United States Patent Application Publication US 2026/0226133 A1 - sequence listing, part 15

SEQ ID NO: 35393 - DNA, 2922 bp, synthetic construct
  source 1..2922: mol_type = other DNA
atggccttaccagtgaccgccttgctcctgccgctggccttgctgctccacgccgccaggccgctcgagatccagaaccctgatcctgccgtgtaccagctgcgggatagcaagagcagcgacaagagcgtgtgtctgttcaccgacttcgacagccagaccaacgtgtcccagagcaaggactccgacgtgtacatcaccgataagtgcgtgctggacatgcggagcatggacttcaagagcaactccgccgtggcctggtccaacaagtccgatttcgcctgcgccaacgccttcaacaacagcattatccccgaggacacattcttcccaagccccgagagcagcgactccaccgaccacgtgaagcccaaagagacagagaacaccaagcagcccagcaagagctgccacaagcccaaggccatcgtgcacaccgagaaagtgaacatgatgagcctgaccgtgctgggcctgcggatgctgttcgccaaaaccgtggccgtgaacttcctgctgaccgccaagctgttcttcctcagggccaagcgatctggatctggagcaacaaacttctcactactcaaacaagcaggtgacgtggaggagaatcccgggcctactagcatggccttaccagtgaccgccttgctcctgccgctggccttgctgctccacgccgccaggccggacatccagatgacacagagccctagcagcctgtctgccagcgtgggagacagagtgaccatcacctgtagagccagccaggacgtgcggaacatcgtcgtgtggttccagcagaagcctggcaaggcccctaagctgctgatctacagcggcagctacagatacagcggcgtgcccagcagattttccggctctggctctggcaccgacttcaccctgacaatatccagcctccagcctgaggacttcgccacctactactgccagcagcactacagccctccatacacattcggccagggcaccaaggtggaaatcaagagaggcggaggcggaagtggaggcggaggatctggcggcggaggctctgaagttcagctggtggaatctggccctggcctggtcaagcctagcgagacactgagcctgacctgtaccgtgtccggcttcagcctgaccagatttggcgtgcactgggtccgacagccacctggcaaaggactggaatggctgggagtgatttggagaggcggcagcaccgattacaacgccgccttcatgagccggctgaccatcagcaaggacaacagcaagaaccaggtgtccctgaagctgagcagcgtgacagccgctgataccgccgtgtactactgctccaaccactactacggcagctccgactacgccctggataattggggccagggaaccctggtcaccgtgtcatctacgcgtgaggaggacctgaagaacgtgttcccacctgaggtggccgtgttcgagcctagcgaggccgagatcagccacacccagaaagccaccctcgtgtgcctggctaccggcttctaccccgaccatgtggaactgtcttggtgggtcaacggcaaagaggtgcacagcggcgtgtgtaccgacccccagccactgaaagaacagcccgccctgaacgacagccggtactgcctgagcagcagactgagagtgtccgccaccttctggcagaacccccggaaccacttcagatgccaggtgcagttctacggcctgagcgagaacgacgagtggacccaggacagagccaagcccgtgacccagatcgtgtctgccgaagcctggggcagagccgatgatgtgattaagatccactggcaggaaaagaagtccaacaccatcctgggcagccaggaaggcaacaccatgaagaccaacgacacctacatgaagttcagctggctgaccgtgcccgagaagtccctggacaaagaacacagatgcatcgtgcggcacgaaaacaacaagaacggcgtggaccaggaaatcatcttcccacccatcaagaccgatgtgattacaatggaccccaaggacaactgctccaaggacgccaacgataccctgctgctccagctgaccaacaccagcgcctactacatgtacttgttgctgctgctgaagtccgtggtgtacttcgccatcatcacatgctgcctgctgcggagaaccgccttctgctgcaacggcgagaagtctcgcgccaagagaagcggatctggcgtgaagcagaccctgaatttcgacctgctgaagctggctggcgacgtggaatccaacccaggcccttctagaggccatatgaccgagtacaagcccacggtgcgcctcgccacccgcgacgacgtccccagggccgtacgcaccctcgccgccgcgttcgccgactaccccgccacgcgccacaccgtcgatccggaccgccacatcgagcgggtcaccgagctgcaagaactcttcctcacgcgcgtcgggctcgacatcggcaaggtgtgggtcgcggacgacggcgccgcggtggcggtctggaccacgccggagagcgtcgaagcgggggcggtgttcgccgagatcggcccgcgcatggccgagttgagcggttcccggctggccgcgcagcaacagatggaaggcctcctggcgccgcaccggcccaaggagcccgcgtggttcctggccaccgtcggcgtctcgcccgaccaccagggcaagggtctgggcagcgccgtcgtgctccccggagtggaggcggccgagcgcgccggggtgcccgccttcctggagacctccgcgccccgcaacctccccttctacgagcggctcggcttcaccgtcaccgccgacgtcgaggtgcccgaaggaccgcgcacctggtgcatgacccgcaagcccggtgcctga

SEQ ID NO: 35394 - DNA, 2613 bp, synthetic construct
  source 1..2613: mol_type = other DNA
atggccttaccagtgaccgccttgctcctgccgctggccttgctgctccacgccgccaggccgctcgaggaggacctgaagaacgtgttcccacctgaggtggccgtgttcgagcctagcgaggccgagatcagccacacccagaaagccaccctcgtgtgcctggctaccggcttctaccccgaccatgtggaactgtcttggtgggtcaacggcaaagaggtgcacagcggcgtgtctaccgacccccagccactgaaagaacagcccgccctgaacgacagccggtactgcctgagcagcagactgagagtgtccgccaccttctggcagaacccccggaaccacttcagatgccaggtgcagttctacggcctgagcgagaacgacgagtggacccaggacagagccaagcccgtgacccagatcgtgtctgccgaagcctggggcagagccgattgcggctttaccagcgagagctaccagcagggcgtgctgagcgccaccaacctgagcgtgatcggcttcagaatcctgctgctgaaagtggccggctttaacctgctgatgaccctgcggctgtggtccagcagggccaagcgatctggatctggagcaacaaacttctcactactcaaacaagcaggtgacgtggaggagaatcccgggcctactagcatggccttaccagtgaccgccttgctcctgccgctggccttgctgctccacgccgccaggccggacatccagatgacacagagccctagcagcctgtctgccagcgtgggagacagagtgaccatcacctgtagagccagccaggacgtgcggaacatcgtcgtgtggttccagcagaagcctggcaaggcccctaagctgctgatctacagcggcagctacagatacagcggcgtgcccagcagattttccggctctggctctggcaccgacttcaccctgacaatatccagcctccagcctgaggacttcgccacctactactgccagcagcactacagccctccatacacattcggccagggcaccaaggtggaaatcaagagaggcggaggcggaagtggaggcggaggatctggcggcggaggctctgaagttcagctggtggaatctggccctggcctggtcaagcctagcgagacactgagcctgacctgtaccgtgtccggcttcagcctgaccagatttggcgtgcactgggtccgacagccacctggcaaaggactggaatggctgggagtgatttggagaggcggcagcaccgattacaacgccgccttcatgagccggctgaccatcagcaaggacaacagcaagaaccaggtgtccctgaagctgagcagcgtgacagccgctgataccgccgtgtactactgctccaaccactactacggcagctccgactacgccctggataattggggccagggaaccctggtcaccgtgtcatctacgcgtatccagaaccctgatcctgccgtgtaccagctgcgggatagcaagagcagcgacaagagcgtgtgtctgttcaccgacttcgacagccagaccaacgtgtcccagagcaaggactccgacgtgtacatcaccgataagaccgtgctggacatgcggagcatggacttcaagagcaactccgccgtggcctggtccaacaagtccgatttcgcctgcgccaacgccttcaacaacagcattatccccgaggacacattcttcccaagccccgagagcagctgcgacgtgaagctggtggaaaagagcttcgagacagacaccaacctgaacttccagatcctgtacgagatcctgctgggcaaggccaccctgtacgccgtgctggtgtctgccctggtgctgatggctatggtcaagcggaaggacagccggggacgcgccaagagaagcggatctggcgtgaagcagaccctgaatttcgacctgctgaagctggctggcgacgtggaatccaacccaggcccttctagaggccatatgaccgagtacaagcccacggtgcgcctcgccacccgcgacgacgtccccagggccgtacgcaccctcgccgccgcgttcgccgactaccccgccacgcgccacaccgtcgatccggaccgccacatcgagcgggtcaccgagctgcaagaactcttcctcacgcgcgtcgggctcgacatcggcaaggtgtgggtcgcggacgacggcgccgcggtggcggtctggaccacgccggagagcgtcgaagcgggggcggtgttcgccgagatcggcccgcgcatggccgagttgagcggttcccggctggccgcgcagcaacagatggaaggcctcctggcgccgcaccggcccaaggagcccgcgtggttcctggccaccgtcggcgtctcgcccgaccaccagggcaagggtctgggcagcgccgtcgtgctccccggagtggaggcggccgagcgcgccggggtgcccgccttcctggagacctccgcgccccgcaacctccccttctacgagcggctcggcttcaccgtcaccgccgacgtcgaggtgcccgaaggaccgcgcacctggtgcatgacccgcaagcccggtgcctga

SEQ ID NO: 35395 - DNA, 2613 bp, synthetic construct
  source 1..2613: mol_type = other DNA
atggccttaccagtgaccgccttgctcctgccgctggccttgctgctccacgccgccaggccgctcgagatccagaaccctgatcctgccgtgtaccagctgcgggatagcaagagcagcgacaagagcgtgtgtctgttcaccgacttcgacagccagaccaacgtgtcccagagcaaggactccgacgtgtacatcaccgataagaccgtgctggacatgcggagcatggacttcaagagcaactccgccgtggcctggtccaacaagtccgatttcgcctgcgccaacgccttcaacaacagcattatccccgaggacacattcttcccaagccccgagagcagctgcgacgtgaagctggtggaaaagagcttcgagacagacaccaacctgaacttccagatcctgtacgagatcctgctgggcaaggccaccctgtacgccgtgctggtgtctgccctggtgctgatggctatggtcaagcggaaggacagccggggaagggccaagcgatctggatctggagcaacaaacttctcactactcaaacaagcaggtgacgtggaggagaatcccgggcctactagcatggccttaccagtgaccgccttgctcctgccgctggccttgctgctccacgccgccaggccggacatccagatgacacagagccctagcagcctgtctgccagcgtgggagacagagtgaccatcacctgtagagccagccaggacgtgcggaacatcgtcgtgtggttccagcagaagcctggcaaggcccctaagctgctgatctacagcggcagctacagatacagcggcgtgcccagcagattttccggctctggctctggcaccgacttcaccctgacaatatccagcctccagcctgaggacttcgccacctactactgccagcagcactacagccctccatacacattcggccagggcaccaaggtggaaatcaagagaggcggaggcggaagtggaggcggaggatctggcggcggaggctctgaagttcagctggtggaatctggccctggcctggtcaagcctagcgagacactgagcctgacctgtaccgtgtccggcttcagcctgaccagatttggcgtgcactgggtccgacagccacctggcaaaggactggaatggctgggagtgatttggagaggcggcagcaccgattacaacgccgccttcatgagccggctgaccatcagcaaggacaacagcaagaaccaggtgtccctgaagctgagcagcgtgacagccgctgataccgccgtgtactactgctccaaccactactacggcagctccgactacgccctggataattggggccagggaaccctggtcaccgtgtcatctacgcgtgaggacctgaagaacgtgttcccacctgaggtggccgtgttcgagcctagcgaggccgagatcagccacacccagaaagccaccctcgtgtgcctggctaccggcttctaccccgaccatgtggaactgtcttggtgggtcaacggcaaagaggtgcacagcggcgtgtctaccgacccccagccactgaaagaacagcccgccctgaacgacagccggtactgcctgagcagcagactgagagtgtccgccaccttctggcagaacccccggaaccacttcagatgccaggtgcagttctacggcctgagcgagaacgacgagtggacccaggacagagccaagcccgtgacccagatcgtgtctgccgaagcctggggcagagccgattgcggctttaccagcgagagctaccagcagggcgtgctgagcgccaccaacctgagcgtgatcggcttcagaatcctgctgctgaaagtggccggctttaacctgctgatgaccctgcggctgtggtccagccgcgccaagagaagcggatctggcgtgaagcagaccctgaatttcgacctgctgaagctggctggcgacgtggaatccaacccaggcccttctagaggccatatgaccgagtacaagcccacggtgcgcctcgccacccgcgacgacgtccccagggccgtacgcaccctcgccgccgcgttcgccgactaccccgccacgcgccacaccgtcgatccggaccgccacatcgagcgggtcaccgagctgcaagaactcttcctcacgcgcgtcgggctcgacatcggcaaggtgtgggtcgcggacgacggcgccgcggtggcggtctggaccacgccggagagcgtcgaagcgggggcggtgttcgccgagatcggcccgcgcatggccgagttgagcggttcccggctggccgcgcagcaacagatggaaggcctcctggcgccgcaccggcccaaggagcccgcgtggttcctggccaccgtcggcgtctcgcccgaccaccagggcaagggtctgggcagcgccgtcgtgctccccggagtggaggcggccgagcgcgccggggtgcccgccttcctggagacctccgcgccccgcaacctccccttctacgagcggctcggcttcaccgtcaccgccgacgtcgaggtgcccgaaggaccgcgcacctggtgcatgacccgcaagcccggtgcctga

SEQ ID NO: 35396 - DNA, 2613 bp, synthetic construct
  source 1..2613: mol_type = other DNA
atggccttaccagtgaccgccttgctcctgccgctggccttgctgctccacgccgccaggccgctcgaggaggacctgaagaacgtgttcccacctgaggtggccgtgttcgagcctagcgaggccgagatcagccacacccagaaagccaccctcgtgtgcctggctaccggcttctaccccgaccatgtggaactgtcttggtgggtcaacggcaaagaggtgcacagcggcgtgtgtaccgacccccagccactgaaagaacagcccgccctgaacgacagccggtactgcctgagcagcagactgagagtgtccgccaccttctggcagaacccccggaaccacttcagatgccaggtgcagttctacggcctgagcgagaacgacgagtggacccaggacagagccaagcccgtgacccagatcgtgtctgccgaagcctggggcagagccgattgcgacgtgaagctggtggaaaagagcttcgagacagacaccaacctgaacttccagaacctgagcgtgatcggcttcagaatcctgctgctgaaagtggccggctttaacctgctgatgaccctgcggctgtggtccagcagggccaagcgatctggatctggagcaacaaacttctcactactcaaacaagcaggtgacgtggaggagaatcccgggcctactagcatggccttaccagtgaccgccttgctcctgccgctggccttgctgctccacgccgccaggccggacatccagatgacacagagccctagcagcctgtctgccagcgtgggagacagagtgaccatcacctgtagagccagccaggacgtgcggaacatcgtcgtgtggttccagcagaagcctggcaaggcccctaagctgctgatctacagcggcagctacagatacagcggcgtgcccagcagattttccggctctggctctggcaccgacttcaccctgacaatatccagcctccagcctgaggacttcgccacctactactgccagcagcactacagccctccatacacattcggccagggcaccaaggtggaaatcaagagaggcggaggcggaagtggaggcggaggatctggcggcggaggctctgaagttcagctggtggaatctggccctggcctggtcaagcctagcgagacactgagcctgacctgtaccgtgtccggcttcagcctgaccagatttggcgtgcactgggtccgacagccacctggcaaaggactggaatggctgggagtgatttggagaggcggcagcaccgattacaacgccgccttcatgagccggctgaccatcagcaaggacaacagcaagaaccaggtgtccctgaagctgagcagcgtgacagccgctgataccgccgtgtactactgctccaaccactactacggcagctccgactacgccctggataattggggccagggaaccctggtcaccgtgtcatctacgcgtatccagaaccctgatcctgccgtgtaccagctgcgggatagcaagagcagcgacaagagcgtgtgtctgttcaccgacttcgacagccagaccaacgtgtcccagagcaaggactccgacgtgtacatcaccgataagtgcgtgctggacatgcggagcatggacttcaagagcaactccgccgtggcctggtccaacaagtccgatttcgcctgcgccaacgccttcaacaacagcattatccccgaggacacattcttcccaagccccgagagcagctgcggctttaccagcgagagctaccagcagggcgtgctgagcgccaccatcctgtacgagatcctgctgggcaaggccaccctgtacgccgtgctggtgtctgccctggtgctgatggctatggtcaagcggaaggacagccggggacgcgccaagagaagcggatctggcgtgaagcagaccctgaatttcgacctgctgaagctggctggcgacgtggaatccaacccaggcccttctagaggccatatgaccgagtacaagcccacggtgcgcctcgccacccgcgacgacgtccccagggccgtacgcaccctcgccgccgcgttcgccgactaccccgccacgcgccacaccgtcgatccggaccgccacatcgagcgggtcaccgagctgcaagaactcttcctcacgcgcgtcgggctcgacatcggcaaggtgtgggtcgcggacgacggcgccgcggtggcggtctggaccacgccggagagcgtcgaagcgggggcggtgttcgccgagatcggcccgcgcatggccgagttgagcggttcccggctggccgcgcagcaacagatggaaggcctcctggcgccgcaccggcccaaggagcccgcgtggttcctggccaccgtcggcgtctcgcccgaccaccagggcaagggtctgggcagcgccgtcgtgctccccggagtggaggcggccgagcgcgccggggtgcccgccttcctggagacctccgcgccccgcaacctccccttctacgagcggctcggcttcaccgtcaccgccgacgtcgaggtgcccgaaggaccgcgcacctggtgcatgacccgcaagcccggtgcctga

SEQ ID NO: 35397 - DNA, 2613 bp, synthetic construct
  source 1..2613: mol_type = other DNA
atggccttaccagtgaccgccttgctcctgccgctggccttgctgctccacgccgccaggccgctcgaggaggacctgaagaacgtgttcccacctgaggtggccgtgttcgagcctagcgaggccgagatcagccacacccagaaagccaccctcgtgtgcctggctaccggcttctaccccgaccatgtggaactgtcttggtgggtcaacggcaaagaggtgcacagcggcgtgtctaccgacccccagccactgaaagaacagcccgccctgaacgacagccggtactgcctgagcagcagactgagagtgtccgccaccttctggcagaacccccggaaccacttcagatgccaggtgcagttctacggcctgagcgagaacgacgagtggacccaggacagagccaagcccgtgacccagatcgtgtctgccgaagcctggggcagagccgattgcgacgtgaagctggtggaaaagagcttcgagacagacaccaacctgaacttccagaacctgagcgtgatcggcttcagaatcctgctgctgaaagtggccggctttaacctgctgatgaccctgcggctgtggtccagcagggccaagcgatctggatctggagcaacaaacttctcactactcaaacaagcaggtgacgtggaggagaatcccgggcctactagcatggccttaccagtgaccgccttgctcctgccgctggccttgctgctccacgccgccaggccggacatccagatgacacagagccctagcagcctgtctgccagcgtgggagacagagtgaccatcacctgtagagccagccaggacgtgcggaacatcgtcgtgtggttccagcagaagcctggcaaggcccctaagctgctgatctacagcggcagctacagatacagcggcgtgcccagcagattttccggctctggctctggcaccgacttcaccctgacaatatccagcctccagcctgaggacttcgccacctactactgccagcagcactacagccctccatacacattcggccagggcaccaaggtggaaatcaagagaggcggaggcggaagtggaggcggaggatctggcggcggaggctctgaagttcagctggtggaatctggccctggcctggtcaagcctagcgagacactgagcctgacctgtaccgtgtccggcttcagcctgaccagatttggcgtgcactgggtccgacagccacctggcaaaggactggaatggctgggagtgatttggagaggcggcagcaccgattacaacgccgccttcatgagccggctgaccatcagcaaggacaacagcaagaaccaggtgtccctgaagctgagcagcgtgacagccgctgataccgccgtgtactactgctccaaccactactacggcagctccgactacgccctggataattggggccagggaaccctggtcaccgtgtcatctacgcgtatccagaaccctgatcctgccgtgtaccagctgcgggatagcaagagcagcgacaagagcgtgtgtctgttcaccgacttcgacagccagaccaacgtgtcccagagcaaggactccgacgtgtacatcaccgataagaccgtgctggacatgcggagcatggacttcaagagcaactccgccgtggcctggtccaacaagtccgatttcgcctgcgccaacgccttcaacaacagcattatccccgaggacacattcttcccaagccccgagagcagctgcggctttaccagcgagagctaccagcagggcgtgctgagcgccaccatcctgtacgagatcctgctgggcaaggccaccctgtacgccgtgctggtgtctgccctggtgctgatggctatggtcaagcggaaggacagccggggacgcgccaagagaagcggatctggcgtgaagcagaccctgaatttcgacctgctgaagctggctggcgacgtggaatccaacccaggcccttctagaggccatatgaccgagtacaagcccacggtgcgcctcgccacccgcgacgacgtccccagggccgtacgcaccctcgccgccgcgttcgccgactaccccgccacgcgccacaccgtcgatccggaccgccacatcgagcgggtcaccgagctgcaagaactcttcctcacgcgcgtcgggctcgacatcggcaaggtgtgggtcgcggacgacggcgccgcggtggcggtctggaccacgccggagagcgtcgaagcgggggcggtgttcgccgagatcggcccgcgcatggccgagttgagcggttcccggctggccgcgcagcaacagatggaaggcctcctggcgccgcaccggcccaaggagcccgcgtggttcctggccaccgtcggcgtctcgcccgaccaccagggcaagggtctgggcagcgccgtcgtgctccccggagtggaggcggccgagcgcgccggggtgcccgccttcctggagacctccgcgccccgcaacctccccttctacgagcggctcggcttcaccgtcaccgccgacgtcgaggtgcccgaaggaccgcgcacctggtgcatgacccgcaagcccggtgcctga

SEQ ID NO: 35398 - DNA, 2922 bp, synthetic construct
  source 1..2922: mol_type = other DNA
atggccttaccagtgaccgccttgctcctgccgctggccttgctgctccacgccgccaggccgctcgaggaggaggacctgaagaacgtgttcccacctgaggtggccgtgttcgagcctagcgaggccgagatcagccacacccagaaagccaccctcgtgtgcctggctaccggcttctaccccgaccatgtggaactgtcttggtgggtcaacggcaaagaggtgcacagcggcgtgtctaccgacccccagccactgaaagaacagcccgccctgaacgacagccggtactgcctgagcagcagactgagagtgtccgccaccttctggcagaacccccggaaccacttcagatgccaggtgcagttctacggcctgagcgagaacgacgagtggacccaggacagagccaagcccgtgacccagatcgtgtctgccgaagcctggggcagagccgatgatgtgattaagatccactggcaggaaaagaagtccaacaccatcctgggcagccaggaaggcaacaccatgaagaccaacgacacctacatgaagttcagctggctgaccgtgcccgagaagtccctggacaaagaacacagatgcatcgtgcggcacgaaaacaacaagaacggcgtggaccaggaaatcatcttcccacccatcaagaccgatgtgattacaatggaccccaaggacaactgctccaaggacgccaacgataccctgctgctccagctgaccaacaccagcgcctactacatgtacttgttgctgctgctgaagtccgtggtgtacttcgccatcatcacatgctgcctgctgcggagaaccgccttctgctgcaacggcgagaagtctagggccaagcgatctggatctggagcaacaaacttctcactactcaaacaagcaggtgacgtggaggagaatcccgggcctactagcatggccttaccagtgaccgccttgctcctgccgctggccttgctgctccacgccgccaggccggacatccagatgacacagagccctagcagcctgtctgccagcgtgggagacagagtgaccatcacctgtagagccagccaggacgtgcggaacatcgtcgtgtggttccagcagaagcctggcaaggcccctaagctgctgatctacagcggcagctacagatacagcggcgtgcccagcagattttccggctctggctctggcaccgacttcaccctgacaatatccagcctccagcctgaggacttcgccacctactactgccagcagcactacagccctccatacacattcggccagggcaccaaggtggaaatcaagagaggcggaggcggaagtggaggcggaggatctggcggcggaggctctgaagttcagctggtggaatctggccctggcctggtcaagcctagcgagacactgagcctgacctgtaccgtgtccggcttcagcctgaccagatttggcgtgcactgggtccgacagccacctggcaaaggactggaatggctgggagtgatttggagaggcggcagcaccgattacaacgccgccttcatgagccggctgaccatcagcaaggacaacagcaagaaccaggtgtccctgaagctgagcagcgtgacagccgctgataccgccgtgtactactgctccaaccactactacggcagctccgactacgccctggataattggggccagggaaccctggtcaccgtgtcatctacgcgtatccagaaccctgatcctgccgtgtaccagctgcgggatagcaagagcagcgacaagagcgtgtgtctgttcaccgacttcgacagccagaccaacgtgtcccagagcaaggactccgacgtgtacatcaccgataagaccgtgctggacatgcggagcatggacttcaagagcaactccgccgtggcctggtccaacaagtccgatttcgcctgcgccaacgccttcaacaacagcattatccccgaggacacattcttcccaagccccgagagcagcgactccaccgaccacgtgaagcccaaagagacagagaacaccaagcagcccagcaagagctgccacaagcccaaggccatcgtgcacaccgagaaagtgaacatgatgagcctgaccgtgctgggcctgcggatgctgttcgccaaaaccgtggccgtgaacttcctgctgaccgccaagctgttcttcctccgcgccaagagaagcggatctggcgtgaagcagaccctgaatttcgacctgctgaagctggctggcgacgtggaatccaacccaggcccttctagaggccatatgaccgagtacaagcccacggtgcgcctcgccacccgcgacgacgtccccagggccgtacgcaccctcgccgccgcgttcgccgactaccccgccacgcgccacaccgtcgatccggaccgccacatcgagcgggtcaccgagctgcaagaactcttcctcacgcgcgtcgggctcgacatcggcaaggtgtgggtcgcggacgacggcgccgcggtggcggtctggaccacgccggagagcgtcgaagcgggggcggtgttcgccgagatcggcccgcgcatggccgagttgagcggttcccggctggccgcgcagcaacagatggaaggcctcctggcgccgcaccggcccaaggagcccgcgtggttcctggccaccgtcggcgtctcgcccgaccaccagggcaagggtctgggcagcgccgtcgtgctccccggagtggaggcggccgagcgcgccggggtgcccgccttcctggagacctccgcgccccgcaacctccccttctacgagcggctcggcttcaccgtcaccgccgacgtcgaggtgcccgaaggaccgcgcacctggtgcatgacccgcaagcccggtgcctga

SEQ ID NO: 35399 - DNA, 2613 bp, synthetic construct
  source 1..2613: mol_type = other DNA
atggccttaccagtgaccgccttgctcctgccgctggccttgctgctccacgccgccaggccgctcgaggaggacctgaagaacgtgttcccacctgaggtggccgtgttcgagcctagcgaggccgagatcagccacacccagaaagccaccctcgtgtgcctggctaccggcttctaccccgaccatgtggaactgtcttggtgggtcaacggcaaagaggtgcacagcggcgtgtgtaccgacccccagccactgaaagaacagcccgccctgaacgacagccggtactgcctgagcagcagactgagagtgtccgccaccttctggcagaacccccggaaccacttcagatgccaggtgcagttctacggcctgagcgagaacgacgagtggacccaggacagagccaagcccgtgacccagatcgtgtctgccgaagcctggggcagagccgattgcggctttaccagcgagagctaccagcagggcgtgctgagcgccaccaacctgagcgtgatcggcttcagaatcctgctgctgaaagtggccggctttaacctgctgatgaccctgcggctgtggtccagcagggccaagcgatctggatctggagcaacaaacttctcactactcaaacaagcaggtgacgtggaggagaatcccgggcctactagcatggccttaccagtgaccgccttgctcctgccgctggccttgctgctccacgccgccaggccggacatccagatgacacagagccctagcagcctgtctgccagcgtgggagacagagtgaccatcacctgtagagccagccaggacgtgcggaacatcgtcgtgtggttccagcagaagcctggcaaggcccctaagctgctgatctacagcggcagctacagatacagcggcgtgcccagcagattttccggctctggctctggcaccgacttcaccctgacaatatccagcctccagcctgaggacttcgccacctactactgccagcagcactacagccctccatacacattcggccagggcaccaaggtggaaatcaagagaggcggaggcggaagtggaggcggaggatctggcggcggaggctctgaagttcagctggtggaatctggccctggcctggtcaagcctagcgagacactgagcctgacctgtaccgtgtccggcttcagcctgaccagatttggcgtgcactgggtccgacagccacctggcaaaggactggaatggctgggagtgatttggagaggcggcagcaccgattacaacgccgccttcatgagccggctgaccatcagcaaggacaacagcaagaaccaggtgtccctgaagctgagcagcgtgacagccgctgataccgccgtgtactactgctccaaccactactacggcagctccgactacgccctggataattggggccagggaaccctggtcaccgtgtcatctacgcgtatccagaaccctgatcctgccgtgtaccagctgcgggatagcaagagcagcgacaagagcgtgtgtctgttcaccgacttcgacagccagaccaacgtgtcccagagcaaggactccgacgtgtacatcaccgataagtgcgtgctggacatgcggagcatggacttcaagagcaactccgccgtggcctggtccaacaagtccgatttcgcctgcgccaacgccttcaacaacagcattatccccgaggacacattcttcccaagccccgagagcagctgcgacgtgaagctggtggaaaagagcttcgagacagacaccaacctgaacttccagatcctgtacgagatcctgctgggcaaggccaccctgtacgccgtgctggtgtctgccctggtgctgatggctatggtcaagcggaaggacagccggggacgcgccaagagaagcggatctggcgtgaagcagaccctgaatttcgacctgctgaagctggctggcgacgtggaatccaacccaggcccttctagaggccatatgaccgagtacaagcccacggtgcgcctcgccacccgcgacgacgtccccagggccgtacgcaccctcgccgccgcgttcgccgactaccccgccacgcgccacaccgtcgatccggaccgccacatcgagcgggtcaccgagctgcaagaactcttcctcacgcgcgtcgggctcgacatcggcaaggtgtgggtcgcggacgacggcgccgcggtggcggtctggaccacgccggagagcgtcgaagcgggggcggtgttcgccgagatcggcccgcgcatggccgagttgagcggttcccggctggccgcgcagcaacagatggaaggcctcctggcgccgcaccggcccaaggagcccgcgtggttcctggccaccgtcggcgtctcgcccgaccaccagggcaagggtctgggcagcgccgtcgtgctccccggagtggaggcggccgagcgcgccggggtgcccgccttcctggagacctccgcgccccgcaacctccccttctacgagcggctcggcttcaccgtcaccgccgacgtcgaggtgcccgaaggaccgcgcacctggtgcatgacccgcaagcccggtgcctga

SEQ ID NO: 35400 - DNA, 2700 bp, synthetic construct
  source 1..2700: mol_type = other DNA
atggccttaccagtgaccgccttgctcctgccgctggccttgctgctccacgccgccaggccgctcgaggaggaggacctgaagaacgtgttcccacctgaggtggccgtgttcgagcctagcgaggccgagatcagccacacccagaaagccaccctcgtgtgcctggctaccggcttctaccccgaccatgtggaactgtcttggtgggtcaacggcaaagaggtgcacagcggcgtgtgtaccgacccccagccactgaaagaacagcccgccctgaacgacagccggtactgcctgagcagcagactgagagtgtccgccaccttctggcagaacccccggaaccacttcagatgccaggtgcagttctacggcctgagcgagaacgacgagtggacccaggacagagccaagcccgtgacccagatcgtgtctgccgaagcctggggcagagccgattgcggctttaccagcgagagctaccagcagggcgtgctgagcgccaccaacctgagcgtgatcggcttcagaatcctgctgctgaaagtggccggctttaacctgctgatgaccctgcggctgtggtccagcagggccaagcgatctggatctggagcaacaaacttctcactactcaaacaagcaggtgacgtggaggagaatcccgggcctactagcatggccttaccagtgaccgccttgctcctgccgctggccttgctgctccacgccgccaggccggacatccagatgacacagagccctagcagcctgtctgccagcgtgggagacagagtgaccatcacctgtagagccagccaggacgtgcggaacatcgtcgtgtggttccagcagaagcctggcaaggcccctaagctgctgatctacagcggcagctacagatacagcggcgtgcccagcagattttccggctctggctctggcaccgacttcaccctgacaatatccagcctccagcctgaggacttcgccacctactactgccagcagcactacagccctccatacacattcggccagggcaccaaggtggaaatcaagagaggcggaggcggaagtggaggcggaggatctggcggcggaggctctgaagttcagctggtggaatctggccctggcctggtcaagcctagcgagacactgagcctgacctgtaccgtgtccggcttcagcctgaccagatttggcgtgcactgggtccgacagccacctggcaaaggactggaatggctgggagtgatttggagaggcggcagcaccgattacaacgccgccttcatgagccggctgaccatcagcaaggacaacagcaagaaccaggtgtccctgaagctgagcagcgtgacagccgctgataccgccgtgtactactgctccaaccactactacggcagctccgactacgccctggataattggggccagggaaccctggtcaccgtgtcatctacgcgtggacagcctaaggccaatcctaccgtgacactgttccctccaagcagcgaagaactccaggccaacaaggccacacttgtgtgcctgatctccgacttctaccctggggctgtgacagtggcttggaaggccgatggatctcctgtgaaagccggcgtggaaaccaccaagccatccaagcagagcaacaacaaatacgccgccagctcctacctgagcctgacacctgagcagtggaagtcccacagatcctacagctgccaagtgacccacgaaggcagcaccgtggaaaagacagtggcccctacagagtgcagccccatcaagaccgatgtgattacaatggaccccaaggacaactgctccaaggacgccaacgataccctgctgctccagctgaccaacaccagcgcctactacatgtacttgttgctgctgctgaagtccgtggtgtacttcgccatcatcacatgctgcctgctgcggagaaccgccttctgctgcaacggcgagaagtctcgcgccaagagaagcggatctggcgtgaagcagaccctgaatttcgacctgctgaagctggctggcgacgtggaatccaacccaggcccttctagaggccatatgaccgagtacaagcccacggtgcgcctcgccacccgcgacgacgtccccagggccgtacgcaccctcgccgccgcgttcgccgactaccccgccacgcgccacaccgtcgatccggaccgccacatcgagcgggtcaccgagctgcaagaactcttcctcacgcgcgtcgggctcgacatcggcaaggtgtgggtcgcggacgacggcgccgcggtggcggtctggaccacgccggagagcgtcgaagcgggggcggtgttcgccgagatcggcccgcgcatggccgagttgagcggttcccggctggccgcgcagcaacagatggaaggcctcctggcgccgcaccggcccaaggagcccgcgtggttcctggccaccgtcggcgtctcgcccgaccaccagggcaagggtctgggcagcgccgtcgtgctccccggagtggaggcggccgagcgcgccggggtgcccgccttcctggagacctccgcgccccgcaacctccccttctacgagcggctcggcttcaccgtcaccgccgacgtcgaggtgcccgaaggaccgcgcacctggtgcatgacccgcaagcccggtgcctga

SEQ ID NO: 35401 - DNA, 2700 bp, synthetic construct
  source 1..2700: mol_type = other DNA
atggccttaccagtgaccgccttgctcctgccgctggccttgctgctccacgccgccaggccgctcgagggacagcctaaggccaatcctaccgtgacactgttccctccaagcagcgaagaactccaggccaacaaggccacacttgtgtgcctgatctccgacttctaccctggggctgtgacagtggcttggaaggccgatggatctcctgtgaaagccggcgtggaaaccaccaagccatccaagcagagcaacaacaaatacgccgccagctcctacctgagcctgacacctgagcagtggaagtcccacagatcctacagctgccaagtgacccacgaaggcagcaccgtggaaaagacagtggcccctacagagtgcagccccatcaagaccgatgtgattacaatggaccccaaggacaactgctccaaggacgccaacgataccctgctgctccagctgaccaacaccagcgcctactacatgtacttgttgctgctgctgaagtccgtggtgtacttcgccatcatcacatgctgcctgctgcggagaaccgccttctgctgcaacggcgagaagtctagggccaagcgatctggatctggagcaacaaacttctcactactcaaacaagcaggtgacgtggaggagaatcccgggcctactagcatggccttaccagtgaccgccttgctcctgccgctggccttgctgctccacgccgccaggccggacatccagatgacacagagccctagcagcctgtctgccagcgtgggagacagagtgaccatcacctgtagagccagccaggacgtgcggaacatcgtcgtgtggttccagcagaagcctggcaaggcccctaagctgctgatctacagcggcagctacagatacagcggcgtgcccagcagattttccggctctggctctggcaccgacttcaccctgacaatatccagcctccagcctgaggacttcgccacctactactgccagcagcactacagccctccatacacattcggccagggcaccaaggtggaaatcaagagaggcggaggcggaagtggaggcggaggatctggcggcggaggctctgaagttcagctggtggaatctggccctggcctggtcaagcctagcgagacactgagcctgacctgtaccgtgtccggcttcagcctgaccagatttggcgtgcactgggtccgacagccacctggcaaaggactggaatggctgggagtgatttggagaggcggcagcaccgattacaacgccgccttcatgagccggctgaccatcagcaaggacaacagcaagaaccaggtgtccctgaagctgagcagcgtgacagccgctgataccgccgtgtactactgctccaaccactactacggcagctccgactacgccctggataattggggccagggaaccctggtcaccgtgtcatctacgcgtgaggaggacctgaagaacgtgttcccacctgaggtggccgtgttcgagcctagcgaggccgagatcagccacacccagaaagccaccctcgtgtgcctggctaccggcttctaccccgaccatgtggaactgtcttggtgggtcaacggcaaagaggtgcacagcggcgtgtgtaccgacccccagccactgaaagaacagcccgccctgaacgacagccggtactgcctgagcagcagactgagagtgtccgccaccttctggcagaacccccggaaccacttcagatgccaggtgcagttctacggcctgagcgagaacgacgagtggacccaggacagagccaagcccgtgacccagatcgtgtctgccgaagcctggggcagagccgattgcggctttaccagcgagagctaccagcagggcgtgctgagcgccaccaacctgagcgtgatcggcttcagaatcctgctgctgaaagtggccggctttaacctgctgatgaccctgcggctgtggtccagccgcgccaagagaagcggatctggcgtgaagcagaccctgaatttcgacctgctgaagctggctggcgacgtggaatccaacccaggcccttctagaggccatatgaccgagtacaagcccacggtgcgcctcgccacccgcgacgacgtccccagggccgtacgcaccctcgccgccgcgttcgccgactaccccgccacgcgccacaccgtcgatccggaccgccacatcgagcgggtcaccgagctgcaagaactcttcctcacgcgcgtcgggctcgacatcggcaaggtgtgggtcgcggacgacggcgccgcggtggcggtctggaccacgccggagagcgtcgaagcgggggcggtgttcgccgagatcggcccgcgcatggccgagttgagcggttcccggctggccgcgcagcaacagatggaaggcctcctggcgccgcaccggcccaaggagcccgcgtggttcctggccaccgtcggcgtctcgcccgaccaccagggcaagggtctgggcagcgccgtcgtgctccccggagtggaggcggccgagcgcgccggggtgcccgccttcctggagacctccgcgccccgcaacctccccttctacgagcggctcggcttcaccgtcaccgccgacgtcgaggtgcccgaaggaccgcgcacctggtgcatgacccgcaagcccggtgcctga

SEQ ID NO: 35402 - DNA, 2691 bp, synthetic construct
  source 1..2691: mol_type = other DNA
atggccttaccagtgaccgccttgctcctgccgctggccttgctgctccacgccgccaggccgctcgaggaggcctctacaaagggaccctccgtgtttcctctggctcccagcagcaagtctacaagcggaggaacagccgctctgggctgcctggtcaaggattactttcccgagcctgtgaccgtgtcctggaatagcggagcactgacaagcggcgtgcacacctttccagccgtgctgcaaagcagcggcctgtactctctgagcagcgtggtcacagtgcctagctctagcctgggcacccagacctacatctgcaatgtgaaccacaagcctagcaacaccaaggtggacaagagagtggaacccaagagctgtcccatcaagaccgatgtgattacaatggaccccaaggacaactgctccaaggacgccaacgataccctgctgctccagctgaccaacaccagcgcctactacatgtacttgttgctgctgctgaagtccgtggtgtacttcgccatcatcacatgctgcctgctgcggagaaccgccttctgctgcaacggcgagaagtctagggccaagcgatctggatctggagcaacaaacttctcactactcaaacaagcaggtgacgtggaggagaatcccgggcctactagcatggccttaccagtgaccgccttgctcctgccgctggccttgctgctccacgccgccaggccggacatccagatgacacagagccctagcagcctgtctgccagcgtgggagacagagtgaccatcacctgtagagccagccaggacgtgcggaacatcgtcgtgtggttccagcagaagcctggcaaggcccctaagctgctgatctacagcggcagctacagatacagcggcgtgcccagcagattttccggctctggctctggcaccgacttcaccctgacaatatccagcctccagcctgaggacttcgccacctactactgccagcagcactacagccctccatacacattcggccagggcaccaaggtggaaatcaagagaggcggaggcggaagtggaggcggaggatctggcggcggaggctctgaagttcagctggtggaatctggccctggcctggtcaagcctagcgagacactgagcctgacctgtaccgtgtccggcttcagcctgaccagatttggcgtgcactgggtccgacagccacctggcaaaggactggaatggctgggagtgatttggagaggcggcagcaccgattacaacgccgccttcatgagccggctgaccatcagcaaggacaacagcaagaaccaggtgtccctgaagctgagcagcgtgacagccgctgataccgccgtgtactactgctccaaccactactacggcagctccgactacgccctggataattggggccagggaaccctggtcaccgtgtcatctacgcgtggacagcctaaggccaatcctaccgtgacactgttccctccaagcagcgaagaactccaggccaacaaggccacacttgtgtgcctgatctccgacttctaccctggggctgtgacagtggcttggaaggccgatggatctcctgtgaaagccggcgtggaaaccaccaagccatccaagcagagcaacaacaaatacgccgccagctcctacctgagcctgacacctgagcagtggaagtcccacagatcctacagctgccaagtgacccacgaaggcagcaccgtggaaaagacagtggcccctacagagtgcagcgaagtgaaaaccgactccaccgaccacgtgaagcccaaagagacagagaacaccaagcagcccagcaagagctgccacaagcccaaggccatcgtgcacaccgagaaagtgaacatgatgagcctgaccgtgctgggcctgcggatgctgttcgccaaaaccgtggccgtgaacttcctgctgaccgccaagctgttcttcctccgcgccaagagaagcggatctggcgtgaagcagaccctgaatttcgacctgctgaagctggctggcgacgtggaatccaacccaggcccttctagaggccatatgaccgagtacaagcccacggtgcgcctcgccacccgcgacgacgtccccagggccgtacgcaccctcgccgccgcgttcgccgactaccccgccacgcgccacaccgtcgatccggaccgccacatcgagcgggtcaccgagctgcaagaactcttcctcacgcgcgtcgggctcgacatcggcaaggtgtgggtcgcggacgacggcgccgcggtggcggtctggaccacgccggagagcgtcgaagcgggggcggtgttcgccgagatcggcccgcgcatggccgagttgagcggttcccggctggccgcgcagcaacagatggaaggcctcctggcgccgcaccggcccaaggagcccgcgtggttcctggccaccgtcggcgtctcgcccgaccaccagggcaagggtctgggcagcgccgtcgtgctccccggagtggaggcggccgagcgcgccggggtgcccgccttcctggagacctccgcgccccgcaacctccccttctacgagcggctcggcttcaccgtcaccgccgacgtcgaggtgcccgaaggaccgcgcacctggtgcatgacccgcaagcccggtgcctga

SEQ ID NO: 35403 - DNA, 2625 bp, synthetic construct
  source 1..2625: mol_type = other DNA
atggccttaccagtgaccgccttgctcctgccgctggccttgctgctccacgccgccaggccgctcgaggaggcctctacaaagggaccctccgtgtttcctctggctcccagcagcaagtctacaagcggaggaacagccgctctgggctgcctggtcaaggattactttcccgagcctgtgaccgtgtcctggaatagcggagcactgacaagcggcgtgcacacctttccagccgtgctgcaaagcagcggcctgtactctctgagcagcgtggtcacagtgcctagctctagcctgggcacccagacctacatctgcaatgtgaaccacaagcctagcaacaccaaggtggacaagagagtggaacccaagagctgtggcagagccgattgcggctttaccagcgagagctaccagcagggcgtgctgagcgccaccatcctgtacgagatcctgctgggcaaggccaccctgtacgccgtgctggtgtctgccctggtgctgatggctatggtcaagcggaaggacagccggggaagggccaagcgatctggatctggagcaacaaacttctcactactcaaacaagcaggtgacgtggaggagaatcccgggcctactagcatggccttaccagtgaccgccttgctcctgccgctggccttgctgctccacgccgccaggccggacatccagatgacacagagccctagcagcctgtctgccagcgtgggagacagagtgaccatcacctgtagagccagccaggacgtgcggaacatcgtcgtgtggttccagcagaagcctggcaaggcccctaagctgctgatctacagcggcagctacagatacagcggcgtgcccagcagattttccggctctggctctggcaccgacttcaccctgacaatatccagcctccagcctgaggacttcgccacctactactgccagcagcactacagccctccatacacattcggccagggcaccaaggtggaaatcaagagaggcggaggcggaagtggaggcggaggatctggcggcggaggctctgaagttcagctggtggaatctggccctggcctggtcaagcctagcgagacactgagcctgacctgtaccgtgtccggcttcagcctgaccagatttggcgtgcactgggtccgacagccacctggcaaaggactggaatggctgggagtgatttggagaggcggcagcaccgattacaacgccgccttcatgagccggctgaccatcagcaaggacaacagcaagaaccaggtgtccctgaagctgagcagcgtgacagccgctgataccgccgtgtactactgctccaaccactactacggcagctccgactacgccctggataattggggccagggaaccctggtcaccgtgtcatctacgcgtggacagcctaaggccaatcctaccgtgacactgttccctccaagcagcgaagaactccaggccaacaaggccacacttgtgtgcctgatctccgacttctaccctggggctgtgacagtggcttggaaggccgatggatctcctgtgaaagccggcgtggaaaccaccaagccatccaagcagagcaacaacaaatacgccgccagctcctacctgagcctgacacctgagcagtggaagtcccacagatcctacagctgccaagtgacccacgaaggcagcaccgtggaaaagacagtggcccctacagagtgcagcatccccgaggacacattcttcccaagccccgagagcagctgcgacgtgaagctggtggaaaagagcttcgagacagacaccaacctgaacttccagaacctgagcgtgatcggcttcagaatcctgctgctgaaagtggccggctttaacctgctgatgaccctgcggctgtggtccagccgcgccaagagaagcggatctggcgtgaagcagaccctgaatttcgacctgctgaagctggctggcgacgtggaatccaacccaggcccttctagaggccatatgaccgagtacaagcccacggtgcgcctcgccacccgcgacgacgtccccagggccgtacgcaccctcgccgccgcgttcgccgactaccccgccacgcgccacaccgtcgatccggaccgccacatcgagcgggtcaccgagctgcaagaactcttcctcacgcgcgtcgggctcgacatcggcaaggtgtgggtcgcggacgacggcgccgcggtggcggtctggaccacgccggagagcgtcgaagcgggggcggtgttcgccgagatcggcccgcgcatggccgagttgagcggttcccggctggccgcgcagcaacagatggaaggcctcctggcgccgcaccggcccaaggagcccgcgtggttcctggccaccgtcggcgtctcgcccgaccaccagggcaagggtctgggcagcgccgtcgtgctccccggagtggaggcggccgagcgcgccggggtgcccgccttcctggagacctccgcgccccgcaacctccccttctacgagcggctcggcttcaccgtcaccgccgacgtcgaggtgcccgaaggaccgcgcacctggtgcatgacccgcaagcccggtgcctga

SEQ ID NO: 35404 - DNA, 2625 bp, synthetic construct
  source 1..2625: mol_type = other DNA
atggccttaccagtgaccgccttgctcctgccgctggccttgctgctccacgccgccaggccgctcgaggaggcctctacaaagggaccctccgtgtttcctctggctcccagcagcaagtctacaagcggaggaacagccgctctgggctgcctggtcaaggattactttcccgagcctgtgaccgtgtcctggaatagcggagcactgacaagcggcgtgcacacctttccagccgtgctgcaaagcagcggcctgtactctctgagcagcgtggtcacagtgcctagctctagcctgggcacccagacctacatctgcaatgtgaaccacaagcctagcaacaccaaggtggacaagagagtggaacccaagagctgtatccccgaggacacattcttcccaagccccgagagcagctgcgacgtgaagctggtggaaaagagcttcgagacagacaccaacctgaacttccagaacctgagcgtgatcggcttcagaatcctgctgctgaaagtggccggctttaacctgctgatgaccctgcggctgtggtccagcagggccaagcgatctggatctggagcaacaaacttctcactactcaaacaagcaggtgacgtggaggagaatcccgggcctactagcatggccttaccagtgaccgccttgctcctgccgctggccttgctgctccacgccgccaggccggacatccagatgacacagagccctagcagcctgtctgccagcgtgggagacagagtgaccatcacctgtagagccagccaggacgtgcggaacatcgtcgtgtggttccagcagaagcctggcaaggcccctaagctgctgatctacagcggcagctacagatacagcggcgtgcccagcagattttccggctctggctctggcaccgacttcaccctgacaatatccagcctccagcctgaggacttcgccacctactactgccagcagcactacagccctccatacacattcggccagggcaccaaggtggaaatcaagagaggcggaggcggaagtggaggcggaggatctggcggcggaggctctgaagttcagctggtggaatctggccctggcctggtcaagcctagcgagacactgagcctgacctgtaccgtgtccggcttcagcctgaccagatttggcgtgcactgggtccgacagccacctggcaaaggactggaatggctgggagtgatttggagaggcggcagcaccgattacaacgccgccttcatgagccggctgaccatcagcaaggacaacagcaagaaccaggtgtccctgaagctgagcagcgtgacagccgctgataccgccgtgtactactgctccaaccactactacggcagctccgactacgccctggataattggggccagggaaccctggtcaccgtgtcatctacgcgtggacagcctaaggccaatcctaccgtgacactgttccctccaagcagcgaagaactccaggccaacaaggccacacttgtgtgcctgatctccgacttctaccctggggctgtgacagtggcttggaaggccgatggatctcctgtgaaagccggcgtggaaaccaccaagccatccaagcagagcaacaacaaatacgccgccagctcctacctgagcctgacacctgagcagtggaagtcccacagatcctacagctgccaagtgacccacgaaggcagcaccgtggaaaagacagtggcccctacagagtgcagcggcagagccgattgcggctttaccagcgagagctaccagcagggcgtgctgagcgccaccatcctgtacgagatcctgctgggcaaggccaccctgtacgccgtgctggtgtctgccctggtgctgatggctatggtcaagcggaaggacagccggggacgcgccaagagaagcggatctggcgtgaagcagaccctgaatttcgacctgctgaagctggctggcgacgtggaatccaacccaggcccttctagaggccatatgaccgagtacaagcccacggtgcgcctcgccacccgcgacgacgtccccagggccgtacgcaccctcgccgccgcgttcgccgactaccccgccacgcgccacaccgtcgatccggaccgccacatcgagcgggtcaccgagctgcaagaactcttcctcacgcgcgtcgggctcgacatcggcaaggtgtgggtcgcggacgacggcgccgcggtggcggtctggaccacgccggagagcgtcgaagcgggggcggtgttcgccgagatcggcccgcgcatggccgagttgagcggttcccggctggccgcgcagcaacagatggaaggcctcctggcgccgcaccggcccaaggagcccgcgtggttcctggccaccgtcggcgtctcgcccgaccaccagggcaagggtctgggcagcgccgtcgtgctccccggagtggaggcggccgagcgcgccggggtgcccgccttcctggagacctccgcgccccgcaacctccccttctacgagcggctcggcttcaccgtcaccgccgacgtcgaggtgcccgaaggaccgcgcacctggtgcatgacccgcaagcccggtgcctga

SEQ ID NO: 35405 - DNA, 1863 bp, synthetic construct
  source 1..1863: mol_type = other DNA
atggccttaccagtgaccgccttgctcctgccgctggccttgctgctccacgccgccaggccggacatccagatgacacagagccctagcagcctgtctgccagcgtgggagacagagtgaccatcacctgtagagccagccaggacgtgcggaacatcgtcgtgtggttccagcagaagcctggcaaggcccctaagctgctgatctacagcggcagctacagatacagcggcgtgcccagcagattttccggctctggctctggcaccgacttcaccctgacaatatccagcctccagcctgaggacttcgccacctactactgccagcagcactacagccctccatacacattcggccagggcaccaaggtggaaatcaagagactcgaggacctgaagaacgtgttcccacctgaggtggccgtgttcgagcctagcgaggccgagatcagccacacccagaaagccaccctcgtgtgcctggctaccggcttctaccccgaccatgtggaactgtcttggtgggtcaacggcaaagaggtgcacagcggcgtgtgtaccgacccccagccactgaaagaacagcccgccctgaacgacagccggtactgcctgagcagcagactgagagtgtccgccaccttctggcagaacccccggaaccacttcagatgccaggtgcagttctacggcctgagcgagaacgacgagtggacccaggacagagccaagcccgtgacccagatcgtgtctgccgaagcctggggcagagccgatagcggctttaccagcgagagctaccagcagggcgtgctgagcgccaccatcctgtacgagatcctgctgggcaaggccaccctgtacgccgtgctggtgtctgccctggtgctgatggctatggtcaagcggaaggacagccggggaagggccaagcgatctggatctggagcaacaaacttctcactactcaaacaagcaggtgacgtggaggagaatcccgggcctactagtatggactggatttggcgcatccttttccttgtcggcgctgctaccggcgcgcattccttcgaagaagttcagctggtggaatctggccctggcctggtcaagcctagcgagacactgagcctgacctgtaccgtgtccggcttcagcctgaccagatttggcgtgcactgggtccgacagccacctggcaaaggactggaatggctgggagtgatttggagaggcggcagcaccgattacaacgccgccttcatgagccggctgaccatcagcaaggacaacagcaagaaccaggtgtccctgaagctgagcagcgtgacagccgctgataccgccgtgtactactgctccaaccactactacggcagctccgactacgccctggataattggggccagggaaccctggtcaccgtgtcatctacgcgtatccagaaccctgatcctgccgtgtaccagctgcgggatagcaagagcagcgacaagagcgtgtgtctgttcaccgacttcgacagccagaccaacgtgtcccagagcaaggactccgacgtgtacatcaccgataagtgcgtgctggacatgcggagcatggacttcaagagcaactccgccgtggcctggtccaacaagtccgatttcgcctgcgccaacgccttcaacaacagcattatccccgaggacacattcttcccaagccccgagagcagcagcgacgtgaagctggtggaaaagagcttcgagacagacaccaacctgaacttccagaacctgagcgtgatcggcttcagaatcctgctgctgaaagtggccggctttaacctgctgatgaccctgcggctgtggtccagc

SEQ ID NO: 35406 - DNA, 2703 bp, synthetic construct
  source 1..2703: mol_type = other DNA
atggccttaccagtgaccgccttgctcctgccgctggccttgctgctccacgccgccaggccggaggttcagctgcttgagtctggcggaggactggttcaacctggcggaagcctgagactgtcttgtgccgcctctggcagaaccttcagcatgggctggtatagacaggcccctggcaagggcctcgaatttgtgtctgccatcacatacagcggcggcagcccttactacgccgattctgtgaagggcagattcaccatcagccgggacaacagcaagaacaccgtgtacctccagatgaacagcctgagagccgaggacaccgccgtgtactactgtgccgccaatccaacctacggcagcgactggaatgccgagaattggggccagggcacactggtcacagtgtctagtggtaccggcggaggcggatctggcggcggaggtagcggtggcggaggatctgaattcgacatccagatgacacagagccctagcagcctgtctgccagcgtgggagacagagtgaccatcacctgtagagccagccaggacgtgcggaacatcgtcgtgtggttccagcagaagcctggcaaggcccctaagctgctgatctacagcggcagctacagatacagcggcgtgcccagcagattttccggctctggctctggcaccgacttcaccctgacaatatccagcctccagcctgaggacttcgccacctactactgccagcagcactacagccctccatacacattcggccagggcaccaaggtggaaatcaagagactcgagatccagaaccctgatcctgccgtgtaccagctgcgggatagcaagagcagcgacaagagcgtgtgtctgttcaccgacttcgacagccagaccaacgtgtcccagagcaaggactccgacgtgtacatcaccgataagtgcgtgctggacatgcggagcatggacttcaagagcaactccgccgtggcctggtccaacaagtccgatttcgcctgcgccaacgccttcaacaacagcattatccccgaggacacattcttcccaagcagcgacgtgccctgcgacgtgaagctggtggaaaagagcttcgagacagacaccaacctgaacttccagaacctgagcgtgatcggcttcagaatcctgctgctgaaagtggccggctttaacctgctgatgaccctgcggctgtggtccagccgcgccaagagaagcggatctggcgtgaagcagaccctgaatttcgacctgctgaagctggctggcgacgtggaatccaacccaggccctactagtaccatggactggatttggcgcatccttttccttgtcggcgctgctaccggcacccattccgggcccgaagtgcaactggttgaatccggtggcggcctggtgcaacccggcggatctctcagacttagctgtgccgcctccggcagaaccttcacaatgggatggtacaggcaggctccagggaaagagagagagttcgtcgccgccatctctctgtctcccacactggcctactacgccgactctgtgaaaggccggttcaccatctccagagataatagcaagaacaccgtggtgctgcaaatgaactctctgagagccgaggatacagccctgtactattgtgccgctgaccggaagtccgtgatgagcatcagacccgattactggggacagggcacactggtcacagtgtctagtggatccggcggcggaggatctggcggaggcggatctgggggcggaggctctttcgaagaagttcagctggtggaatctggccctggcctggtcaagcctagcgagacactgagcctgacctgtaccgtgtccggcttcagcctgaccagatttggcgtgcactgggtccgacagccacctggcaaaggactggaatggctgggagtgatttggagaggcggcagcaccgattacaacgccgccttcatgagccggctgaccatcagcaaggacaacagcaagaaccaggtgtccctgaagctgagcagcgtgacagccgctgataccgccgtgtactactgctccaaccactactacggcagctccgactacgccctggataattggggccagggaaccctggtcaccgtgtcatctacgcgtgaggacctgaagaacgtgttcccacctgaggtggccgtgttcgagcctagcaaggccgagatcgcccacacccagaaagccaccctcgtgtgcctggctaccggcttctaccccgaccatgtggaactgtcttggtgggtcaacggcaaagaggtgcacagcggcgtgtgtaccgacccccagccactgaaagaacagcccgccctgaacgacagccggtactgcctgagcagcagactgagagtgtccgccaccttctggcagaacccccggaaccacttcagatgccaggtgcagttctacggcctgagcgagaacgacgagtggacccaggacagagccaagcccgtgacccagatcgtgtctgccgaagcctggggcagagccgattgcggcatcaccagcgccagctaccaccagggcgtgctgagcgccaccatcctgtacgagatcctgctgggcaaggccaccctgtacgccgtgctggtgtctgccctggtgctgatggctatggtcaagcggaaggacagccggggataa

SEQ ID NO: 35407 - DNA, 2703 bp, synthetic construct
  source 1..2703: mol_type = other DNA
atggccttaccagtgaccgccttgctcctgccgctggccttgctgctccacgccgccaggccggaagtgcagctggttgaatctggcggaggactggttcaggctggcggatctctgagactgtcttgtgccgccagcggcagaacctttagcatgggctggtttagacaggcccctggcaaagagagagagttcgtcgccgccatcacatactctggcggcagcccttactacgccgactctgtgaagggcagattcaccatcagccgggacaacgccaagaacaccgtgtacctccagatgaacagcctgaagcctgaggacaccgccgtgtactactgcgccgccaatccaacatacggcagcgactggaacgccgagaattggggccagggaacccaagtgacagtgtctagcggtaccggcggaggcggatctggcggcggaggtagcggtggcggaggatctgaattcgacatccagatgacacagagccctagcagcctgtctgccagcgtgggagacagagtgaccatcacctgtagagccagccaggacgtgcggaacatcgtcgtgtggttccagcagaagcctggcaaggcccctaagctgctgatctacagcggcagctacagatacagcggcgtgcccagcagattttccggctctggctctggcaccgacttcaccctgacaatatccagcctccagcctgaggacttcgccacctactactgccagcagcactacagccctccatacacattcggccagggcaccaaggtggaaatcaagagactcgagatccagaaccctgatcctgccgtgtaccagctgcgggatagcaagagcagcgacaagagcgtgtgtctgttcaccgacttcgacagccagaccaacgtgtcccagagcaaggactccgacgtgtacatcaccgataagtgcgtgctggacatgcggagcatggacttcaagagcaactccgccgtggcctggtccaacaagtccgatttcgcctgcgccaacgccttcaacaacagcattatccccgaggacacattcttcccaagcagcgacgtgccctgcgacgtgaagctggtggaaaagagcttcgagacagacaccaacctgaacttccagaacctgagcgtgatcggcttcagaatcctgctgctgaaagtggccggctttaacctgctgatgaccctgcggctgtggtccagccgcgccaagagaagcggatctggcgtgaagcagaccctgaatttcgacctgctgaagctggctggcgacgtggaatccaacccaggccctactagtaccatggactggatttggcgcatccttttccttgtcggcgctgctaccggcgcccattccgggcccgaagtgcaactggttgaatccggtggcggcctggtgcaacccggcggatctctcagacttagctgtgccgcctccggcagaaccttcacaatgggatggtacaggcaggctccagggaaagagagagagttcgtcgccgccatctctctgtctcccacactggcctactacgccgactctgtgaaaggccggttcaccatctccagagataatagcaagaacaccgtggtgctgcaaatgaactctctgagagccgaggatacagccctgtactattgtgccgctgaccggaagtccgtgatgagcatcagacccgattactggggacagggcacactggtcacagtgtctagtggatccggcggcggaggatctggcggaggcggatctgggggcggaggctctttcgaagaagttcagctggtggaatctggccctggcctggtcaagcctagcgagacactgagcctgacctgtaccgtgtccggcttcagcctgaccagatttggcgtgcactgggtccgacagccacctggcaaaggactggaatggctgggagtgatttggagaggcggcagcaccgattacaacgccgccttcatgagccggctgaccatcagcaaggacaacagcaagaaccaggtgtccctgaagctgagcagcgtgacagccgctgataccgccgtgtactactgctccaaccactactacggcagctccgactacgccctggataattggggccagggaaccctggtcaccgtgtcatctacgcgtgaggacctgaagaacgtgttcccacctgaggtggccgtgttcgagcctagcaaggccgagatcgcccacacccagaaagccaccctcgtgtgcctggctaccggcttctaccccgaccatgtggaactgtcttggtgggtcaacggcaaagaggtgcacagcggcgtgtgtaccgacccccagccactgaaagaacagcccgccctgaacgacagccggtactgcctgagcagcagactgagagtgtccgccaccttctggcagaacccccggaaccacttcagatgccaggtgcagttctacggcctgagcgagaacgacgagtggacccaggacagagccaagcccgtgacccagatcgtgtctgccgaagcctggggcagagccgattgcggcatcaccagcgccagctaccaccagggcgtgctgagcgccaccatcctgtacgagatcctgctgggcaaggccaccctgtacgccgtgctggtgtctgccctggtgctgatggctatggtcaagcggaaggacagccggggataa

SEQ ID NO: 35408 - DNA, 2694 bp, synthetic construct
  source 1..2694: mol_type = other DNA
atggccttaccagtgaccgccttgctcctgccgctggccttgctgctccacgccgccaggccggaagtgcagctggttgaatctggcggaggactggttcaggctggcggatctctgagactgtcttgtgccgccagcggcagaacctttagcatgggctggtttagacaggcccctggcaaagagagagagttcgtcgccgccatcacatactctggcggcagcccttactacgccgactctgtgaagggcagattcaccatcagccgggacaacgccaagaacaccgtgtacctccagatgaacagcctgaagcctgaggacaccgccgtgtactactgcgccgccaatccaacatacggcagcgactggaacgccgagaattggggccagggaacccaagtgacagtgtctagcggtaccggcggaggcggatctggcggcggaggtagcggtggcggaggatctgaattcgacatccagatgacacagagccctagcagcctgtctgccagcgtgggagacagagtgaccatcacctgtagagccagccaggacgtgcggaacatcgtcgtgtggttccagcagaagcctggcaaggcccctaagctgctgatctacagcggcagctacagatacagcggcgtgcccagcagattttccggctctggctctggcaccgacttcaccctgacaatatccagcctccagcctgaggacttcgccacctactactgccagcagcactacagccctccatacacattcggccagggcaccaaggtggaaatcaagagactcgaggacctgaagaacgtgttcccacctgaggtggccgtgttcgagcctagcgaggccgagatcagccacacccagaaagccaccctcgtgtgcctggctaccggcttctaccccgaccatgtggaactgtcttggtgggtcaacggcaaagaggtgcacagcggcgtgtgtaccgacccccagccactgaaagaacagcccgccctgaacgacagccggtactgcctgagcagcagactgagagtgtccgccaccttctggcagaacccccggaaccacttcagatgccaggtgcagttctacggcctgagcgagaacgacgagtggacccaggacagagccaagcccgtgacccagatcgtgtctgccgaagcctggggcagagccgattgcggctttaccagcgagagctaccagcagggcgtgctgagcgccaccatcctgtacgagatcctgctgggcaaggccaccctgtacgccgtgctggtgtctgccctggtgctgatggctatggtcaagcggaaggacagccggggaagggccaagcgatctggatctggagcaacaaacttctcactactcaaacaagcaggtgacgtggaggagaatcccgggcctactagtgccaccatggactggatttggcgcatccttttccttgtcggcgctgctaccggcgcccattccgggcccgaagtgcaactggttgaatccggtggcggcctggtgcaagcaggcggatctctcagacttagctgtgccgcctccggcagaaccttcacaatgggatggtttaggcaggctccagggaaagagagagagttcgtcgccgccatctctctgtctcccacactggcctactacgccgactctgtgaaaggccggttcaccatctccagagataatgccaagaacaccgtggtgctgcaaatgaactctctgaaacccgaggatacagccctgtactattgtgccgctgaccggaagtccgtgatgagcatcagacccgattactggggacagggcacacaagtcacagtgtcctctggatccggcggcggaggatctggcggaggcggatctgggggcggaggctctttcgaagaagttcagctggtggaatctggccctggcctggtcaagcctagcgagacactgagcctgacctgtaccgtgtccggcttcagcctgaccagatttggcgtgcactgggtccgacagccacctggcaaaggactggaatggctgggagtgatttggagaggcggcagcaccgattacaacgccgccttcatgagccggctgaccatcagcaaggacaacagcaagaaccaggtgtccctgaagctgagcagcgtgacagccgctgataccgccgtgtactactgctccaaccactactacggcagctccgactacgccctggataattggggccagggaaccctggtcaccgtgtcatctacgcgtatccagaaccctgatcctgccgtgtaccagctgcgggatagcaagagcagcgacaagagcgtgtgtctgttcaccgacttcgacagccagaccaacgtgtcccagagcaaggactccgacgtgtacatcaccgataagtgcgtgctggacatgcggagcatggacttcaagagcaactccgccgtggcctggtccaacaagtccgatttcgcctgcgccaacgccttcaacaacagcattatccccgaggacacattcttcccaagccccgagagcagctgcgacgtgaagctggtggaaaagagcttcgagacagacaccaacctgaacttccagaacctgagcgtgatcggcttcagaatcctgctgctgaaagtggccggctttaacctgctgatgaccctgcggctgtggtccagctaa

SEQ ID NO: 35409 - DNA, 2307 bp, synthetic construct
  source 1..2307: mol_type = other DNA
atggccttaccagtgaccgccttgctcctgccgctggccttgctgctccacgccgccaggccggaagtgcagctggttgaatctggcggaggactggttcagcctggcggatctctgagactgagctgtgaagccagcggcttcgccagcgacgattacatcatcggctggttcagacaggcccctggcaaagagagagagggcgtcagctgcatcagctctaagtacgccaacaccgtgtacaccgacagcgtgaagggcagattcagactgagcagaggcaccgccaagaataccgtgtacctccagatgagcgccctgaagcctgaggataccgccgtgtactactgcgctatggacagccgcagagtgacatgccctgagatcagcaccatgcaccggaacttcgattcttggggccagggcacactggtcacagtgtcatctggtaccggcggaggcggatctggcggcggaggtagcggtggcggaggatctgaattcgacatccagatgacacagagccctagcagcctgtctgccagcgtgggagacagagtgaccatcacctgtagagccagccaggacgtgcggaacatcgtcgtgtggttccagcagaagcctggcaaggcccctaagctgctgatctacagcggcagctacagatacagcggcgtgcccagcagattttccggctctggctctggcaccgacttcaccctgacaatatccagcctccagcctgaggacttcgccacctactactgccagcagcactacagccctccatacacattcggccagggcaccaaggtggaaatcaagagactcgaggacctgaagaacgtgttcccacctgaggtggccgtgttcgagcctagcaaggccgagatcgcccacacccagaaagccaccctcgtgtgcctggctaccggcttctaccccgaccatgtggaactgtcttggtgggtcaacggcaaagaggtgcacagcggcgtgtgtaccgacccccagccactgaaagaacagcccgccctgaacgacagccggtactgcctgagcagcagactgagagtgtccgccaccttctggcagaacccccggaaccacttcagatgccaggtgcagttctacggcctgagcgagaacgacgagtggacccaggacagagccaagcccgtgacccagatcgtgtctgccgaagcctggggcagagccgattgcggcatcaccagcgccagctaccaccagggcgtgctgagcgccaccatcctgtacgagatcctgctgggcaaggccaccctgtacgccgtgctggtgtctgccctggtgctgatggctatggtcaagcggaaggacagccggggaagggccaagcgatctggatctggagcaacaaacttctcactactcaaacaagcaggtgacgtggaggagaatcccgggcctactagtatggactggatttggcgcatccttttccttgtcggcgctgctaccggcgcgcattccttcgaagaagttcagctggtggaatctggccctggcctggtcaagcctagcgagacactgagcctgacctgtaccgtgtccggcttcagcctgaccagatttggcgtgcactgggtccgacagccacctggcaaaggactggaatggctgggagtgatttggagaggcggcagcaccgattacaacgccgccttcatgagccggctgaccatcagcaaggacaacagcaagaaccaggtgtccctgaagctgagcagcgtgacagccgctgataccgccgtgtactactgctccaaccactactacggcagctccgactacgccctggataattggggccagggaaccctggtcaccgtgtcatctacgcgtatccagaaccctgatcctgccgtgtaccagctgcgggatagcaagagcagcgacaagagcgtgtgtctgttcaccgacttcgacagccagaccaacgtgtcccagagcaaggactccgacgtgtacatcaccgataagtgcgtgctggacatgcggagcatggacttcaagagcaactccgccgtggcctggtccaacaagtccgatttcgcctgcgccaacgccttcaacaacagcattatccccgaggacacattcttcccaagcagcgacgtgccctgcgacgtgaagctggtggaaaagagcttcgagacagacaccaacctgaacttccagaacctgagcgtgatcggcttcagaatcctgctgctgaaagtggccggctttaacctgctgatgaccctgcggctgtggtccagctaa

SEQ ID NO: 35410 - DNA, 2280 bp, synthetic construct
  source 1..2280: mol_type = other DNA
atggccttaccagtgaccgccttgctcctgccgctggccttgctgctccacgccgccaggccggacatccagatgacacagagccctagcagcctgtctgccagcgtgggagacagagtgaccatcacctgtagagccagccaggacgtgcggaacatcgtcgtgtggttccagcagaagcctggcaaggcccctaagctgctgatctacagcggcagctacagatacagcggcgtgcccagcagattttccggctctggctctggcaccgacttcaccctgacaatatccagcctccagcctgaggacttcgccacctactactgccagcagcactacagccctccatacacattcggccagggcaccaaggtggaaatcaagagactcgaggacctgaagaacgtgttcccacctgaggtggccgtgttcgagcctagcgaggccgagatcagccacacccagaaagccaccctcgtgtgcctggctaccggcttctaccccgaccatgtggaactgtcttggtgggtcaacggcaaagaggtgcacagcggcgtgtgtaccgacccccagccactgaaagaacagcccgccctgaacgacagccggtactgcctgagcagcagactgagagtgtccgccaccttctggcagaacccccggaaccacttcagatgccaggtgcagttctacggcctgagcgagaacgacgagtggacccaggacagagccaagcccgtgacccagatcgtgtctgccgaagcctggggcagagccgattgcggctttaccagcgagagctaccagcagggcgtgctgagcgccaccatcctgtacgagatcctgctgggcaaggccaccctgtacgccgtgctggtgtctgccctggtgctgatggctatggtcaagcggaaggacagccggggaagggccaagcgatctggatctggagcaacaaacttctcactactcaaacaagcaggtgacgtggaggagaatcccgggcctactagtaccatggactggatttggcgcatccttttccttgtcggcgctgctaccggcgcccattccgggcccgaagtgcaactggttgaatccggtggcggcctggtgcaacccggcggatctctcagacttagctgtgccgcctccggcagaaccttcacaatgggatggtacaggcaggctccagggaaagagagagagttcgtcgccgccatctctctgtctcccacactggcctactacgccgactctgtgaaaggccggttcaccatctccagagataatagcaagaacaccgtggtgctgcaaatgaactctctgagagccgaggatacagccctgtactattgtgccgctgaccggaagtccgtgatgagcatcagacccgattactggggacagggcacactggtcacagtgtctagtggatccggcggcggaggatctggcggaggcggatctgggggcggaggctctttcgaagaagttcagctggtggaatctggccctggcctggtcaagcctagcgagacactgagcctgacctgtaccgtgtccggcttcagcctgaccagatttggcgtgcactgggtccgacagccacctggcaaaggactggaatggctgggagtgatttggagaggcggcagcaccgattacaacgccgccttcatgagccggctgaccatcagcaaggacaacagcaagaaccaggtgtccctgaagctgagcagcgtgacagccgctgataccgccgtgtactactgctccaaccactactacggcagctccgactacgccctggataattggggccagggaaccctggtcaccgtgtcatctacgcgtatccagaaccctgatcctgccgtgtaccagctgcgggatagcaagagcagcgacaagagcgtgtgtctgttcaccgacttcgacagccagaccaacgtgtcccagagcaaggactccgacgtgtacatcaccgataagtgcgtgctggacatgcggagcatggacttcaagagcaactccgccgtggcctggtccaacaagtccgatttcgcctgcgccaacgccttcaacaacagcattatccccgaggacacattcttcccaagccccgagagcagctgcgacgtgaagctggtggaaaagagcttcgagacagacaccaacctgaacttccagaacctgagcgtgatcggcttcagaatcctgctgctgaaagtggccggctttaacctgctgatgaccctgcggctgtggtccagctaa

SEQ ID NO: 35411 - DNA, 2298 bp, synthetic construct
  source 1..2298: mol_type = other DNA
atggccttaccagtgaccgccttgctcctgccgctggccttgctgctccacgccgccaggccggacatccagatgacacagagccctagcagcctgtctgccagcgtgggagacagagtgaccatcacctgtagagccagccaggacgtgcggaacatcgtcgtgtggttccagcagaagcctggcaaggcccctaagctgctgatctacagcggcagctacagatacagcggcgtgcccagcagattttccggctctggctctggcaccgacttcaccctgacaatatccagcctccagcctgaggacttcgccacctactactgccagcagcactacagccctccatacacattcggccagggcaccaaggtggaaatcaagagactcgaggacctgaagaacgtgttcccacctgaggtggccgtgttcgagcctagcgaggccgagatcagccacacccagaaagccaccctcgtgtgcctggctaccggcttctaccccgaccatgtggaactgtcttggtgggtcaacggcaaagaggtgcacagcggcgtgtgtaccgacccccagccactgaaagaacagcccgccctgaacgacagccggtactgcctgagcagcagactgagagtgtccgccaccttctggcagaacccccggaaccacttcagatgccaggtgcagttctacggcctgagcgagaacgacgagtggacccaggacagagccaagcccgtgacccagatcgtgtctgccgaagcctggggcagagccgattgcggctttaccagcgagagctaccagcagggcgtgctgagcgccaccatcctgtacgagatcctgctgggcaaggccaccctgtacgccgtgctggtgtctgccctggtgctgatggctatggtcaagcggaaggacagccggggaagggccaagcgatctggatctggagcaacaaacttctcactactcaaacaagcaggtgacgtggaggagaatcccgggcctactagtaccatggactggatttggcgcatccttttccttgtcggcgctgctaccggcgcccattccgggccccaggtgcagctggttgaatctggcggaggactggttcagcctggcggatctctgagactgtcttgtgccgccagcggcaacatcaacagcagaaactgcatgggctggttcagacaggcccctggcaagggaagagaaggcgtggcagctatcggccaagtgaccggcagaacctactacgtggacagcgtgaagggcagattcaccatcagcctggacaacagcaagaacaccctgtacctccagatgaacagcctgagagccgaggacaccgccgtgtactattgtgctgctgcccctggctgtctgctgtctgcacttagaagcgccgactacagaaactggggccagggcacactggtcaccgtttcttctggatccggcggcggaggatctggcggaggcggatctgggggcggaggctctttcgaagaagttcagctggtggaatctggccctggcctggtcaagcctagcgagacactgagcctgacctgtaccgtgtccggcttcagcctgaccagatttggcgtgcactgggtccgacagccacctggcaaaggactggaatggctgggagtgatttggagaggcggcagcaccgattacaacgccgccttcatgagccggctgaccatcagcaaggacaacagcaagaaccaggtgtccctgaagctgagcagcgtgacagccgctgataccgccgtgtactactgctccaaccactactacggcagctccgactacgccctggataattggggccagggaaccctggtcaccgtgtcatctacgcgtatccagaaccctgatcctgccgtgtaccagctgcgggatagcaagagcagcgacaagagcgtgtgtctgttcaccgacttcgacagccagaccaacgtgtcccagagcaaggactccgacgtgtacatcaccgataagtgcgtgctggacatgcggagcatggacttcaagagcaactccgccgtggcctggtccaacaagtccgatttcgcctgcgccaacgccttcaacaacagcattatccccgaggacacattcttcccaagccccgagagcagctgcgacgtgaagctggtggaaaagagcttcgagacagacaccaacctgaacttccagaacctgagcgtgatcggcttcagaatcctgctgctgaaagtggccggctttaacctgctgatgaccctgcggctgtggtccagc

SEQ ID NO: 35412 - DNA, 2301 bp, synthetic construct
  source 1..2301: mol_type = other DNA
atggccttaccagtgaccgccttgctcctgccgctggccttgctgctccacgccgccaggccggacatccagatgacacagagccctagcagcctgtctgccagcgtgggagacagagtgaccatcacctgtagagccagccaggacgtgcggaacatcgtcgtgtggttccagcagaagcctggcaaggcccctaagctgctgatctacagcggcagctacagatacagcggcgtgcccagcagattttccggctctggctctggcaccgacttcaccctgacaatatccagcctccagcctgaggacttcgccacctactactgccagcagcactacagccctccatacacattcggccagggcaccaaggtggaaatcaagagactcgaggacctgaagaacgtgttcccacctgaggtggccgtgttcgagcctagcgaggccgagatcagccacacccagaaagccaccctcgtgtgcctggctaccggcttctaccccgaccatgtggaactgtcttggtgggtcaacggcaaagaggtgcacagcggcgtgtgtaccgacccccagccactgaaagaacagcccgccctgaacgacagccggtactgcctgagcagcagactgagagtgtccgccaccttctggcagaacccccggaaccacttcagatgccaggtgcagttctacggcctgagcgagaacgacgagtggacccaggacagagccaagcccgtgacccagatcgtgtctgccgaagcctggggcagagccgattgcggctttaccagcgagagctaccagcagggcgtgctgagcgccaccatcctgtacgagatcctgctgggcaaggccaccctgtacgccgtgctggtgtctgccctggtgctgatggctatggtcaagcggaaggacagccggggaagggccaagcgatctggatctggagcaacaaacttctcactactcaaacaagcaggtgacgtggaggagaatcccgggcctactagtaccatggactggatttggcgcatccttttccttgtcggcgctgctaccggcgcccattccgggccccaggtgcagctggttgaatctggcggaggatctgttcaggctggcggctctctgagactgtcttgtggcgcttccggcaacatcagcagcagaaactgcatgggctggttcagacaggcccctggcaaagagagagaaggcgttgccgccatcggacaagtgaccggcagatcctactacgtggacagcgtgaagggcagattcaccatcagcctggacaacgccaagaacaccctgtacctccagatgaacacactgaagcccgaggacaccgccatgtactactgtgctgctgcccctggctgtctgctgtctgcacttagaagcgccgactacagaaactggggccagggaacccaagtgacagtgtctagtggatccggcggcggaggatctggcggaggcggatctgggggcggaggctctttcgaagaagttcagctggtggaatctggccctggcctggtcaagcctagcgagacactgagcctgacctgtaccgtgtccggcttcagcctgaccagatttggcgtgcactgggtccgacagccacctggcaaaggactggaatggctgggagtgatttggagaggcggcagcaccgattacaacgccgccttcatgagccggctgaccatcagcaaggacaacagcaagaaccaggtgtccctgaagctgagcagcgtgacagccgctgataccgccgtgtactactgctccaaccactactacggcagctccgactacgccctggataattggggccagggaaccctggtcaccgtgtcatctacgcgtatccagaaccctgatcctgccgtgtaccagctgcgggatagcaagagcagcgacaagagcgtgtgtctgttcaccgacttcgacagccagaccaacgtgtcccagagcaaggactccgacgtgtacatcaccgataagtgcgtgctggacatgcggagcatggacttcaagagcaactccgccgtggcctggtccaacaagtccgatttcgcctgcgccaacgccttcaacaacagcattatccccgaggacacattcttcccaagccccgagagcagctgcgacgtgaagctggtggaaaagagcttcgagacagacaccaacctgaacttccagaacctgagcgtgatcggcttcagaatcctgctgctgaaagtggccggctttaacctgctgatgaccctgcggctgtggtccagctaa

SEQ ID NO: 35413 - DNA, 2724 bp, synthetic construct
  source 1..2724: mol_type = other DNA
atggccttaccagtgaccgccttgctcctgccgctggccttgctgctccacgccgccaggccggaagtgcagctggttgaatctggcggaggactggttcaggctggcggatctctgagactgtcttgtgccgccagcggcagaacctttagcatgggctggtttagacaggcccctggcaaagagagagagttcgtcgccgccatcacatactctggcggcagcccttactacgccgactctgtgaagggcagattcaccatcagccgggacaacgccaagaacaccgtgtacctccagatgaacagcctgaagcctgaggacaccgccgtgtactactgcgccgccaatccaacatacggcagcgactggaacgccgagaattggggccagggaacccaagtgacagtgtctagcggtaccggcggaggcggatctggcggcggaggtagcggtggcggaggatctgaattcgacatccagatgacacagagccctagcagcctgtctgccagcgtgggagacagagtgaccatcacctgtagagccagccaggacgtgcggaacatcgtcgtgtggttccagcagaagcctggcaaggcccctaagctgctgatctacagcggcagctacagatacagcggcgtgcccagcagattttccggctctggctctggcaccgacttcaccctgacaatatccagcctccagcctgaggacttcgccacctactactgccagcagcactacagccctccatacacattcggccagggcaccaaggtggaaatcaagagactcgagatccagaaccctgatcctgccgtgtaccagctgcgggatagcaagagcagcgacaagagcgtgtgtctgttcaccgacttcgacagccagaccaacgtgtcccagagcaaggactccgacgtgtacatcaccgataagtgcgtgctggacatgcggagcatggacttcaagagcaactccgccgtggcctggtccaacaagtccgatttcgcctgcgccaacgccttcaacaacagcattatccccgaggacacattcttcccaagcagcgacgtgccctgcgacgtgaagctggtggaaaagagcttcgagacagacaccaacctgaacttccagaacctgagcgtgatcggcttcagaatcctgctgctgaaagtggccggctttaacctgctgatgaccctgcggctgtggtccagccgcgccaagagaagcggatctggcgtgaagcagaccctgaatttcgacctgctgaagctggctggcgacgtggaatccaacccaggccctactagtaccatggactggatttggcgcatccttttccttgtcggcgctgctaccggcgcccattccgggccccaggtgcagctggttgaatctggcggaggatctgttcaggctggcggctctctgagactgtcttgtggcgcttccggcaacatcagcagcagaaactgcatgggctggttcagacaggcccctggcaaagagagagaaggcgttgccgccatcggacaagtgaccggcagatcctactacgtggacagcgtgaagggcagattcaccatcagcctggacaacgccaagaacaccctgtacctccagatgaacacactgaagcccgaggacaccgccatgtactactgtgctgctgcccctggctgtctgctgtctgcacttagaagcgccgactacagaaactggggccagggaacccaagtgacagtgtctagtggatccggcggcggaggatctggcggaggcggatctgggggcggaggctctttcgaagaagttcagctggtggaatctggccctggcctggtcaagcctagcgagacactgagcctgacctgtaccgtgtccggcttcagcctgaccagatttggcgtgcactgggtccgacagccacctggcaaaggactggaatggctgggagtgatttggagaggcggcagcaccgattacaacgccgccttcatgagccggctgaccatcagcaaggacaacagcaagaaccaggtgtccctgaagctgagcagcgtgacagccgctgataccgccgtgtactactgctccaaccactactacggcagctccgactacgccctggataattggggccagggaaccctggtcaccgtgtcatctacgcgtgaggacctgaagaacgtgttcccacctgaggtggccgtgttcgagcctagcaaggccgagatcgcccacacccagaaagccaccctcgtgtgcctggctaccggcttctaccccgaccatgtggaactgtcttggtgggtcaacggcaaagaggtgcacagcggcgtgtgtaccgacccccagccactgaaagaacagcccgccctgaacgacagccggtactgcctgagcagcagactgagagtgtccgccaccttctggcagaacccccggaaccacttcagatgccaggtgcagttctacggcctgagcgagaacgacgagtggacccaggacagagccaagcccgtgacccagatcgtgtctgccgaagcctggggcagagccgattgcggcatcaccagcgccagctaccaccagggcgtgctgagcgccaccatcctgtacgagatcctgctgggcaaggccaccctgtacgccgtgctggtgtctgccctggtgctgatggctatggtcaagcggaaggacagccggggataa

SEQ ID NO: 35414 - DNA, 2715 bp, synthetic construct
  source 1..2715: mol_type = other DNA
atggccttaccagtgaccgccttgctcctgccgctggccttgctgctccacgccgccaggccgcaggtgcagctggttgaatctggcggaggatctgttcaggctggcggctctctgagactgtcttgtggcgcttccggcaacatcagcagcagaaactgcatgggctggttcagacaggcccctggcaaagagagagaaggcgttgccgccatcggacaagtgaccggcagatcctactacgtggacagcgtgaagggcagattcaccatcagcctggacaacgccaagaacaccctgtacctccagatgaacacactgaagcccgaggacaccgccatgtactactgtgctgctgcccctggctgtctgctgtctgcacttagaagcgccgactacagaaactggggccagggaacccaagtgacagtgtctagtggtaccggcggaggcggatctggcggcggaggtagcggtggcggaggatctgaattcgacatccagatgacacagagccctagcagcctgtctgccagcgtgggagacagagtgaccatcacctgtagagccagccaggacgtgcggaacatcgtcgtgtggttccagcagaagcctggcaaggcccctaagctgctgatctacagcggcagctacagatacagcggcgtgcccagcagattttccggctctggctctggcaccgacttcaccctgacaatatccagcctccagcctgaggacttcgccacctactactgccagcagcactacagccctccatacacattcggccagggcaccaaggtggaaatcaagagactcgaggacctgaagaacgtgttcccacctgaggtggccgtgttcgagcctagcgaggccgagatcagccacacccagaaagccaccctcgtgtgcctggctaccggcttctaccccgaccatgtggaactgtcttggtgggtcaacggcaaagaggtgcacagcggcgtgtgtaccgacccccagccactgaaagaacagcccgccctgaacgacagccggtactgcctgagcagcagactgagagtgtccgccaccttctggcagaacccccggaaccacttcagatgccaggtgcagttctacggcctgagcgagaacgacgagtggacccaggacagagccaagcccgtgacccagatcgtgtctgccgaagcctggggcagagccgattgcggctttaccagcgagagctaccagcagggcgtgctgagcgccaccatcctgtacgagatcctgctgggcaaggccaccctgtacgccgtgctggtgtctgccctggtgctgatggctatggtcaagcggaaggacagccggggaagggccaagcgatctggatctggagcaacaaacttctcactactcaaacaagcaggtgacgtggaggagaatcccgggcctactagtgccaccatggactggatttggcgcatccttttccttgtcggcgctgctaccggcgcccattccgggcccgaagtgcaactggttgaatccggtggcggcctggtgcaagcaggcggatctctcagacttagctgtgccgcctccggcagaaccttcacaatgggatggtttaggcaggctccagggaaagagagagagttcgtcgccgccatctctctgtctcccacactggcctactacgccgactctgtgaaaggccggttcaccatctccagagataatgccaagaacaccgtggtgctgcaaatgaactctctgaaacccgaggatacagccctgtactattgtgccgctgaccggaagtccgtgatgagcatcagacccgattactggggacagggcacacaagtcacagtgtcctctggatccggcggcggaggatctggcggaggcggatctgggggcggaggctctttcgaagaagttcagctggtggaatctggccctggcctggtcaagcctagcgagacactgagcctgacctgtaccgtgtccggcttcagcctgaccagatttggcgtgcactgggtccgacagccacctggcaaaggactggaatggctgggagtgatttggagaggcggcagcaccgattacaacgccgccttcatgagccggctgaccatcagcaaggacaacagcaagaaccaggtgtccctgaagctgagcagcgtgacagccgctgataccgccgtgtactactgctccaaccactactacggcagctccgactacgccctggataattggggccagggaaccctggtcaccgtgtcatctacgcgtatccagaaccctgatcctgccgtgtaccagctgcgggatagcaagagcagcgacaagagcgtgtgtctgttcaccgacttcgacagccagaccaacgtgtcccagagcaaggactccgacgtgtacatcaccgataagtgcgtgctggacatgcggagcatggacttcaagagcaactccgccgtggcctggtccaacaagtccgatttcgcctgcgccaacgccttcaacaacagcattatccccgaggacacattcttcccaagccccgagagcagctgcgacgtgaagctggtggaaaagagcttcgagacagacaccaacctgaacttccagaacctgagcgtgatcggcttcagaatcctgctgctgaaagtggccggctttaacctgctgatgaccctgcggctgtggtccagctaa

SEQ ID NO: 35415 - DNA, 2304 bp, synthetic construct
  source 1..2304: mol_type = other DNA
atggccttaccagtgaccgccttgctcctgccgctggccttgctgctccacgccgccaggccgcaggtgcagctggttgaatctggcggaggatctgttcaggctggcggctctctgagactgtcttgtggcgcttccggcaacatcagcagcagaaactgcatgggctggttcagacaggcccctggcaaagagagagaaggcgttgccgccatcggacaagtgaccggcagatcctactacgtggacagcgtgaagggcagattcaccatcagcctggacaacgccaagaacaccctgtacctccagatgaacacactgaagcccgaggacaccgccatgtactactgtgctgctgcccctggctgtctgctgtctgcacttagaagcgccgactacagaaactggggccagggaacccaagtgacagtgtctagtggtaccggcggaggcggatctggcggcggaggtagcggtggcggaggatctgaattcgacatccagatgacacagagccctagcagcctgtctgccagcgtgggagacagagtgaccatcacctgtagagccagccaggacgtgcggaacatcgtcgtgtggttccagcagaagcctggcaaggcccctaagctgctgatctacagcggcagctacagatacagcggcgtgcccagcagattttccggctctggctctggcaccgacttcaccctgacaatatccagcctccagcctgaggacttcgccacctactactgccagcagcactacagccctccatacacattcggccagggcaccaaggtggaaatcaagagactcgaggacctgaagaacgtgttcccacctgaggtggccgtgttcgagcctagcgaggccgagatcagccacacccagaaagccaccctcgtgtgcctggctaccggcttctaccccgaccatgtggaactgtcttggtgggtcaacggcaaagaggtgcacagcggcgtgtgtaccgacccccagccactgaaagaacagcccgccctgaacgacagccggtactgcctgagcagcagactgagagtgtccgccaccttctggcagaacccccggaaccacttcagatgccaggtgcagttctacggcctgagcgagaacgacgagtggacccaggacagagccaagcccgtgacccagatcgtgtctgccgaagcctggggcagagccgattgcggctttaccagcgagagctaccagcagggcgtgctgagcgccaccatcctgtacgagatcctgctgggcaaggccaccctgtacgccgtgctggtgtctgccctggtgctgatggctatggtcaagcggaaggacagccggggaagggccaagcgatctggatctggagcaacaaacttctcactactcaaacaagcaggtgacgtggaggagaatcccgggcctactagtgccaccatggactggatttggcgcatccttttccttgtcggcgctgctaccggcgcccattccttcgaagaagttcagctggtggaatctggccctggcctggtcaagcctagcgagacactgagcctgacctgtaccgtgtccggcttcagcctgaccagatttggcgtgcactgggtccgacagccacctggcaaaggactggaatggctgggagtgatttggagaggcggcagcaccgattacaacgccgccttcatgagccggctgaccatcagcaaggacaacagcaagaaccaggtgtccctgaagctgagcagcgtgacagccgctgataccgccgtgtactactgctccaaccactactacggcagctccgactacgccctggataattggggccagggaaccctggtcaccgtgtcatctacgcgtatccagaaccctgatcctgccgtgtaccagctgcgggatagcaagagcagcgacaagagcgtgtgtctgttcaccgacttcgacagccagaccaacgtgtcccagagcaaggactccgacgtgtacatcaccgataagtgcgtgctggacatgcggagcatggacttcaagagcaactccgccgtggcctggtccaacaagtccgatttcgcctgcgccaacgccttcaacaacagcattatccccgaggacacattcttcccaagccccgagagcagctgcgacgtgaagctggtggaaaagagcttcgagacagacaccaacctgaacttccagaacctgagcgtgatcggcttcagaatcctgctgctgaaagtggccggctttaacctgctgatgaccctgcggctgtggtccagctaa

SEQ ID NO: 35416 - DNA, 2304 bp, synthetic construct
  source 1..2304: mol_type = other DNA
atggccttaccagtgaccgccttgctcctgccgctggccttgctgctccacgccgccaggccgcaagttcagctggtggaaagcggtggtggcgttgtgcaacctggtggaagtctgaggctgagctgtgccgcttctggcctgagctttagcacctacactgtggcctggttcaggcaggctcccggaaagggtcttgaaggcgtggccgccattccttacaccagccagcacatggtgtacacagacagcgtcagaggccggttcaccatcagcagagacaactccaagaatacgctctatctccagatgaactctctgcgcgccgaagatacagccgtgtattactgcgccaccgacagacggcctggcacctctatgctggctatcaacggctacaacagatggggacagggaaccaccgtgaccgtgtcatctggtaccggcggaggcggatctggcggcggaggtagcggtggcggaggatctgaattcgacatccagatgacacagagccctagcagcctgtctgccagcgtgggagacagagtgaccatcacctgtagagccagccaggacgtgcggaacatcgtcgtgtggttccagcagaagcctggcaaggcccctaagctgctgatctacagcggcagctacagatacagcggcgtgcccagcagattttccggctctggctctggcaccgacttcaccctgacaatatccagcctccagcctgaggacttcgccacctactactgccagcagcactacagccctccatacacattcggccagggcaccaaggtggaaatcaagagactcgaggacctgaagaacgtgttcccacctgaggtggccgtgttcgagcctagcgaggccgagatcagccacacccagaaagccaccctcgtgtgcctggctaccggcttctaccccgaccatgtggaactgtcttggtgggtcaacggcaaagaggtgcacagcggcgtgtgtaccgacccccagccactgaaagaacagcccgccctgaacgacagccggtactgcctgagcagcagactgagagtgtccgccaccttctggcagaacccccggaaccacttcagatgccaggtgcagttctacggcctgagcgagaacgacgagtggacccaggacagagccaagcccgtgacccagatcgtgtctgccgaagcctggggcagagccgattgcggctttaccagcgagagctaccagcagggcgtgctgagcgccaccatcctgtacgagatcctgctgggcaaggccaccctgtacgccgtgctggtgtctgccctggtgctgatggctatggtcaagcggaaggacagccggggaagggccaagcgatctggatctggagcaacaaacttctcactactcaaacaagcaggtgacgtggaggagaatcccgggcctactagtgccaccatggactggatttggcgcatccttttccttgtcggcgctgctaccggcgcccattccttcgaagaagttcagctggtggaatctggccctggcctggtcaagcctagcgagacactgagcctgacctgtaccgtgtccggcttcagcctgaccagatttggcgtgcactgggtccgacagccacctggcaaaggactggaatggctgggagtgatttggagaggcggcagcaccgattacaacgccgccttcatgagccggctgaccatcagcaaggacaacagcaagaaccaggtgtccctgaagctgagcagcgtgacagccgctgataccgccgtgtactactgctccaaccactactacggcagctccgactacgccctggataattggggccagggaaccctggtcaccgtgtcatctacgcgtatccagaaccctgatcctgccgtgtaccagctgcgggatagcaagagcagcgacaagagcgtgtgtctgttcaccgacttcgacagccagaccaacgtgtcccagagcaaggactccgacgtgtacatcaccgataagtgcgtgctggacatgcggagcatggacttcaagagcaactccgccgtggcctggtccaacaagtccgatttcgcctgcgccaacgccttcaacaacagcattatccccgaggacacattcttcccaagccccgagagcagctgcgacgtgaagctggtggaaaagagcttcgagacagacaccaacctgaacttccagaacctgagcgtgatcggcttcagaatcctgctgctgaaagtggccggctttaacctgctgatgaccctgcggctgtggtccagctaa

SEQ ID NO: 35417 - DNA, 2301 bp, synthetic construct
  source 1..2301: mol_type = other DNA
atggccttaccagtgaccgccttgctcctgccgctggccttgctgctccacgccgccaggccggacatccagatgacacagagccctagcagcctgtctgccagcgtgggagacagagtgaccatcacctgtagagccagccaggacgtgcggaacatcgtcgtgtggttccagcagaagcctggcaaggcccctaagctgctgatctacagcggcagctacagatacagcggcgtgcccagcagattttccggctctggctctggcaccgacttcaccctgacaatatccagcctccagcctgaggacttcgccacctactactgccagcagcactacagccctccatacacattcggccagggcaccaaggtggaaatcaagagactcgaggacctgaagaacgtgttcccacctgaggtggccgtgttcgagcctagcgaggccgagatcagccacacccagaaagccaccctcgtgtgcctggctaccggcttctaccccgaccatgtggaactgtcttggtgggtcaacggcaaagaggtgcacagcggcgtgtgtaccgacccccagccactgaaagaacagcccgccctgaacgacagccggtactgcctgagcagcagactgagagtgtccgccaccttctggcagaacccccggaaccacttcagatgccaggtgcagttctacggcctgagcgagaacgacgagtggacccaggacagagccaagcccgtgacccagatcgtgtctgccgaagcctggggcagagccgattgcggctttaccagcgagagctaccagcagggcgtgctgagcgccaccatcctgtacgagatcctgctgggcaaggccaccctgtacgccgtgctggtgtctgccctggtgctgatggctatggtcaagcggaaggacagccggggaagggccaagcgatctggatctggagcaacaaacttctcactactcaaacaagcaggtgacgtggaggagaatcccgggcctactagtaccatggactggatttggcgcatccttttccttgtcggcgctgctaccggcgcccattccgggccccaagttcagctggtggaaagcggtggtggcgttgtgcaacctggtggaagtctgaggctgagctgtgccgcttctggcctgagctttagcacctacactgtggcctggttcaggcaggctcccggaaagggtcttgaaggcgtggccgccattccttacaccagccagcacatggtgtacacagacagcgtcagaggccggttcaccatcagcagagacaactccaagaatacgctctatctccagatgaactctctgcgcgccgaagatacagccgtgtattactgcgccaccgacagacggcctggcacctctatgctggctatcaacggctacaacagatggggacagggaaccaccgtgaccgtgtcatctggatccggcggcggaggatctggcggaggcggatctgggggcggaggctctttcgaagaagttcagctggtggaatctggccctggcctggtcaagcctagcgagacactgagcctgacctgtaccgtgtccggcttcagcctgaccagatttggcgtgcactgggtccgacagccacctggcaaaggactggaatggctgggagtgatttggagaggcggcagcaccgattacaacgccgccttcatgagccggctgaccatcagcaaggacaacagcaagaaccaggtgtccctgaagctgagcagcgtgacagccgctgataccgccgtgtactactgctccaaccactactacggcagctccgactacgccctggataattggggccagggaaccctggtcaccgtgtcatctacgcgtatccagaaccctgatcctgccgtgtaccagctgcgggatagcaagagcagcgacaagagcgtgtgtctgttcaccgacttcgacagccagaccaacgtgtcccagagcaaggactccgacgtgtacatcaccgataagtgcgtgctggacatgcggagcatggacttcaagagcaactccgccgtggcctggtccaacaagtccgatttcgcctgcgccaacgccttcaacaacagcattatccccgaggacacattcttcccaagccccgagagcagctgcgacgtgaagctggtggaaaagagcttcgagacagacaccaacctgaacttccagaacctgagcgtgatcggcttcagaatcctgctgctgaaagtggccggctttaacctgctgatgaccctgcggctgtggtccagctaa

SEQ ID NO: 35418 - DNA, 2307 bp, synthetic construct
  source 1..2307: mol_type = other DNA
atggccttaccagtgaccgccttgctcctgccgctggccttgctgctccacgccgccaggccggacatccagatgacacagagccctagcagcctgtctgccagcgtgggagacagagtgaccatcacctgtagagccagccaggacgtgcggaacatcgtcgtgtggttccagcagaagcctggcaaggcccctaagctgctgatctacagcggcagctacagatacagcggcgtgcccagcagattttccggctctggctctggcaccgacttcaccctgacaatatccagcctccagcctgaggacttcgccacctactactgccagcagcactacagccctccatacacattcggccagggcaccaaggtggaaatcaagagactcgaggacctgaagaacgtgttcccacctgaggtggccgtgttcgagcctagcgaggccgagatcagccacacccagaaagccaccctcgtgtgcctggctaccggcttctaccccgaccatgtggaactgtcttggtgggtcaacggcaaagaggtgcacagcggcgtgtgtaccgacccccagccactgaaagaacagcccgccctgaacgacagccggtactgcctgagcagcagactgagagtgtccgccaccttctggcagaacccccggaaccacttcagatgccaggtgcagttctacggcctgagcgagaacgacgagtggacccaggacagagccaagcccgtgacccagatcgtgtctgccgaagcctggggcagagccgattgcggctttaccagcgagagctaccagcagggcgtgctgagcgccaccatcctgtacgagatcctgctgggcaaggccaccctgtacgccgtgctggtgtctgccctggtgctgatggctatggtcaagcggaaggacagccggggaagggccaagcgatctggatctggagcaacaaacttctcactactcaaacaagcaggtgacgtggaggagaatcccgggcctactagtaccatggactggatttggcgcatccttttccttgtcggcgctgctaccggcgcccattccgggcccgaggtgcagctggttgaatctggcggaggatctgttcaggctggcggctctctgagactgtcttgtgccgccagcggctacacctacagcatcaactgcatgggctggttcagacaggcccctggcaaagagagagaaggcgttgccgccatctctaccggcggaggcagaaccgattaccgggattctgtgaagggcagattcaccatcagccaggacaacgccaagaacaccgtgtacctccagatgaacagcctgaagcctgaggacaccgccatgtactactgtgccggcaagaccacctatcctggctacggatgtggcctgggcagaagcgcctacaattattggggccagggcacccaagtgaccgtgtcatctggatccggcggcggaggatctggcggaggcggatctgggggcggaggctctttcgaagaagttcagctggtggaatctggccctggcctggtcaagcctagcgagacactgagcctgacctgtaccgtgtccggcttcagcctgaccagatttggcgtgcactgggtccgacagccacctggcaaaggactggaatggctgggagtgatttggagaggcggcagcaccgattacaacgccgccttcatgagccggctgaccatcagcaaggacaacagcaagaaccaggtgtccctgaagctgagcagcgtgacagccgctgataccgccgtgtactactgctccaaccactactacggcagctccgactacgccctggataattggggccagggaaccctggtcaccgtgtcatctacgcgtatccagaaccctgatcctgccgtgtaccagctgcgggatagcaagagcagcgacaagagcgtgtgtctgttcaccgacttcgacagccagaccaacgtgtcccagagcaaggactccgacgtgtacatcaccgataagtgcgtgctggacatgcggagcatggacttcaagagcaactccgccgtggcctggtccaacaagtccgatttcgcctgcgccaacgccttcaacaacagcattatccccgaggacacattcttcccaagccccgagagcagctgcgacgtgaagctggtggaaaagagcttcgagacagacaccaacctgaacttccagaacctgagcgtgatcggcttcagaatcctgctgctgaaagtggccggctttaacctgctgatgaccctgcggctgtggtccagctaa

SEQ ID NO: 35419 - DNA, 1863 bp, synthetic construct
  source 1..1863: mol_type = other DNA
atggccttaccagtgaccgccttgctcctgccgctggccttgctgctccacgccgccaggccggacatccagatgacacagagccctagcagcctgtctgccagcgtgggagacagagtgaccatcacctgtagagccagccaggacgtgcggaacatcgtcgtgtggttccagcagaagcctggcaaggcccctaagctgctgatctacagcggcagctacagatacagcggcgtgcccagcagattttccggctctggctctggcaccgacttcaccctgacaatatccagcctccagcctgaggacttcgccacctactactgccagcagcactacagccctccatacacattcggccagggcaccaaggtggaaatcaagagactcgaggacctgaagcacgtgttcccacctgaggtggccgtgttcgagcctagcgacgccgagatctggcacacccagaaagccaccctcgtgtgcctggctaccggcttctaccccgaccatgtggaactgtcttggtgggtcaacggcaaagaggtgcacagcggcgtgtctaccgacccccagccactgaaagaacagcccgccctgaacgacagccggtactgcctgagcagcagactgagagtgtccgccaccttctggcagaacccccggaaccacttcagatgccaggtgcagttctacggcctgagcgagaacgacgagtggacccaggacagagccaagcccgtgacccagatcgtgtctgccgaagcctggggcagagccgattgcggctttaccagcgagagctaccagcagggcgtgctgagcgccaccatcctgtacgagatcctgctgggcaaggccaccctgtacgccgtgctggtgtctgccctggtgctgatggctatggtcaagcggaaggacagccggggaagggccaagcgatctggatctggagcaacaaacttctcactactcaaacaagcaggtgacgtggaggagaatcccgggcctactagtatggactggatttggcgcatccttttccttgtcggcgctgctaccggcgcgcattccttcgaagaagttcagctggtggaatctggccctggcctggtcaagcctagcgagacactgagcctgacctgtaccgtgtccggcttcagcctgaccagatttggcgtgcactgggtccgacagccacctggcaaaggactggaatggctgggagtgatttggagaggcggcagcaccgattacaacgccgccttcatgagccggctgaccatcagcaaggacaacagcaagaaccaggtgtccctgaagctgagcagcgtgacagccgctgataccgccgtgtactactgctccaaccactactacggcagctccgactacgccctggataattggggccagggaaccctggtcaccgtgtcatctacgcgtatccagaaccctgatcctgccgtgtaccagctgcgggatagcaagagcagcgacaagagcgtgtgtctgttcaccgacttcgacagccagaccaacgtgtcccagagcaaggactccgacgtgtacatcaccgataagaccgtgctggacatgcggagcatggacttcaagagcaactccgccgtggcctggtccagcaagtccgatttcgcctgcgccaacgccttcaacaacagcattatccccgaggacacattcttcccaagccccgagatggcctgcgacgtgaagctggtggaaaagagcttcgagacagacaccaacctgaacttccagaacctgctcgtgatctggctgagaatcctgctgctgaaagtggccggctttaacctgctgatgaccctgcggctgtggtccagc

SEQ ID NO: 35420 - DNA, 1863 bp, synthetic construct
  source 1..1863: mol_type = other DNA
atggccttaccagtgaccgccttgctcctgccgctggccttgctgctccacgccgccaggccggacatccagatgacacagagccctagcagcctgtctgccagcgtgggagacagagtgaccatcacctgtagagccagccaggacgtgcggaacatcgtcgtgtggttccagcagaagcctggcaaggcccctaagctgctgatctacagcggcagctacagatacagcggcgtgcccagcagattttccggctctggctctggcaccgacttcaccctgacaatatccagcctccagcctgaggacttcgccacctactactgccagcagcactacagccctccatacacattcggccagggcaccaaggtggaaatcaagagactcgaggacctgaagcacgtgttcccacctgaggtggccgtgttcgagcctagcgacgccgagatctggcacacccagaaagccaccctcgtgtgcctggctaccggcttctaccccgaccatgtggaactgtcttggtgggtcaacggcaaagaggtgcacagcggcgtgtctaccgacccccagccactgaaagaacagcccgccctgaacgacagccggtactgcctgagcagcagactgagagtgtccgccaccttctggcagaacccccggaaccacttcagatgccaggtgcagttctacggcctgagcgagaacgacgagtggacccaggacagagccaagcccgtgacccagatcgtgtctgccgaagcctggggcagagccgattgcggctttaccagcgagagctaccagcagggcgtgctgagcgccaccatcctgtacgagatcctgctgggcaaggccaccctgtacgccgtgctggtgtctgccctggtgctgatggctatggtcaagcggaaggacagccggggaagggccaagcgatctggatctggagcaacaaacttctcactactcaaacaagcaggtgacgtggaggagaatcccgggcctactagtatggactggatttggcgcatccttttccttgtcggcgctgctaccggcgcgcattccttcgaagaagttcagctggtggaatctggccctggcctggtcaagcctagcgagacactgagcctgacctgtaccgtgtccggcttcagcctgaccagatttggcgtgcactgggtccgacagccacctggcaaaggactggaatggctgggagtgatttggagaggcggcagcaccgattacaacgccgccttcatgagccggctgaccatcagcaaggacaacagcaagaaccaggtgtccctgaagctgagcagcgtgacagccgctgataccgccgtgtactactgctccaaccactactacggcagctccgactacgccctggataattggggccagggaaccctggtcaccgtgtcatctacgcgtatccagaaccctgatcctgccgtgtaccagctgcgggatagcaagagcagcgacaagagcgtgtgtctgttcaccgacttcgacagccagaccaacgtgtcccagagcaaggactccgacgtgtacatcaccgataagaccgtgctggacatgcggagcatggacttcaagagcaactccgccgtggcctggtccaccaagtccgatttcgcctgcgccaacgccttcaacaacagcattatccccgaggacacattcttcccaagccccgaggtggtgtgcgacgtgaagctggtggaaaagagcttcgagacagacaccaacctgaacttccagaacctggtggtgatcggcgccagaatcctgctgctgaaagtggccggctttaacctgctgatgaccctgcggctgtggtccagc

SEQ ID NO: 35421 - DNA, 1863 bp, synthetic construct
  source 1..1863: mol_type = other DNA
atggccttaccagtgaccgccttgctcctgccgctggccttgctgctccacgccgccaggccggacatccagatgacacagagccctagcagcctgtctgccagcgtgggagacagagtgaccatcacctgtagagccagccaggacgtgcggaacatcgtcgtgtggttccagcagaagcctggcaaggcccctaagctgctgatctacagcggcagctacagatacagcggcgtgcccagcagattttccggctctggctctggcaccgacttcaccctgacaatatccagcctccagcctgaggacttcgccacctactactgccagcagcactacagccctccatacacattcggccagggcaccaaggtggaaatcaagagactcgaggacctgaagaacgtgttcccacctgaggtggccgtgttcgagcctagcaaggccgagatcagcagaacccagaaagccaccctcgtgtgcctggctaccggcttctaccctcctcatgtggaactgtcttggtgggtcaacggcaaagaggtgcacgacggcgtgtgtaccgacccccagccactgaaagaacagcccgccctgaacgacagccggtactgcctgagcagcagactgagagtgtccgccaccttctggcagaacccccggaaccacttcagatgccaggtgcagttctacggcctgagcgagaacgacgagtggacccaggacagagccaagcccgtgacccagatcgtgtctgccgaagcctggggcagagccgattgcggctttaccagcgagagctaccagcagggcgtgctgagcgccaccatcctgtacgagatcctgctgggcaaggccaccctgtacgccgtgctggtgtctgccctggtgctgatggctatggtcaagcggaaggacagccggggaagggccaagcgatctggatctggagcaacaaacttctcactactcaaacaagcaggtgacgtggaggagaatcccgggcctactagtatggactggatttggcgcatccttttccttgtcggcgctgctaccggcgcgcattccttcgaagaagttcagctggtggaatctggccctggcctggtcaagcctagcgagacactgagcctgacctgtaccgtgtccggcttcagcctgaccagatttggcgtgcactgggtccgacagccacctggcaaaggactggaatggctgggagtgatttggagaggcggcagcaccgattacaacgccgccttcatgagccggctgaccatcagcaaggacaacagcaagaaccaggtgtccctgaagctgagcagcgtgacagccgctgataccgccgtgtactactgctccaaccactactacggcagctccgactacgccctggataattggggccagggaaccctggtcaccgtgtcatctacgcgtatccagaaccctgatcctgccgtgtaccagctgcgggatagcaagagcagcgacaagttcgtgtgtctgttcaccgacttcgacagccagatcaacgtgtcccagagcaaggactccgacgtgtacatcaccgataagtgcgtgctggacatgcggagcatggacttcaagagcaactccgccgtggcctggtccaacaagtccgatttcacctgcgccaacgccttcaacaacagcattatccccgaggacacattcttcccaagccccgagagcagctgcgacgtgaagctggtggaaaagagcttcgagacagacaccaacctgaacttccagaacctgagcgtgatcggcttcagaatcctgctgctgaaagtggccggctttaacctgctgatgaccctgcggctgtggtccagc

SEQ ID NO: 35422 - DNA, 2289 bp, synthetic construct
  source 1..2289: mol_type = other DNA
atggccttaccagtgaccgccttgctcctgccgctggccttgctgctccacgccgccaggccggacatccagatgacacagagccctagcagcctgtctgccagcgtgggagacagagtgaccatcacctgtagagccagccaggacgtgcggaacatcgtcgtgtggttccagcagaagcctggcaaggcccctaagctgctgatctacagcggcagctacagatacagcggcgtgcccagcagattttccggctctggctctggcaccgacttcaccctgacaatatccagcctccagcctgaggacttcgccacctactactgccagcagcactacagccctccatacacattcggccagggcaccaaggtggaaatcaagagactcgaggacctgaagaacgtgttcccacctgaggtggccgtgttcgagcctagcgaggccgagatcagccacacccagaaagccaccctcgtgtgcctggctaccggcttctaccccgaccatgtggaactgtcttggtgggtcaacggcaaagaggtgcacagcggcgtgtgtaccgacccccagccactgaaagaacagcccgccctgaacgacagccggtactgcctgagcagcagactgagagtgtccgccaccttctggcagaacccccggaaccacttcagatgccaggtgcagttctacggcctgagcgagaacgacgagtggacccaggacagagccaagcccgtgacccagatcgtgtctgccgaagcctggggcagagccgattgcggctttaccagcgagagctaccagcagggcgtgctgagcgccaccatcctgtacgagatcctgctgggcaaggccaccctgtacgccgtgctggtgtctgccctggtgctgatggctatggtcaagcggaaggacagccggggaagggccaagcgatctggatctggagcaacaaacttctcactactcaaacaagcaggtgacgtggaggagaatcccgggcctactagtaccatggactggatttggcgcatccttttccttgtcggcgctgctaccggcgcccattccgggccccaggtgcagctccaagaaagcggacccggactggttaagccctctcagaccctgtctctgacctgcacagttagcggagccagcattaccacaggcgagtattattggaattggtttcggcagccaccaggcaaggggcttgagtggatgggtgctattgctgcctctggcagcaccacctactctcccagctttgagagcagaacctccatcagccgggacacctccaaaaaccagttctctctgaagctgtcctccgtgaccgctgctgacaccgccgtctattattgtggccggtctttcggcgtggcagctgtgaccacaggacagaacagaggccagggaacacttgtgaccgtgtcctctggatccggcggcggaggatctggcggaggcggatctgggggcggaggctctttcgaagaagttcagctggtggaatctggccctggcctggtcaagcctagcgagacactgagcctgacctgtaccgtgtccggcttcagcctgaccagatttggcgtgcactgggtccgacagccacctggcaaaggactggaatggctgggagtgatttggagaggcggcagcaccgattacaacgccgccttcatgagccggctgaccatcagcaaggacaacagcaagaaccaggtgtccctgaagctgagcagcgtgacagccgctgataccgccgtgtactactgctccaaccactactacggcagctccgactacgccctggataattggggccagggaaccctggtcaccgtgtcatctacgcgtatccagaaccctgatcctgccgtgtaccagctgcgggatagcaagagcagcgacaagagcgtgtgtctgttcaccgacttcgacagccagaccaacgtgtcccagagcaaggactccgacgtgtacatcaccgataagtgcgtgctggacatgcggagcatggacttcaagagcaactccgccgtggcctggtccaacaagtccgatttcgcctgcgccaacgccttcaacaacagcattatccccgaggacacattcttcccaagccccgagagcagctgcgacgtgaagctggtggaaaagagcttcgagacagacaccaacctgaacttccagaacctgagcgtgatcggcttcagaatcctgctgctgaaagtggccggctttaacctgctgatgaccctgcggctgtggtccagc

SEQ ID NO: 35423 - DNA, 2712 bp, synthetic construct
  source 1..2712: mol_type = other DNA
atggccttaccagtgaccgccttgctcctgccgctggccttgctgctccacgccgccaggccgcaggttcagctgcaagagtctggccctggcctggtcaagcctagccaaacactgagcctgacctgtaccgtgtctggcggctctatcaccaccggcgagttctactggaactggttcagacagcctcctggcaaaggactggaatggatgggagccattgccgccagcggcagcacaacatacagccctagcttcgagagccggaccagcatcagcagagacaccagcaagaatcagttcagcctgaagctgagcagcgtgacagccgccgatacagccgtgtattactgcggcagatcctttggagtggccgccgtgacaaccggccagaatagaggacagggcaccctggtcacagtgtctagcggtaccggcggaggcggatctggcggcggaggtagcggtggcggaggatctgaattcgacatccagatgacacagagccctagcagcctgtctgccagcgtgggagacagagtgaccatcacctgtagagccagccaggacgtgcggaacatcgtcgtgtggttccagcagaagcctggcaaggcccctaagctgctgatctacagcggcagctacagatacagcggcgtgcccagcagattttccggctctggctctggcaccgacttcaccctgacaatatccagcctccagcctgaggacttcgccacctactactgccagcagcactacagccctccatacacattcggccagggcaccaaggtggaaatcaagagactcgagatccagaaccctgatcctgccgtgtaccagctgcgggatagcaagagcagcgacaagagcgtgtgtctgttcaccgacttcgacagccagaccaacgtgtcccagagcaaggactccgacgtgtacatcaccgataagtgcgtgctggacatgcggagcatggacttcaagagcaactccgccgtggcctggtccaacaagtccgatttcgcctgcgccaacgccttcaacaacagcattatccccgaggacacattcttcccaagcagcgacgtgccctgcgacgtgaagctggtggaaaagagcttcgagacagacaccaacctgaacttccagaacctgagcgtgatcggcttcagaatcctgctgctgaaagtggccggctttaacctgctgatgaccctgcggctgtggtccagccgcgccaagagaagcggatctggcgtgaagcagaccctgaatttcgacctgctgaagctggctggcgacgtggaatccaacccaggccctactagtaccatggactggatttggcgcatccttttccttgtcggcgctgctaccggcgcccattccgggcccgaagtgcaactggttgaatccggtggcggcctggtgcaacccggcggatctctcagacttagctgtgccgcctccggcagaaccttcacaatgggatggtacaggcaggctccagggaaagagagagagttcgtcgccgccatctctctgtctcccacactggcctactacgccgactctgtgaaaggccggttcaccatctccagagataatagcaagaacaccgtggtgctgcaaatgaactctctgagagccgaggatacagccctgtactattgtgccgctgaccggaagtccgtgatgagcatcagacccgattactggggacagggcacactggtcacagtgtctagtggatccggcggcggaggatctggcggaggcggatctgggggcggaggctctttcgaagaagttcagctggtggaatctggccctggcctggtcaagcctagcgagacactgagcctgacctgtaccgtgtccggcttcagcctgaccagatttggcgtgcactgggtccgacagccacctggcaaaggactggaatggctgggagtgatttggagaggcggcagcaccgattacaacgccgccttcatgagccggctgaccatcagcaaggacaacagcaagaaccaggtgtccctgaagctgagcagcgtgacagccgctgataccgccgtgtactactgctccaaccactactacggcagctccgactacgccctggataattggggccagggaaccctggtcaccgtgtcatctacgcgtgaggacctgaagaacgtgttcccacctgaggtggccgtgttcgagcctagcaaggccgagatcgcccacacccagaaagccaccctcgtgtgcctggctaccggcttctaccccgaccatgtggaactgtcttggtgggtcaacggcaaagaggtgcacagcggcgtgtgtaccgacccccagccactgaaagaacagcccgccctgaacgacagccggtactgcctgagcagcagactgagagtgtccgccaccttctggcagaacccccggaaccacttcagatgccaggtgcagttctacggcctgagcgagaacgacgagtggacccaggacagagccaagcccgtgacccagatcgtgtctgccgaagcctggggcagagccgattgcggcatcaccagcgccagctaccaccagggcgtgctgagcgccaccatcctgtacgagatcctgctgggcaaggccaccctgtacgccgtgctggtgtctgccctggtgctgatggctatggtcaagcggaaggacagccgggga

SEQ ID NO: 35424 - DNA, 2301 bp, synthetic construct
  source 1..2301: mol_type = other DNA
atggccttaccagtgaccgccttgctcctgccgctggccttgctgctccacgccgccaggccgcaggttcagctgcaagagtctggccctggcctggtcaagcctagccaaacactgagcctgacctgtaccgtgtctggcggctctatcaccaccggcgagttctactggaactggttcagacagcctcctggcaaaggactggaatggatgggagccattgccgccagcggcagcacaacatacagccctagcttcgagagccggaccagcatcagcagagacaccagcaagaatcagttcagcctgaagctgagcagcgtgacagccgccgatacagccgtgtattactgcggcagatcctttggagtggccgccgtgacaaccggccagaatagaggacagggcaccctggtcacagtgtctagcggtaccggcggaggcggatctggcggcggaggtagcggtggcggaggatctgaattcgacatccagatgacacagagccctagcagcctgtctgccagcgtgggagacagagtgaccatcacctgtagagccagccaggacgtgcggaacatcgtcgtgtggttccagcagaagcctggcaaggcccctaagctgctgatctacagcggcagctacagatacagcggcgtgcccagcagattttccggctctggctctggcaccgacttcaccctgacaatatccagcctccagcctgaggacttcgccacctactactgccagcagcactacagccctccatacacattcggccagggcaccaaggtggaaatcaagagactcgagatccagaaccctgatcctgccgtgtaccagctgcgggatagcaagagcagcgacaagagcgtgtgtctgttcaccgacttcgacagccagaccaacgtgtcccagagcaaggactccgacgtgtacatcaccgataagtgcgtgctggacatgcggagcatggacttcaagagcaactccgccgtggcctggtccaacaagtccgatttcgcctgcgccaacgccttcaacaacagcattatccccgaggacacattcttcccaagcagcgacgtgccctgcgacgtgaagctggtggaaaagagcttcgagacagacaccaacctgaacttccagaacctgagcgtgatcggcttcagaatcctgctgctgaaagtggccggctttaacctgctgatgaccctgcggctgtggtccagccgcgccaagagaagcggatctggcgtgaagcagaccctgaatttcgacctgctgaagctggctggcgacgtggaatccaacccaggccctactagtaccatggactggatttggcgcatccttttccttgtcggcgctgctaccggcgcccattccttcgaagaagttcagctggtggaatctggccctggcctggtcaagcctagcgagacactgagcctgacctgtaccgtgtccggcttcagcctgaccagatttggcgtgcactgggtccgacagccacctggcaaaggactggaatggctgggagtgatttggagaggcggcagcaccgattacaacgccgccttcatgagccggctgaccatcagcaaggacaacagcaagaaccaggtgtccctgaagctgagcagcgtgacagccgctgataccgccgtgtactactgctccaaccactactacggcagctccgactacgccctggataattggggccagggaaccctggtcaccgtgtcatctacgcgtgaggacctgaagaacgtgttcccacctgaggtggccgtgttcgagcctagcaaggccgagatcgcccacacccagaaagccaccctcgtgtgcctggctaccggcttctaccccgaccatgtggaactgtcttggtgggtcaacggcaaagaggtgcacagcggcgtgtgtaccgacccccagccactgaaagaacagcccgccctgaacgacagccggtactgcctgagcagcagactgagagtgtccgccaccttctggcagaacccccggaaccacttcagatgccaggtgcagttctacggcctgagcgagaacgacgagtggacccaggacagagccaagcccgtgacccagatcgtgtctgccgaagcctggggcagagccgattgcggcatcaccagcgccagctaccaccagggcgtgctgagcgccaccatcctgtacgagatcctgctgggcaaggccaccctgtacgccgtgctggtgtctgccctggtgctgatggctatggtcaagcggaaggacagccgggga

SEQ ID NO: 35425 - DNA, 2700 bp, synthetic construct
  source 1..2700: mol_type = other DNA
atggccttaccagtgaccgccttgctcctgccgctggccttgctgctccacgccgccaggccggaagtgcagctggttgaatctggcggaggactggttcaggctggcggatctctgagactgtcttgtgccgccagcggcagaacctttagcatgggctggtttagacaggcccctggcaaagagagagagttcgtcgccgccatcacatactctggcggcagcccttactacgccgactctgtgaagggcagattcaccatcagccgggacaacgccaagaacaccgtgtacctccagatgaacagcctgaagcctgaggacaccgccgtgtactactgcgccgccaatccaacatacggcagcgactggaacgccgagaattggggccagggaacccaagtgacagtgtctagcggtaccggcggaggcggatctggcggcggaggtagcggtggcggaggatctgaattcgacatccagatgacacagagccctagcagcctgtctgccagcgtgggagacagagtgaccatcacctgtagagccagccaggacgtgcggaacatcgtcgtgtggttccagcagaagcctggcaaggcccctaagctgctgatctacagcggcagctacagatacagcggcgtgcccagcagattttccggctctggctctggcaccgacttcaccctgacaatatccagcctccagcctgaggacttcgccacctactactgccagcagcactacagccctccatacacattcggccagggcaccaaggtggaaatcaagagactcgaggacctgaagaacgtgttcccacctgaggtggccgtgttcgagcctagcgaggccgagatcagccacacccagaaagccaccctcgtgtgcctggctaccggcttctaccccgaccatgtggaactgtcttggtgggtcaacggcaaagaggtgcacagcggcgtgtgtaccgacccccagccactgaaagaacagcccgccctgaacgacagccggtactgcctgagcagcagactgagagtgtccgccaccttctggcagaacccccggaaccacttcagatgccaggtgcagttctacggcctgagcgagaacgacgagtggacccaggacagagccaagcccgtgacccagatcgtgtctgccgaagcctggggcagagccgattgcggctttaccagcgagagctaccagcagggcgtgctgagcgccaccatcctgtacgagatcctgctgggcaaggccaccctgtacgccgtgctggtgtctgccctggtgctgatggctatggtcaagcggaaggacagccggggaagggccaagcgatctggatctggagcaacaaacttctcactactcaaacaagcaggtgacgtggaggagaatcccgggcctactagtaccatggactggatttggcgcatccttttccttgtcggcgctgctaccggcgcccattccgggccccaggtgcagctccaagaaagcggacccggactggttaagccctctcagaccctgtctctgacctgcacagttagcggagccagcattaccacaggcgagtattattggaattggtttcggcagccaccaggcaaggggcttgagtggatgggtgctattgctgcctctggcagcaccacctactctcccagctttgagagcagaacctccatcagccgggacacctccaaaaaccagttctctctgaagctgtcctccgtgaccgctgctgacaccgccgtctattattgtggccggtctttcggcgtggcagctgtgaccacaggacagaacagaggccagggaacacttgtgaccgtgtcctctggatccggcggcggaggatctggcggaggcggatctgggggcggaggctctttcgaagaagttcagctggtggaatctggccctggcctggtcaagcctagcgagacactgagcctgacctgtaccgtgtccggcttcagcctgaccagatttggcgtgcactgggtccgacagccacctggcaaaggactggaatggctgggagtgatttggagaggcggcagcaccgattacaacgccgccttcatgagccggctgaccatcagcaaggacaacagcaagaaccaggtgtccctgaagctgagcagcgtgacagccgctgataccgccgtgtactactgctccaaccactactacggcagctccgactacgccctggataattggggccagggaaccctggtcaccgtgtcatctacgcgtatccagaaccctgatcctgccgtgtaccagctgcgggatagcaagagcagcgacaagagcgtgtgtctgttcaccgacttcgacagccagaccaacgtgtcccagagcaaggactccgacgtgtacatcaccgataagtgcgtgctggacatgcggagcatggacttcaagagcaactccgccgtggcctggtccaacaagtccgatttcgcctgcgccaacgccttcaacaacagcattatccccgaggacacattcttcccaagccccgagagcagctgcgacgtgaagctggtggaaaagagcttcgagacagacaccaacctgaacttccagaacctgagcgtgatcggcttcagaatcctgctgctgaaagtggccggctttaacctgctgatgaccctgcggctgtggtccagc

SEQ ID NO: 35426 - DNA, 2721 bp, synthetic construct
  source 1..2721: mol_type = other DNA
atggccttaccagtgaccgccttgctcctgccgctggccttgctgctccacgccgccaggccggaagtgcagctggttgaatctggcggaggactggttcaggctggcggatctctgagactgtcttgtgccgccagcggcagaacctttagcatgggctggtttagacaggcccctggcaaagagagagagttcgtcgccgccatcacatactctggcggcagcccttactacgccgactctgtgaagggcagattcaccatcagccgggacaacgccaagaacaccgtgtacctccagatgaacagcctgaagcctgaggacaccgccgtgtactactgcgccgccaatccaacatacggcagcgactggaacgccgagaattggggccagggaacccaagtgacagtgtctagcggtaccggcggaggcggatctggcggcggaggtagcggtggcggaggatctgaattcgacatccagatgacacagagccctagcagcctgtctgccagcgtgggagacagagtgaccatcacctgtagagccagccaggacgtgcggaacatcgtcgtgtggttccagcagaagcctggcaaggcccctaagctgctgatctacagcggcagctacagatacagcggcgtgcccagcagattttccggctctggctctggcaccgacttcaccctgacaatatccagcctccagcctgaggacttcgccacctactactgccagcagcactacagccctccatacacattcggccagggcaccaaggtggaaatcaagagactcgagatccagaaccctgatcctgccgtgtaccagctgcgggatagcaagagcagcgacaagagcgtgtgtctgttcaccgacttcgacagccagaccaacgtgtcccagagcaaggactccgacgtgtacatcaccgataagtgcgtgctggacatgcggagcatggacttcaagagcaactccgccgtggcctggtccaacaagtccgatttcgcctgcgccaacgccttcaacaacagcattatccccgaggacacattcttcccaagcagcgacgtgccctgcgacgtgaagctggtggaaaagagcttcgagacagacaccaacctgaacttccagaacctgagcgtgatcggcttcagaatcctgctgctgaaagtggccggctttaacctgctgatgaccctgcggctgtggtccagccgcgccaagagaagcggatctggcgtgaagcagaccctgaatttcgacctgctgaagctggctggcgacgtggaatccaacccaggccctactagtaccatggactggatttggcgcatccttttccttgtcggcgctgctaccggcgcccattccgggccccaggtgcagctggttgaatctggcggaggactggttcagcctggcggatctctgagactgtcttgtgccgccagcggcaacatcaacagcagaaactgcatgggctggttcagacaggcccctggcaagggaagagaaggcgtggcagctatcggccaagtgaccggcagaacctactacgtggacagcgtgaagggcagattcaccatcagcctggacaacagcaagaacaccctgtacctccagatgaacagcctgagagccgaggacaccgccgtgtactattgtgctgctgcccctggctgtctgctgtctgcacttagaagcgccgactacagaaactggggccagggcacactggtcaccgtttcttctggatccggcggcggaggatctggcggaggcggatctgggggcggaggctctttcgaagaagttcagctggtggaatctggccctggcctggtcaagcctagcgagacactgagcctgacctgtaccgtgtccggcttcagcctgaccagatttggcgtgcactgggtccgacagccacctggcaaaggactggaatggctgggagtgatttggagaggcggcagcaccgattacaacgccgccttcatgagccggctgaccatcagcaaggacaacagcaagaaccaggtgtccctgaagctgagcagcgtgacagccgctgataccgccgtgtactactgctccaaccactactacggcagctccgactacgccctggataattggggccagggaaccctggtcaccgtgtcatctacgcgtgaggacctgaagaacgtgttcccacctgaggtggccgtgttcgagcctagcaaggccgagatcgcccacacccagaaagccaccctcgtgtgcctggctaccggcttctaccccgaccatgtggaactgtcttggtgggtcaacggcaaagaggtgcacagcggcgtgtgtaccgacccccagccactgaaagaacagcccgccctgaacgacagccggtactgcctgagcagcagactgagagtgtccgccaccttctggcagaacccccggaaccacttcagatgccaggtgcagttctacggcctgagcgagaacgacgagtggacccaggacagagccaagcccgtgacccagatcgtgtctgccgaagcctggggcagagccgattgcggcatcaccagcgccagctaccaccagggcgtgctgagcgccaccatcctgtacgagatcctgctgggcaaggccaccctgtacgccgtgctggtgtctgccctggtgctgatggctatggtcaagcggaaggacagccgggga

SEQ ID NO: 35427 - DNA, 2709 bp, synthetic construct
  source 1..2709: mol_type = other DNA
atggccttaccagtgaccgccttgctcctgccgctggccttgctgctccacgccgccaggccggaagtgcagctggttgaatctggcggaggactggttcaggctggcggatctctgagactgtcttgtgccgccagcggcagaacctttagcatgggctggtttagacaggcccctggcaaagagagagagttcgtcgccgccatcacatactctggcggcagcccttactacgccgactctgtgaagggcagattcaccatcagccgggacaacgccaagaacaccgtgtacctccagatgaacagcctgaagcctgaggacaccgccgtgtactactgcgccgccaatccaacatacggcagcgactggaacgccgagaattggggccagggaacccaagtgacagtgtctagcggtaccggcggaggcggatctggcggcggaggtagcggtggcggaggatctgaattcgacatccagatgacacagagccctagcagcctgtctgccagcgtgggagacagagtgaccatcacctgtagagccagccaggacgtgcggaacatcgtcgtgtggttccagcagaagcctggcaaggcccctaagctgctgatctacagcggcagctacagatacagcggcgtgcccagcagattttccggctctggctctggcaccgacttcaccctgacaatatccagcctccagcctgaggacttcgccacctactactgccagcagcactacagccctccatacacattcggccagggcaccaaggtggaaatcaagagactcgaggacctgaagaacgtgttcccacctgaggtggccgtgttcgagcctagcgaggccgagatcagccacacccagaaagccaccctcgtgtgcctggctaccggcttctaccccgaccatgtggaactgtcttggtgggtcaacggcaaagaggtgcacagcggcgtgtgtaccgacccccagccactgaaagaacagcccgccctgaacgacagccggtactgcctgagcagcagactgagagtgtccgccaccttctggcagaacccccggaaccacttcagatgccaggtgcagttctacggcctgagcgagaacgacgagtggacccaggacagagccaagcccgtgacccagatcgtgtctgccgaagcctggggcagagccgattgcggctttaccagcgagagctaccagcagggcgtgctgagcgccaccatcctgtacgagatcctgctgggcaaggccaccctgtacgccgtgctggtgtctgccctggtgctgatggctatggtcaagcggaaggacagccggggaagggccaagcgatctggatctggagcaacaaacttctcactactcaaacaagcaggtgacgtggaggagaatcccgggcctactagtaccatggactggatttggcgcatccttttccttgtcggcgctgctaccggcgcccattccgggccccaggtgcagctggttgaatctggcggaggactggttcagcctggcggatctctgagactgtcttgtgccgccagcggcaacatcaacagcagaaactgcatgggctggttcagacaggcccctggcaagggaagagaaggcgtggcagctatcggccaagtgaccggcagaacctactacgtggacagcgtgaagggcagattcaccatcagcctggacaacagcaagaacaccctgtacctccagatgaacagcctgagagccgaggacaccgccgtgtactattgtgctgctgcccctggctgtctgctgtctgcacttagaagcgccgactacagaaactggggccagggcacactggtcaccgtttcttctggatccggcggcggaggatctggcggaggcggatctgggggcggaggctctttcgaagaagttcagctggtggaatctggccctggcctggtcaagcctagcgagacactgagcctgacctgtaccgtgtccggcttcagcctgaccagatttggcgtgcactgggtccgacagccacctggcaaaggactggaatggctgggagtgatttggagaggcggcagcaccgattacaacgccgccttcatgagccggctgaccatcagcaaggacaacagcaagaaccaggtgtccctgaagctgagcagcgtgacagccgctgataccgccgtgtactactgctccaaccactactacggcagctccgactacgccctggataattggggccagggaaccctggtcaccgtgtcatctacgcgtatccagaaccctgatcctgccgtgtaccagctgcgggatagcaagagcagcgacaagagcgtgtgtctgttcaccgacttcgacagccagaccaacgtgtcccagagcaaggactccgacgtgtacatcaccgataagtgcgtgctggacatgcggagcatggacttcaagagcaactccgccgtggcctggtccaacaagtccgatttcgcctgcgccaacgccttcaacaacagcattatccccgaggacacattcttcccaagccccgagagcagctgcgacgtgaagctggtggaaaagagcttcgagacagacaccaacctgaacttccagaacctgagcgtgatcggcttcagaatcctgctgctgaaagtggccggctttaacctgctgatgaccctgcggctgtggtccagc

SEQ ID NO: 35428 - DNA, 2709 bp, synthetic construct
  source 1..2709: mol_type = other DNA
atggccttaccagtgaccgccttgctcctgccgctggccttgctgctccacgccgccaggccggaagtgcaactggttgaatccggtggcggcctggtgcaagcaggcggatctctcagacttagctgtgccgcctccggcagaaccttcacaatgggatggtttaggcaggctccagggaaagagagagagttcgtcgccgccatctctctgtctcccacactggcctactacgccgactctgtgaaaggccggttcaccatctccagagataatgccaagaacaccgtggtgctgcaaatgaactctctgaaacccgaggatacagccctgtactattgtgccgctgaccggaagtccgtgatgagcatcagacccgattactggggacagggcacacaagtcacagtgtcctctggtaccggcggaggcggatctggcggcggaggtagcggtggcggaggatctgaattcgacatccagatgacacagagccctagcagcctgtctgccagcgtgggagacagagtgaccatcacctgtagagccagccaggacgtgcggaacatcgtcgtgtggttccagcagaagcctggcaaggcccctaagctgctgatctacagcggcagctacagatacagcggcgtgcccagcagattttccggctctggctctggcaccgacttcaccctgacaatatccagcctccagcctgaggacttcgccacctactactgccagcagcactacagccctccatacacattcggccagggcaccaaggtggaaatcaagagactcgaggacctgaagaacgtgttcccacctgaggtggccgtgttcgagcctagcgaggccgagatcagccacacccagaaagccaccctcgtgtgcctggctaccggcttctaccccgaccatgtggaactgtcttggtgggtcaacggcaaagaggtgcacagcggcgtgtgtaccgacccccagccactgaaagaacagcccgccctgaacgacagccggtactgcctgagcagcagactgagagtgtccgccaccttctggcagaacccccggaaccacttcagatgccaggtgcagttctacggcctgagcgagaacgacgagtggacccaggacagagccaagcccgtgacccagatcgtgtctgccgaagcctggggcagagccgattgcggctttaccagcgagagctaccagcagggcgtgctgagcgccaccatcctgtacgagatcctgctgggcaaggccaccctgtacgccgtgctggtgtctgccctggtgctgatggctatggtcaagcggaaggacagccggggaagggccaagcgatctggatctggagcaacaaacttctcactactcaaacaagcaggtgacgtggaggagaatcccgggcctactagtaccatggactggatttggcgcatccttttccttgtcggcgctgctaccggcgcccattccgggccccaggtgcagctggttgaatctggcggaggactggttcagcctggcggatctctgagactgtcttgtgccgccagcggcaacatcaacagcagaaactgcatgggctggttcagacaggcccctggcaagggaagagaaggcgtggcagctatcggccaagtgaccggcagaacctactacgtggacagcgtgaagggcagattcaccatcagcctggacaacagcaagaacaccctgtacctccagatgaacagcctgagagccgaggacaccgccgtgtactattgtgctgctgcccctggctgtctgctgtctgcacttagaagcgccgactacagaaactggggccagggcacactggtcaccgtttcttctggatccggcggcggaggatctggcggaggcggatctgggggcggaggctctttcgaagaagttcagctggtggaatctggccctggcctggtcaagcctagcgagacactgagcctgacctgtaccgtgtccggcttcagcctgaccagatttggcgtgcactgggtccgacagccacctggcaaaggactggaatggctgggagtgatttggagaggcggcagcaccgattacaacgccgccttcatgagccggctgaccatcagcaaggacaacagcaagaaccaggtgtccctgaagctgagcagcgtgacagccgctgataccgccgtgtactactgctccaaccactactacggcagctccgactacgccctggataattggggccagggaaccctggtcaccgtgtcatctacgcgtatccagaaccctgatcctgccgtgtaccagctgcgggatagcaagagcagcgacaagagcgtgtgtctgttcaccgacttcgacagccagaccaacgtgtcccagagcaaggactccgacgtgtacatcaccgataagtgcgtgctggacatgcggagcatggacttcaagagcaactccgccgtggcctggtccaacaagtccgatttcgcctgcgccaacgccttcaacaacagcattatccccgaggacacattcttcccaagccccgagagcagctgcgacgtgaagctggtggaaaagagcttcgagacagacaccaacctgaacttccagaacctgagcgtgatcggcttcagaatcctgctgctgaaagtggccggctttaacctgctgatgaccctgcggctgtggtccagc

SEQ ID NO: 35429 - DNA, 2721 bp, synthetic construct
  source 1..2721: mol_type = other DNA
atggccttaccagtgaccgccttgctcctgccgctggccttgctgctccacgccgccaggccgcaggttcagctgcaagagtctggccctggcctggtcaagcctagccaaacactgagcctgacctgtaccgtgtctggcggctctatcaccaccggcgagttctactggaactggttcagacagcctcctggcaaaggactggaatggatgggagccattgccgccagcggcagcacaacatacagccctagcttcgagagccggaccagcatcagcagagacaccagcaagaatcagttcagcctgaagctgagcagcgtgacagccgccgatacagccgtgtattactgcggcagatcctttggagtggccgccgtgacaaccggccagaatagaggacagggcaccctggtcacagtgtctagcggtaccggcggaggcggatctggcggcggaggtagcggtggcggaggatctgaattcgacatccagatgacacagagccctagcagcctgtctgccagcgtgggagacagagtgaccatcacctgtagagccagccaggacgtgcggaacatcgtcgtgtggttccagcagaagcctggcaaggcccctaagctgctgatctacagcggcagctacagatacagcggcgtgcccagcagattttccggctctggctctggcaccgacttcaccctgacaatatccagcctccagcctgaggacttcgccacctactactgccagcagcactacagccctccatacacattcggccagggcaccaaggtggaaatcaagagactcgaggacctgaagaacgtgttcccacctgaggtggccgtgttcgagcctagcgaggccgagatcagccacacccagaaagccaccctcgtgtgcctggctaccggcttctaccccgaccatgtggaactgtcttggtgggtcaacggcaaagaggtgcacagcggcgtgtgtaccgacccccagccactgaaagaacagcccgccctgaacgacagccggtactgcctgagcagcagactgagagtgtccgccaccttctggcagaacccccggaaccacttcagatgccaggtgcagttctacggcctgagcgagaacgacgagtggacccaggacagagccaagcccgtgacccagatcgtgtctgccgaagcctggggcagagccgattgcggctttaccagcgagagctaccagcagggcgtgctgagcgccaccatcctgtacgagatcctgctgggcaaggccaccctgtacgccgtgctggtgtctgccctggtgctgatggctatggtcaagcggaaggacagccggggaagggccaagcgatctggatctggagcaacaaacttctcactactcaaacaagcaggtgacgtggaggagaatcccgggcctactagtaccatggactggatttggcgcatccttttccttgtcggcgctgctaccggcgcccattccgggccccaggtgcagctggttgaatctggcggaggactggttcagcctggcggatctctgagactgtcttgtgccgccagcggcaacatcaacagcagaaactgcatgggctggttcagacaggcccctggcaagggaagagaaggcgtggcagctatcggccaagtgaccggcagaacctactacgtggacagcgtgaagggcagattcaccatcagcctggacaacagcaagaacaccctgtacctccagatgaacagcctgagagccgaggacaccgccgtgtactattgtgctgctgcccctggctgtctgctgtctgcacttagaagcgccgactacagaaactggggccagggcacactggtcaccgtttcttctggatccggcggcggaggatctggcggaggcggatctgggggcggaggctctttcgaagaagttcagctggtggaatctggccctggcctggtcaagcctagcgagacactgagcctgacctgtaccgtgtccggcttcagcctgaccagatttggcgtgcactgggtccgacagccacctggcaaaggactggaatggctgggagtgatttggagaggcggcagcaccgattacaacgccgccttcatgagccggctgaccatcagcaaggacaacagcaagaaccaggtgtccctgaagctgagcagcgtgacagccgctgataccgccgtgtactactgctccaaccactactacggcagctccgactacgccctggataattggggccagggaaccctggtcaccgtgtcatctacgcgtatccagaaccctgatcctgccgtgtaccagctgcgggatagcaagagcagcgacaagagcgtgtgtctgttcaccgacttcgacagccagaccaacgtgtcccagagcaaggactccgacgtgtacatcaccgataagtgcgtgctggacatgcggagcatggacttcaagagcaactccgccgtggcctggtccaacaagtccgatttcgcctgcgccaacgccttcaacaacagcattatccccgaggacacattcttcccaagccccgagagcagctgcgacgtgaagctggtggaaaagagcttcgagacagacaccaacctgaacttccagaacctgagcgtgatcggcttcagaatcctgctgctgaaagtggccggctttaacctgctgatgaccctgcggctgtggtccagc

SEQ ID NO: 35430 - DNA, 1464 bp, synthetic construct
  source 1..1464: mol_type = other DNA
atggccttaccagtgaccgccttgctcctgccgctggccttgctgctccacgccgccaggccggacatcgtgctgacccagagccctctgagcctggccgtgtctctgggacagcctgccatcatcagctgtagggccagccagagcgtgtcctttgccggcacctctctgatgcactggtatcaccagaagcccggccagcagcccagactgctgatctacagagccagcaacctggaagccggcgtgcccgatagattttccggcagcggcagcaagaccgacttcaccctgaccatcagccccgtggaagccgaagatgccgccacctactactgccagcagagcagagagtacccctacaccttcggcggaggcaccaagctggaaatcaagaggggcggaggcggaagtggaggcggaggatctggcggcggaggctctcaggtccaactggtgcagagcggagccgaggtcgtgaagcctggcgcttccgtgaagattagctgcaaagccagcggctacacctttaccggctactttatgcactgggtcaagcagagccctggccagagcctggaatggatcggcagaatccacccctacgacggcgacaccttctacaaccagaagttccagggcaaggccaccctgacagtggacaagagcagcaacaccgcccacatggaactgctgagcctgaccagcgaggacttcgccgtgtactactgcaccagatacgacggcagccgggctatggactattggggccagggcaccaccgtgaccgtgtctagtacgcgtaaaattgaagttatgtatcctcctccttacctagacaatgagaagagcaatggaaccattatccatgtgaaagggaaacacctttgtccaagtcccctatttcccggaccttctaagcccttttgggtgctggtggtggttgggggagtcctggcttgctatagcttgctagtaacagtggcctttattattttctgggtgaggagtaagaggagcaggctcctgcacagtgactacatgaacatgactccacgccgccccggacccacccgcaagcattaccagccctatgccccaccacgcgacttcgcagcctatcgctccagagtgaagttcagcaggagcgcagacgcccccgcgtaccagcagggccagaaccagctctataacgagctcaatctaggacgaagagaggagtacgatgttttggacaagagacgtggccgggaccctgagatggggggaaagccgagaaggaagaaccctcaggaaggcctgtacaatgaactgcagaaagataagatggcggaggcctacagtgagattgggatgaaaggcgagcgccggaggggcaaggggcacgatggcctttaccagggtctcagtacagccaccaaggacacctacgacgcccttcacatgcaggccctgccccctcgc

SEQ ID NO: 35431 - DNA, 1482 bp, synthetic construct
  source 1..1482: mol_type = other DNA
atggccttaccagtgaccgccttgctcctgccgctggccttgctgctccacgccgccaggccggacatcgtgctgacccagagccctctgagcctggccgtgtctctgggacagcctgccatcatcagctgtagggccagccagagcgtgtcctttgccggcacctctctgatgcactggtatcaccagaagcccggccagcagcccagactgctgatctacagagccagcaacctggaagccggcgtgcccgatagattttccggcagcggcagcaagaccgacttcaccctgaccatcagccccgtggaagccgaagatgccgccacctactactgccagcagagcagagagtacccctacaccttcggcggaggcaccaagctggaaatcaagaggggcggaggcggaagtggaggcggaggatctggcggcggaggctctcaggtccaactggtgcagagcggagccgaggtcgtgaagcctggcgcttccgtgaagattagctgcaaagccagcggctacacctttaccggctactttatgcactgggtcaagcagagccctggccagagcctggaatggatcggcagaatccacccctacgacggcgacaccttctacaaccagaagttccagggcaaggccaccctgacagtggacaagagcagcaacaccgcccacatggaactgctgagcctgaccagcgaggacttcgccgtgtactactgcaccagatacgacggcagccgggctatggactattggggccagggcaccaccgtgaccgtgtctagtacgcgtgcgaagcccaccacgacgccagcgccgcgaccaccaacaccggcgcccaccatcgcgtcgcagcccctgtccctgcgcccagaggcgtgccggccagcggcggggggcgcagtgcacacgagggggctggacttcgcctgtgacatctacatctgggcgcccttggccgggacttgtggggtccttctcctgtcactggttatcaccctttactgcaaacggggcagaaagaaactcctgtatatattcaaacaaccatttatgagaccagtacaaactactcaagaggaagatggctgtagctgccgatttccagaagaagaagaaggaggatgtgaactgagagtgaagttcagcaggagcgcagacgcccccgcgtaccagcagggccagaaccagctctataacgagctgaatctaggacgaagagaggagtacgatgttttggacaagagacgtggccgggaccctgagatggggggaaagccgagaaggaagaaccctcaggaaggcctgtacaatgaactgcagaaagataagatggcggaggcctacagtgagattgggatgaaaggcgagcgccggaggggcaaggggcacgatggcctttaccagggtctcagtacagccaccaaggacacctacgacgcccttcacatgcaggccctgccccctcgc

SEQ ID NO: 35432 - DNA, 1482 bp, synthetic construct
  source 1..1482: mol_type = other DNA
atggccttaccagtgaccgccttgctcctgccgctggccttgctgctccacgccgccaggccgcaggtccaactggtgcagagcggagccgaggtcgtgaagcctggcgcttccgtgaagattagctgcaaagccagcggctacacctttaccggctactttatgcactgggtcaagcagagccctggccagagcctggaatggatcggcagaatccacccctacgacggcgacaccttctacaaccagaagttccagggcaaggccaccctgacagtggacaagagcagcaacaccgcccacatggaactgctgagcctgaccagcgaggacttcgccgtgtactactgcaccagatacgacggcagccgggctatggactattggggccagggcaccaccgtgaccgtgtctagtggcggaggcggaagtggaggcggaggatctggcggcggaggctctgacatcgtgctgacccagagccctctgagcctggccgtgtctctgggacagcctgccatcatcagctgtagggccagccagagcgtgtcctttgccggcacctctctgatgcactggtatcaccagaagcccggccagcagcccagactgctgatctacagagccagcaacctggaagccggcgtgcccgatagattttccggcagcggcagcaagaccgacttcaccctgaccatcagccccgtggaagccgaagatgccgccacctactactgccagcagagcagagagtacccctacaccttcggcggaggcaccaagctggaaatcaagaggacgcgtgcgaagcccaccacgacgccagcgccgcgaccaccaacaccggcgcccaccatcgcgtcgcagcccctgtccctgcgcccagaggcgtgccggccagcggcggggggcgcagtgcacacgagggggctggacttcgcctgtgacatctacatctgggcgcccttggccgggacttgtggggtccttctcctgtcactggttatcaccctttactgcaaacggggcagaaagaaactcctgtatatattcaaacaaccatttatgagaccagtacaaactactcaagaggaagatggctgtagctgccgatttccagaagaagaagaaggaggatgtgaactgagagtgaagttcagcaggagcgcagacgcccccgcgtaccagcagggccagaaccagctctataacgagctgaatctaggacgaagagaggagtacgatgttttggacaagagacgtggccgggaccctgagatggggggaaagccgagaaggaagaaccctcaggaaggcctgtacaatgaactgcagaaagataagatggcggaggcctacagtgagattgggatgaaaggcgagcgccggaggggcaaggggcacgatggcctttaccagggtctcagtacagccaccaaggacacctacgacgcccttcacatgcaggccctgccccctcgc

SEQ ID NO: 35433 - DNA, 1881 bp, synthetic construct
  source 1..1881: mol_type = other DNA
atggccttaccagtgaccgccttgctcctgccgctggccttgctgctccacgccgccaggccggacatcgtgctgacccagagccctctgagcctggccgtgtctctgggacagcctgccatcatcagctgtagggccagccagagcgtgtcctttgccggcacctctctgatgcactggtatcaccagaagcccggccagcagcccagactgctgatctacagagccagcaacctggaagccggcgtgcccgatagattttccggcagcggcagcaagaccgacttcaccctgaccatcagccccgtggaagccgaagatgccgccacctactactgccagcagagcagagagtacccctacaccttcggcggaggcaccaagctggaaatcaagaggctcgagatccagaaccctgatcctgccgtgtaccagctgcgggatagcaagagcagcgacaagagcgtgtgtctgttcaccgacttcgacagccagaccaacgtgtcccagagcaaggactccgacgtgtacatcaccgataagtgcgtgctggacatgcggagcatggacttcaagagcaactccgccgtggcctggtccaacaagtccgatttcgcctgcgccaacgccttcaacaacagcattatccccgaggacacattcttcccaagcagcgacgtgccctgcgacgtgaagctggtggaaaagagcttcgagacagacaccaacctgaacttccagaacctgagcgtgatcggcttcagaatcctgctgctgaaagtggccggctttaacctgctgatgaccctgcggctgtggtccagccgcgccaagagaagcggatctggcgtgaagcagaccctgaatttcgacctgctgaagctggctggcgacgtggaatccaacccaggccctactagtatggactggatttggcgcatccttttccttgtcggcgctgctaccggcgcgcattccttcgaacaggtccaactggtgcagagcggagccgaggtcgtgaagcctggcgcttccgtgaagattagctgcaaagccagcggctacacctttaccggctactttatgcactgggtcaagcagagccctggccagagcctggaatggatcggcagaatccacccctacgacggcgacaccttctacaaccagaagttccagggcaaggccaccctgacagtggacaagagcagcaacaccgcccacatggaactgctgagcctgaccagcgaggacttcgccgtgtactactgcaccagatacgacggcagccgggctatggactattggggccagggcaccaccgtgaccgtgtctagtacgcgtgaggacctgaagaacgtgttcccacctgaggtggccgtgttcgagcctagcaaggccgagatcgcccacacccagaaagccaccctcgtgtgcctggctaccggcttctaccccgaccatgtggaactgtcttggtgggtcaacggcaaagaggtgcacagcggcgtgtgtaccgacccccagccactgaaagaacagcccgccctgaacgacagccggtactgcctgagcagcagactgagagtgtccgccaccttctggcagaacccccggaaccacttcagatgccaggtgcagttctacggcctgagcgagaacgacgagtggacccaggacagagccaagcccgtgacccagatcgtgtctgccgaagcctggggcagagccgattgcggcatcaccagcgccagctaccaccagggcgtgctgagcgccaccatcctgtacgagatcctgctgggcaaggccaccctgtacgccgtgctggtgtctgccctggtgctgatggctatggtcaagcggaaggacagccgggga

SEQ ID NO: 35434 - DNA, 1869 bp, synthetic construct
  source 1..1869: mol_type = other DNA
atggccttaccagtgaccgccttgctcctgccgctggccttgctgctccacgccgccaggccggacatcgtgctgacccagagccctctgagcctggccgtgtctctgggacagcctgccatcatcagctgtagggccagccagagcgtgtcctttgccggcacctctctgatgcactggtatcaccagaagcccggccagcagcccagactgctgatctacagagccagcaacctggaagccggcgtgcccgatagattttccggcagcggcagcaagaccgacttcaccctgaccatcagccccgtggaagccgaagatgccgccacctactactgccagcagagcagagagtacccctacaccttcggcggaggcaccaagctggaaatcaagaggctcgaggacctgaagaacgtgttcccacctgaggtggccgtgttcgagcctagcaaggccgagatcgcccacacccagaaagccaccctcgtgtgcctggctaccggcttctaccccgaccatgtggaactgtcttggtgggtcaacggcaaagaggtgcacagcggcgtgtgtaccgacccccagccactgaaagaacagcccgccctgaacgacagccggtactgcctgagcagcagactgagagtgtccgccaccttctggcagaacccccggaaccacttcagatgccaggtgcagttctacggcctgagcgagaacgacgagtggacccaggacagagccaagcccgtgacccagatcgtgtctgccgaagcctggggcagagccgattgcggcatcaccagcgccagctaccaccagggcgtgctgagcgccaccatcctgtacgagatcctgctgggcaaggccaccctgtacgccgtgctggtgtctgccctggtgctgatggctatggtcaagcggaaggacagccggggaagggccaagcgatctggatctggagcaacaaacttctcactactcaaacaagcaggtgacgtggaggagaatcccgggcctactagtatggactggatttggcgcatccttttccttgtcggcgctgctaccggcgcgcattccttcgaacaggtccaactggtgcagagcggagccgaggtcgtgaagcctggcgcttccgtgaagattagctgcaaagccagcggctacacctttaccggctactttatgcactgggtcaagcagagccctggccagagcctggaatggatcggcagaatccacccctacgacggcgacaccttctacaaccagaagttccagggcaaggccaccctgacagtggacaagagcagcaacaccgcccacatggaactgctgagcctgaccagcgaggacttcgccgtgtactactgcaccagatacgacggcagccgggctatggactattggggccagggcaccaccgtgaccgtgtctagtacgcgtatccagaaccctgatcctgccgtgtaccagctgcgggatagcaagagcagcgacaagagcgtgtgtctgttcaccgacttcgacagccagaccaacgtgtcccagagcaaggactccgacgtgtacatcaccgataagtgcgtgctggacatgcggagcatggacttcaagagcaactccgccgtggcctggtccaacaagtccgatttcgcctgcgccaacgccttcaacaacagcattatccccgaggacacattcttcccaagcagcgacgtgccctgcgacgtgaagctggtggaaaagagcttcgagacagacaccaacctgaacttccagaacctgagcgtgatcggcttcagaatcctgctgctgaaagtggccggctttaacctgctgatgaccctgcggctgtggtccagc

SEQ ID NO: 35435 - DNA, 1869 bp, synthetic construct
  source 1..1869: mol_type = other DNA
atggccttaccagtgaccgccttgctcctgccgctggccttgctgctccacgccgccaggccggacatcgtgctgacccagagccctctgagcctggccgtgtctctgggacagcctgccatcatcagctgtagggccagccagagcgtgtcctttgccggcacctctctgatgcactggtatcaccagaagcccggccagcagcccagactgctgatctacagagccagcaacctggaagccggcgtgcccgatagattttccggcagcggcagcaagaccgacttcaccctgaccatcagccccgtggaagccgaagatgccgccacctactactgccagcagagcagagagtacccctacaccttcggcggaggcaccaagctggaaatcaagaggctcgaggacctgaagaacgtgttcccacctgaggtggccgtgttcgagcctagcgaggccgagatcagccacacccagaaagccaccctcgtgtgcctggctaccggcttctaccccgaccatgtggaactgtcttggtgggtcaacggcaaagaggtgcacagcggcgtgtgtaccgacccccagccactgaaagaacagcccgccctgaacgacagccggtactgcctgagcagcagactgagagtgtccgccaccttctggcagaacccccggaaccacttcagatgccaggtgcagttctacggcctgagcgagaacgacgagtggacccaggacagagccaagcccgtgacccagatcgtgtctgccgaagcctggggcagagccgattgcggctttaccagcgagagctaccagcagggcgtgctgagcgccaccatcctgtacgagatcctgctgggcaaggccaccctgtacgccgtgctggtgtctgccctggtgctgatggctatggtcaagcggaaggacagccggggaagggccaagcgatctggatctggagcaacaaacttctcactactcaaacaagcaggtgacgtggaggagaatcccgggcctactagtatggactggatttggcgcatccttttccttgtcggcgctgctaccggcgcgcattccttcgaacaggtccaactggtgcagagcggagccgaggtcgtgaagcctggcgcttccgtgaagattagctgcaaagccagcggctacacctttaccggctactttatgcactgggtcaagcagagccctggccagagcctggaatggatcggcagaatccacccctacgacggcgacaccttctacaaccagaagttccagggcaaggccaccctgacagtggacaagagcagcaacaccgcccacatggaactgctgagcctgaccagcgaggacttcgccgtgtactactgcaccagatacgacggcagccgggctatggactattggggccagggcaccaccgtgaccgtgtctagtacgcgtatccagaaccctgatcctgccgtgtaccagctgcgggatagcaagagcagcgacaagagcgtgtgtctgttcaccgacttcgacagccagaccaacgtgtcccagagcaaggactccgacgtgtacatcaccgataagtgcgtgctggacatgcggagcatggacttcaagagcaactccgccgtggcctggtccaacaagtccgatttcgcctgcgccaacgccttcaacaacagcattatccccgaggacacattcttcccaagccccgagagcagctgcgacgtgaagctggtggaaaagagcttcgagacagacaccaacctgaacttccagaacctgagcgtgatcggcttcagaatcctgctgctgaaagtggccggctttaacctgctgatgaccctgcggctgtggtccagc

SEQ ID NO: 35436 - DNA, 1881 bp, synthetic construct
  source 1..1881: mol_type = other DNA
atggccttaccagtgaccgccttgctcctgccgctggccttgctgctccacgccgccaggccggacatcgtgctgacccagagccctctgagcctggccgtgtctctgggacagcctgccatcatcagctgtagggccagccagagcgtgtcctttgccggcacctctctgatgcactggtatcaccagaagcccggccagcagcccagactgctgatctacagagccagcaacctggaagccggcgtgcccgatagattttccggcagcggcagcaagaccgacttcaccctgaccatcagccccgtggaagccgaagatgccgccacctactactgccagcagagcagagagtacccctacaccttcggcggaggcaccaagctggaaatcaagaggctcgagatccagaaccctgatcctgccgtgtaccagctgcgggatagcaagagcagcgacaagagcgtgtgtctgttcaccgacttcgacagccagaccaacgtgtcccagagcaaggactccgacgtgtacatcaccgataagtgcgtgctggacatgcggagcatggacttcaagagcaactccgccgtggcctggtccaacaagtccgatttcgcctgcgccaacgccttcaacaacagcattatccccgaggacacattcttcccaagccccgagagcagctgcgacgtgaagctggtggaaaagagcttcgagacagacaccaacctgaacttccagaacctgagcgtgatcggcttcagaatcctgctgctgaaagtggccggctttaacctgctgatgaccctgcggctgtggtccagccgcgccaagagaagcggatctggcgtgaagcagaccctgaatttcgacctgctgaagctggctggcgacgtggaatccaacccaggccctactagtatggactggatttggcgcatccttttccttgtcggcgctgctaccggcgcgcattccttcgaacaggtccaactggtgcagagcggagccgaggtcgtgaagcctggcgcttccgtgaagattagctgcaaagccagcggctacacctttaccggctactttatgcactgggtcaagcagagccctggccagagcctggaatggatcggcagaatccacccctacgacggcgacaccttctacaaccagaagttccagggcaaggccaccctgacagtggacaagagcagcaacaccgcccacatggaactgctgagcctgaccagcgaggacttcgccgtgtactactgcaccagatacgacggcagccgggctatggactattggggccagggcaccaccgtgaccgtgtctagtacgcgtgaggacctgaagaacgtgttcccacctgaggtggccgtgttcgagcctagcgaggccgagatcagccacacccagaaagccaccctcgtgtgcctggctaccggcttctaccccgaccatgtggaactgtcttggtgggtcaacggcaaagaggtgcacagcggcgtgtgtaccgacccccagccactgaaagaacagcccgccctgaacgacagccggtactgcctgagcagcagactgagagtgtccgccaccttctggcagaacccccggaaccacttcagatgccaggtgcagttctacggcctgagcgagaacgacgagtggacccaggacagagccaagcccgtgacccagatcgtgtctgccgaagcctggggcagagccgattgcggctttaccagcgagagctaccagcagggcgtgctgagcgccaccatcctgtacgagatcctgctgggcaaggccaccctgtacgccgtgctggtgtctgccctggtgctgatggctatggtcaagcggaaggacagccgggga

SEQ ID NO: 35437 - DNA, 1917 bp, synthetic construct
  source 1..1917: mol_type = other DNA
atggccttaccagtgaccgccttgctcctgccgctggccttgctgctccacgccgccaggccgctcgaggaggacctgaagaacgtgttcccacctgaggtggccgtgttcgagcctagcaaggccgagatcgcccacacccagaaagccaccctcgtgtgcctggctaccggcttctaccccgaccatgtggaactgtcttggtgggtcaacggcaaagaggtgcacagcggcgtgtgtaccgacccccagccactgaaagaacagcccgccctgaacgacagccggtactgcctgagcagcagactgagagtgtccgccaccttctggcagaacccccggaaccacttcagatgccaggtgcagttctacggcctgagcgagaacgacgagtggacccaggacagagccaagcccgtgacccagatcgtgtctgccgaagcctggggcagagccgattgcggcatcaccagcgccagctaccaccagggcgtgctgagcgccaccatcctgtacgagatcctgctgggcaaggccaccctgtacgccgtgctggtgtctgccctggtgctgatggctatggtcaagcggaaggacagccggggaagggccaagcgatctggatctggagcaacaaacttctcactactcaaacaagcaggtgacgtggaggagaatcccgggcctactagcatggccttaccagtgaccgccttgctcctgccgctggccttgctgctccacgccgccaggccggacatcgtgctgacccagagccctctgagcctggccgtgtctctgggacagcctgccatcatcagctgtagggccagccagagcgtgtcctttgccggcacctctctgatgcactggtatcaccagaagcccggccagcagcccagactgctgatctacagagccagcaacctggaagccggcgtgcccgatagattttccggcagcggcagcaagaccgacttcaccctgaccatcagccccgtggaagccgaagatgccgccacctactactgccagcagagcagagagtacccctacaccttcggcggaggcaccaagctggaaatcaagaggggcggaggcggaagtggaggcggaggatctggcggcggaggctctcaggtccaactggtgcagagcggagccgaggtcgtgaagcctggcgcttccgtgaagattagctgcaaagccagcggctacacctttaccggctactttatgcactgggtcaagcagagccctggccagagcctggaatggatcggcagaatccacccctacgacggcgacaccttctacaaccagaagttccagggcaaggccaccctgacagtggacaagagcagcaacaccgcccacatggaactgctgagcctgaccagcgaggacttcgccgtgtactactgcaccagatacgacggcagccgggctatggactattggggccagggcaccaccgtgaccgtgtctagtacgcgtatccagaaccctgatcctgccgtgtaccagctgcgggatagcaagagcagcgacaagagcgtgtgtctgttcaccgacttcgacagccagaccaacgtgtcccagagcaaggactccgacgtgtacatcaccgataagtgcgtgctggacatgcggagcatggacttcaagagcaactccgccgtggcctggtccaacaagtccgatttcgcctgcgccaacgccttcaacaacagcattatccccgaggacacattcttcccaagcagcgacgtgccctgcgacgtgaagctggtggaaaagagcttcgagacagacaccaacctgaacttccagaacctgagcgtgatcggcttcagaatcctgctgctgaaagtggccggctttaacctgctgatgaccctgcggctgtggtccagc

SEQ ID NO: 35438 - DNA, 1938 bp, synthetic construct
  source 1..1938: mol_type = other DNA
atggccttaccagtgaccgccttgctcctgccgctggccttgctgctccacgccgccaggccgctcgagggctccggcgatcgccctgatcctgccgtgtaccagctgcgggatagcaagagcagcgacaagagcgtgtgtctgttcaccgacttcgacagccagaccaacgtgtcccagagcaaggactccgacgtgtacatcaccgataagtgcgtgctggacatgcggagcatggacttcaagagcaactccgccgtggcctggtccaacaagtccgatttcgcctgcgccaacgccttcaacaacagcattatccccgaggacacattcttcccaagccccgagagcagctgcgacgtgaagctggtggaaaagagcttcgagacagacaccaacctgaacttccagaacctgagcgtgatcggcttcagaatcctgctgctgaaagtggccggctttaacctgctgatgaccctgcggctgtggtccagctctagtcgcgccaagagaagcggatctggcgtgaagcagaccctgaatttcgacctgctgaagctggctggcgacgtggaatccaacccaggccccactagcatggccttaccagtgaccgccttgctcctgccgctggccttgctgctccacgccgccaggccggacatcgtgctgacccagagccctctgagcctggccgtgtctctgggacagcctgccatcatcagctgtagggccagccagagcgtgtcctttgccggcacctctctgatgcactggtatcaccagaagcccggccagcagcccagactgctgatctacagagccagcaacctggaagccggcgtgcccgatagattttccggcagcggcagcaagaccgacttcaccctgaccatcagccccgtggaagccgaagatgccgccacctactactgccagcagagcagagagtacccctacaccttcggcggaggcaccaagctggaaatcaagaggggcggaggcggaagtggaggcggaggatctggcggcggaggctctcaggtccaactggtgcagagcggagccgaggtcgtgaagcctggcgcttccgtgaagattagctgcaaagccagcggctacacctttaccggctactttatgcactgggtcaagcagagccctggccagagcctggaatggatcggcagaatccacccctacgacggcgacaccttctacaaccagaagttccagggcaaggccaccctgacagtggacaagagcagcaacaccgcccacatggaactgctgagcctgaccagcgaggacttcgccgtgtactactgcaccagatacgacggcagccgggctatggactattggggccagggcaccaccgtgaccgtgtctagtacgcgtgaggacctgaagaacgtgttcccacctgaggtggccgtgttcgagcctagcgaggccgagatcagccacacccagaaagccaccctcgtgtgcctggctaccggcttctaccccgaccatgtggaactgtcttggtgggtcaacggcaaagaggtgcacagcggcgtgtgtaccgacccccagccactgaaagaacagcccgccctgaacgacagccggtactgcctgagcagcagactgagagtgtccgccaccttctggcagaacccccggaaccacttcagatgccaggtgcagttctacggcctgagcgagaacgacgagtggacccaggacagagccaagcccgtgacccagatcgtgtctgccgaagcctggggcagagccgattgcggctttaccagcgagagctaccagcagggcgtgctgagcgccaccatcctgtacgagatcctgctgggcaaggccaccctgtacgccgtgctggtgtctgccctggtgctgatggctatggtcaagcggaaggacagccgggga

SEQ ID NO: 35439 - DNA, 1869 bp, synthetic construct
  source 1..1869: mol_type = other DNA
atggccttaccagtgaccgccttgctcctgccgctggccttgctgctccacgccgccaggccggacatcgtgctgacccagagccctctgagcctggccgtgtctctgggacagcctgccatcatcagctgtagggccagccagagcgtgtcctttgccggcacctctctgatgcactggtatcaccagaagcccggccagcagcccagactgctgatctacagagccagcaacctggaagccggcgtgcccgatagattttccggcagcggcagcaagaccgacttcaccctgaccatcagccccgtggaagccgaagatgccgccacctactactgccagcagagcagagagtacccctacaccttcggcggaggcaccaagctggaaatcaagaggctcgaggacctgaagaacgtgttcccacctgaggtggccgtgttcgagcctagcgaggccgagatcagccacacccagaaagccaccctcgtgtgcctggctaccggcttctaccccgaccatgtggaactgtcttggtgggtcaacggcaaagaggtgcacagcggcgtgtctaccgacccccagccactgaaagaacagcccgccctgaacgacagccggtactgcctgagcagcagactgagagtgtccgccaccttctggcagaacccccggaaccacttcagatgccaggtgcagttctacggcctgagcgagaacgacgagtggacccaggacagagccaagcccgtgacccagatcgtgtctgccgaagcctggggcagagccgattgcggctttaccagcgagagctaccagcagggcgtgctgagcgccaccatcctgtacgagatcctgctgggcaaggccaccctgtacgccgtgctggtgtctgccctggtgctgatggctatggtcaagcggaaggacagccggggaagggccaagcgatctggatctggagcaacaaacttctcactactcaaacaagcaggtgacgtggaggagaatcccgggcctactagtatggactggatttggcgcatccttttccttgtcggcgctgctaccggcgcgcattccttcgaacaggtccaactggtgcagagcggagccgaggtcgtgaagcctggcgcttccgtgaagattagctgcaaagccagcggctacacctttaccggctactttatgcactgggtcaagcagagccctggccagagcctggaatggatcggcagaatccacccctacgacggcgacaccttctacaaccagaagttccagggcaaggccaccctgacagtggacaagagcagcaacaccgcccacatggaactgctgagcctgaccagcgaggacttcgccgtgtactactgcaccagatacgacggcagccgggctatggactattggggccagggcaccaccgtgaccgtgtctagtacgcgtatccagaaccctgatcctgccgtgtaccagctgcgggatagcaagagcagcgacaagagcgtgtgtctgttcaccgacttcgacagccagaccaacgtgtcccagagcaaggactccgacgtgtacatcaccgataagaccgtgctggacatgcggagcatggacttcaagagcaactccgccgtggcctggtccaacaagtccgatttcgcctgcgccaacgccttcaacaacagcattatccccgaggacacattcttcccaagccccgagagcagctgcgacgtgaagctggtggaaaagagcttcgagacagacaccaacctgaacttccagaacctgagcgtgatcggcttcagaatcctgctgctgaaagtggccggctttaacctgctgatgaccctgcggctgtggtccagc

SEQ ID NO: 35440 - DNA, 1893 bp, synthetic construct
  source 1..1893: mol_type = other DNA
atggccttaccagtgaccgccttgctcctgccgctggccttgctgctccacgccgccaggccggacatcgtgctgacccagagccctctgagcctggccgtgtctctgggacagcctgccatcatcagctgtagggccagccagagcgtgtcctttgccggcacctctctgatgcactggtatcaccagaagcccggccagcagcccagactgctgatctacagagccagcaacctggaagccggcgtgcccgatagattttccggcagcggcagcaagaccgacttcaccctgaccatcagccccgtggaagccgaagatgccgccacctactactgccagcagagcagagagtacccctacaccttcggcggaggcaccaagctggaaatcaagaggctcgaggacaagcagctggacgccgacgtgtcccccaagcctaccatcttcctgccctctatcgccgagacaaagctccagaaggccggcacctacctgtgcctgctggaaaagttcttcccagatgtgattaagatccactggcaggaaaagaagtccaacaccatcctgggcagccaggaaggcaacaccatgaagaccaacgacacctacatgaagttcagctggctgaccgtgcccgagaagtccctggacaaagaacacagatgcatcgtgcggcacgaaaacaacaagaacggcgtggaccaggaaatcatcttcccacccatcaagaccgatgtgattacaatggaccccaaggacaactgctccaaggacgccaacgataccctgctgctccagctgaccaacaccagcgcctactacatgtacttgttgctgctgctgaagtccgtggtgtacttcgccatcatcacatgctgcctgctgcggagaaccgccttctgctgcaacggcgagaagtctagggccaagcgatctggatctggagcaacaaacttctcactactcaaacaagcaggtgacgtggaggagaatcccgggcctactagtatggactggatttggcgcatccttttccttgtcggcgctgctaccggcgcgcattccttcgaacaggtccaactggtgcagagcggagccgaggtcgtgaagcctggcgcttccgtgaagattagctgcaaagccagcggctacacctttaccggctactttatgcactgggtcaagcagagccctggccagagcctggaatggatcggcagaatccacccctacgacggcgacaccttctacaaccagaagttccagggcaaggccaccctgacagtggacaagagcagcaacaccgcccacatggaactgctgagcctgaccagcgaggacttcgccgtgtactactgcaccagatacgacggcagccgggctatggactattggggccagggcaccaccgtgaccgtgtctagtacgcgtagccagcctcacaccaagcccagcgtgttcgtgatgaagaacggcaccaacgtggcctgcctcgtgaaagagttctaccccaaggacatcaggatcaacctggtgtccagcaagaagatcaccgagttcgaccccgccatcgtgatctcccccagcggcaagtacaacgccgtgaagctggggaagtacgaggacagcaacagcgtgacctgctccgtgcagcacgacaacaagaccgtgcacagcaccgactttgaagtgaaaaccgactccaccgaccacgtgaagcccaaagagacagagaacaccaagcagcccagcaagagctgccacaagcccaaggccatcgtgcacaccgagaaagtgaacatgatgagcctgaccgtgctgggcctgcggatgctgttcgccaaaaccgtggccgtgaacttcctgctgaccgccaagctgttcttcctc

SEQ ID NO: 35441 - DNA, 1893 bp, synthetic construct
  source 1..1893: mol_type = other DNA
atggccttaccagtgaccgccttgctcctgccgctggccttgctgctccacgccgccaggccggacatcgtgctgacccagagccctctgagcctggccgtgtctctgggacagcctgccatcatcagctgtagggccagccagagcgtgtcctttgccggcacctctctgatgcactggtatcaccagaagcccggccagcagcccagactgctgatctacagagccagcaacctggaagccggcgtgcccgatagattttccggcagcggcagcaagaccgacttcaccctgaccatcagccccgtggaagccgaagatgccgccacctactactgccagcagagcagagagtacccctacaccttcggcggaggcaccaagctggaaatcaagaggctcgagagccagcctcacaccaagcccagcgtgttcgtgatgaagaacggcaccaacgtggcctgcctcgtgaaagagttctaccccaaggacatcaggatcaacctggtgtccagcaagaagatcaccgagttcgaccccgccatcgtgatctcccccagcggcaagtacaacgccgtgaagctggggaagtacgaggacagcaacagcgtgacctgctccgtgcagcacgacaacaagaccgtgcacagcaccgactttgaagtgaaaaccgactccaccgaccacgtgaagcccaaagagacagagaacaccaagcagcccagcaagagctgccacaagcccaaggccatcgtgcacaccgagaaagtgaacatgatgagcctgaccgtgctgggcctgcggatgctgttcgccaaaaccgtggccgtgaacttcctgctgaccgccaagctgttcttcctcagggccaagcgatctggatctggagcaacaaacttctcactactcaaacaagcaggtgacgtggaggagaatcccgggcctactagtatggactggatttggcgcatccttttccttgtcggcgctgctaccggcgcgcattccttcgaacaggtccaactggtgcagagcggagccgaggtcgtgaagcctggcgcttccgtgaagattagctgcaaagccagcggctacacctttaccggctactttatgcactgggtcaagcagagccctggccagagcctggaatggatcggcagaatccacccctacgacggcgacaccttctacaaccagaagttccagggcaaggccaccctgacagtggacaagagcagcaacaccgcccacatggaactgctgagcctgaccagcgaggacttcgccgtgtactactgcaccagatacgacggcagccgggctatggactattggggccagggcaccaccgtgaccgtgtctagtacgcgtgacaagcagctggacgccgacgtgtcccccaagcctaccatcttcctgccctctatcgccgagacaaagctccagaaggccggcacctacctgtgcctgctggaaaagttcttcccagatgtgattaagatccactggcaggaaaagaagtccaacaccatcctgggcagccaggaaggcaacaccatgaagaccaacgacacctacatgaagttcagctggctgaccgtgcccgagaagtccctggacaaagaacacagatgcatcgtgcggcacgaaaacaacaagaacggcgtggaccaggaaatcatcttcccacccatcaagaccgatgtgattacaatggaccccaaggacaactgctccaaggacgccaacgataccctgctgctccagctgaccaacaccagcgcctactacatgtacttgttgctgctgctgaagtccgtggtgtacttcgccatcatcacatgctgcctgctgcggagaaccgccttctgctgcaacggcgagaagtct

SEQ ID NO: 35442 - DNA, 1938 bp, synthetic construct
  source 1..1938: mol_type = other DNA
atggccttaccagtgaccgccttgctcctgccgctggccttgctgctccacgccgccaggccgctcgaggacaagcagctggacgccgacgtgtcccccaagcctaccatcttcctgccctctatcgccgagacaaagctccagaaggccggcacctacctgtgcctgctggaaaagttcttcccagatgtgattaagatccactggcaggaaaagaagtccaacaccatcctgggcagccaggaaggcaacaccatgaagaccaacgacacctacatgaagttcagctggctgaccgtgcccgagaagtccctggacaaagaacacagatgcatcgtgcggcacgaaaacaacaagaacggcgtggaccaggaaatcatcttcccacccatcaagaccgatgtgattacaatggaccccaaggacaactgctccaaggacgccaacgataccctgctgctccagctgaccaacaccagcgcctactacatgtacttgttgctgctgctgaagtccgtggtgtacttcgccatcatcacatgctgcctgctgcggagaaccgccttctgctgcaacggcgagaagtctagggccaagcgatctggatctggagcaacaaacttctcactactcaaacaagcaggtgacgtggaggagaatcccgggcctactagcatggccttaccagtgaccgccttgctcctgccgctggccttgctgctccacgccgccaggccggacatcgtgctgacccagagccctctgagcctggccgtgtctctgggacagcctgccatcatcagctgtagggccagccagagcgtgtcctttgccggcacctctctgatgcactggtatcaccagaagcccggccagcagcccagactgctgatctacagagccagcaacctggaagccggcgtgcccgatagattttccggcagcggcagcaagaccgacttcaccctgaccatcagccccgtggaagccgaagatgccgccacctactactgccagcagagcagagagtacccctacaccttcggcggaggcaccaagctggaaatcaagaggggcggaggcggaagtggaggcggaggatctggcggcggaggctctcaggtccaactggtgcagagcggagccgaggtcgtgaagcctggcgcttccgtgaagattagctgcaaagccagcggctacacctttaccggctactttatgcactgggtcaagcagagccctggccagagcctggaatggatcggcagaatccacccctacgacggcgacaccttctacaaccagaagttccagggcaaggccaccctgacagtggacaagagcagcaacaccgcccacatggaactgctgagcctgaccagcgaggacttcgccgtgtactactgcaccagatacgacggcagccgggctatggactattggggccagggcaccaccgtgaccgtgtctagtacgcgtagccagcctcacaccaagcccagcgtgttcgtgatgaagaacggcaccaacgtggcctgcctcgtgaaagagttctaccccaaggacatcaggatcaacctggtgtccagcaagaagatcaccgagttcgaccccgccatcgtgatctcccccagcggcaagtacaacgccgtgaagctggggaagtacgaggacagcaacagcgtgacctgctccgtgcagcacgacaacaagaccgtgcacagcaccgactttgaagtgaaaaccgactccaccgaccacgtgaagcccaaagagacagagaacaccaagcagcccagcaagagctgccacaagcccaaggccatcgtgcacaccgagaaagtgaacatgatgagcctgaccgtgctgggcctgcggatgctgttcgccaaaaccgtggccgtgaacttcctgctgaccgccaagctgttcttcctc

SEQ ID NO: 35443 - DNA, 2400 bp, synthetic construct
  source 1..2400: mol_type = other DNA
atggccttaccagtgaccgccttgctcctgccgctggccttgctgctccacgccgccaggccggacatcgtgctgacccagagccctctgagcctggccgtgtctctgggacagcctgccatcatcagctgtagggccagccagagcgtgtcctttgccggcacctctctgatgcactggtatcaccagaagcccggccagcagcccagactgctgatctacagagccagcaacctggaagccggcgtgcccgatagattttccggcagcggcagcaagaccgacttcaccctgaccatcagccccgtggaagccgaagatgccgccacctactactgccagcagagcagagagtacccctacaccttcggcggaggcaccaagctggaaatcaagaggggacagcctaaggccaatcctaccgtgacactgttccctccaagcagcgaagaactccaggccaacaaggccacacttgtgtgcctgatctccgacttctaccctggggctgtgacagtggcttggaaggccgatggatctcctgtgaaagccggcgtggaaaccaccaagccatccaagcagagcaacaacaaatacgccgccagctcctacctgagcctgacacctgagcagtggaagtcccacagatcctacagctgccaagtgacccacgaaggcagcaccgtggaaaagacagtggcccctacagagtgcagcggatcccagagcttcggcctgctggaccccaagctgtgctacctgctggatggcatcctgttcatctacggcgtgatcctgaccgccctgttcctgagagtgaagttcagcagaagcgccgacgcccctgcctaccagcagggacagaaccaactgtacaacgagctgaacctgggcagacgggaagagtacgacgtgctggacaagcggagaggcagggaccctgagatgggcggaaagccccagcggagaaagaacccccaggaaggactgtataacgaactccagaaagacaagatggccgaagcctacagcgagatcggcatgaagggcgagcggagaagaggcaagggccacgatggcctgtaccagggcctgagcaccgccaccaaggacacctatgacgccctgcacatgcaggccctgcctccaagaagggccaagcgatctggatctggagcaacaaacttctcactactcaaacaagcaggtgacgtggaggagaatcccgggcctactagtatggactggatttggcgcatccttttccttgtcggcgctgctaccggcgcgcattccttcgaacaggtccaactggtgcagagcggagccgaggtcgtgaagcctggcgcttccgtgaagattagctgcaaagccagcggctacacctttaccggctactttatgcactgggtcaagcagagccctggccagagcctggaatggatcggcagaatccacccctacgacggcgacaccttctacaaccagaagttccagggcaaggccaccctgacagtggacaagagcagcaacaccgcccacatggaactgctgagcctgaccagcgaggacttcgccgtgtactactgcaccagatacgacggcagccgggctatggactattggggccagggcaccaccgtgaccgtgtctagtgcctctacaaagggaccctccgtgtttcctctggctcccagcagcaagtctacaagcggaggaacagccgctctgggctgcctggtcaaggattactttcccgagcctgtgaccgtgtcctggaatagcggagcactgacaagcggcgtgcacacctttccagccgtgctgcaaagcagcggcctgtactctctgagcagcgtggtcacagtgcctagctctagcctgggcacccagacctacatctgcaatgtgaaccacaagcctagcaacaccaaggtggacaagagagtggaacccaagagctgtggtacccagagttttgggttgttggaccctaaattgtgctatctgttggacggaatcctgttcatttacggagtgatcctgaccgcattgttcctgcgggttaagttttccagatccgcagacgcacccgcttaccaacaagggcagaaccaactctacaatgaacttaatttggggcggagggaagagtacgacgttctggacaaaaggaggggacgagatcccgagatgggcggaaagcctcagcgaaggaagaatccgcaagaggggctttataacgaactccagaaagataaaatggcagaagcctatagtgagattgggatgaagggagaaaggaggaggggtaaaggtcacgatgggttgtaccaaggattgagcacagccactaaagatacctatgatgcgctccacatgcaggccctgccgccaaga

SEQ ID NO: 35444 - DNA, 2457 bp, synthetic construct
  source 1..2457: mol_type = other DNA
atggccttaccagtgaccgccttgctcctgccgctggccttgctgctccacgccgccaggccggacatcgtgctgacccagagccctctgagcctggccgtgtctctgggacagcctgccatcatcagctgtagggccagccagagcgtgtcctttgccggcacctctctgatgcactggtatcaccagaagcccggccagcagcccagactgctgatctacagagccagcaacctggaagccggcgtgcccgatagattttccggcagcggcagcaagaccgacttcaccctgaccatcagccccgtggaagccgaagatgccgccacctactactgccagcagagcagagagtacccctacaccttcggcggaggcaccaagctggaaatcaagaggctcgaggacctgaagaacgtgttcccacctgaggtggccgtgttcgagcctagcgaggccgagatcagccacacccagaaagccaccctcgtgtgcctggctaccggcttctaccccgaccatgtggaactgtcttggtgggtcaacggcaaagaggtgcacagcggcgtgtctaccgacccccagccactgaaagaacagcccgccctgaacgacagccggtactgcctgagcagcagactgagagtgtccgccaccttctggcagaacccccggaaccacttcagatgccaggtgcagttctacggcctgagcgagaacgacgagtggacccaggacagagccaagcccgtgacccagatcgtgtctgccgaagcctggggcagagccgattgcggatcccagagcttcggcctgctggaccccaagctgtgctacctgctggatggcatcctgttcatctacggcgtgatcctgaccgccctgttcctgagagtgaagttcagcagaagcgccgacgcccctgcctaccagcagggacagaaccaactgtacaacgagctgaacctgggcagacgggaagagtacgacgtgctggacaagcggagaggcagggaccctgagatgggcggaaagccccagcggagaaagaacccccaggaaggactgtataacgaactccagaaagacaagatggccgaagcctacagcgagatcggcatgaagggcgagcggagaagaggcaagggccacgatggcctgtaccagggcctgagcaccgccaccaaggacacctatgacgccctgcacatgcaggccctgcctccaagaagggccaagcgatctggatctggagcaacaaacttctcactactcaaacaagcaggtgacgtggaggagaatcccgggcctactagtatggactggatttggcgcatccttttccttgtcggcgctgctaccggcgcgcattccttcgaacaggtccaactggtgcagagcggagccgaggtcgtgaagcctggcgcttccgtgaagattagctgcaaagccagcggctacacctttaccggctactttatgcactgggtcaagcagagccctggccagagcctggaatggatcggcagaatccacccctacgacggcgacaccttctacaaccagaagttccagggcaaggccaccctgacagtggacaagagcagcaacaccgcccacatggaactgctgagcctgaccagcgaggacttcgccgtgtactactgcaccagatacgacggcagccgggctatggactattggggccagggcaccaccgtgaccgtgtctagtacgcgtatccagaaccctgatcctgccgtgtaccagctgcgggatagcaagagcagcgacaagagcgtgtgtctgttcaccgacttcgacagccagaccaacgtgtcccagagcaaggactccgacgtgtacatcaccgataagaccgtgctggacatgcggagcatggacttcaagagcaactccgccgtggcctggtccaacaagtccgatttcgcctgcgccaacgccttcaacaacagcattatccccgaggacacattcttcccaagccccgagagcagctgcggtacccagagttttgggttgttggaccctaaattgtgctatctgttggacggaatcctgttcatttacggagtgatcctgaccgcattgttcctgcgggttaagttttccagatccgcagacgcacccgcttaccaacaagggcagaaccaactctacaatgaacttaatttggggcggagggaagagtacgacgttctggacaaaaggaggggacgagatcccgagatgggcggaaagcctcagcgaaggaagaatccgcaagaggggctttataacgaactccagaaagataaaatggcagaagcctatagtgagattgggatgaagggagaaaggaggaggggtaaaggtcacgatgggttgtaccaaggattgagcacagccactaaagatacctatgatgcgctccacatgcaggccctgccgccaaga

SEQ ID NO: 35445 - DNA, 2583 bp, synthetic construct
  source 1..2583: mol_type = other DNA
atggccttaccagtgaccgccttgctcctgccgctggccttgctgctccacgccgccaggccggacatcgtgctgacccagagccctctgagcctggccgtgtctctgggacagcctgccatcatcagctgtagggccagccagagcgtgtcctttgccggcacctctctgatgcactggtatcaccagaagcccggccagcagcccagactgctgatctacagagccagcaacctggaagccggcgtgcccgatagattttccggcagcggcagcaagaccgacttcaccctgaccatcagccccgtggaagccgaagatgccgccacctactactgccagcagagcagagagtacccctacaccttcggcggaggcaccaagctggaaatcaagaggctcgaggaggacctgaagaacgtgttcccacctgaggtggccgtgttcgagcctagcgaggccgagatcagccacacccagaaagccaccctcgtgtgcctggctaccggcttctaccccgaccatgtggaactgtcttggtgggtcaacggcaaagaggtgcacagcggcgtgtctaccgacccccagccactgaaagaacagcccgccctgaacgacagccggtactgcctgagcagcagactgagagtgtccgccaccttctggcagaacccccggaaccacttcagatgccaggtgcagttctacggcctgagcgagaacgacgagtggacccaggacagagccaagcccgtgacccagatcgtgtctgccgaagcctggggcagagccgattgcggatcccagagcttcggcctgctggaccccaagctgtgctacctgctggatggcatcctgttcatctacggcgtgatcctgaccgccctgttcctgagagtgaagttcagcagaagcgccgacgcccctgcctaccagcagggacagaaccaactgtacaacgagctgaacctgggcagacgggaagagtacgacgtgctggacaagcggagaggcagggaccctgagatgggcggaaagccccagcggagaaagaacccccaggaaggactgtataacgaactccagaaagacaagatggccgaagcctacagcgagatcggcatgaagggcgagcggagaagaggcaagggccacgatggcctgtaccagggcctgagcaccgccaccaaggacacctatgacgccctgcacatgcaggccctgcctccaagaagggccaagcgatctggatctggagcaacaaacttctcactactcaaacaagcaggtgacgtggaggagaatcccgggcctactagtatggactggatttggcgcatccttttccttgtcggcgctgctaccggcgcgcattccttcgaacaggtccaactggtgcagagcggagccgaggtcgtgaagcctggcgcttccgtgaagattagctgcaaagccagcggctacacctttaccggctactttatgcactgggtcaagcagagccctggccagagcctggaatggatcggcagaatccacccctacgacggcgacaccttctacaaccagaagttccagggcaaggccaccctgacagtggacaagagcagcaacaccgcccacatggaactgctgagcctgaccagcgaggacttcgccgtgtactactgcaccagatacgacggcagccgggctatggactattggggccagggcaccaccgtgaccgtgtctagtacgcgtatccagaaccctgatcctgccgtgtaccagctgcgggatagcaagagcagcgacaagagcgtgtgtctgttcaccgacttcgacagccagaccaacgtgtcccagagcaaggactccgacgtgtacatcaccgataagaccgtgctggacatgcggagcatggacttcaagagcaactccgccgtggcctggtccaacaagtccgatttcgcctgcgccaacgccttcaacaacagcattatccccgaggacacattcttcccaagccccgagagcagctgcggtacccagagttttgggttgttggaccctaaattgtgctatctgttggacggaatcctgttcatttacggagtgatcctgaccgcattgttcctgaggagcaagcggtcacggctgctccacagcgattacatgaatatgacaccacgaagaccgggtcctactcgcaaacactaccaaccctacgcacctccccgcgactttgcagcgtaccgatctcgggttaagttttccagatccgcagacgcacccgcttaccaacaagggcagaaccaactctacaatgaacttaatttggggcggagggaagagtacgacgttctggacaaaaggaggggacgagatcccgagatgggcggaaagcctcagcgaaggaagaatccgcaagaggggctttataacgaactccagaaagataaaatggcagaagcctatagtgagattgggatgaagggagaaaggaggaggggtaaaggtcacgatgggttgtaccaaggattgagcacagccactaaagatacctatgatgcgctccacatgcaggccctgccgccaaga

SEQ ID NO: 35446 - DNA, 2712 bp, synthetic construct
  source 1..2712: mol_type = other DNA
atggccttaccagtgaccgccttgctcctgccgctggccttgctgctccacgccgccaggccggacatcgtgctgacccagagccctctgagcctggccgtgtctctgggacagcctgccatcatcagctgtagggccagccagagcgtgtcctttgccggcacctctctgatgcactggtatcaccagaagcccggccagcagcccagactgctgatctacagagccagcaacctggaagccggcgtgcccgatagattttccggcagcggcagcaagaccgacttcaccctgaccatcagccccgtggaagccgaagatgccgccacctactactgccagcagagcagagagtacccctacaccttcggcggaggcaccaagctggaaatcaagaggctcgaggaggacctgaagaacgtgttcccacctgaggtggccgtgttcgagcctagcgaggccgagatcagccacacccagaaagccaccctcgtgtgcctggctaccggcttctaccccgaccatgtggaactgtcttggtgggtcaacggcaaagaggtgcacagcggcgtgtctaccgacccccagccactgaaagaacagcccgccctgaacgacagccggtactgcctgagcagcagactgagagtgtccgccaccttctggcagaacccccggaaccacttcagatgccaggtgcagttctacggcctgagcgagaacgacgagtggacccaggacagagccaagcccgtgacccagatcgtgtctgccgaagcctggggcagagccgattgcggatcccagagcttcggcctgctggaccccaagctgtgctacctgctggatggcatcctgttcatctacggcgtgatcctgaccgccctgttcctgaaacggggcagaaagaaactcctgtatatattcaaacaaccatttatgagaccagtacaaactactcaagaggaagatggctgtagctgccgatttccagaagaagaagaaggaggatgtgaactgagagtgaagttcagcagaagcgccgacgcccctgcctaccagcagggacagaaccaactgtacaacgagctgaacctgggcagacgggaagagtacgacgtgctggacaagcggagaggcagggaccctgagatgggcggaaagccccagcggagaaagaacccccaggaaggactgtataacgaactccagaaagacaagatggccgaagcctacagcgagatcggcatgaagggcgagcggagaagaggcaagggccacgatggcctgtaccagggcctgagcaccgccaccaaggacacctatgacgccctgcacatgcaggccctgcctccaagaagggccaagcgatctggatctggagcaacaaacttctcactactcaaacaagcaggtgacgtggaggagaatcccgggcctactagtatggactggatttggcgcatccttttccttgtcggcgctgctaccggcgcgcattccttcgaacaggtccaactggtgcagagcggagccgaggtcgtgaagcctggcgcttccgtgaagattagctgcaaagccagcggctacacctttaccggctactttatgcactgggtcaagcagagccctggccagagcctggaatggatcggcagaatccacccctacgacggcgacaccttctacaaccagaagttccagggcaaggccaccctgacagtggacaagagcagcaacaccgcccacatggaactgctgagcctgaccagcgaggacttcgccgtgtactactgcaccagatacgacggcagccgggctatggactattggggccagggcaccaccgtgaccgtgtctagtacgcgtatccagaaccctgatcctgccgtgtaccagctgcgggatagcaagagcagcgacaagagcgtgtgtctgttcaccgacttcgacagccagaccaacgtgtcccagagcaaggactccgacgtgtacatcaccgataagaccgtgctggacatgcggagcatggacttcaagagcaactccgccgtggcctggtccaacaagtccgatttcgcctgcgccaacgccttcaacaacagcattatccccgaggacacattcttcccaagccccgagagcagctgcggtacccagagttttgggttgttggaccctaaattgtgctatctgttggacggaatcctgttcatttacggagtgatcctgaccgcattgttcctgaagagaggccggaagaagctgctgtacatcttcaagcagcctttcatgcggcccgtgcagaccacccaggaagaggacggctgctcctgccggttccccgaggaagaagaaggcggctgcgagctgcgggttaagttttccagatccgcagacgcacccgcttaccaacaagggcagaaccaactctacaatgaacttaatttggggcggagggaagagtacgacgttctggacaaaaggaggggacgagatcccgagatgggcggaaagcctcagcgaaggaagaatccgcaagaggggctttataacgaactccagaaagataaaatggcagaagcctatagtgagattgggatgaagggagaaaggaggaggggtaaaggtcacgatgggttgtaccaaggattgagcacagccactaaagatacctatgatgcgctccacatgcaggccctgccgccaaga

SEQ ID NO: 35447 - DNA, 1773 bp, synthetic construct
  source 1..1773: mol_type = other DNA
atggccttaccagtgaccgccttgctcctgccgctggccttgctgctccacgccgccaggccggacatcgtgctgacccagagccctctgagcctggccgtgtctctgggacagcctgccatcatcagctgtagggccagccagagcgtgtcctttgccggcacctctctgatgcactggtatcaccagaagcccggccagcagcccagactgctgatctacagagccagcaacctggaagccggcgtgcccgatagattttccggcagcggcagcaagaccgacttcaccctgaccatcagccccgtggaagccgaagatgccgccacctactactgccagcagagcagagagtacccctacaccttcggcggaggcaccaagctggaaatcaagaggctcgagcagagcttcggcctgctggaccccaagctgtgctacctgctggatggcatcctgttcatctacggcgtgatcctgaccgccctgttcctgagagtgaagttcagcagaagcgccgacgcccctgcctaccagcagggacagaaccaactgtacaacgagctgaacctgggcagacgggaagagtacgacgtgctggacaagcggagaggcagggaccctgagatgggcggaaagccccagcggagaaagaacccccaggaaggactgtataacgaactccagaaagacaagatggccgaagcctacagcgagatcggcatgaagggcgagcggagaagaggcaagggccacgatggcctgtaccagggcctgagcaccgccaccaaggacacctatgacgccctgcacatgcaggccctgcctccaagaagggccaagcgatctggatctggagcaacaaacttctcactactcaaacaagcaggtgacgtggaggagaatcccgggcctactagtatggactggatttggcgcatccttttccttgtcggcgctgctaccggcgcgcattccttcgaacaggtccaactggtgcagagcggagccgaggtcgtgaagcctggcgcttccgtgaagattagctgcaaagccagcggctacacctttaccggctactttatgcactgggtcaagcagagccctggccagagcctggaatggatcggcagaatccacccctacgacggcgacaccttctacaaccagaagttccagggcaaggccaccctgacagtggacaagagcagcaacaccgcccacatggaactgctgagcctgaccagcgaggacttcgccgtgtactactgcaccagatacgacggcagccgggctatggactattggggccagggcaccaccgtgaccgtgtctagtacgcgtcagagttttgggttgttggaccctaaattgtgctatctgttggacggaatcctgttcatttacggagtgatcctgaccgcattgttcctgcgggttaagttttccagatccgcagacgcacccgcttaccaacaagggcagaaccaactctacaatgaacttaatttggggcggagggaagagtacgacgttctggacaaaaggaggggacgagatcccgagatgggcggaaagcctcagcgaaggaagaatccgcaagaggggctttataacgaactccagaaagataaaatggcagaagcctatagtgagattgggatgaagggagaaaggaggaggggtaaaggtcacgatgggttgtaccaaggattgagcacagccactaaagatacctatgatgcgctccacatgcaggccctgccgccaaga

SEQ ID NO: 35448 - DNA, 1947 bp, synthetic construct
  source 1..1947: mol_type = other DNA
atggccttaccagtgaccgccttgctcctgccgctggccttgctgctccacgccgccaggccggacatcgtgctgacccagagccctctgagcctggccgtgtctctgggacagcctgccatcatcagctgtagggccagccagagcgtgtcctttgccggcacctctctgatgcactggtatcaccagaagcccggccagcagcccagactgctgatctacagagccagcaacctggaagccggcgtgcccgatagattttccggcagcggcagcaagaccgacttcaccctgaccatcagccccgtggaagccgaagatgccgccacctactactgccagcagagcagagagtacccctacaccttcggcggaggcaccaagctggaaatcaagaggctcgagggacagcctaaggccaatcctaccgtgacactgttccctccaagcagcgaagaactccaggccaacaaggccacacttgtgtgcctgatctccgacttctaccctggggctgtgacagtggcttggaaggccgatggatctcctgtgaaagccggcgtggaaaccaccaagccatccaagcagagcaacaacaaatacgccgccagctcctacctgagcctgacacctgagcagtggaagtcccacagatcctacagctgccaagtgacccacgaaggcagcaccgtggaaaagacagtggcccctacagagtgcagccccatcaagaccgatgtgattacaatggaccccaaggacaactgctccaaggacgccaacgataccctgctgctccagctgaccaacaccagcgcctactacatgtacttgttgctgctgctgaagtccgtggtgtacttcgccatcatcacatgctgcctgctgcggagaaccgccttctgctgcaacggcgagaagtctagggccaagcgatctggatctggagcaacaaacttctcactactcaaacaagcaggtgacgtggaggagaatcccgggcctactagtatggactggatttggcgcatccttttccttgtcggcgctgctaccggcgcgcattccttcgaacaggtccaactggtgcagagcggagccgaggtcgtgaagcctggcgcttccgtgaagattagctgcaaagccagcggctacacctttaccggctactttatgcactgggtcaagcagagccctggccagagcctggaatggatcggcagaatccacccctacgacggcgacaccttctacaaccagaagttccagggcaaggccaccctgacagtggacaagagcagcaacaccgcccacatggaactgctgagcctgaccagcgaggacttcgccgtgtactactgcaccagatacgacggcagccgggctatggactattggggccagggcaccaccgtgaccgtgtctagtacgcgtgcctctacaaagggaccctccgtgtttcctctggctcccagcagcaagtctacaagcggaggaacagccgctctgggctgcctggtcaaggattactttcccgagcctgtgaccgtgtcctggaatagcggagcactgacaagcggcgtgcacacctttccagccgtgctgcaaagcagcggcctgtactctctgagcagcgtggtcacagtgcctagctctagcctgggcacccagacctacatctgcaatgtgaaccacaagcctagcaacaccaaggtggacaagagagtggaacccaagagctgtgaagtgaaaaccgactccaccgaccacgtgaagcccaaagagacagagaacaccaagcagcccagcaagagctgccacaagcccaaggccatcgtgcacaccgagaaagtgaacatgatgagcctgaccgtgctgggcctgcggatgctgttcgccaaaaccgtggccgtgaacttcctgctgaccgccaagctgttcttcctc

SEQ ID NO: 35449 - DNA, 1881 bp, synthetic construct
  source 1..1881: mol_type = other DNA
atggccttaccagtgaccgccttgctcctgccgctggccttgctgctccacgccgccaggccggacatcgtgctgacccagagccctctgagcctggccgtgtctctgggacagcctgccatcatcagctgtagggccagccagagcgtgtcctttgccggcacctctctgatgcactggtatcaccagaagcccggccagcagcccagactgctgatctacagagccagcaacctggaagccggcgtgcccgatagattttccggcagcggcagcaagaccgacttcaccctgaccatcagccccgtggaagccgaagatgccgccacctactactgccagcagagcagagagtacccctacaccttcggcggaggcaccaagctggaaatcaagaggctcgagggacagcctaaggccaatcctaccgtgacactgttccctccaagcagcgaagaactccaggccaacaaggccacacttgtgtgcctgatctccgacttctaccctggggctgtgacagtggcttggaaggccgatggatctcctgtgaaagccggcgtggaaaccaccaagccatccaagcagagcaacaacaaatacgccgccagctcctacctgagcctgacacctgagcagtggaagtcccacagatcctacagctgccaagtgacccacgaaggcagcaccgtggaaaagacagtggcccctacagagtgcagcggcagagccgattgcggcatcaccagcgccagctaccaccagggcgtgctgagcgccaccatcctgtacgagatcctgctgggcaaggccaccctgtacgccgtgctggtgtctgccctggtgctgatggctatggtcaagcggaaggacagccggggaagggccaagcgatctggatctggagcaacaaacttctcactactcaaacaagcaggtgacgtggaggagaatcccgggcctactagtatggactggatttggcgcatccttttccttgtcggcgctgctaccggcgcgcattccttcgaacaggtccaactggtgcagagcggagccgaggtcgtgaagcctggcgcttccgtgaagattagctgcaaagccagcggctacacctttaccggctactttatgcactgggtcaagcagagccctggccagagcctggaatggatcggcagaatccacccctacgacggcgacaccttctacaaccagaagttccagggcaaggccaccctgacagtggacaagagcagcaacaccgcccacatggaactgctgagcctgaccagcgaggacttcgccgtgtactactgcaccagatacgacggcagccgggctatggactattggggccagggcaccaccgtgaccgtgtctagtacgcgtgcctctacaaagggaccctccgtgtttcctctggctcccagcagcaagtctacaagcggaggaacagccgctctgggctgcctggtcaaggattactttcccgagcctgtgaccgtgtcctggaatagcggagcactgacaagcggcgtgcacacctttccagccgtgctgcaaagcagcggcctgtactctctgagcagcgtggtcacagtgcctagctctagcctgggcacccagacctacatctgcaatgtgaaccacaagcctagcaacaccaaggtggacaagagagtggaacccaagagctgtatccccgaggacacattcttcccaagcagcgacgtgccctgcgacgtgaagctggtggaaaagagcttcgagacagacaccaacctgaacttccagaacctgagcgtgatcggcttcagaatcctgctgctgaaagtggccggctttaacctgctgatgaccctgcggctgtggtccagc

SEQ ID NO: 35450 - DNA, 1881 bp, synthetic construct
  source 1..1881: mol_type = other DNA
atggccttaccagtgaccgccttgctcctgccgctggccttgctgctccacgccgccaggccggacatcgtgctgacccagagccctctgagcctggccgtgtctctgggacagcctgccatcatcagctgtagggccagccagagcgtgtcctttgccggcacctctctgatgcactggtatcaccagaagcccggccagcagcccagactgctgatctacagagccagcaacctggaagccggcgtgcccgatagattttccggcagcggcagcaagaccgacttcaccctgaccatcagccccgtggaagccgaagatgccgccacctactactgccagcagagcagagagtacccctacaccttcggcggaggcaccaagctggaaatcaagaggctcgagggacagcctaaggccaatcctaccgtgacactgttccctccaagcagcgaagaactccaggccaacaaggccacacttgtgtgcctgatctccgacttctaccctggggctgtgacagtggcttggaaggccgatggatctcctgtgaaagccggcgtggaaaccaccaagccatccaagcagagcaacaacaaatacgccgccagctcctacctgagcctgacacctgagcagtggaagtcccacagatcctacagctgccaagtgacccacgaaggcagcaccgtggaaaagacagtggcccctacagagtgcagcggcagagccgattgcggctttaccagcgagagctaccagcagggcgtgctgagcgccaccatcctgtacgagatcctgctgggcaaggccaccctgtacgccgtgctggtgtctgccctggtgctgatggctatggtcaagcggaaggacagccggggaagggccaagcgatctggatctggagcaacaaacttctcactactcaaacaagcaggtgacgtggaggagaatcccgggcctactagtatggactggatttggcgcatccttttccttgtcggcgctgctaccggcgcgcattccttcgaacaggtccaactggtgcagagcggagccgaggtcgtgaagcctggcgcttccgtgaagattagctgcaaagccagcggctacacctttaccggctactttatgcactgggtcaagcagagccctggccagagcctggaatggatcggcagaatccacccctacgacggcgacaccttctacaaccagaagttccagggcaaggccaccctgacagtggacaagagcagcaacaccgcccacatggaactgctgagcctgaccagcgaggacttcgccgtgtactactgcaccagatacgacggcagccgggctatggactattggggccagggcaccaccgtgaccgtgtctagtacgcgtgcctctacaaagggaccctccgtgtttcctctggctcccagcagcaagtctacaagcggaggaacagccgctctgggctgcctggtcaaggattactttcccgagcctgtgaccgtgtcctggaatagcggagcactgacaagcggcgtgcacacctttccagccgtgctgcaaagcagcggcctgtactctctgagcagcgtggtcacagtgcctagctctagcctgggcacccagacctacatctgcaatgtgaaccacaagcctagcaacaccaaggtggacaagagagtggaacccaagagctgtatccccgaggacacattcttcccaagccccgagagcagctgcgacgtgaagctggtggaaaagagcttcgagacagacaccaacctgaacttccagaacctgagcgtgatcggcttcagaatcctgctgctgaaagtggccggctttaacctgctgatgaccctgcggctgtggtccagc

SEQ ID NO: 35451 - DNA, 1359 bp, synthetic construct
  source 1..1359: mol_type = other DNA
atggccttaccagtgaccgccttgctcctgccgctggccttgctgctccacgccgccaggccggacatcgtgctgacccagagccctctgagcctggccgtgtctctgggacagcctgccatcatcagctgtagggccagccagagcgtgtcctttgccggcacctctctgatgcactggtatcaccagaagcccggccagcagcccagactgctgatctacagagccagcaacctggaagccggcgtgcccgatagattttccggcagcggcagcaagaccgacttcaccctgaccatcagccccgtggaagccgaagatgccgccacctactactgccagcagagcagagagtacccctacaccttcggcggaggcaccaagctggaaatcaagaggggcggaggcggaagtggaggcggaggatctggcggcggaggctctcaggtccaactggtgcagagcggagccgaggtcgtgaagcctggcgcttccgtgaagattagctgcaaagccagcggctacacctttaccggctactttatgcactgggtcaagcagagccctggccagagcctggaatggatcggcagaatccacccctacgacggcgacaccttctacaaccagaagttccagggcaaggccaccctgacagtggacaagagcagcaacaccgcccacatggaactgctgagcctgaccagcgaggacttcgccgtgtactactgcaccagatacgacggcagccgggctatggactattggggccagggcaccaccgtgaccgtgtctagtacgcgtgacggtaacgaggagatgggaggaatcactcaaaccccttacaaagtctcaatttcaggaacaactgttatccttacatgtccccagtatcctggcagcgagatcctttggcagcataacgacaagaatatagggggagatgaagacgataagaatatcggatctgacgaggatcacttgagcctgaaagagttctccgagcttgaacaaagcggatattatgtgtgctatccgcgcgggtcaaagccggaagacgctaacttttacctttatctccgagccagagtgtgcgaaaattgcatggaaatggacgttatgtccgttgctacaatagttatcgtagatatatgcatcacgggtggactgcttctgctggtttattattggtccaagaatagaaaggccaaagctaaacccgtgaccagaggcgctggcgcaggcggaaggcaaaggggacaaaacaaagaacggccaccaccagtgccaaatccagattatgagcctattcggaaaggacagagggacctgtactctggcctgaatcagagaagaatc

SEQ ID NO: 35452 - DNA, 1254 bp, synthetic construct
  source 1..1254: mol_type = other DNA
atggccttaccagtgaccgccttgctcctgccgctggccttgctgctccacgccgccaggccggacatcgtgctgacccagagccctctgagcctggccgtgtctctgggacagcctgccatcatcagctgtagggccagccagagcgtgtcctttgccggcacctctctgatgcactggtatcaccagaagcccggccagcagcccagactgctgatctacagagccagcaacctggaagccggcgtgcccgatagattttccggcagcggcagcaagaccgacttcaccctgaccatcagccccgtggaagccgaagatgccgccacctactactgccagcagagcagagagtacccctacaccttcggcggaggcaccaagctggaaatcaagaggggcggaggcggaagtggaggcggaggatctggcggcggaggctctcaggtccaactggtgcagagcggagccgaggtcgtgaagcctggcgcttccgtgaagattagctgcaaagccagcggctacacctttaccggctactttatgcactgggtcaagcagagccctggccagagcctggaatggatcggcagaatccacccctacgacggcgacaccttctacaaccagaagttccagggcaaggccaccctgacagtggacaagagcagcaacaccgcccacatggaactgctgagcctgaccagcgaggacttcgccgtgtactactgcaccagatacgacggcagccgggctatggactattggggccagggcaccaccgtgaccgtgtctagtacgcgtttcaagatccccatcgaggaactggaagatcgggtgttcgtgaactgcaacacctctatcacctgggtggaaggcaccgtgggaacactgctgagcgacatcaccagactggacctcggcaagcggattctggaccctcggggcatctacagatgcaacggcaccgacatctacaaggacaaagaaagcaccgtgcaggtccactacagaatgtgccagtcctgcgtggaactggaccctgctacagtggccggcatcatcgtgaccgatgtgatcgctactctgctgctggctctgggagtgttctgcttcgccggacacgaaacaggcagactgtctggcgctgccgatacacaggccctgctgagaaacgaccaagtgtatcagcccctgcgcgacagagatgatgcccagtattctcacctcggcggcaactgggctagaaacaag

SEQ ID NO: 35453 - DNA, 1284 bp, synthetic construct
  source 1..1284: mol_type = other DNA
atggccttaccagtgaccgccttgctcctgccgctggccttgctgctccacgccgccaggccggacatcgtgctgacccagagccctctgagcctggccgtgtctctgggacagcctgccatcatcagctgtagggccagccagagcgtgtcctttgccggcacctctctgatgcactggtatcaccagaagcccggccagcagcccagactgctgatctacagagccagcaacctggaagccggcgtgcccgatagattttccggcagcggcagcaagaccgacttcaccctgaccatcagccccgtggaagccgaagatgccgccacctactactgccagcagagcagagagtacccctacaccttcggcggaggcaccaagctggaaatcaagaggggcggaggcggaagtggaggcggaggatctggcggcggaggctctcaggtccaactggtgcagagcggagccgaggtcgtgaagcctggcgcttccgtgaagattagctgcaaagccagcggctacacctttaccggctactttatgcactgggtcaagcagagccctggccagagcctggaatggatcggcagaatccacccctacgacggcgacaccttctacaaccagaagttccagggcaaggccaccctgacagtggacaagagcagcaacaccgcccacatggaactgctgagcctgaccagcgaggacttcgccgtgtactactgcaccagatacgacggcagccgggctatggactattggggccagggcaccaccgtgaccgtgtctagtacgcgtcagagcatcaagggcaaccacctggtcaaggtgtacgactaccaagaggacggcagcgtgctgctgacatgtgatgccgaggccaagaacatcacctggtttaaggacggcaagatgatcggcttcctgaccgaggacaagaagaagtggaacctgggcagcaacgctaaggaccccagaggcatgtatcagtgcaagggcagccagaacaagagcaagcccctccaggtgtactaccggatgtgccagaactgcatcgagctgaacgccgctaccatcagcggctttctgttcgccgagatcgtgtccatcttcgtgctggccgtgggcgtgtactttatcgctggacaggatggcgtgcggcagagcagagcttccgataagcaaaccctgctgcctaacgaccagctgtaccagcctctgaaggacagagaggacgaccagtacagccacctccagggcaatcagctgagaagaaac

SEQ ID NO: 35454 - DNA, 1233 bp, synthetic construct
  source 1..1233: mol_type = other DNA
atggccttaccagtgaccgccttgctcctgccgctggccttgctgctccacgccgccaggccggacatcgtgctgacccagagccctctgagcctggccgtgtctctgggacagcctgccatcatcagctgtagggccagccagagcgtgtcctttgccggcacctctctgatgcactggtatcaccagaagcccggccagcagcccagactgctgatctacagagccagcaacctggaagccggcgtgcccgatagattttccggcagcggcagcaagaccgacttcaccctgaccatcagccccgtggaagccgaagatgccgccacctactactgccagcagagcagagagtacccctacaccttcggcggaggcaccaagctggaaatcaagaggggcggaggcggaagtggaggcggaggatctggcggcggaggctctcaggtccaactggtgcagagcggagccgaggtcgtgaagcctggcgcttccgtgaagattagctgcaaagccagcggctacacctttaccggctactttatgcactgggtcaagcagagccctggccagagcctggaatggatcggcagaatccacccctacgacggcgacaccttctacaaccagaagttccagggcaaggccaccctgacagtggacaagagcagcaacaccgcccacatggaactgctgagcctgaccagcgaggacttcgccgtgtactactgcaccagatacgacggcagccgggctatggactattggggccagggcaccaccgtgaccgtgtctagtacgcgtcagagttttgggttgttggaccctaaattgtgctatctgttggacggaatcctgttcatttacggagtgatcctgaccgcattgttcctgcgggttaagttttccagatccgcagacgcacccgcttaccaacaagggcagaaccaactctacaatgaacttaatttggggcggagggaagagtacgacgttctggacaaaaggaggggacgagatcccgagatgggcggaaagcctcagcgaaggaagaatccgcaagaggggctttataacgaactccagaaagataaaatggcagaagcctatagtgagattgggatgaagggagaaaggaggaggggtaaaggtcacgatgggttgtaccaaggattgagcacagccactaaagatacctatgatgcgctccacatgcaggccctgccgccaaga

SEQ ID NO: 35455 - DNA, 1518 bp, synthetic construct
  source 1..1518: mol_type = other DNA
atggccttaccagtgaccgccttgctcctgccgctggccttgctgctccacgccgccaggccggacatcgtgctgacccagagccctctgagcctggccgtgtctctgggacagcctgccatcatcagctgtagggccagccagagcgtgtcctttgccggcacctctctgatgcactggtatcaccagaagcccggccagcagcccagactgctgatctacagagccagcaacctggaagccggcgtgcccgatagattttccggcagcggcagcaagaccgacttcaccctgaccatcagccccgtggaagccgaagatgccgccacctactactgccagcagagcagagagtacccctacaccttcggcggaggcaccaagctggaaatcaagaggggcggaggcggaagtggaggcggaggatctggcggcggaggctctcaggtccaactggtgcagagcggagccgaggtcgtgaagcctggcgcttccgtgaagattagctgcaaagccagcggctacacctttaccggctactttatgcactgggtcaagcagagccctggccagagcctggaatggatcggcagaatccacccctacgacggcgacaccttctacaaccagaagttccagggcaaggccaccctgacagtggacaagagcagcaacaccgcccacatggaactgctgagcctgaccagcgaggacttcgccgtgtactactgcaccagatacgacggcagccgggctatggactattggggccagggcaccaccgtgaccgtgtctagtacgcgtggaatgaggactgaggatcttcccaaagctgtcgtctttctcgaaccccaatggtatcgggtgctcgaaaaagactctgtgacactgaaatgccaaggggcctactctcccgaggacaactccacacagtggtttcataatgagtccctcatcagctctcaggccagctcttatttcattgatgccgctacagtggacgactccggcgagtatcggtgtcagaccaatctgtctacactgtctgaccccgtgcagcttgaggtccacattggatggttgctcttgcaagccccacgctgggttttcaaagaggaagatccaatccatctgcggtgccacagctggaaaaacaccgctctccacaaagtcacatacctgcaaaatggcaaaggacgcaaatacttccatcacaattccgatttttacattccgaaggctaccctgaaagacagcggcagctatttctgccggggactcgtcggctccaagaatgtgtcctccgaaaccgtgaatatcacgattacccaaggactggctgtgcctacaatctctagcttctttccgcctggataccaagtctccttctgtcttgtgatggtcctcctgtttgctgtggacacaggactgtacttttccgtgaaaacgaacatccgcagctccacacgcgattggaaagatcacaagtttaaatggcgcaaagatccccaggacaag

SEQ ID NO: 35456 - DNA, 1443 bp, synthetic construct
  source 1..1443: mol_type = other DNA
atggccttaccagtgaccgccttgctcctgccgctggccttgctgctccacgccgccaggccggacatcgtgctgacccagagccctctgagcctggccgtgtctctgggacagcctgccatcatcagctgtagggccagccagagcgtgtcctttgccggcacctctctgatgcactggtatcaccagaagcccggccagcagcccagactgctgatctacagagccagcaacctggaagccggcgtgcccgatagattttccggcagcggcagcaagaccgacttcaccctgaccatcagccccgtggaagccgaagatgccgccacctactactgccagcagagcagagagtacccctacaccttcggcggaggcaccaagctggaaatcaagaggggcggaggcggaagtggaggcggaggatctggcggcggaggctctcaggtccaactggtgcagagcggagccgaggtcgtgaagcctggcgcttccgtgaagattagctgcaaagccagcggctacacctttaccggctactttatgcactgggtcaagcagagccctggccagagcctggaatggatcggcagaatccacccctacgacggcgacaccttctacaaccagaagttccagggcaaggccaccctgacagtggacaagagcagcaacaccgcccacatggaactgctgagcctgaccagcgaggacttcgccgtgtactactgcaccagatacgacggcagccgggctatggactattggggccagggcaccaccgtgaccgtgtctagtacgcgtggaatgaggactgaggatcttcccaaagctgtcgtctttctcgaaccccaatggtatcgggtgctcgaaaaagactctgtgacactgaaatgccaaggggcctactctcccgaggacaactccacacagtggtttcataatgagtccctcatcagctctcaggccagctcttatttcattgatgccgctacagtggacgactccggcgagtatcggtgtcagaccaatctgtctacactgtctgaccccgtgcagcttgaggtccacattggatggttgctcttgcaagccccacgctgggttttcaaagaggaagatccaatccatctgcggtgccacagctggaaaaacaccgctctccacaaagtcacatacctgcaaaatggcaaaggacgcaaatacttccatcacaattccgatttttacattccgaaggctaccctgaaagacagcggcagctatttctgccggggactcgtcggctccaagaatgtgtcctccgaaaccgtgaatatcacgattacccaaggactggctgtgcctacaatctctagcttctttccgcctggataccaagtctccttctgtcttgtgatggtcctcctgtttgctgtggacacaggactgtacttttccgtg

SEQ ID NO: 35457 - DNA, 1446 bp, synthetic construct
  source 1..1446: mol_type = other DNA
atggccttaccagtgaccgccttgctcctgccgctggccttgctgctccacgccgccaggccggacatcgtgctgacccagagccctctgagcctggccgtgtctctgggacagcctgccatcatcagctgtagggccagccagagcgtgtcctttgccggcacctctctgatgcactggtatcaccagaagcccggccagcagcccagactgctgatctacagagccagcaacctggaagccggcgtgcccgatagattttccggcagcggcagcaagaccgacttcaccctgaccatcagccccgtggaagccgaagatgccgccacctactactgccagcagagcagagagtacccctacaccttcggcggaggcaccaagctggaaatcaagaggggcggaggcggaagtggaggcggaggatctggcggcggaggctctcaggtccaactggtgcagagcggagccgaggtcgtgaagcctggcgcttccgtgaagattagctgcaaagccagcggctacacctttaccggctactttatgcactgggtcaagcagagccctggccagagcctggaatggatcggcagaatccacccctacgacggcgacaccttctacaaccagaagttccagggcaaggccaccctgacagtggacaagagcagcaacaccgcccacatggaactgctgagcctgaccagcgaggacttcgccgtgtactactgcaccagatacgacggcagccgggctatggactattggggccagggcaccaccgtgaccgtgtctagtacgcgtggaatgaggactgaggatcttcccaaagctgtcgtctttctcgaaccccaatggtatcgggtgctcgaaaaagactctgtgacactgaaatgccaaggggcctactctcccgaggacaactccacacagtggtttcataatgagtccctcatcagctctcaggccagctcttatttcattgatgccgctacagtggacgactccggcgagtatcggtgtcagaccaatctgtctacactgtctgaccccgtgcagcttgaggtccacattggatggttgctcttgcaagccccacgctgggttttcaaagaggaagatccaatccatctgcggtgccacagctggaaaaacaccgctctccacaaagtcacatacctgcaaaatggcaaaggacgcaaatacttccatcacaattccgatttttacattccgaaggctaccctgaaagacagcggcagctatttctgccggggactcgtcggctccaagaatgtgtcctccgaaaccgtgaatatcacgattacccaaggactggctgtgcctacaatctctagcttctttccgcctggataccaagtctccttctgtcttgtgatggtcctcctgtttgctgtggacacaggactgtacttttccgtgaaa

SEQ ID NO: 35458 - DNA, 2178 bp, synthetic construct
  source 1..2178: mol_type = other DNA
atggccttaccagtgaccgccttgctcctgccgctggccttgctgctccacgccgccaggccggacatcgtgctgacccagagccctctgagcctggccgtgtctctgggacagcctgccatcatcagctgtagggccagccagagcgtgtcctttgccggcacctctctgatgcactggtatcaccagaagcccggccagcagcccagactgctgatctacagagccagcaacctggaagccggcgtgcccgatagattttccggcagcggcagcaagaccgacttcaccctgaccatcagccccgtggaagccgaagatgccgccacctactactgccagcagagcagagagtacccctacaccttcggcggaggcaccaagctggaaatcaagaggctcgagggacagcctaaggccaatcctaccgtgacactgttccctccaagcagcgaagaactccaggccaacaaggccacacttgtgtgcctgatctccgacttctaccctggggctgtgacagtggcttggaaggccgatggatctcctgtgaaagccggcgtggaaaccaccaagccatccaagcagagcaacaacaaatacgccgccagctcctacctgagcctgacacctgagcagtggaagtcccacagatcctacagctgccaagtgacccacgaaggcagcaccgtggaaaagacagtggcccctacagagtgcagcggatcccagagcttcggcctgctggaccccaagctgtgctacctgctggatggcatcctgttcatctacggcgtgatcctgaccgccctgttcctgagagtgaagttcagcagaagcgccgacgcccctgcctaccagcagggacagaaccaactgtacaacgagctgaacctgggcagacgggaagagtacgacgtgctggacaagcggagaggcagggaccctgagatgggcggaaagccccagcggagaaagaacccccaggaaggactgtataacgaactccagaaagacaagatggccgaagcctacagcgagatcggcatgaagggcgagcggagaagaggcaagggccacgatggcctgtaccagggcctgagcaccgccaccaaggacacctatgacgccctgcacatgcaggccctgcctccaagaagggccaagcgatctggatctggagcaacaaacttctcactactcaaacaagcaggtgacgtggaggagaatcccgggcctactagtatggactggatttggcgcatccttttccttgtcggcgctgctaccggcgcgcattccttcgaacaggtccaactggtgcagagcggagccgaggtcgtgaagcctggcgcttccgtgaagattagctgcaaagccagcggctacacctttaccggctactttatgcactgggtcaagcagagccctggccagagcctggaatggatcggcagaatccacccctacgacggcgacaccttctacaaccagaagttccagggcaaggccaccctgacagtggacaagagcagcaacaccgcccacatggaactgctgagcctgaccagcgaggacttcgccgtgtactactgcaccagatacgacggcagccgggctatggactattggggccagggcaccaccgtgaccgtgtctagtacgcgtgcctctacaaagggaccctccgtgtttcctctggctcccagcagcaagtctacaagcggaggaacagccgctctgggctgcctggtcaaggattactttcccgagcctgtgaccgtgtcctggaatagcggagcactgacaagcggcgtgcacacctttccagccgtgctgcaaagcagcggcctgtactctctgagcagcgtggtcacagtgcctagctctagcctgggcacccagacctacatctgcaatgtgaaccacaagcctagcaacaccaaggtggacaagagagtggaacccaagagctgtggtaccatcactcaaggtttggcagtgtcaaccatctcatcattctttccacctggctaccaagtgtccttctgcctggtcatggtgctgctgttcgccgtggataccggcctgtacttcagcgtcaagaccaacatccggtccagcaccagagactggaaggaccacaagttcaagtggcggaaggaccctcaggacaag

SEQ ID NO: 35459 - DNA, 2223 bp, synthetic construct
  source 1..2223: mol_type = other DNA
atggccttaccagtgaccgccttgctcctgccgctggccttgctgctccacgccgccaggccggacatcgtgctgacccagagccctctgagcctggccgtgtctctgggacagcctgccatcatcagctgtagggccagccagagcgtgtcctttgccggcacctctctgatgcactggtatcaccagaagcccggccagcagcccagactgctgatctacagagccagcaacctggaagccggcgtgcccgatagattttccggcagcggcagcaagaccgacttcaccctgaccatcagccccgtggaagccgaagatgccgccacctactactgccagcagagcagagagtacccctacaccttcggcggaggcaccaagctggaaatcaagaggctcgaggacctgaagaacgtgttcccacctgaggtggccgtgttcgagcctagcgaggccgagatcagccacacccagaaagccaccctcgtgtgcctggctaccggcttctaccccgaccatgtggaactgtcttggtgggtcaacggcaaagaggtgcacagcggcgtgtctaccgacccccagccactgaaagaacagcccgccctgaacgacagccggtactgcctgagcagcagactgagagtgtccgccaccttctggcagaacccccggaaccacttcagatgccaggtgcagttctacggcctgagcgagaacgacgagtggacccaggacagagccaagcccgtgacccagatcgtgtctgccgaagcctggggcagagccgattgcggatcccagagcttcggcctgctggaccccaagctgtgctacctgctggatggcatcctgttcatctacggcgtgatcctgaccgccctgttcctgagagtgaagttcagcagaagcgccgacgcccctgcctaccagcagggacagaaccaactgtacaacgagctgaacctgggcagacgggaagagtacgacgtgctggacaagcggagaggcagggaccctgagatgggcggaaagccccagcggagaaagaacccccaggaaggactgtataacgaactccagaaagacaagatggccgaagcctacagcgagatcggcatgaagggcgagcggagaagaggcaagggccacgatggcctgtaccagggcctgagcaccgccaccaaggacacctatgacgccctgcacatgcaggccctgcctccaagaagggccaagcgatctggatctggagcaacaaacttctcactactcaaacaagcaggtgacgtggaggagaatcccgggcctactagtatggactggatttggcgcatccttttccttgtcggcgctgctaccggcgcgcattccttcgaacaggtccaactggtgcagagcggagccgaggtcgtgaagcctggcgcttccgtgaagattagctgcaaagccagcggctacacctttaccggctactttatgcactgggtcaagcagagccctggccagagcctggaatggatcggcagaatccacccctacgacggcgacaccttctacaaccagaagttccagggcaaggccaccctgacagtggacaagagcagcaacaccgcccacatggaactgctgagcctgaccagcgaggacttcgccgtgtactactgcaccagatacgacggcagccgggctatggactattggggccagggcaccaccgtgaccgtgtctagtacgcgtatccagaaccctgatcctgccgtgtaccagctgcgggatagcaagagcagcgacaagagcgtgtgtctgttcaccgacttcgacagccagaccaacgtgtcccagagcaaggactccgacgtgtacatcaccgataagaccgtgctggacatgcggagcatggacttcaagagcaactccgccgtggcctggtccaacaagtccgatttcgcctgcgccaacgccttcaacaacagcattatccccgaggacacattcttcccaagccccgagagcagctgcggtaccatcactcaaggtttggcagtgtcaaccatctcatcattctttccacctggctaccaagtgtccttctgcctggtcatggtgctgctgttcgccgtggataccggcctgtacttcagcgtcaagaccaacatccggtccagcaccagagactggaaggaccacaagttcaagtggcggaaggaccctcaggacaag

SEQ ID NO: 35460 - DNA, 2148 bp, synthetic construct
  source 1..2148: mol_type = other DNA
atggccttaccagtgaccgccttgctcctgccgctggccttgctgctccacgccgccaggccggacatcgtgctgacccagagccctctgagcctggccgtgtctctgggacagcctgccatcatcagctgtagggccagccagagcgtgtcctttgccggcacctctctgatgcactggtatcaccagaagcccggccagcagcccagactgctgatctacagagccagcaacctggaagccggcgtgcccgatagattttccggcagcggcagcaagaccgacttcaccctgaccatcagccccgtggaagccgaagatgccgccacctactactgccagcagagcagagagtacccctacaccttcggcggaggcaccaagctggaaatcaagaggctcgaggacctgaagaacgtgttcccacctgaggtggccgtgttcgagcctagcgaggccgagatcagccacacccagaaagccaccctcgtgtgcctggctaccggcttctaccccgaccatgtggaactgtcttggtgggtcaacggcaaagaggtgcacagcggcgtgtctaccgacccccagccactgaaagaacagcccgccctgaacgacagccggtactgcctgagcagcagactgagagtgtccgccaccttctggcagaacccccggaaccacttcagatgccaggtgcagttctacggcctgagcgagaacgacgagtggacccaggacagagccaagcccgtgacccagatcgtgtctgccgaagcctggggcagagccgattgcggatcccagagcttcggcctgctggaccccaagctgtgctacctgctggatggcatcctgttcatctacggcgtgatcctgaccgccctgttcctgagagtgaagttcagcagaagcgccgacgcccctgcctaccagcagggacagaaccaactgtacaacgagctgaacctgggcagacgggaagagtacgacgtgctggacaagcggagaggcagggaccctgagatgggcggaaagccccagcggagaaagaacccccaggaaggactgtataacgaactccagaaagacaagatggccgaagcctacagcgagatcggcatgaagggcgagcggagaagaggcaagggccacgatggcctgtaccagggcctgagcaccgccaccaaggacacctatgacgccctgcacatgcaggccctgcctccaagaagggccaagcgatctggatctggagcaacaaacttctcactactcaaacaagcaggtgacgtggaggagaatcccgggcctactagtatggactggatttggcgcatccttttccttgtcggcgctgctaccggcgcgcattccttcgaacaggtccaactggtgcagagcggagccgaggtcgtgaagcctggcgcttccgtgaagattagctgcaaagccagcggctacacctttaccggctactttatgcactgggtcaagcagagccctggccagagcctggaatggatcggcagaatccacccctacgacggcgacaccttctacaaccagaagttccagggcaaggccaccctgacagtggacaagagcagcaacaccgcccacatggaactgctgagcctgaccagcgaggacttcgccgtgtactactgcaccagatacgacggcagccgggctatggactattggggccagggcaccaccgtgaccgtgtctagtacgcgtatccagaaccctgatcctgccgtgtaccagctgcgggatagcaagagcagcgacaagagcgtgtgtctgttcaccgacttcgacagccagaccaacgtgtcccagagcaaggactccgacgtgtacatcaccgataagaccgtgctggacatgcggagcatggacttcaagagcaactccgccgtggcctggtccaacaagtccgatttcgcctgcgccaacgccttcaacaacagcattatccccgaggacacattcttcccaagccccgagagcagctgcggtaccatcactcaaggtttggcagtgtcaaccatctcatcattctttccacctggctaccaagtgtccttctgcctggtcatggtgctgctgttcgccgtggataccggcctgtacttcagcgtc

SEQ ID NO: 35461 - DNA, 2151 bp, synthetic construct
  source 1..2151: mol_type = other DNA
atggccttaccagtgaccgccttgctcctgccgctggccttgctgctccacgccgccaggccggacatcgtgctgacccagagccctctgagcctggccgtgtctctgggacagcctgccatcatcagctgtagggccagccagagcgtgtcctttgccggcacctctctgatgcactggtatcaccagaagcccggccagcagcccagactgctgatctacagagccagcaacctggaagccggcgtgcccgatagattttccggcagcggcagcaagaccgacttcaccctgaccatcagccccgtggaagccgaagatgccgccacctactactgccagcagagcagagagtacccctacaccttcggcggaggcaccaagctggaaatcaagaggctcgaggacctgaagaacgtgttcccacctgaggtggccgtgttcgagcctagcgaggccgagatcagccacacccagaaagccaccctcgtgtgcctggctaccggcttctaccccgaccatgtggaactgtcttggtgggtcaacggcaaagaggtgcacagcggcgtgtctaccgacccccagccactgaaagaacagcccgccctgaacgacagccggtactgcctgagcagcagactgagagtgtccgccaccttctggcagaacccccggaaccacttcagatgccaggtgcagttctacggcctgagcgagaacgacgagtggacccaggacagagccaagcccgtgacccagatcgtgtctgccgaagcctggggcagagccgattgcggatcccagagcttcggcctgctggaccccaagctgtgctacctgctggatggcatcctgttcatctacggcgtgatcctgaccgccctgttcctgagagtgaagttcagcagaagcgccgacgcccctgcctaccagcagggacagaaccaactgtacaacgagctgaacctgggcagacgggaagagtacgacgtgctggacaagcggagaggcagggaccctgagatgggcggaaagccccagcggagaaagaacccccaggaaggactgtataacgaactccagaaagacaagatggccgaagcctacagcgagatcggcatgaagggcgagcggagaagaggcaagggccacgatggcctgtaccagggcctgagcaccgccaccaaggacacctatgacgccctgcacatgcaggccctgcctccaagaagggccaagcgatctggatctggagcaacaaacttctcactactcaaacaagcaggtgacgtggaggagaatcccgggcctactagtatggactggatttggcgcatccttttccttgtcggcgctgctaccggcgcgcattccttcgaacaggtccaactggtgcagagcggagccgaggtcgtgaagcctggcgcttccgtgaagattagctgcaaagccagcggctacacctttaccggctactttatgcactgggtcaagcagagccctggccagagcctggaatggatcggcagaatccacccctacgacggcgacaccttctacaaccagaagttccagggcaaggccaccctgacagtggacaagagcagcaacaccgcccacatggaactgctgagcctgaccagcgaggacttcgccgtgtactactgcaccagatacgacggcagccgggctatggactattggggccagggcaccaccgtgaccgtgtctagtacgcgtatccagaaccctgatcctgccgtgtaccagctgcgggatagcaagagcagcgacaagagcgtgtgtctgttcaccgacttcgacagccagaccaacgtgtcccagagcaaggactccgacgtgtacatcaccgataagaccgtgctggacatgcggagcatggacttcaagagcaactccgccgtggcctggtccaacaagtccgatttcgcctgcgccaacgccttcaacaacagcattatccccgaggacacattcttcccaagccccgagagcagctgcggtaccatcactcaaggtttggcagtgtcaaccatctcatcattctttccacctggctaccaagtgtccttctgcctggtcatggtgctgctgttcgccgtggataccggcctgtacttcagcgtcaag

SEQ ID NO: 35462 - DNA, 2154 bp, synthetic construct
  source 1..2154: mol_type = other DNA
atggccttaccagtgaccgccttgctcctgccgctggccttgctgctccacgccgccaggccggacatcgtgctgacccagagccctctgagcctggccgtgtctctgggacagcctgccatcatcagctgtagggccagccagagcgtgtcctttgccggcacctctctgatgcactggtatcaccagaagcccggccagcagcccagactgctgatctacagagccagcaacctggaagccggcgtgcccgatagattttccggcagcggcagcaagaccgacttcaccctgaccatcagccccgtggaagccgaagatgccgccacctactactgccagcagagcagagagtacccctacaccttcggcggaggcaccaagctggaaatcaagaggctcgaggacctgaagaacgtgttcccacctgaggtggccgtgttcgagcctagcgaggccgagatcagccacacccagaaagccaccctcgtgtgcctggctaccggcttctaccccgaccatgtggaactgtcttggtgggtcaacggcaaagaggtgcacagcggcgtgtctaccgacccccagccactgaaagaacagcccgccctgaacgacagccggtactgcctgagcagcagactgagagtgtccgccaccttctggcagaacccccggaaccacttcagatgccaggtgcagttctacggcctgagcgagaacgacgagtggacccaggacagagccaagcccgtgacccagatcgtgtctgccgaagcctggggcagagccgattgcggatcccagagcttcggcctgctggaccccaagctgtgctacctgctggatggcatcctgttcatctacggcgtgatcctgaccgccctgttcctgagagtgaagttcagcagaagcgccgacgcccctgcctaccagcagggacagaaccaactgtacaacgagctgaacctgggcagacgggaagagtacgacgtgctggacaagcggagaggcagggaccctgagatgggcggaaagccccagcggagaaagaacccccaggaaggactgtataacgaactccagaaagacaagatggccgaagcctacagcgagatcggcatgaagggcgagcggagaagaggcaagggccacgatggcctgtaccagggcctgagcaccgccaccaaggacacctatgacgccctgcacatgcaggccctgcctccaagaagggccaagcgatctggatctggagcaacaaacttctcactactcaaacaagcaggtgacgtggaggagaatcccgggcctactagtatggactggatttggcgcatccttttccttgtcggcgctgctaccggcgcgcattccttcgaacaggtccaactggtgcagagcggagccgaggtcgtgaagcctggcgcttccgtgaagattagctgcaaagccagcggctacacctttaccggctactttatgcactgggtcaagcagagccctggccagagcctggaatggatcggcagaatccacccctacgacggcgacaccttctacaaccagaagttccagggcaaggccaccctgacagtggacaagagcagcaacaccgcccacatggaactgctgagcctgaccagcgaggacttcgccgtgtactactgcaccagatacgacggcagccgggctatggactattggggccagggcaccaccgtgaccgtgtctagtacgcgtatccagaaccctgatcctgccgtgtaccagctgcgggatagcaagagcagcgacaagagcgtgtgtctgttcaccgacttcgacagccagaccaacgtgtcccagagcaaggactccgacgtgtacatcaccgataagaccgtgctggacatgcggagcatggacttcaagagcaactccgccgtggcctggtccaacaagtccgatttcgcctgcgccaacgccttcaacaacagcattatccccgaggacacattcttcccaagccccgagagcagctgcggtaccatcactcaaggtttggcagtgtcaaccatctcatcattctttccacctggctaccaagtgtccttctgcctggtcatggtgctgctgttcgccgtggataccggcctgtacttcagcgtcaagacc

SEQ ID NO: 35463 - DNA, 1965 bp, synthetic construct
  source 1..1965: mol_type = other DNA
atggccttaccagtgaccgccttgctcctgccgctggccttgctgctccacgccgccaggccggacatcgtgctgacccagagccctctgagcctggccgtgtctctgggacagcctgccatcatcagctgtagggccagccagagcgtgtcctttgccggcacctctctgatgcactggtatcaccagaagcccggccagcagcccagactgctgatctacagagccagcaacctggaagccggcgtgcccgatagattttccggcagcggcagcaagaccgacttcaccctgaccatcagccccgtggaagccgaagatgccgccacctactactgccagcagagcagagagtacccctacaccttcggcggaggcaccaagctggaaatcaagaggctcgagggacagcctaaggccaatcctaccgtgacactgttccctccaagcagcgaagaactccaggccaacaaggccacacttgtgtgcctgatctccgacttctaccctggggctgtgacagtggcttggaaggccgatggatctcctgtgaaagccggcgtggaaaccaccaagccatccaagcagagcaacaacaaatacgccgccagctcctacctgagcctgacacctgagcagtggaagtcccacagatcctacagctgccaagtgacccacgaaggcagcaccgtggaaaagacagtggcccctacagagtgcagcggatccctgggagagcctcagctgtgctatatcctggacgccatcctgtttctgtacggcatcgtgctgaccctgctgtactgccggctgaagatccaagtgcggaaggccgccatcaccagctacgagaaatccgacggcgtgtacaccggcctgagcaccagaaatcaagagacatacgagacactgaagcacgaaaagcctccacaaagggccaagcgatctggatctggagcaacaaacttctcactactcaaacaagcaggtgacgtggaggagaatcccgggcctactagtatggactggatttggcgcatccttttccttgtcggcgctgctaccggcgcgcattccttcgaacaggtccaactggtgcagagcggagccgaggtcgtgaagcctggcgcttccgtgaagattagctgcaaagccagcggctacacctttaccggctactttatgcactgggtcaagcagagccctggccagagcctggaatggatcggcagaatccacccctacgacggcgacaccttctacaaccagaagttccagggcaaggccaccctgacagtggacaagagcagcaacaccgcccacatggaactgctgagcctgaccagcgaggacttcgccgtgtactactgcaccagatacgacggcagccgggctatggactattggggccagggcaccaccgtgaccgtgtctagtacgcgtgcctctacaaagggaccctccgtgtttcctctggctcccagcagcaagtctacaagcggaggaacagccgctctgggctgcctggtcaaggattactttcccgagcctgtgaccgtgtcctggaatagcggagcactgacaagcggcgtgcacacctttccagccgtgctgcaaagcagcggcctgtactctctgagcagcgtggtcacagtgcctagctctagcctgggcacccagacctacatctgcaatgtgaaccacaagcctagcaacaccaaggtggacaagagagtggaacccaagagctgtggtaccctcggagaaccacagctctgttacattctggatgctatcctgttcctctatgggatcgtcctgacactcctgtattgcagactcaaaattcaagttcgcaaagccgccattacctcttacgagaagagtgatggggtgtacacaggactgtctacccggaatcaagaaacctacgaaaccctcaaacatgagaagccacctcagtaa

SEQ ID NO: 35464 - DNA, 1872 bp, synthetic construct
  source 1..1872: mol_type = other DNA
atggccttaccagtgaccgccttgctcctgccgctggccttgctgctccacgccgccaggccggacatcgtgctgacccagagccctctgagcctggccgtgtctctgggacagcctgccatcatcagctgtagggccagccagagcgtgtcctttgccggcacctctctgatgcactggtatcaccagaagcccggccagcagcccagactgctgatctacagagccagcaacctggaagccggcgtgcccgatagattttccggcagcggcagcaagaccgacttcaccctgaccatcagccccgtggaagccgaagatgccgccacctactactgccagcagagcagagagtacccctacaccttcggcggaggcaccaagctggaaatcaagaggctcgaggacctgaagaacgtgttcccacctgaggtggccgtgttcgagcctagcgaggccgagatcagccacacccagaaagccaccctcgtgtgcctggctaccggcttctaccccgaccatgtggaactgtcttggtgggtcaacggcaaagaggtgcacagcggcgtgtgtaccgacccccagccactgaaagaacagcccgccctgaacgacagccggtactgcctgagcagcagactgagagtgtccgccaccttctggcagaacccccggaaccacttcagatgccaggtgcagttctacggcctgagcgagaacgacgagtggacccaggacagagccaagcccgtgacccagatcgtgtctgccgaagcctggggcagagccgattgcggctttaccagcgagagctaccagcagggcgtgctgagcgcctactacatgtacttgttgctgctgctgaagtccgtggtgtacttcgccatcatcacatgctgcctgctgcggagaaccgccttctgctgcaacggcgagaagtctagggccaagcgatctggatctggagcaacaaacttctcactactcaaacaagcaggtgacgtggaggagaatcccgggcctactagtatggactggatttggcgcatccttttccttgtcggcgctgctaccggcgcgcattccttcgaacaggtccaactggtgcagagcggagccgaggtcgtgaagcctggcgcttccgtgaagattagctgcaaagccagcggctacacctttaccggctactttatgcactgggtcaagcagagccctggccagagcctggaatggatcggcagaatccacccctacgacggcgacaccttctacaaccagaagttccagggcaaggccaccctgacagtggacaagagcagcaacaccgcccacatggaactgctgagcctgaccagcgaggacttcgccgtgtactactgcaccagatacgacggcagccgggctatggactattggggccagggcaccaccgtgaccgtgtctagtacgcgtatccagaaccctgatcctgccgtgtaccagctgcgggatagcaagagcagcgacaagagcgtgtgtctgttcaccgacttcgacagccagaccaacgtgtcccagagcaaggactccgacgtgtacatcaccgataagtgcgtgctggacatgcggagcatggacttcaagagcaactccgccgtggcctggtccaacaagtccgatttcgcctgcgccaacgccttcaacaacagcattatccccgaggacacattcttcccaagccccgagagcagctgcgacgtgaagctggtggaaaagagcttcgagacagacaccaacctgaacttccagaacctgagcgtgatcggcttcagaatcctgctgctgaaagtggccggctttaacctgctgatgaccctgcggctgtggtccagc

SEQ ID NO: 35465 - DNA, 1893 bp, synthetic construct
  source 1..1893: mol_type = other DNA
atggccttaccagtgaccgccttgctcctgccgctggccttgctgctccacgccgccaggccggacatcgtgctgacccagagccctctgagcctggccgtgtctctgggacagcctgccatcatcagctgtagggccagccagagcgtgtcctttgccggcacctctctgatgcactggtatcaccagaagcccggccagcagcccagactgctgatctacagagccagcaacctggaagccggcgtgcccgatagattttccggcagcggcagcaagaccgacttcaccctgaccatcagccccgtggaagccgaagatgccgccacctactactgccagcagagcagagagtacccctacaccttcggcggaggcaccaagctggaaatcaagaggctcgaggacaagcagctggacgccgacgtgtcccccaagcctaccatcttcctgccctctatcgccgagacaaagctccagaaggccggcacctacctgtgcctgctggaaaagttcttcccagatgtgattaagatccactggcaggaaaagaagtccaacaccatcctgggcagccaggaaggcaacaccatgaagaccaacgacacctacatgaagttcagctggctgaccgtgcccgagaagtccctggacaaagaacacagatgcatcgtgcggcacgaaaacaacaagaacggcgtggaccaggaaatcatcttcccacccatcaagaccgatgtgattacaatggaccccaaggacaactgctccaaggacgccaacgataccctgctgctccagctgaccaacaccagcgcctactacatgtacgagatcctgctgggcaaggccaccctgtacgccgtgctggtgtctgccctggtgctgatggctatggtcaagcggaaggacagccggggaagggccaagcgatctggatctggagcaacaaacttctcactactcaaacaagcaggtgacgtggaggagaatcccgggcctactagtatggactggatttggcgcatccttttccttgtcggcgctgctaccggcgcgcattccttcgaacaggtccaactggtgcagagcggagccgaggtcgtgaagcctggcgcttccgtgaagattagctgcaaagccagcggctacacctttaccggctactttatgcactgggtcaagcagagccctggccagagcctggaatggatcggcagaatccacccctacgacggcgacaccttctacaaccagaagttccagggcaaggccaccctgacagtggacaagagcagcaacaccgcccacatggaactgctgagcctgaccagcgaggacttcgccgtgtactactgcaccagatacgacggcagccgggctatggactattggggccagggcaccaccgtgaccgtgtctagtacgcgtagccagcctcacaccaagcccagcgtgttcgtgatgaagaacggcaccaacgtggcctgcctcgtgaaagagttctaccccaaggacatcaggatcaacctggtgtccagcaagaagatcaccgagttcgaccccgccatcgtgatctcccccagcggcaagtacaacgccgtgaagctggggaagtatgaggacagcaacagcgtgacctgctccgtgcagcacgacaacaagaccgtgcacagcaccgactttgaagtgaaaaccgactccaccgaccacgtgaagcccaaagagacagagaacaccaagcagcccagcaagagctgccacaagcccaaggccatcgtgcacaccgagaaagtgaacatgatgagcctgaccgtgatcggcttcagaatcctgctgctgaaagtggccggctttaacctgctgatgaccctgcggctgtggtccagctaa

SEQ ID NO: 35466 - DNA, 1893 bp, synthetic construct
  source 1..1893: mol_type = other DNA
atggccttaccagtgaccgccttgctcctgccgctggccttgctgctccacgccgccaggccggacatcgtgctgacccagagccctctgagcctggccgtgtctctgggacagcctgccatcatcagctgtagggccagccagagcgtgtcctttgccggcacctctctgatgcactggtatcaccagaagcccggccagcagcccagactgctgatctacagagccagcaacctggaagccggcgtgcccgatagattttccggcagcggcagcaagaccgacttcaccctgaccatcagccccgtggaagccgaagatgccgccacctactactgccagcagagcagagagtacccctacaccttcggcggaggcaccaagctggaaatcaagaggctcgaggacaagcagctggacgccgacgtgtcccccaagcctaccatcttcctgccctctatcgccgagacaaagctccagaaggccggcacctacctgtgcctgctggaaaagttcttcccagatgtgattaagatccactggcaggaaaagaagtccaacaccatcctgggcagccaggaaggcaacaccatgaagaccaacgacacctacatgaagttcagctggctgaccgtgcccgagaagtccctggacaaagaacacagatgcatcgtgcggcacgaaaacaacaagaacggcgtggaccaggaaatcatcttcccacccatcaagaccgatgtgattacaatggaccccaaggacaactgctccaaggacgccaacgataccctgctgctccagctgaccaacaccagcgccaccatcctgtacgagatcctgctgggcaaggccaccctgtacgccgtgctggtgtctgccctggtgctgatggctatggtcaagcggaaggacagccggggaagggccaagcgatctggatctggagcaacaaacttctcactactcaaacaagcaggtgacgtggaggagaatcccgggcctactagtatggactggatttggcgcatccttttccttgtcggcgctgctaccggcgcgcattccttcgaacaggtccaactggtgcagagcggagccgaggtcgtgaagcctggcgcttccgtgaagattagctgcaaagccagcggctacacctttaccggctactttatgcactgggtcaagcagagccctggccagagcctggaatggatcggcagaatccacccctacgacggcgacaccttctacaaccagaagttccagggcaaggccaccctgacagtggacaagagcagcaacaccgcccacatggaactgctgagcctgaccagcgaggacttcgccgtgtactactgcaccagatacgacggcagccgggctatggactattggggccagggcaccaccgtgaccgtgtctagtacgcgtagccagcctcacaccaagcccagcgtgttcgtgatgaagaacggcaccaacgtggcctgcctcgtgaaagagttctaccccaaggacatcaggatcaacctggtgtccagcaagaagatcaccgagttcgaccccgccatcgtgatctcccccagcggcaagtacaacgccgtgaagctggggaagtatgaggacagcaacagcgtgacctgctccgtgcagcacgacaacaagaccgtgcacagcaccgactttgaagtgaaaaccgactccaccgaccacgtgaagcccaaagagacagagaacaccaagcagcccagcaagagctgccacaagcccaaggccatcgtgcacaccgagaaagtgaacatgatgagcctgaccgtgatcggcttcagaatcctgctgctgaaagtggccggctttaacctgctgatgaccctgcggctgtggtccagctaa

SEQ ID NO: 35467 - DNA, 1893 bp, synthetic construct
  source 1..1893: mol_type = other DNA
atggccttaccagtgaccgccttgctcctgccgctggccttgctgctccacgccgccaggccggacatcgtgctgacccagagccctctgagcctggccgtgtctctgggacagcctgccatcatcagctgtagggccagccagagcgtgtcctttgccggcacctctctgatgcactggtatcaccagaagcccggccagcagcccagactgctgatctacagagccagcaacctggaagccggcgtgcccgatagattttccggcagcggcagcaagaccgacttcaccctgaccatcagccccgtggaagccgaagatgccgccacctactactgccagcagagcagagagtacccctacaccttcggcggaggcaccaagctggaaatcaagaggctcgaggacaagcagctggacgccgacgtgtcccccaagcctaccatcttcctgccctctatcgccgagacaaagctccagaaggccggcacctacctgtgcctgctggaaaagttcttcccagatgtgattaagatccactggcaggaaaagaagtccaacaccatcctgggcagccaggaaggcaacaccatgaagaccaacgacacctacatgaagttcagctggctgaccgtgcccgagaagtccctggacaaagaacacagatgcatcgtgcggcacgaaaacaacaagaacggcgtggaccaggaaatcatcttcccacccatcaagaccgatgtgattacaatggaccccaaggacaactgctccaaggacgccaacgataccctgctgctccagctgaccaacaccagcgcctactacatgtacgagatcctgctgggcaaggccaccctgtacgccgtgctggtgtctgccctggtgctgatggctatggtcaagcggaaggacagccggggaagggccaagcgatctggatctggagcaacaaacttctcactactcaaacaagcaggtgacgtggaggagaatcccgggcctactagtatggactggatttggcgcatccttttccttgtcggcgctgctaccggcgcgcattccttcgaacaggtccaactggtgcagagcggagccgaggtcgtgaagcctggcgcttccgtgaagattagctgcaaagccagcggctacacctttaccggctactttatgcactgggtcaagcagagccctggccagagcctggaatggatcggcagaatccacccctacgacggcgacaccttctacaaccagaagttccagggcaaggccaccctgacagtggacaagagcagcaacaccgcccacatggaactgctgagcctgaccagcgaggacttcgccgtgtactactgcaccagatacgacggcagccgggctatggactattggggccagggcaccaccgtgaccgtgtctagtacgcgtagccagcctcacaccaagcccagcgtgttcgtgatgaagaacggcaccaacgtggcctgcctcgtgaaagagttctaccccaaggacatcaggatcaacctggtgtccagcaagaagatcaccgagttcgaccccgccatcgtgatctcccccagcggcaagtacaacgccgtgaagctggggaagtacgaggacagcaacagcgtgacctgctccgtgcagcacgacaacaagaccgtgcacagcaccgactttgaagtgaaaaccgactccaccgaccacgtgaagcccaaagagacagagaacaccaagcagcccagcaagagctgccacaagcccaaggccatcgtgcacaccgagaaagtgaacatgatgagcctgaccgtgctgggcttcagaatcctgctgctgaaagtggccggctttaacctgctgatgaccctgcggctgtggtccagctaa

SEQ ID NO: 35468 - DNA, 1893 bp, synthetic construct
  source 1..1893: mol_type = other DNA
atggccttaccagtgaccgccttgctcctgccgctggccttgctgctccacgccgccaggccggacatcgtgctgacccagagccctctgagcctggccgtgtctctgggacagcctgccatcatcagctgtagggccagccagagcgtgtcctttgccggcacctctctgatgcactggtatcaccagaagcccggccagcagcccagactgctgatctacagagccagcaacctggaagccggcgtgcccgatagattttccggcagcggcagcaagaccgacttcaccctgaccatcagccccgtggaagccgaagatgccgccacctactactgccagcagagcagagagtacccctacaccttcggcggaggcaccaagctggaaatcaagaggctcgaggacaagcagctggacgccgacgtgtcccccaagcctaccatcttcctgccctctatcgccgagacaaagctccagaaggccggcacctacctgtgcctgctggaaaagttcttcccagatgtgattaagatccactggcaggaaaagaagtccaacaccatcctgggcagccaggaaggcaacaccatgaagaccaacgacacctacatgaagttcagctggctgaccgtgcccgagaagtccctggacaaagaacacagatgcatcgtgcggcacgaaaacaacaagaacggcgtggaccaggaaatcatcttcccacccatcaagaccgatgtgattacaatggaccccaaggacaactgctccaaggacgccaacgataccctgctgctccagctgaccaacaccagcgccaccatcctgtacgagatcctgctgggcaaggccaccctgtacgccgtgctggtgtctgccctggtgctgatggctatggtcaagcggaaggacagccggggaagggccaagcgatctggatctggagcaacaaacttctcactactcaaacaagcaggtgacgtggaggagaatcccgggcctactagtatggactggatttggcgcatccttttccttgtcggcgctgctaccggcgcgcattccttcgaacaggtccaactggtgcagagcggagccgaggtcgtgaagcctggcgcttccgtgaagattagctgcaaagccagcggctacacctttaccggctactttatgcactgggtcaagcagagccctggccagagcctggaatggatcggcagaatccacccctacgacggcgacaccttctacaaccagaagttccagggcaaggccaccctgacagtggacaagagcagcaacaccgcccacatggaactgctgagcctgaccagcgaggacttcgccgtgtactactgcaccagatacgacggcagccgggctatggactattggggccagggcaccaccgtgaccgtgtctagtacgcgtagccagcctcacaccaagcccagcgtgttcgtgatgaagaacggcaccaacgtggcctgcctcgtgaaagagttctaccccaaggacatcaggatcaacctggtgtccagcaagaagatcaccgagttcgaccccgccatcgtgatctcccccagcggcaagtacaacgccgtgaagctggggaagtacgaggacagcaacagcgtgacctgctccgtgcagcacgacaacaagaccgtgcacagcaccgactttgaagtgaaaaccgactccaccgaccacgtgaagcccaaagagacagagaacaccaagcagcccagcaagagctgccacaagcccaaggccatcgtgcacaccgagaaagtgaacatgatgagcctgaccgtgctgggcttcagaatcctgctgctgaaagtggccggctttaacctgctgatgaccctgcggctgtggtccagctaa

SEQ ID NO: 35469 - DNA, 1875 bp, synthetic construct
  source 1..1875: mol_type = other DNA
atggccttaccagtgaccgccttgctcctgccgctggccttgctgctccacgccgccaggccggacatcgtgctgacccagagccctctgagcctggccgtgtctctgggacagcctgccatcatcagctgtagggccagccagagcgtgtcctttgccggcacctctctgatgcactggtatcaccagaagcccggccagcagcccagactgctgatctacagagccagcaacctggaagccggcgtgcccgatagattttccggcagcggcagcaagaccgacttcaccctgaccatcagccccgtggaagccgaagatgccgccacctactactgccagcagagcagagagtacccctacaccttcggcggaggcaccaagctggaaatcaagaggctcgaggacctgaagaacgtgttcccacctgaggtggccgtgttcgagcctagcgaggccgagatcagccacacccagaaagccaccctcgtgtgcctggctaccggcttctaccccgaccatgtggaactgtcttggtgggtcaacggcaaagaggtgcacagcggcgtgtgtaccgacccccagccactgaaagaacagcccgccctgaacgacagccggtactgcctgagcagcagactgagagtgtccgccaccttctggcagaacccccggaaccacttcagatgccaggtgcagttctacggcctgagcgagaacgacgagtggacccaggacagagccaagcccgtgacccagatcgtgtctgccgaagcctggggcagagccgattgcggctttaccagcgagagctaccagcagggcgtgctgagcgccaccatcctgtacttgttgctgctgctgaagtccgtggtgtacttcgccatcatcacatgctgcctgctgcggagaaccgccttctgctgcaacggcgagaagtctagggccaagcgatctggatctggagcaacaaacttctcactactcaaacaagcaggtgacgtggaggagaatcccgggcctactagtatggactggatttggcgcatccttttccttgtcggcgctgctaccggcgcgcattccttcgaacaggtccaactggtgcagagcggagccgaggtcgtgaagcctggcgcttccgtgaagattagctgcaaagccagcggctacacctttaccggctactttatgcactgggtcaagcagagccctggccagagcctggaatggatcggcagaatccacccctacgacggcgacaccttctacaaccagaagttccagggcaaggccaccctgacagtggacaagagcagcaacaccgcccacatggaactgctgagcctgaccagcgaggacttcgccgtgtactactgcaccagatacgacggcagccgggctatggactattggggccagggcaccaccgtgaccgtgtctagtacgcgtatccagaaccctgatcctgccgtgtaccagctgcgggatagcaagagcagcgacaagagcgtgtgtctgttcaccgacttcgacagccagaccaacgtgtcccagagcaaggactccgacgtgtacatcaccgataagtgcgtgctggacatgcggagcatggacttcaagagcaactccgccgtggcctggtccaacaagtccgatttcgcctgcgccaacgccttcaacaacagcattatccccgaggacacattcttcccaagccccgagagcagctgcgacgtgaagctggtggaaaagagcttcgagacagacaccaacctgaacttccagaacctgagcgtgatcggcctgcggatgctgttcgccaaaaccgtggccgtgaacttcctgctgaccgccaagctgttcttcctctaa

SEQ ID NO: 35470 - DNA, 1962 bp, synthetic construct
  source 1..1962: mol_type = other DNA
atggccttaccagtgaccgccttgctcctgccgctggccttgctgctccacgccgccaggccggacatcgtgctgacccagagccctctgagcctggccgtgtctctgggacagcctgccatcatcagctgtagggccagccagagcgtgtcctttgccggcacctctctgatgcactggtatcaccagaagcccggccagcagcccagactgctgatctacagagccagcaacctggaagccggcgtgcccgatagattttccggcagcggcagcaagaccgacttcaccctgaccatcagccccgtggaagccgaagatgccgccacctactactgccagcagagcagagagtacccctacaccttcggcggaggcaccaagctggaaatcaagaggctcgaggacctgaagaacgtgttcccacctgaggtggccgtgttcgagcctagcgaggccgagatcagccacacccagaaagccaccctcgtgtgcctggctaccggcttctaccccgaccatgtggaactgtcttggtgggtcaacggcaaagaggtgcacagcggcgtgtctaccgacccccagccactgaaagaacagcccgccctgaacgacagccggtactgcctgagcagcagactgagagtgtccgccaccttctggcagaacccccggaaccacttcagatgccaggtgcagttctacggcctgagcgagaacgacgagtggacccaggacagagccaagcccgtgacccagatcgtgtctgccgaagcctggggcagagccgattgcggatcctccaaggacgccaacgataccctgctgctccagctgaccaacaccagcgcctactacatgtacttgttgctgctgctgaagtccgtggtgtacttcgccatcatcacatgctgcctgctgcggagaaccgccttctgctgcaacggcgagaagtctagggccaagcgatctggatctggagcaacaaacttctcactactcaaacaagcaggtgacgtggaggagaatcccgggcctactagtatggactggatttggcgcatccttttccttgtcggcgctgctaccggcgcgcattccttcgaacaggtccaactggtgcagagcggagccgaggtcgtgaagcctggcgcttccgtgaagattagctgcaaagccagcggctacacctttaccggctactttatgcactgggtcaagcagagccctggccagagcctggaatggatcggcagaatccacccctacgacggcgacaccttctacaaccagaagttccagggcaaggccaccctgacagtggacaagagcagcaacaccgcccacatggaactgctgagcctgaccagcgaggacttcgccgtgtactactgcaccagatacgacggcagccgggctatggactattggggccagggcaccaccgtgaccgtgtctagtacgcgtatccagaaccctgatcctgccgtgtaccagctgcgggatagcaagagcagcgacaagagcgtgtgtctgttcaccgacttcgacagccagaccaacgtgtcccagagcaaggactccgacgtgtacatcaccgataagaccgtgctggacatgcggagcatggacttcaagagcaactccgccgtggcctggtccaacaagtccgatttcgcctgcgccaacgccttcaacaacagcattatccccgaggacacattcttcccaagccccgagagcagctgcggtaccgaagtgaaaaccgactccaccgaccacgtgaagcccaaagagacagagaacaccaagcagcccagcaagagctgccacaagcccaaggccatcgtgcacaccgagaaagtgaacatgatgagcctgaccgtgctgggcctgcggatgctgttcgccaaaaccgtggccgtgaacttcctgctgaccgccaagctgttcttcctctaa

SEQ ID NO: 35471 - DNA, 1872 bp, synthetic construct
  source 1..1872: mol_type = other DNA
atggccttaccagtgaccgccttgctcctgccgctggccttgctgctccacgccgccaggccggacatcgtgctgacccagagccctctgagcctggccgtgtctctgggacagcctgccatcatcagctgtagggccagccagagcgtgtcctttgccggcacctctctgatgcactggtatcaccagaagcccggccagcagcccagactgctgatctacagagccagcaacctggaagccggcgtgcccgatagattttccggcagcggcagcaagaccgacttcaccctgaccatcagccccgtggaagccgaagatgccgccacctactactgccagcagagcagagagtacccctacaccttcggcggaggcaccaagctggaaatcaagaggctcgaggacctgaagaacgtgttcccacctgaggtggccgtgttcgagcctagcgaggccgagatcagccacacccagaaagccaccctcgtgtgcctggctaccggcttctaccccgaccatgtggaactgtcttggtgggtcaacggcaaagaggtgcacagcggcgtgtgtaccgacccccagccactgaaagaacagcccgccctgaacgacagccggtactgcctgagcagcagactgagagtgtccgccaccttctggcagaacccccggaaccacttcagatgccaggtgcagttctacggcctgagcgagaacgacgagtggacccaggacagagccaagcccgtgacccagatcgtgtctgccgaagcctggggcagagccgattgcgacgtgaagctggtggaaaagagcttcgagacagacaccaacctgaacttccagaacctgagcgtgatcggcttcagaatcctgctgctgaaagtggccggctttaacctgctgatgaccctgcggctgtggtccagcagggccaagcgatctggatctggagcaacaaacttctcactactcaaacaagcaggtgacgtggaggagaatcccgggcctactagtatggactggatttggcgcatccttttccttgtcggcgctgctaccggcgcgcattccttcgaacaggtccaactggtgcagagcggagccgaggtcgtgaagcctggcgcttccgtgaagattagctgcaaagccagcggctacacctttaccggctactttatgcactgggtcaagcagagccctggccagagcctggaatggatcggcagaatccacccctacgacggcgacaccttctacaaccagaagttccagggcaaggccaccctgacagtggacaagagcagcaacaccgcccacatggaactgctgagcctgaccagcgaggacttcgccgtgtactactgcaccagatacgacggcagccgggctatggactattggggccagggcaccaccgtgaccgtgtctagtacgcgtatccagaaccctgatcctgccgtgtaccagctgcgggatagcaagagcagcgacaagagcgtgtgtctgttcaccgacttcgacagccagaccaacgtgtcccagagcaaggactccgacgtgtacatcaccgataagtgcgtgctggacatgcggagcatggacttcaagagcaactccgccgtggcctggtccaacaagtccgatttcgcctgcgccaacgccttcaacaacagcattatccccgaggacacattcttcccaagccccgagagcagctgcggctttaccagcgagagctaccagcagggcgtgctgagcgccaccatcctgtacgagatcctgctgggcaaggccaccctgtacgccgtgctggtgtctgccctggtgctgatggctatggtcaagcggaaggacagccggggataa

SEQ ID NO: 35472 - DNA, 1872 bp, synthetic construct
  source 1..1872: mol_type = other DNA
atggccttaccagtgaccgccttgctcctgccgctggccttgctgctccacgccgccaggccggacatcgtgctgacccagagccctctgagcctggccgtgtctctgggacagcctgccatcatcagctgtagggccagccagagcgtgtcctttgccggcacctctctgatgcactggtatcaccagaagcccggccagcagcccagactgctgatctacagagccagcaacctggaagccggcgtgcccgatagattttccggcagcggcagcaagaccgacttcaccctgaccatcagccccgtggaagccgaagatgccgccacctactactgccagcagagcagagagtacccctacaccttcggcggaggcaccaagctggaaatcaagaggctcgaggacctgaagaacgtgttcccacctgaggtggccgtgttcgagcctagcgaggccgagatcagccacacccagaaagccaccctcgtgtgcctggctaccggcttctaccccgaccatgtggaactgtcttggtgggtcaacggcaaagaggtgcacagcggcgtgtgtaccgacccccagccactgaaagaacagcccgccctgaacgacagccggtactgcctgagcagcagactgagagtgtccgccaccttctggcagaacccccggaaccacttcagatgccaggtgcagttctacggcctgagcgagaacgacgagtggacccaggacagagccaagcccgtgacccagatcgtgtctgccgaagcctggggcagagccgattgcggctttaccagcgagagctaccagcagggcgtgctgagcgccaccaacctgagcgtgatcggcttcagaatcctgctgctgaaagtggccggctttaacctgctgatgaccctgcggctgtggtccagcagggccaagcgatctggatctggagcaacaaacttctcactactcaaacaagcaggtgacgtggaggagaatcccgggcctactagtatggactggatttggcgcatccttttccttgtcggcgctgctaccggcgcgcattccttcgaacaggtccaactggtgcagagcggagccgaggtcgtgaagcctggcgcttccgtgaagattagctgcaaagccagcggctacacctttaccggctactttatgcactgggtcaagcagagccctggccagagcctggaatggatcggcagaatccacccctacgacggcgacaccttctacaaccagaagttccagggcaaggccaccctgacagtggacaagagcagcaacaccgcccacatggaactgctgagcctgaccagcgaggacttcgccgtgtactactgcaccagatacgacggcagccgggctatggactattggggccagggcaccaccgtgaccgtgtctagtacgcgtatccagaaccctgatcctgccgtgtaccagctgcgggatagcaagagcagcgacaagagcgtgtgtctgttcaccgacttcgacagccagaccaacgtgtcccagagcaaggactccgacgtgtacatcaccgataagtgcgtgctggacatgcggagcatggacttcaagagcaactccgccgtggcctggtccaacaagtccgatttcgcctgcgccaacgccttcaacaacagcattatccccgaggacacattcttcccaagccccgagagcagctgcgacgtgaagctggtggaaaagagcttcgagacagacaccaacctgaacttccagatcctgtacgagatcctgctgggcaaggccaccctgtacgccgtgctggtgtctgccctggtgctgatggctatggtcaagcggaaggacagccggggataa

SEQ ID NO: 35473 - DNA, 1872 bp, synthetic construct; identical to SEQ ID NO: 35471
  source 1..1872: mol_type = other DNA

SEQ ID NO: 35474 - DNA, 1872 bp, synthetic construct; identical to SEQ ID NO: 35472
  source 1..1872: mol_type = other DNA

SEQ ID NO: 35475 - DNA, 1869 bp, synthetic construct
  source 1..1869: mol_type = other DNA
atggccttaccagtgaccgccttgctcctgccgctggccttgctgctccacgccgccaggccggacatcgtgctgacccagagccctctgagcctggccgtgtctctgggacagcctgccatcatcagctgtagggccagccagagcgtgtcctttgccggcacctctctgatgcactggtatcaccagaagcccggccagcagcccagactgctgatctacagagccagcaacctggaagccggcgtgcccgatagattttccggcagcggcagcaagaccgacttcaccctgaccatcagccccgtggaagccgaagatgccgccacctactactgccagcagagcagagagtacccctacaccttcggcggaggcaccaagctggaaatcaagaggctcgaggacctgaagaacgtgttcccacctgaggtggccgtgttcgagcctagcgaggccgagatcagccacacccagaaagccaccctcgtgtgcctggctaccggcttctaccccgaccatgtggaactgtcttggtgggtcaacggcaaagaggtgcacagcggcgtgtgtaccgacccccagccactgaaagaacagcccgccctgaacgacagccggtactgcctgagcagcagactgagagtgtccgccaccttctggcagaacccccggaaccacttcagatgccaggtgcagttctacggcctgagcgagaacgacgagtggacccaggacagagccaagcccgtgacccagatcgtgtctgccgaagcctggggcagagccgattgcgacgtgaagctggtggaaaagagcttcgagacagacaccaacctgaacttccagaacctgagcgtgatcggcttcagaatcctgctgctgaaagtggccggctttaacctgctgatgaccctgcggctgtggtccagcagggccaagcgatctggatctggagcaacaaacttctcactactcaaacaagcaggtgacgtggaggagaatcccgggcctactagtatggactggatttggcgcatccttttccttgtcggcgctgctaccggcgcgcattccttcgaacaggtccaactggtgcagagcggagccgaggtcgtgaagcctggcgcttccgtgaagattagctgcaaagccagcggctacacctttaccggctactttatgcactgggtcaagcagagccctggccagagcctggaatggatcggcagaatccacccctacgacggcgacaccttctacaaccagaagttccagggcaaggccaccctgacagtggacaagagcagcaacaccgcccacatggaactgctgagcctgaccagcgaggacttcgccgtgtactactgcaccagatacgacggcagccgggctatggactattggggccagggcaccaccgtgaccgtgtctagtacgcgtatccagaaccctgatcctgccgtgtaccagctgcgggatagcaagagcagcgacaagagcgtgtgtctgttcaccgacttcgacagccagaccaacgtgtcccagagcaaggactccgacgtgtacatcaccgataagtgcgtgctggacatgcggagcatggacttcaagagcaactccgccgtggcctggtccaacaagtccgatttcgcctgcgccaacgccttcaacaacagcattatccccgaggacacattcttcccaagccccgagagcagctgcggctttaccagcgagagctaccagcagggcgtgctgagcgccaccatcctgtacgagatcctgctgggcaaggccaccctgtacgccgtgctggtgtctgccctggtgctgatggctatggtcaagcggaaggacagccgggga

SEQ ID NO: 35476 - DNA, 1881 bp, synthetic construct
  source 1..1881: mol_type = other DNA
atggccttaccagtgaccgccttgctcctgccgctggccttgctgctccacgccgccaggccggacatcgtgctgacccagagccctctgagcctggccgtgtctctgggacagcctgccatcatcagctgtagggccagccagagcgtgtcctttgccggcacctctctgatgcactggtatcaccagaagcccggccagcagcccagactgctgatctacagagccagcaacctggaagccggcgtgcccgatagattttccggcagcggcagcaagaccgacttcaccctgaccatcagccccgtggaagccgaagatgccgccacctactactgccagcagagcagagagtacccctacaccttcggcggaggcaccaagctggaaatcaagaggctcgaggccgacgtgtcccccaagcctaccatcttcctgccctctatcgccgagacaaagctccagaaggccggcacctacctgtgcctgctggaaaagttcttcccagatgtgattaagatccactggcaggaaaagaagtccaacaccatcctgggcagccaggaaggcaacaccatgaagaccaacgacacctacatgaagttcagctggctgaccgtgcccgagaagtccctggacaaagaacacagatgcatcgtgcggcacgaaaacaacaagaacggcgtggaccaggaaatcatcttcccacccatcaagaccgatgtgattacaatggaccccaaggacaactgctccaaggacgccaacgataccctgctgctccagctgaccaacaccagcgcctactacatgtacttgttgctgctgctgaagtccgtggtgtacttcgccatcatcacatgctgcctgctgcggagaaccgccttctgctgcaacggcgagaagtctagggccaagcgatctggatctggagcaacaaacttctcactactcaaacaagcaggtgacgtggaggagaatcccgggcctactagtatggactggatttggcgcatccttttccttgtcggcgctgctaccggcgcgcattccttcgaacaggtccaactggtgcagagcggagccgaggtcgtgaagcctggcgcttccgtgaagattagctgcaaagccagcggctacacctttaccggctactttatgcactgggtcaagcagagccctggccagagcctggaatggatcggcagaatccacccctacgacggcgacaccttctacaaccagaagttccagggcaaggccaccctgacagtggacaagagcagcaacaccgcccacatggaactgctgagcctgaccagcgaggacttcgccgtgtactactgcaccagatacgacggcagccgggctatggactattggggccagggcaccaccgtgaccgtgtctagtacgcgtagccagcctcacaccaagcccagcgtgttcgtgatgaagaacggcaccaacgtggcctgcctcgtgaaagagttctaccccaaggacatcaggatcaacctggtgtccagcaagaagatcaccgagttcgaccccgccatcgtgatctcccccagcggcaagtacaacgccgtgaagctggggaagtatgaggacagcaacagcgtgacctgctccgtgcagcacgacaacaagaccgtgcacagcaccgactttgaagtgaaaaccgactccaccgaccacgtgaagcccaaagagacagagaacaccaagcagcccagcaagagctgccacaagcccaaggccatcgtgcacaccgagaaagtgaacatgatgagcctgaccgtgatcggcttcagaatcctgctgctgaaagtggccggctttaacctgctgatgaccctgcggctgtggtccagctaa

SEQ ID NO: 35477 - DNA, 1881 bp, synthetic construct
  source 1..1881: mol_type = other DNA
atggccttaccagtgaccgccttgctcctgccgctggccttgctgctccacgccgccaggccggacatcgtgctgacccagagccctctgagcctggccgtgtctctgggacagcctgccatcatcagctgtagggccagccagagcgtgtcctttgccggcacctctctgatgcactggtatcaccagaagcccggccagcagcccagactgctgatctacagagccagcaacctggaagccggcgtgcccgatagattttccggcagcggcagcaagaccgacttcaccctgaccatcagccccgtggaagccgaagatgccgccacctactactgccagcagagcagagagtacccctacaccttcggcggaggcaccaagctggaaatcaagaggctcgaggccgacgtgtcccccaagcctaccatcttcctgccctctatcgccgagacaaagctccagaaggccggcacctacctgtgcctgctggaaaagttcttcccagatgtgattaagatccactggcaggaaaagaagtccaacaccatcctgggcagccaggaaggcaacaccatgaagaccaacgacacctacatgaagttcagctggctgaccgtgcccgagaagtccctggacaaagaacacagatgcatcgtgcggcacgaaaacaacaagaacggcgtggaccaggaaatcatcttcccacccatcaagaccgatgtgattacaatggaccccaaggacaactgctccaaggacgccaacgataccctgctgctccagctgaccaacaccagcgcctactacatgtacttgttgctgctgctgaagtccgtggtgtacttcgccatcatcacatgctgcctgctgcggagaaccgccttctgctgcaacggcgagaagtctagggccaagcgatctggatctggagcaacaaacttctcactactcaaacaagcaggtgacgtggaggagaatcccgggcctactagtatggactggatttggcgcatccttttccttgtcggcgctgctaccggcgcgcattccttcgaacaggtccaactggtgcagagcggagccgaggtcgtgaagcctggcgcttccgtgaagattagctgcaaagccagcggctacacctttaccggctactttatgcactgggtcaagcagagccctggccagagcctggaatggatcggcagaatccacccctacgacggcgacaccttctacaaccagaagttccagggcaaggccaccctgacagtggacaagagcagcaacaccgcccacatggaactgctgagcctgaccagcgaggacttcgccgtgtactactgcaccagatacgacggcagccgggctatggactattggggccagggcaccaccgtgaccgtgtctagtacgcgtagccagcctcacaccaagcccagcgtgttcgtgatgaagaacggcaccaacgtggcctgcctcgtgaaagagttctaccccaaggacatcaggatcaacctggtgtccagcaagaagatcaccgagttcgaccccgccatcgtgatctcccccagcggcaagtacaacgccgtgaagctggggaagtacgaggacagcaacagcgtgacctgctccgtgcagcacgacaacaagaccgtgcacagcaccgactttgaagtgaaaaccgactccaccgaccacgtgaagcccaaagagacagagaacaccaagcagcccagcaagagctgccacaagcccaaggccatcgtgcacaccgagaaagtgaacatgatgagcctgaccgtgctgggcttcagaatcctgctgctgaaagtggccggctttaacctgctgatgaccctgcggctgtggtccagctaa

SEQ ID NO: 35478 - DNA, 1869 bp, synthetic construct; identical to SEQ ID NO: 35475
  source 1..1869: mol_type = other DNA

SEQ ID NO: 35479 - DNA, 1881 bp, synthetic construct
  source 1..1881: mol_type = other DNA
atggccttaccagtgaccgccttgctcctgccgctggccttgctgctccacgccgccaggccggacatcgtgctgacccagagccctctgagcctggccgtgtctctgggacagcctgccatcatcagctgtagggccagccagagcgtgtcctttgccggcacctctctgatgcactggtatcaccagaagcccggccagcagcccagactgctgatctacagagccagcaacctggaagccggcgtgcccgatagattttccggcagcggcagcaagaccgacttcaccctgaccatcagccccgtggaagccgaagatgccgccacctactactgccagcagagcagagagtacccctacaccttcggcggaggcaccaagctggaaatcaagaggctcgagatccagaaccctgatcctgccgtgtaccagctgcgggatagcaagagcagcgacaagagcgtgtgtctgttcaccgacttcgacagccagaccaacgtgtcccagagcaaggactccgacgtgtacatcaccgataagtgcgtgctggacatgcggagcatggacttcaagagcaactccgccgtggcctggtccaacaagtccgatttcgcctgcgccaacgccttcaacaacagcattatccccgaggacacattcttcccaagccccgagagcagctgcggctttaccagcgagagctaccagcagggcgtgctgagcgccaccatcctgtacgagatcctgctgggcaaggccaccctgtacgccgtgctggtgtctgccctggtgctgatggctatggtcaagcggaaggacagccggggacgcgccaagagaagcggatctggcgtgaagcagaccctgaatttcgacctgctgaagctggctggcgacgtggaatccaacccaggccctactagtatggactggatttggcgcatccttttccttgtcggcgctgctaccggcgcgcattccttcgaacaggtccaactggtgcagagcggagccgaggtcgtgaagcctggcgcttccgtgaagattagctgcaaagccagcggctacacctttaccggctactttatgcactgggtcaagcagagccctggccagagcctggaatggatcggcagaatccacccctacgacggcgacaccttctacaaccagaagttccagggcaaggccaccctgacagtggacaagagcagcaacaccgcccacatggaactgctgagcctgaccagcgaggacttcgccgtgtactactgcaccagatacgacggcagccgggctatggactattggggccagggcaccaccgtgaccgtgtctagtacgcgtgaggacctgaagaacgtgttcccacctgaggtggccgtgttcgagcctagcgaggccgagatcagccacacccagaaagccaccctcgtgtgcctggctaccggcttctaccccgaccatgtggaactgtcttggtgggtcaacggcaaagaggtgcacagcggcgtgtgtaccgacccccagccactgaaagaacagcccgccctgaacgacagccggtactgcctgagcagcagactgagagtgtccgccaccttctggcagaacccccggaaccacttcagatgccaggtgcagttctacggcctgagcgagaacgacgagtggacccaggacagagccaagcccgtgacccagatcgtgtctgccgaagcctggggcagagccgattgcgacgtgaagctggtggaaaagagcttcgagacagacaccaacctgaacttccagaacctgagcgtgatcggcttcagaatcctgctgctgaaagtggccggctttaacctgctgatgaccctgcggctgtggtccagc

SEQ ID NO: 35480 - DNA, 2274 bp, synthetic construct
  source 1..2274: mol_type = other DNA
atggccttaccagtgaccgccttgctcctgccgctggccttgctgctccacgccgccaggccggaagtgcagctggttgaatctggcggaggactggttcagcctggcggatctctgagactgtcttgtgccgccagcggcttcagcttcagcgacttttggatgagctgggtccgacaggcccctggcaaaggacttgaatgggtcgccacaatcagccaggccggcagcgagaaggactacgtggactctgtgaagggcagattcaccatcagccgggacaacgccaagaagtccctgtacctccagatgaacagcctgagagccgaggacaccgccgtgtactattgtgcctctggcgtgtacagcttcgactacagaggccagggcaccctggtcacagtctcttctggtaccggcggaggcggatctggcggcggaggtagcggtggcggaggatctgaattcgacatcgtgctgacccagagccctctgagcctggccgtgtctctgggacagcctgccatcatcagctgtagggccagccagagcgtgtcctttgccggcacctctctgatgcactggtatcaccagaagcccggccagcagcccagactgctgatctacagagccagcaacctggaagccggcgtgcccgatagattttccggcagcggcagcaagaccgacttcaccctgaccatcagccccgtggaagccgaagatgccgccacctactactgccagcagagcagagagtacccctacaccttcggcggaggcaccaagctggaaatcaagaggctcgaggacctgaagaacgtgttcccacctgaggtggccgtgttcgagcctagcgaggccgagatcagccacacccagaaagccaccctcgtgtgcctggctaccggcttctaccccgaccatgtggaactgtcttggtgggtcaacggcaaagaggtgcacagcggcgtgtgtaccgacccccagccactgaaagaacagcccgccctgaacgacagccggtactgcctgagcagcagactgagagtgtccgccaccttctggcagaacccccggaaccacttcagatgccaggtgcagttctacggcctgagcgagaacgacgagtggacccaggacagagccaagcccgtgacccagatcgtgtctgccgaagcctggggcagagccgattgcgacgtgaagctggtggaaaagagcttcgagacagacaccaacctgaacttccagaacctgagcgtgatcggcttcagaatcctgctgctgaaagtggccggctttaacctgctgatgaccctgcggctgtggtccagcagggccaagcgatctggatctggagcaacaaacttctcactactcaaacaagcaggtgacgtggaggagaatcccgggcctactagtatggactggatttggcgcatccttttccttgtcggcgctgctaccggcgcgcattccttcgaacaggtccaactggtgcagagcggagccgaggtcgtgaagcctggcgcttccgtgaagattagctgcaaagccagcggctacacctttaccggctactttatgcactgggtcaagcagagccctggccagagcctggaatggatcggcagaatccacccctacgacggcgacaccttctacaaccagaagttccagggcaaggccaccctgacagtggacaagagcagcaacaccgcccacatggaactgctgagcctgaccagcgaggacttcgccgtgtactactgcaccagatacgacggcagccgggctatggactattggggccagggcaccaccgtgaccgtgtctagtacgcgtatccagaaccctgatcctgccgtgtaccagctgcgggatagcaagagcagcgacaagagcgtgtgtctgttcaccgacttcgacagccagaccaacgtgtcccagagcaaggactccgacgtgtacatcaccgataagtgcgtgctggacatgcggagcatggacttcaagagcaactccgccgtggcctggtccaacaagtccgatttcgcctgcgccaacgccttcaacaacagcattatccccgaggacacattcttcccaagccccgagagcagctgcggctttaccagcgagagctaccagcagggcgtgctgagcgccaccatcctgtacgagatcctgctgggcaaggccaccctgtacgccgtgctggtgtctgccctggtgctgatggctatggtcaagcggaaggacagccgggga

SEQ ID NO: 35481 - DNA, 2286 bp, synthetic construct
  source 1..2286: mol_type = other DNA
atggccttaccagtgaccgccttgctcctgccgctggccttgctgctccacgccgccaggccggaagtgcagctggttgaatctggcggaggactggttcagcctggcggatctctgagactgtcttgtgccgccagcggcttcagcttcagcgacttttggatgagctgggtccgacaggcccctggcaaaggacttgaatgggtcgccacaatcagccaggccggcagcgagaaggactacgtggactctgtgaagggcagattcaccatcagccgggacaacgccaagaagtccctgtacctccagatgaacagcctgagagccgaggacaccgccgtgtactattgtgcctctggcgtgtacagcttcgactacagaggccagggcaccctggtcacagtctcttctggtaccggcggaggcggatctggcggcggaggtagcggtggcggaggatctgaattcgacatcgtgctgacccagagccctctgagcctggccgtgtctctgggacagcctgccatcatcagctgtagggccagccagagcgtgtcctttgccggcacctctctgatgcactggtatcaccagaagcccggccagcagcccagactgctgatctacagagccagcaacctggaagccggcgtgcccgatagattttccggcagcggcagcaagaccgacttcaccctgaccatcagccccgtggaagccgaagatgccgccacctactactgccagcagagcagagagtacccctacaccttcggcggaggcaccaagctggaaatcaagaggctcgagatccagaaccctgatcctgccgtgtaccagctgcgggatagcaagagcagcgacaagagcgtgtgtctgttcaccgacttcgacagccagaccaacgtgtcccagagcaaggactccgacgtgtacatcaccgataagtgcgtgctggacatgcggagcatggacttcaagagcaactccgccgtggcctggtccaacaagtccgatttcgcctgcgccaacgccttcaacaacagcattatccccgaggacacattcttcccaagccccgagagcagctgcggctttaccagcgagagctaccagcagggcgtgctgagcgccaccatcctgtacgagatcctgctgggcaaggccaccctgtacgccgtgctggtgtctgccctggtgctgatggctatggtcaagcggaaggacagccggggacgcgccaagagaagcggatctggcgtgaagcagaccctgaatttcgacctgctgaagctggctggcgacgtggaatccaacccaggccctactagtatggactggatttggcgcatccttttccttgtcggcgctgctaccggcgcgcattccttcgaacaggtccaactggtgcagagcggagccgaggtcgtgaagcctggcgcttccgtgaagattagctgcaaagccagcggctacacctttaccggctactttatgcactgggtcaagcagagccctggccagagcctggaatggatcggcagaatccacccctacgacggcgacaccttctacaaccagaagttccagggcaaggccaccctgacagtggacaagagcagcaacaccgcccacatggaactgctgagcctgaccagcgaggacttcgccgtgtactactgcaccagatacgacggcagccgggctatggactattggggccagggcaccaccgtgaccgtgtctagtacgcgtgaggacctgaagaacgtgttcccacctgaggtggccgtgttcgagcctagcgaggccgagatcagccacacccagaaagccaccctcgtgtgcctggctaccggcttctaccccgaccatgtggaactgtcttggtgggtcaacggcaaagaggtgcacagcggcgtgtgtaccgacccccagccactgaaagaacagcccgccctgaacgacagccggtactgcctgagcagcagactgagagtgtccgccaccttctggcagaacccccggaaccacttcagatgccaggtgcagttctacggcctgagcgagaacgacgagtggacccaggacagagccaagcccgtgacccagatcgtgtctgccgaagcctggggcagagccgattgcgacgtgaagctggtggaaaagagcttcgagacagacaccaacctgaacttccagaacctgagcgtgatcggcttcagaatcctgctgctgaaagtggccggctttaacctgctgatgaccctgcggctgtggtccagc

SEQ ID NO: 35482 - DNA, 2685 bp, synthetic construct
  source 1..2685: mol_type = other DNA
atggccttaccagtgaccgccttgctcctgccgctggccttgctgctccacgccgccaggccggaagtgcagctggttgaatctggcggaggactggttcagcctggcggatctctgagactgtcttgtgccgccagcggcttcagcttcagcgacttttggatgagctgggtccgacaggcccctggcaaaggacttgaatgggtcgccacaatcagccaggccggcagcgagaaggactacgtggactctgtgaagggcagattcaccatcagccgggacaacgccaagaagtccctgtacctccagatgaacagcctgagagccgaggacaccgccgtgtactattgtgcctctggcgtgtacagcttcgactacagaggccagggcaccctggtcacagtctcttctggtaccggcggaggcggatctggcggcggaggtagcggtggcggaggatctgaattcgacatcgtgctgacccagagccctctgagcctggccgtgtctctgggacagcctgccatcatcagctgtagggccagccagagcgtgtcctttgccggcacctctctgatgcactggtatcaccagaagcccggccagcagcccagactgctgatctacagagccagcaacctggaagccggcgtgcccgatagattttccggcagcggcagcaagaccgacttcaccctgaccatcagccccgtggaagccgaagatgccgccacctactactgccagcagagcagagagtacccctacaccttcggcggaggcaccaagctggaaatcaagaggctcgaggacctgaagaacgtgttcccacctgaggtggccgtgttcgagcctagcgaggccgagatcagccacacccagaaagccaccctcgtgtgcctggctaccggcttctaccccgaccatgtggaactgtcttggtgggtcaacggcaaagaggtgcacagcggcgtgtgtaccgacccccagccactgaaagaacagcccgccctgaacgacagccggtactgcctgagcagcagactgagagtgtccgccaccttctggcagaacccccggaaccacttcagatgccaggtgcagttctacggcctgagcgagaacgacgagtggacccaggacagagccaagcccgtgacccagatcgtgtctgccgaagcctggggcagagccgattgcgacgtgaagctggtggaaaagagcttcgagacagacaccaacctgaacttccagaacctgagcgtgatcggcttcagaatcctgctgctgaaagtggccggctttaacctgctgatgaccctgcggctgtggtccagcagggccaagcgatctggatctggagcaacaaacttctcactactcaaacaagcaggtgacgtggaggagaatcccgggcctactagtatggactggatttggcgcatccttttccttgtcggcgctgctaccggcgcgcattccgggccccagctccagctgcaagagtctggacctggcctggtcaagcctagcgagacactgagcctgacctgtaccgtgtccggcgatagcatcagcagcggcgattactactggggctggatcagacagcctcctggcaaaggactggaatggatcggccacatctactacagcggcgtgacctactacaaccccagcctgaagtccagagtgaccatcagcgtggacaccagccggaaccagttctccctgaagctgtctagcgtgacagccgccgataccgccgtgtactactgcaccagagaggacagcagcaactggcggagtagaggccagggaacactggtcacagttagctctggatccggcggaggcggaagtggaggcggaggatctggcggcggaggctctttcgaacaggtccaactggtgcagagcggagccgaggtcgtgaagcctggcgcttccgtgaagattagctgcaaagccagcggctacacctttaccggctactttatgcactgggtcaagcagagccctggccagagcctggaatggatcggcagaatccacccctacgacggcgacaccttctacaaccagaagttccagggcaaggccaccctgacagtggacaagagcagcaacaccgcccacatggaactgctgagcctgaccagcgaggacttcgccgtgtactactgcaccagatacgacggcagccgggctatggactattggggccagggcaccaccgtgaccgtgtctagtacgcgtatccagaaccctgatcctgccgtgtaccagctgcgggatagcaagagcagcgacaagagcgtgtgtctgttcaccgacttcgacagccagaccaacgtgtcccagagcaaggactccgacgtgtacatcaccgataagtgcgtgctggacatgcggagcatggacttcaagagcaactccgccgtggcctggtccaacaagtccgatttcgcctgcgccaacgccttcaacaacagcattatccccgaggacacattcttcccaagccccgagagcagctgcggctttaccagcgagagctaccagcagggcgtgctgagcgccaccatcctgtacgagatcctgctgggcaaggccaccctgtacgccgtgctggtgtctgccctggtgctgatggctatggtcaagcggaaggacagccgggga

SEQ ID NO: 35483 - DNA, 2697 bp, synthetic construct
  source 1..2697: mol_type = other DNA
atggccttaccagtgaccgccttgctcctgccgctggccttgctgctccacgccgccaggccggaagtgcagctggttgaatctggcggaggactggttcagcctggcggatctctgagactgtcttgtgccgccagcggcttcagcttcagcgacttttggatgagctgggtccgacaggcccctggcaaaggacttgaatgggtcgccacaatcagccaggccggcagcgagaaggactacgtggactctgtgaagggcagattcaccatcagccgggacaacgccaagaagtccctgtacctccagatgaacagcctgagagccgaggacaccgccgtgtactattgtgcctctggcgtgtacagcttcgactacagaggccagggcaccctggtcacagtctcttctggtaccggcggaggcggatctggcggcggaggtagcggtggcggaggatctgaattcgacatcgtgctgacccagagccctctgagcctggccgtgtctctgggacagcctgccatcatcagctgtagggccagccagagcgtgtcctttgccggcacctctctgatgcactggtatcaccagaagcccggccagcagcccagactgctgatctacagagccagcaacctggaagccggcgtgcccgatagattttccggcagcggcagcaagaccgacttcaccctgaccatcagccccgtggaagccgaagatgccgccacctactactgccagcagagcagagagtacccctacaccttcggcggaggcaccaagctggaaatcaagaggctcgagatccagaaccctgatcctgccgtgtaccagctgcgggatagcaagagcagcgacaagagcgtgtgtctgttcaccgacttcgacagccagaccaacgtgtcccagagcaaggactccgacgtgtacatcaccgataagtgcgtgctggacatgcggagcatggacttcaagagcaactccgccgtggcctggtccaacaagtccgatttcgcctgcgccaacgccttcaacaacagcattatccccgaggacacattcttcccaagccccgagagcagctgcggctttaccagcgagagctaccagcagggcgtgctgagcgccaccatcctgtacgagatcctgctgggcaaggccaccctgtacgccgtgctggtgtctgccctggtgctgatggctatggtcaagcggaaggacagccggggacgcgccaagagaagcggatctggcgtgaagcagaccctgaatttcgacctgctgaagctggctggcgacgtggaatccaacccaggccctactagtatggactggatttggcgcatccttttccttgtcggcgctgctaccggcgcgcattccgggccccagctccagctgcaagagtctggacctggcctggtcaagcctagcgagacactgagcctgacctgtaccgtgtccggcgatagcatcagcagcggcgattactactggggctggatcagacagcctcctggcaaaggactggaatggatcggccacatctactacagcggcgtgacctactacaaccccagcctgaagtccagagtgaccatcagcgtggacaccagccggaaccagttctccctgaagctgtctagcgtgacagccgccgataccgccgtgtactactgcaccagagaggacagcagcaactggcggagtagaggccagggaacactggtcacagttagctctggatccggcggaggcggaagtggaggcggaggatctggcggcggaggctctttcgaacaggtccaactggtgcagagcggagccgaggtcgtgaagcctggcgcttccgtgaagattagctgcaaagccagcggctacacctttaccggctactttatgcactgggtcaagcagagccctggccagagcctggaatggatcggcagaatccacccctacgacggcgacaccttctacaaccagaagttccagggcaaggccaccctgacagtggacaagagcagcaacaccgcccacatggaactgctgagcctgaccagcgaggacttcgccgtgtactactgcaccagatacgacggcagccgggctatggactattggggccagggcaccaccgtgaccgtgtctagtacgcgtgaggacctgaagaacgtgttcccacctgaggtggccgtgttcgagcctagcgaggccgagatcagccacacccagaaagccaccctcgtgtgcctggctaccggcttctaccccgaccatgtggaactgtcttggtgggtcaacggcaaagaggtgcacagcggcgtgtgtaccgacccccagccactgaaagaacagcccgccctgaacgacagccggtactgcctgagcagcagactgagagtgtccgccaccttctggcagaacccccggaaccacttcagatgccaggtgcagttctacggcctgagcgagaacgacgagtggacccaggacagagccaagcccgtgacccagatcgtgtctgccgaagcctggggcagagccgattgcgacgtgaagctggtggaaaagagcttcgagacagacaccaacctgaacttccagaacctgagcgtgatcggcttcagaatcctgctgctgaaagtggccggctttaacctgctgatgaccctgcggctgtggtccagc

SEQ ID NO: 35484 - DNA, 2079 bp, synthetic construct
  source 1..2079: mol_type = other DNA
atggccttaccagtgaccgccttgctcctgccgctggccttgctgctccacgccgccaggccggacatcgtgctgacccagagccctctgagcctggccgtgtctctgggacagcctgccatcatcagctgtagggccagccagagcgtgtcctttgccggcacctctctgatgcactggtatcaccagaagcccggccagcagcccagactgctgatctacagagccagcaacctggaagccggcgtgcccgatagattttccggcagcggcagcaagaccgacttcaccctgaccatcagccccgtggaagccgaagatgccgccacctactactgccagcagagcagagagtacccctacaccttcggcggaggcaccaagctggaaatcaagaggctcgaggacctgaagaacgtgttcccacctgaggtggccgtgttcgagcctagcgaggccgagatcagccacacccagaaagccaccctcgtgtgcctggctaccggcttctaccccgaccatgtggaactgtcttggtgggtcaacggcaaagaggtgcacagcggcgtgtgtaccgacccccagccactgaaagaacagcccgccctgaacgacagccggtactgcctgagcagcagactgagagtgtccgccaccttctggcagaacccccggaaccacttcagatgccaggtgcagttctacggcctgagcgagaacgacgagtggacccaggacagagccaagcccgtgacccagatcgtgtctgccgaagcctggggcagagccgattgcgacgtgaagctggtggaaaagagcttcgagacagacaccaacctgaacttccagaacctgagcgtgatcggcttcagaatcctgctgctgaaagtggccggctttaacctgctgatgaccctgcggctgtggtccagcagggccaagcgatctggatctggagcaacaaacttctcactactcaaacaagcaggtgacgtggaggagaatcccgggcctactagtatggactggatttggcgcatccttttccttgtcggcgctgctaccggcgcccattccgggcccatggaccccgacctggaaatcagagccgccttcctgcggcagagaaacacagccctgagaacagaggtggccgagctggaacaagaggtgcagcggctggaaaacgaggtgtcccagtacgagacaagatacggccctctcggaggcggaaaaggatccggcggcggaggatctggcggaggcggatctgggggcggaggctctttcgaacaggtccaactggtgcagagcggagccgaggtcgtgaagcctggcgcttccgtgaagattagctgcaaagccagcggctacacctttaccggctactttatgcactgggtcaagcagagccctggccagagcctggaatggatcggcagaatccacccctacgacggcgacaccttctacaaccagaagttccagggcaaggccaccctgacagtggacaagagcagcaacaccgcccacatggaactgctgagcctgaccagcgaggacttcgccgtgtactactgcaccagatacgacggcagccgggctatggactattggggccagggcaccaccgtgaccgtgtctagtacgcgtatccagaaccctgatcctgccgtgtaccagctgcgggatagcaagagcagcgacaagagcgtgtgtctgttcaccgacttcgacagccagaccaacgtgtcccagagcaaggactccgacgtgtacatcaccgataagtgcgtgctggacatgcggagcatggacttcaagagcaactccgccgtggcctggtccaacaagtccgatttcgcctgcgccaacgccttcaacaacagcattatccccgaggacacattcttcccaagccccgagagcagctgcggctttaccagcgagagctaccagcagggcgtgctgagcgccaccatcctgtacgagatcctgctgggcaaggccaccctgtacgccgtgctggtgtctgccctggtgctgatggctatggtcaagcggaaggacagccgggga

SEQ ID NO: 35485 - DNA, 2091 bp, synthetic construct
  source 1..2091: mol_type = other DNA
atggccttaccagtgaccgccttgctcctgccgctggccttgctgctccacgccgccaggccggacatcgtgctgacccagagccctctgagcctggccgtgtctctgggacagcctgccatcatcagctgtagggccagccagagcgtgtcctttgccggcacctctctgatgcactggtatcaccagaagcccggccagcagcccagactgctgatctacagagccagcaacctggaagccggcgtgcccgatagattttccggcagcggcagcaagaccgacttcaccctgaccatcagccccgtggaagccgaagatgccgccacctactactgccagcagagcagagagtacccctacaccttcggcggaggcaccaagctggaaatcaagaggctcgagatccagaaccctgatcctgccgtgtaccagctgcgggatagcaagagcagcgacaagagcgtgtgtctgttcaccgacttcgacagccagaccaacgtgtcccagagcaaggactccgacgtgtacatcaccgataagtgcgtgctggacatgcggagcatggacttcaagagcaactccgccgtggcctggtccaacaagtccgatttcgcctgcgccaacgccttcaacaacagcattatccccgaggacacattcttcccaagccccgagagcagctgcggctttaccagcgagagctaccagcagggcgtgctgagcgccaccatcctgtacgagatcctgctgggcaaggccaccctgtacgccgtgctggtgtctgccctggtgctgatggctatggtcaagcggaaggacagccggggacgcgccaagagaagcggatctggcgtgaagcagaccctgaatttcgacctgctgaagctggctggcgacgtggaatccaacccaggccctactagtatggactggatttggcgcatccttttccttgtcggcgctgctaccggcgcccattccgggcccatggaccccgacctggaaatcagagccgccttcctgcggcagagaaacacagccctgagaacagaggtggccgagctggaacaagaggtgcagcggctggaaaacgaggtgtcccagtacgagacaagatacggccctctcggaggcggaaaaggatccggcggcggaggatctggcggaggcggatctgggggcggaggctctttcgaacaggtccaactggtgcagagcggagccgaggtcgtgaagcctggcgcttccgtgaagattagctgcaaagccagcggctacacctttaccggctactttatgcactgggtcaagcagagccctggccagagcctggaatggatcggcagaatccacccctacgacggcgacaccttctacaaccagaagttccagggcaaggccaccctgacagtggacaagagcagcaacaccgcccacatggaactgctgagcctgaccagcgaggacttcgccgtgtactactgcaccagatacgacggcagccgggctatggactattggggccagggcaccaccgtgaccgtgtctagtacgcgtgaggacctgaagaacgtgttcccacctgaggtggccgtgttcgagcctagcgaggccgagatcagccacacccagaaagccaccctcgtgtgcctggctaccggcttctaccccgaccatgtggaactgtcttggtgggtcaacggcaaagaggtgcacagcggcgtgtgtaccgacccccagccactgaaagaacagcccgccctgaacgacagccggtactgcctgagcagcagactgagagtgtccgccaccttctggcagaacccccggaaccacttcagatgccaggtgcagttctacggcctgagcgagaacgacgagtggacccaggacagagccaagcccgtgacccagatcgtgtctgccgaagcctggggcagagccgattgcgacgtgaagctggtggaaaagagcttcgagacagacaccaacctgaacttccagaacctgagcgtgatcggcttcagaatcctgctgctgaaagtggccggctttaacctgctgatgaccctgcggctgtggtccagc

SEQ ID NO: 35486 - DNA, 2010 bp, synthetic construct
  source 1..2010: mol_type = other DNA
atggccttaccagtgaccgccttgctcctgccgctggccttgctgctccacgccgccaggccggacatcgtgctgacccagagccctctgagcctggccgtgtctctgggacagcctgccatcatcagctgtagggccagccagagcgtgtcctttgccggcacctctctgatgcactggtatcaccagaagcccggccagcagcccagactgctgatctacagagccagcaacctggaagccggcgtgcccgatagattttccggcagcggcagcaagaccgacttcaccctgaccatcagccccgtggaagccgaagatgccgccacctactactgccagcagagcagagagtacccctacaccttcggcggaggcaccaagctggaaatcaagaggctcgaggacctgaagaacgtgttcccacctgaggtggccgtgttcgagcctagcgaggccgagatcagccacacccagaaagccaccctcgtgtgcctggctaccggcttctaccccgaccatgtggaactgtcttggtgggtcaacggcaaagaggtgcacagcggcgtgtgtaccgacccccagccactgaaagaacagcccgccctgaacgacagccggtactgcctgagcagcagactgagagtgtccgccaccttctggcagaacccccggaaccacttcagatgccaggtgcagttctacggcctgagcgagaacgacgagtggacccaggacagagccaagcccgtgacccagatcgtgtctgccgaagcctggggcagagccgattgcgacgtgaagctggtggaaaagagcttcgagacagacaccaacctgaacttccagaacctgagcgtgatcggcttcagaatcctgctgctgaaagtggccggctttaacctgctgatgaccctgcggctgtggtccagcagggccaagcgatctggatctggagcaacaaacttctcactactcaaacaagcaggtgacgtggaggagaatcccgggcctactagtatggactggatttggcgcatccttttccttgtcggcgctgctaccggcgcccattccgggcccgaagttgctgccctcgagaaggaggtagcagctttggaaaaagaagtcgcagcccttgagaaagaagttgcggctctggagaagggatccggcggcggaggatctggcggaggcggatctgggggcggaggctctttcgaacaggtccaactggtgcagagcggagccgaggtcgtgaagcctggcgcttccgtgaagattagctgcaaagccagcggctacacctttaccggctactttatgcactgggtcaagcagagccctggccagagcctggaatggatcggcagaatccacccctacgacggcgacaccttctacaaccagaagttccagggcaaggccaccctgacagtggacaagagcagcaacaccgcccacatggaactgctgagcctgaccagcgaggacttcgccgtgtactactgcaccagatacgacggcagccgggctatggactattggggccagggcaccaccgtgaccgtgtctagtacgcgtatccagaaccctgatcctgccgtgtaccagctgcgggatagcaagagcagcgacaagagcgtgtgtctgttcaccgacttcgacagccagaccaacgtgtcccagagcaaggactccgacgtgtacatcaccgataagtgcgtgctggacatgcggagcatggacttcaagagcaactccgccgtggcctggtccaacaagtccgatttcgcctgcgccaacgccttcaacaacagcattatccccgaggacacattcttcccaagccccgagagcagctgcggctttaccagcgagagctaccagcagggcgtgctgagcgccaccatcctgtacgagatcctgctgggcaaggccaccctgtacgccgtgctggtgtctgccctggtgctgatggctatggtcaagcggaaggacagccgggga

SEQ ID NO: 35487 - DNA, 2022 bp, synthetic construct
  source 1..2022: mol_type = other DNA
atggccttaccagtgaccgccttgctcctgccgctggccttgctgctccacgccgccaggccggacatcgtgctgacccagagccctctgagcctggccgtgtctctgggacagcctgccatcatcagctgtagggccagccagagcgtgtcctttgccggcacctctctgatgcactggtatcaccagaagcccggccagcagcccagactgctgatctacagagccagcaacctggaagccggcgtgcccgatagattttccggcagcggcagcaagaccgacttcaccctgaccatcagccccgtggaagccgaagatgccgccacctactactgccagcagagcagagagtacccctacaccttcggcggaggcaccaagctggaaatcaagaggctcgagatccagaaccctgatcctgccgtgtaccagctgcgggatagcaagagcagcgacaagagcgtgtgtctgttcaccgacttcgacagccagaccaacgtgtcccagagcaaggactccgacgtgtacatcaccgataagtgcgtgctggacatgcggagcatggacttcaagagcaactccgccgtggcctggtccaacaagtccgatttcgcctgcgccaacgccttcaacaacagcattatccccgaggacacattcttcccaagccccgagagcagctgcggctttaccagcgagagctaccagcagggcgtgctgagcgccaccatcctgtacgagatcctgctgggcaaggccaccctgtacgccgtgctggtgtctgccctggtgctgatggctatggtcaagcggaaggacagccggggacgcgccaagagaagcggatctggcgtgaagcagaccctgaatttcgacctgctgaagctggctggcgacgtggaatccaacccaggccctactagtatggactggatttggcgcatccttttccttgtcggcgctgctaccggcgcccattccgggcccgaagttgctgccctcgagaaggaggtagcagctttggaaaaagaagtcgcagcccttgagaaagaagttgcggctctggagaagggatccggcggcggaggatctggcggaggcggatctgggggcggaggctctttcgaacaggtccaactggtgcagagcggagccgaggtcgtgaagcctggcgcttccgtgaagattagctgcaaagccagcggctacacctttaccggctactttatgcactgggtcaagcagagccctggccagagcctggaatggatcggcagaatccacccctacgacggcgacaccttctacaaccagaagttccagggcaaggccaccctgacagtggacaagagcagcaacaccgcccacatggaactgctgagcctgaccagcgaggacttcgccgtgtactactgcaccagatacgacggcagccgggctatggactattggggccagggcaccaccgtgaccgtgtctagtacgcgtgaggacctgaagaacgtgttcccacctgaggtggccgtgttcgagcctagcgaggccgagatcagccacacccagaaagccaccctcgtgtgcctggctaccggcttctaccccgaccatgtggaactgtcttggtgggtcaacggcaaagaggtgcacagcggcgtgtgtaccgacccccagccactgaaagaacagcccgccctgaacgacagccggtactgcctgagcagcagactgagagtgtccgccaccttctggcagaacccccggaaccacttcagatgccaggtgcagttctacggcctgagcgagaacgacgagtggacccaggacagagccaagcccgtgacccagatcgtgtctgccgaagcctggggcagagccgattgcgacgtgaagctggtggaaaagagcttcgagacagacaccaacctgaacttccagaacctgagcgtgatcggcttcagaatcctgctgctgaaagtggccggctttaacctgctgatgaccctgcggctgtggtccagc

SEQ ID NO: 35488 - DNA, 2280 bp, synthetic construct
  source 1..2280: mol_type = other DNA
atggccttaccagtgaccgccttgctcctgccgctggccttgctgctccacgccgccaggccggacatcgtgctgacccagagccctctgagcctggccgtgtctctgggacagcctgccatcatcagctgtagggccagccagagcgtgtcctttgccggcacctctctgatgcactggtatcaccagaagcccggccagcagcccagactgctgatctacagagccagcaacctggaagccggcgtgcccgatagattttccggcagcggcagcaagaccgacttcaccctgaccatcagccccgtggaagccgaagatgccgccacctactactgccagcagagcagagagtacccctacaccttcggcggaggcaccaagctggaaatcaagaggctcgaggacctgaagaacgtgttcccacctgaggtggccgtgttcgagcctagcgaggccgagatcagccacacccagaaagccaccctcgtgtgcctggctaccggcttctaccccgaccatgtggaactgtcttggtgggtcaacggcaaagaggtgcacagcggcgtgtgtaccgacccccagccactgaaagaacagcccgccctgaacgacagccggtactgcctgagcagcagactgagagtgtccgccaccttctggcagaacccccggaaccacttcagatgccaggtgcagttctacggcctgagcgagaacgacgagtggacccaggacagagccaagcccgtgacccagatcgtgtctgccgaagcctggggcagagccgattgcgacgtgaagctggtggaaaagagcttcgagacagacaccaacctgaacttccagaacctgagcgtgatcggcttcagaatcctgctgctgaaagtggccggctttaacctgctgatgaccctgcggctgtggtccagcagggccaagcgatctggatctggagcaacaaacttctcactactcaaacaagcaggtgacgtggaggagaatcccgggcctactagtatggactggatttggcgcatccttttccttgtcggcgctgctaccggcgcccattccgggccccaggttcagctgcaagagtctggcggaggacttgctcaagctggcggaagcctgagactgtcttgtgccgcctctggcagaaccttcagcatgggctggtttagacaggcccctggcaaagagagagagttcgtcgccgccatcacatacagcggcggcagcccttactacgcctcttctgtcagaggccggttcaccatcagccgggacaacgccaagaacaccgtgtacctccagatgaacagcctgaagccagaggacaccgccgtgtactactgtgccgccaatccaacctacggcagcgactggaatgccgagaattggggccagggcacccaagtgacagtgtctagtggatccggcggcggaggatctggcggaggcggatctgggggcggaggctctttcgaacaggtccaactggtgcagagcggagccgaggtcgtgaagcctggcgcttccgtgaagattagctgcaaagccagcggctacacctttaccggctactttatgcactgggtcaagcagagccctggccagagcctggaatggatcggcagaatccacccctacgacggcgacaccttctacaaccagaagttccagggcaaggccaccctgacagtggacaagagcagcaacaccgcccacatggaactgctgagcctgaccagcgaggacttcgccgtgtactactgcaccagatacgacggcagccgggctatggactattggggccagggcaccaccgtgaccgtgtctagtacgcgtatccagaaccctgatcctgccgtgtaccagctgcgggatagcaagagcagcgacaagagcgtgtgtctgttcaccgacttcgacagccagaccaacgtgtcccagagcaaggactccgacgtgtacatcaccgataagtgcgtgctggacatgcggagcatggacttcaagagcaactccgccgtggcctggtccaacaagtccgatttcgcctgcgccaacgccttcaacaacagcattatccccgaggacacattcttcccaagccccgagagcagctgcggctttaccagcgagagctaccagcagggcgtgctgagcgccaccatcctgtacgagatcctgctgggcaaggccaccctgtacgccgtgctggtgtctgccctggtgctgatggctatggtcaagcggaaggacagccgggga

SEQ ID NO: 35489 - DNA, 2292 bp, synthetic construct
  source 1..2292: mol_type = other DNA
atggccttaccagtgaccgccttgctcctgccgctggccttgctgctccacgccgccaggccggacatcgtgctgacccagagccctctgagcctggccgtgtctctgggacagcctgccatcatcagctgtagggccagccagagcgtgtcctttgccggcacctctctgatgcactggtatcaccagaagcccggccagcagcccagactgctgatctacagagccagcaacctggaagccggcgtgcccgatagattttccggcagcggcagcaagaccgacttcaccctgaccatcagccccgtggaagccgaagatgccgccacctactactgccagcagagcagagagtacccctacaccttcggcggaggcaccaagctggaaatcaagaggctcgagatccagaaccctgatcctgccgtgtaccagctgcgggatagcaagagcagcgacaagagcgtgtgtctgttcaccgacttcgacagccagaccaacgtgtcccagagcaaggactccgacgtgtacatcaccgataagtgcgtgctggacatgcggagcatggacttcaagagcaactccgccgtggcctggtccaacaagtccgatttcgcctgcgccaacgccttcaacaacagcattatccccgaggacacattcttcccaagccccgagagcagctgcggctttaccagcgagagctaccagcagggcgtgctgagcgccaccatcctgtacgagatcctgctgggcaaggccaccctgtacgccgtgctggtgtctgccctggtgctgatggctatggtcaagcggaaggacagccggggacgcgccaagagaagcggatctggcgtgaagcagaccctgaatttcgacctgctgaagctggctggcgacgtggaatccaacccaggccctactagtatggactggatttggcgcatccttttccttgtcggcgctgctaccggcgcccattccgggccccaggttcagctgcaagagtctggcggaggacttgctcaagctggcggaagcctgagactgtcttgtgccgcctctggcagaaccttcagcatgggctggtttagacaggcccctggcaaagagagagagttcgtcgccgccatcacatacagcggcggcagcccttactacgcctcttctgtcagaggccggttcaccatcagccgggacaacgccaagaacaccgtgtacctccagatgaacagcctgaagccagaggacaccgccgtgtactactgtgccgccaatccaacctacggcagcgactggaatgccgagaattggggccagggcacccaagtgacagtgtctagtggatccggcggcggaggatctggcggaggcggatctgggggcggaggctctttcgaacaggtccaactggtgcagagcggagccgaggtcgtgaagcctggcgcttccgtgaagattagctgcaaagccagcggctacacctttaccggctactttatgcactgggtcaagcagagccctggccagagcctggaatggatcggcagaatccacccctacgacggcgacaccttctacaaccagaagttccagggcaaggccaccctgacagtggacaagagcagcaacaccgcccacatggaactgctgagcctgaccagcgaggacttcgccgtgtactactgcaccagatacgacggcagccgggctatggactattggggccagggcaccaccgtgaccgtgtctagtacgcgtgaggacctgaagaacgtgttcccacctgaggtggccgtgttcgagcctagcgaggccgagatcagccacacccagaaagccaccctcgtgtgcctggctaccggcttctaccccgaccatgtggaactgtcttggtgggtcaacggcaaagaggtgcacagcggcgtgtgtaccgacccccagccactgaaagaacagcccgccctgaacgacagccggtactgcctgagcagcagactgagagtgtccgccaccttctggcagaacccccggaaccacttcagatgccaggtgcagttctacggcctgagcgagaacgacgagtggacccaggacagagccaagcccgtgacccagatcgtgtctgccgaagcctggggcagagccgattgcgacgtgaagctggtggaaaagagcttcgagacagacaccaacctgaacttccagaacctgagcgtgatcggcttcagaatcctgctgctgaaagtggccggctttaacctgctgatgaccctgcggctgtggtccagc

SEQ ID NO: 35490 - DNA, 2298 bp, synthetic construct
  source 1..2298: mol_type = other DNA
atggccttaccagtgaccgccttgctcctgccgctggccttgctgctccacgccgccaggccggaagtgcaactggtggaatctggaggctctctggtgcagccagggggaagcctgagactgtcttgtgccgcttccggcttcaccttcgacgactacgccatgagctgggtgcgccaggtgccaggcaaaggcctggaatgggtgtccagcatcaactggagcggcacccacaccgattacgccgactccgtgaaaggcagattcacaatcagcagaaacaacgccaacaataccctgtacctgcagatgaactccctgaagtctgaggatacagcagtgtattattgcgccaagaactggcgggacgccggcaccacttggtttgagaaaagcggctctgccggacagggaacccaagtgacagtgtcctccggtaccggcggaggcggatctggcggcggaggtagcggtggcggaggatctgaattcgacatcgtgctgacccagagccctctgagcctggccgtgtctctgggacagcctgccatcatcagctgtagggccagccagagcgtgtcctttgccggcacctctctgatgcactggtatcaccagaagcccggccagcagcccagactgctgatctacagagccagcaacctggaagccggcgtgcccgatagattttccggcagcggcagcaagaccgacttcaccctgaccatcagccccgtggaagccgaagatgccgccacctactactgccagcagagcagagagtacccctacaccttcggcggaggcaccaagctggaaatcaagaggctcgaggacctgaagaacgtgttcccacctgaggtggccgtgttcgagcctagcgaggccgagatcagccacacccagaaagccaccctcgtgtgcctggctaccggcttctaccccgaccatgtggaactgtcttggtgggtcaacggcaaagaggtgcacagcggcgtgtgtaccgacccccagccactgaaagaacagcccgccctgaacgacagccggtactgcctgagcagcagactgagagtgtccgccaccttctggcagaacccccggaaccacttcagatgccaggtgcagttctacggcctgagcgagaacgacgagtggacccaggacagagccaagcccgtgacccagatcgtgtctgccgaagcctggggcagagccgattgcgacgtgaagctggtggaaaagagcttcgagacagacaccaacctgaacttccagaacctgagcgtgatcggcttcagaatcctgctgctgaaagtggccggctttaacctgctgatgaccctgcggctgtggtccagcagggccaagcgatctggatctggagcaacaaacttctcactactcaaacaagcaggtgacgtggaggagaatcccgggcctactagtatggactggatttggcgcatccttttccttgtcggcgctgctaccggcgcgcattccttcgaacaggtccaactggtgcagagcggagccgaggtcgtgaagcctggcgcttccgtgaagattagctgcaaagccagcggctacacctttaccggctactttatgcactgggtcaagcagagccctggccagagcctggaatggatcggcagaatccacccctacgacggcgacaccttctacaaccagaagttccagggcaaggccaccctgacagtggacaagagcagcaacaccgcccacatggaactgctgagcctgaccagcgaggacttcgccgtgtactactgcaccagatacgacggcagccgggctatggactattggggccagggcaccaccgtgaccgtgtctagtacgcgtatccagaaccctgatcctgccgtgtaccagctgcgggatagcaagagcagcgacaagagcgtgtgtctgttcaccgacttcgacagccagaccaacgtgtcccagagcaaggactccgacgtgtacatcaccgataagtgcgtgctggacatgcggagcatggacttcaagagcaactccgccgtggcctggtccaacaagtccgatttcgcctgcgccaacgccttcaacaacagcattatccccgaggacacattcttcccaagccccgagagcagctgcggctttaccagcgagagctaccagcagggcgtgctgagcgccaccatcctgtacgagatcctgctgggcaaggccaccctgtacgccgtgctggtgtctgccctggtgctgatggctatggtcaagcggaaggacagccgggga

SEQ ID NO: 35491 - DNA, 2310 bp, synthetic construct
  source 1..2310: mol_type = other DNA
atggccttaccagtgaccgccttgctcctgccgctggccttgctgctccacgccgccaggccggaagtgcaactggtggaatctggaggctctctggtgcagccagggggaagcctgagactgtcttgtgccgcttccggcttcaccttcgacgactacgccatgagctgggtgcgccaggtgccaggcaaaggcctggaatgggtgtccagcatcaactggagcggcacccacaccgattacgccgactccgtgaaaggcagattcacaatcagcagaaacaacgccaacaataccctgtacctgcagatgaactccctgaagtctgaggatacagcagtgtattattgcgccaagaactggcgggacgccggcaccacttggtttgagaaaagcggctctgccggacagggaacccaagtgacagtgtcctccggtaccggcggaggcggatctggcggcggaggtagcggtggcggaggatctgaattcgacatcgtgctgacccagagccctctgagcctggccgtgtctctgggacagcctgccatcatcagctgtagggccagccagagcgtgtcctttgccggcacctctctgatgcactggtatcaccagaagcccggccagcagcccagactgctgatctacagagccagcaacctggaagccggcgtgcccgatagattttccggcagcggcagcaagaccgacttcaccctgaccatcagccccgtggaagccgaagatgccgccacctactactgccagcagagcagagagtacccctacaccttcggcggaggcaccaagctggaaatcaagaggctcgagatccagaaccctgatcctgccgtgtaccagctgcgggatagcaagagcagcgacaagagcgtgtgtctgttcaccgacttcgacagccagaccaacgtgtcccagagcaaggactccgacgtgtacatcaccgataagtgcgtgctggacatgcggagcatggacttcaagagcaactccgccgtggcctggtccaacaagtccgatttcgcctgcgccaacgccttcaacaacagcattatccccgaggacacattcttcccaagccccgagagcagctgcggctttaccagcgagagctaccagcagggcgtgctgagcgccaccatcctgtacgagatcctgctgggcaaggccaccctgtacgccgtgctggtgtctgccctggtgctgatggctatggtcaagcggaaggacagccggggacgcgccaagagaagcggatctggcgtgaagcagaccctgaatttcgacctgctgaagctggctggcgacgtggaatccaacccaggccctactagtatggactggatttggcgcatccttttccttgtcggcgctgctaccggcgcgcattccttcgaacaggtccaactggtgcagagcggagccgaggtcgtgaagcctggcgcttccgtgaagattagctgcaaagccagcggctacacctttaccggctactttatgcactgggtcaagcagagccctggccagagcctggaatggatcggcagaatccacccctacgacggcgacaccttctacaaccagaagttccagggcaaggccaccctgacagtggacaagagcagcaacaccgcccacatggaactgctgagcctgaccagcgaggacttcgccgtgtactactgcaccagatacgacggcagccgggctatggactattggggccagggcaccaccgtgaccgtgtctagtacgcgtgaggacctgaagaacgtgttcccacctgaggtggccgtgttcgagcctagcgaggccgagatcagccacacccagaaagccaccctcgtgtgcctggctaccggcttctaccccgaccatgtggaactgtcttggtgggtcaacggcaaagaggtgcacagcggcgtgtgtaccgacccccagccactgaaagaacagcccgccctgaacgacagccggtactgcctgagcagcagactgagagtgtccgccaccttctggcagaacccccggaaccacttcagatgccaggtgcagttctacggcctgagcgagaacgacgagtggacccaggacagagccaagcccgtgacccagatcgtgtctgccgaagcctggggcagagccgattgcgacgtgaagctggtggaaaagagcttcgagacagacaccaacctgaacttccagaacctgagcgtgatcggcttcagaatcctgctgctgaaagtggccggctttaacctgctgatgaccctgcggctgtggtccagc

SEQ ID NO: 35492 - DNA, 2292 bp, synthetic construct
  source 1..2292: mol_type = other DNA
atggccttaccagtgaccgccttgctcctgccgctggccttgctgctccacgccgccaggccggaagttcagctgcttgagtctggcggaggactggttcaacctggcggaagcctgagactgtcttgtgccgccagcggcttcatcttcagcagctacgccatgagctgggtccgacaggctcctggaaagggccaagaatgggtttccggcgttagcggcacaggcgtgaacacctactacgccgatagcgtgaagggcagattcaccatcagccgggacaacagcaagaacaccctgtacctccagatgaacagcctgagagccgaggacaccgccgtgtactattgtgcctctggcaaaggctgggacagcggctcttggtacgaggactatagaggccagggcaccctggtcacagtttcttcaggtaccggcggaggcggatctggcggcggaggtagcggtggcggaggatctgaattcgacatcgtgctgacccagagccctctgagcctggccgtgtctctgggacagcctgccatcatcagctgtagggccagccagagcgtgtcctttgccggcacctctctgatgcactggtatcaccagaagcccggccagcagcccagactgctgatctacagagccagcaacctggaagccggcgtgcccgatagattttccggcagcggcagcaagaccgacttcaccctgaccatcagccccgtggaagccgaagatgccgccacctactactgccagcagagcagagagtacccctacaccttcggcggaggcaccaagctggaaatcaagaggctcgaggacctgaagaacgtgttcccacctgaggtggccgtgttcgagcctagcgaggccgagatcagccacacccagaaagccaccctcgtgtgcctggctaccggcttctaccccgaccatgtggaactgtcttggtgggtcaacggcaaagaggtgcacagcggcgtgtgtaccgacccccagccactgaaagaacagcccgccctgaacgacagccggtactgcctgagcagcagactgagagtgtccgccaccttctggcagaacccccggaaccacttcagatgccaggtgcagttctacggcctgagcgagaacgacgagtggacccaggacagagccaagcccgtgacccagatcgtgtctgccgaagcctggggcagagccgattgcgacgtgaagctggtggaaaagagcttcgagacagacaccaacctgaacttccagaacctgagcgtgatcggcttcagaatcctgctgctgaaagtggccggctttaacctgctgatgaccctgcggctgtggtccagcagggccaagcgatctggatctggagcaacaaacttctcactactcaaacaagcaggtgacgtggaggagaatcccgggcctactagtatggactggatttggcgcatccttttccttgtcggcgctgctaccggcgcgcattccttcgaacaggtccaactggtgcagagcggagccgaggtcgtgaagcctggcgcttccgtgaagattagctgcaaagccagcggctacacctttaccggctactttatgcactgggtcaagcagagccctggccagagcctggaatggatcggcagaatccacccctacgacggcgacaccttctacaaccagaagttccagggcaaggccaccctgacagtggacaagagcagcaacaccgcccacatggaactgctgagcctgaccagcgaggacttcgccgtgtactactgcaccagatacgacggcagccgggctatggactattggggccagggcaccaccgtgaccgtgtctagtacgcgtatccagaaccctgatcctgccgtgtaccagctgcgggatagcaagagcagcgacaagagcgtgtgtctgttcaccgacttcgacagccagaccaacgtgtcccagagcaaggactccgacgtgtacatcaccgataagtgcgtgctggacatgcggagcatggacttcaagagcaactccgccgtggcctggtccaacaagtccgatttcgcctgcgccaacgccttcaacaacagcattatccccgaggacacattcttcccaagccccgagagcagctgcggctttaccagcgagagctaccagcagggcgtgctgagcgccaccatcctgtacgagatcctgctgggcaaggccaccctgtacgccgtgctggtgtctgccctggtgctgatggctatggtcaagcggaaggacagccgggga

SEQ ID NO: 35493 - DNA, 2304 bp, synthetic construct
  source 1..2304: mol_type = other DNA
atggccttaccagtgaccgccttgctcctgccgctggccttgctgctccacgccgccaggccggaagttcagctgcttgagtctggcggaggactggttcaacctggcggaagcctgagactgtcttgtgccgccagcggcttcatcttcagcagctacgccatgagctgggtccgacaggctcctggaaagggccaagaatgggtttccggcgttagcggcacaggcgtgaacacctactacgccgatagcgtgaagggcagattcaccatcagccgggacaacagcaagaacaccctgtacctccagatgaacagcctgagagccgaggacaccgccgtgtactattgtgcctctggcaaaggctgggacagcggctcttggtacgaggactatagaggccagggcaccctggtcacagtttcttcaggtaccggcggaggcggatctggcggcggaggtagcggtggcggaggatctgaattcgacatcgtgctgacccagagccctctgagcctggccgtgtctctgggacagcctgccatcatcagctgtagggccagccagagcgtgtcctttgccggcacctctctgatgcactggtatcaccagaagcccggccagcagcccagactgctgatctacagagccagcaacctggaagccggcgtgcccgatagattttccggcagcggcagcaagaccgacttcaccctgaccatcagccccgtggaagccgaagatgccgccacctactactgccagcagagcagagagtacccctacaccttcggcggaggcaccaagctggaaatcaagaggctcgagatccagaaccctgatcctgccgtgtaccagctgcgggatagcaagagcagcgacaagagcgtgtgtctgttcaccgacttcgacagccagaccaacgtgtcccagagcaaggactccgacgtgtacatcaccgataagtgcgtgctggacatgcggagcatggacttcaagagcaactccgccgtggcctggtccaacaagtccgatttcgcctgcgccaacgccttcaacaacagcattatccccgaggacacattcttcccaagccccgagagcagctgcggctttaccagcgagagctaccagcagggcgtgctgagcgccaccatcctgtacgagatcctgctgggcaaggccaccctgtacgccgtgctggtgtctgccctggtgctgatggctatggtcaagcggaaggacagccggggacgcgccaagagaagcggatctggcgtgaagcagaccctgaatttcgacctgctgaagctggctggcgacgtggaatccaacccaggccctactagtatggactggatttggcgcatccttttccttgtcggcgctgctaccggcgcgcattccttcgaacaggtccaactggtgcagagcggagccgaggtcgtgaagcctggcgcttccgtgaagattagctgcaaagccagcggctacacctttaccggctactttatgcactgggtcaagcagagccctggccagagcctggaatggatcggcagaatccacccctacgacggcgacaccttctacaaccagaagttccagggcaaggccaccctgacagtggacaagagcagcaacaccgcccacatggaactgctgagcctgaccagcgaggacttcgccgtgtactactgcaccagatacgacggcagccgggctatggactattggggccagggcaccaccgtgaccgtgtctagtacgcgtgaggacctgaagaacgtgttcccacctgaggtggccgtgttcgagcctagcgaggccgagatcagccacacccagaaagccaccctcgtgtgcctggctaccggcttctaccccgaccatgtggaactgtcttggtgggtcaacggcaaagaggtgcacagcggcgtgtgtaccgacccccagccactgaaagaacagcccgccctgaacgacagccggtactgcctgagcagcagactgagagtgtccgccaccttctggcagaacccccggaaccacttcagatgccaggtgcagttctacggcctgagcgagaacgacgagtggacccaggacagagccaagcccgtgacccagatcgtgtctgccgaagcctggggcagagccgattgcgacgtgaagctggtggaaaagagcttcgagacagacaccaacctgaacttccagaacctgagcgtgatcggcttcagaatcctgctgctgaaagtggccggctttaacctgctgatgaccctgcggctgtggtccagc

SEQ ID NO: 35494 - DNA, 2196 bp, synthetic construct
  source 1..2196: mol_type = other DNA
atggccttaccagtgaccgccttgctcctgccgctggccttgctgctccacgccgccaggccgatgctgcccgctcctaagaatctggtggtgtccagaatcaccgaggacagcgccagactgtcttggacagctcctgatgccgccttcgacagcttccccatccggtacatcgagacactgatctggggcgaagccatctggctggatgtgcctggaagcgagagaagctacgacctgaccggactgaagcctggcacagagtatgccgtggtcatcaccggcgtgaaaggcggcagattctctagccctctggtggcctctttcaccaccggtaccggcggaggcggatctggcggcggaggtagcggtggcggaggatctgaattcgacatcgtgctgacccagagccctctgagcctggccgtgtctctgggacagcctgccatcatcagctgtagggccagccagagcgtgtcctttgccggcacctctctgatgcactggtatcaccagaagcccggccagcagcccagactgctgatctacagagccagcaacctggaagccggcgtgcccgatagattttccggcagcggcagcaagaccgacttcaccctgaccatcagccccgtggaagccgaagatgccgccacctactactgccagcagagcagagagtacccctacaccttcggcggaggcaccaagctggaaatcaagaggctcgaggacctgaagaacgtgttcccacctgaggtggccgtgttcgagcctagcgaggccgagatcagccacacccagaaagccaccctcgtgtgcctggctaccggcttctaccccgaccatgtggaactgtcttggtgggtcaacggcaaagaggtgcacagcggcgtgtgtaccgacccccagccactgaaagaacagcccgccctgaacgacagccggtactgcctgagcagcagactgagagtgtccgccaccttctggcagaacccccggaaccacttcagatgccaggtgcagttctacggcctgagcgagaacgacgagtggacccaggacagagccaagcccgtgacccagatcgtgtctgccgaagcctggggcagagccgattgcgacgtgaagctggtggaaaagagcttcgagacagacaccaacctgaacttccagaacctgagcgtgatcggcttcagaatcctgctgctgaaagtggccggctttaacctgctgatgaccctgcggctgtggtccagcagggccaagcgatctggatctggagcaacaaacttctcactactcaaacaagcaggtgacgtggaggagaatcccgggcctactagtatggactggatttggcgcatccttttccttgtcggcgctgctaccggcgcgcattccttcgaacaggtccaactggtgcagagcggagccgaggtcgtgaagcctggcgcttccgtgaagattagctgcaaagccagcggctacacctttaccggctactttatgcactgggtcaagcagagccctggccagagcctggaatggatcggcagaatccacccctacgacggcgacaccttctacaaccagaagttccagggcaaggccaccctgacagtggacaagagcagcaacaccgcccacatggaactgctgagcctgaccagcgaggacttcgccgtgtactactgcaccagatacgacggcagccgggctatggactattggggccagggcaccaccgtgaccgtgtctagtacgcgtatccagaaccctgatcctgccgtgtaccagctgcgggatagcaagagcagcgacaagagcgtgtgtctgttcaccgacttcgacagccagaccaacgtgtcccagagcaaggactccgacgtgtacatcaccgataagtgcgtgctggacatgcggagcatggacttcaagagcaactccgccgtggcctggtccaacaagtccgatttcgcctgcgccaacgccttcaacaacagcattatccccgaggacacattcttcccaagccccgagagcagctgcggctttaccagcgagagctaccagcagggcgtgctgagcgccaccatcctgtacgagatcctgctgggcaaggccaccctgtacgccgtgctggtgtctgccctggtgctgatggctatggtcaagcggaaggacagccgggga

SEQ ID NO: 35495 - DNA, 2208 bp, synthetic construct
  source 1..2208: mol_type = other DNA
atggccttaccagtgaccgccttgctcctgccgctggccttgctgctccacgccgccaggccgatgctgcccgctcctaagaatctggtggtgtccagaatcaccgaggacagcgccagactgtcttggacagctcctgatgccgccttcgacagcttccccatccggtacatcgagacactgatctggggcgaagccatctggctggatgtgcctggaagcgagagaagctacgacctgaccggactgaagcctggcacagagtatgccgtggtcatcaccggcgtgaaaggcggcagattctctagccctctggtggcctctttcaccaccggtaccggcggaggcggatctggcggcggaggtagcggtggcggaggatctgaattcgacatcgtgctgacccagagccctctgagcctggccgtgtctctgggacagcctgccatcatcagctgtagggccagccagagcgtgtcctttgccggcacctctctgatgcactggtatcaccagaagcccggccagcagcccagactgctgatctacagagccagcaacctggaagccggcgtgcccgatagattttccggcagcggcagcaagaccgacttcaccctgaccatcagccccgtggaagccgaagatgccgccacctactactgccagcagagcagagagtacccctacaccttcggcggaggcaccaagctggaaatcaagaggctcgagatccagaaccctgatcctgccgtgtaccagctgcgggatagcaagagcagcgacaagagcgtgtgtctgttcaccgacttcgacagccagaccaacgtgtcccagagcaaggactccgacgtgtacatcaccgataagtgcgtgctggacatgcggagcatggacttcaagagcaactccgccgtggcctggtccaacaagtccgatttcgcctgcgccaacgccttcaacaacagcattatccccgaggacacattcttcccaagccccgagagcagctgcggctttaccagcgagagctaccagcagggcgtgctgagcgccaccatcctgtacgagatcctgctgggcaaggccaccctgtacgccgtgctggtgtctgccctggtgctgatggctatggtcaagcggaaggacagccggggacgcgccaagagaagcggatctggcgtgaagcagaccctgaatttcgacctgctgaagctggctggcgacgtggaatccaacccaggccctactagtatggactggatttggcgcatccttttccttgtcggcgctgctaccggcgcgcattccttcgaacaggtccaactggtgcagagcggagccgaggtcgtgaagcctggcgcttccgtgaagattagctgcaaagccagcggctacacctttaccggctactttatgcactgggtcaagcagagccctggccagagcctggaatggatcggcagaatccacccctacgacggcgacaccttctacaaccagaagttccagggcaaggccaccctgacagtggacaagagcagcaacaccgcccacatggaactgctgagcctgaccagcgaggacttcgccgtgtactactgcaccagatacgacggcagccgggctatggactattggggccagggcaccaccgtgaccgtgtctagtacgcgtgaggacctgaagaacgtgttcccacctgaggtggccgtgttcgagcctagcgaggccgagatcagccacacccagaaagccaccctcgtgtgcctggctaccggcttctaccccgaccatgtggaactgtcttggtgggtcaacggcaaagaggtgcacagcggcgtgtgtaccgacccccagccactgaaagaacagcccgccctgaacgacagccggtactgcctgagcagcagactgagagtgtccgccaccttctggcagaacccccggaaccacttcagatgccaggtgcagttctacggcctgagcgagaacgacgagtggacccaggacagagccaagcccgtgacccagatcgtgtctgccgaagcctggggcagagccgattgcgacgtgaagctggtggaaaagagcttcgagacagacaccaacctgaacttccagaacctgagcgtgatcggcttcagaatcctgctgctgaaagtggccggctttaacctgctgatgaccctgcggctgtggtccagc

SEQ ID NO: 35496 - DNA, 2283 bp, synthetic construct
  source 1..2283: mol_type = other DNA
atggccttaccagtgaccgccttgctcctgccgctggccttgctgctccacgccgccaggccggaggtgcagctggttgaatctggcggaggactggttcagcctggcggatctctgagactgtcttgtgccgccagcggcttcaacatcaaggatacctgtatcggctgggttcgcagagcccctggcaaagaggaagaactggtcgccaaaatctgcaagtacagcggccacaccagatacgccgacagcgtgaagggcagattcaccatcagcgccgacaccagcaagaacaccgcctacctccagatgaacagcctgagagccgaggacaccgccgtgtactattgtgccgctgtgtccgtcagagatgggcactacaattactggggccagggcaccaccgtgaccgtttcttcaggtaccggcggaggcggatctggcggcggaggtagcggtggcggaggatctgaattcgacatcgtgctgacccagagccctctgagcctggccgtgtctctgggacagcctgccatcatcagctgtagggccagccagagcgtgtcctttgccggcacctctctgatgcactggtatcaccagaagcccggccagcagcccagactgctgatctacagagccagcaacctggaagccggcgtgcccgatagattttccggcagcggcagcaagaccgacttcaccctgaccatcagccccgtggaagccgaagatgccgccacctactactgccagcagagcagagagtacccctacaccttcggcggaggcaccaagctggaaatcaagaggctcgaggacctgaagaacgtgttcccacctgaggtggccgtgttcgagcctagcgaggccgagatcagccacacccagaaagccaccctcgtgtgcctggctaccggcttctaccccgaccatgtggaactgtcttggtgggtcaacggcaaagaggtgcacagcggcgtgtgtaccgacccccagccactgaaagaacagcccgccctgaacgacagccggtactgcctgagcagcagactgagagtgtccgccaccttctggcagaacccccggaaccacttcagatgccaggtgcagttctacggcctgagcgagaacgacgagtggacccaggacagagccaagcccgtgacccagatcgtgtctgccgaagcctggggcagagccgattgcgacgtgaagctggtggaaaagagcttcgagacagacaccaacctgaacttccagaacctgagcgtgatcggcttcagaatcctgctgctgaaagtggccggctttaacctgctgatgaccctgcggctgtggtccagcagggccaagcgatctggatctggagcaacaaacttctcactactcaaacaagcaggtgacgtggaggagaatcccgggcctactagtatggactggatttggcgcatccttttccttgtcggcgctgctaccggcgcgcattccttcgaacaggtccaactggtgcagagcggagccgaggtcgtgaagcctggcgcttccgtgaagattagctgcaaagccagcggctacacctttaccggctactttatgcactgggtcaagcagagccctggccagagcctggaatggatcggcagaatccacccctacgacggcgacaccttctacaaccagaagttccagggcaaggccaccctgacagtggacaagagcagcaacaccgcccacatggaactgctgagcctgaccagcgaggacttcgccgtgtactactgcaccagatacgacggcagccgggctatggactattggggccagggcaccaccgtgaccgtgtctagtacgcgtatccagaaccctgatcctgccgtgtaccagctgcgggatagcaagagcagcgacaagagcgtgtgtctgttcaccgacttcgacagccagaccaacgtgtcccagagcaaggactccgacgtgtacatcaccgataagtgcgtgctggacatgcggagcatggacttcaagagcaactccgccgtggcctggtccaacaagtccgatttcgcctgcgccaacgccttcaacaacagcattatccccgaggacacattcttcccaagccccgagagcagctgcggctttaccagcgagagctaccagcagggcgtgctgagcgccaccatcctgtacgagatcctgctgggcaaggccaccctgtacgccgtgctggtgtctgccctggtgctgatggctatggtcaagcggaaggacagccgggga

SEQ ID NO: 35497 - DNA, 2295 bp, synthetic construct
  source 1..2295: mol_type = other DNA
atggccttaccagtgaccgccttgctcctgccgctggccttgctgctccacgccgccaggccggaggtgcagctggttgaatctggcggaggactggttcagcctggcggatctctgagactgtcttgtgccgccagcggcttcaacatcaaggatacctgtatcggctgggttcgcagagcccctggcaaagaggaagaactggtcgccaaaatctgcaagtacagcggccacaccagatacgccgacagcgtgaagggcagattcaccatcagcgccgacaccagcaagaacaccgcctacctccagatgaacagcctgagagccgaggacaccgccgtgtactattgtgccgctgtgtccgtcagagatgggcactacaattactggggccagggcaccaccgtgaccgtttcttcaggtaccggcggaggcggatctggcggcggaggtagcggtggcggaggatctgaattcgacatcgtgctgacccagagccctctgagcctggccgtgtctctgggacagcctgccatcatcagctgtagggccagccagagcgtgtcctttgccggcacctctctgatgcactggtatcaccagaagcccggccagcagcccagactgctgatctacagagccagcaacctggaagccggcgtgcccgatagattttccggcagcggcagcaagaccgacttcaccctgaccatcagccccgtggaagccgaagatgccgccacctactactgccagcagagcagagagtacccctacaccttcggcggaggcaccaagctggaaatcaagaggctcgagatccagaaccctgatcctgccgtgtaccagctgcgggatagcaagagcagcgacaagagcgtgtgtctgttcaccgacttcgacagccagaccaacgtgtcccagagcaaggactccgacgtgtacatcaccgataagtgcgtgctggacatgcggagcatggacttcaagagcaactccgccgtggcctggtccaacaagtccgatttcgcctgcgccaacgccttcaacaacagcattatccccgaggacacattcttcccaagccccgagagcagctgcggctttaccagcgagagctaccagcagggcgtgctgagcgccaccatcctgtacgagatcctgctgggcaaggccaccctgtacgccgtgctggtgtctgccctggtgctgatggctatggtcaagcggaaggacagccggggacgcgccaagagaagcggatctggcgtgaagcagaccctgaatttcgacctgctgaagctggctggcgacgtggaatccaacccaggccctactagtatggactggatttggcgcatccttttccttgtcggcgctgctaccggcgcgcattccttcgaacaggtccaactggtgcagagcggagccgaggtcgtgaagcctggcgcttccgtgaagattagctgcaaagccagcggctacacctttaccggctactttatgcactgggtcaagcagagccctggccagagcctggaatggatcggcagaatccacccctacgacggcgacaccttctacaaccagaagttccagggcaaggccaccctgacagtggacaagagcagcaacaccgcccacatggaactgctgagcctgaccagcgaggacttcgccgtgtactactgcaccagatacgacggcagccgggctatggactattggggccagggcaccaccgtgaccgtgtctagtacgcgtgaggacctgaagaacgtgttcccacctgaggtggccgtgttcgagcctagcgaggccgagatcagccacacccagaaagccaccctcgtgtgcctggctaccggcttctaccccgaccatgtggaactgtcttggtgggtcaacggcaaagaggtgcacagcggcgtgtgtaccgacccccagccactgaaagaacagcccgccctgaacgacagccggtactgcctgagcagcagactgagagtgtccgccaccttctggcagaacccccggaaccacttcagatgccaggtgcagttctacggcctgagcgagaacgacgagtggacccaggacagagccaagcccgtgacccagatcgtgtctgccgaagcctggggcagagccgattgcgacgtgaagctggtggaaaagagcttcgagacagacaccaacctgaacttccagaacctgagcgtgatcggcttcagaatcctgctgctgaaagtggccggctttaacctgctgatgaccctgcggctgtggtccagc

SEQ ID NO: 35498 - DNA, 3399 bp, synthetic construct
  source 1..3399: mol_type = other DNA
atggccttaccagtgaccgccttgctcctgccgctggccttgctgctccacgccgccaggccggaagtgcagctggttgaatctggcggaggactggttcaggctggcggatctctgagactgtcttgtgccgccagcggcagaacctttagcatgggctggtttagacaggcccctggcaaagagagagagttcgtcgccgccatcacatactctggcggcagcccttactacgccgactctgtgaagggcagattcaccatcagccgggacaacgccaagaacaccgtgtacctccagatgaacagcctgaagcctgaggacaccgccgtgtactactgcgccgccaatccaacatacggcagcgactggaacgccgagaattggggccagggaacccaagtgacagtgtctagcggtaccggcggaggcggatctggcggcggaggtagcggtggcggaggatctgaattcgacatcgtgctgacccagagccctctgagcctggccgtgtctctgggacagcctgccatcatcagctgtagggccagccagagcgtgtcctttgccggcacctctctgatgcactggtatcaccagaagcccggccagcagcccagactgctgatctacagagccagcaacctggaagccggcgtgcccgatagattttccggcagcggcagcaagaccgacttcaccctgaccatcagccccgtggaagccgaagatgccgccacctactactgccagcagagcagagagtacccctacaccttcggcggaggcaccaagctggaaatcaagaggctcgaggacctgaagaacgtgttcccacctgaggtggccgtgttcgagcctagcgaggccgagatcagccacacccagaaagccaccctcgtgtgcctggctaccggcttctaccccgaccatgtggaactgtcttggtgggtcaacggcaaagaggtgcacagcggcgtgtgtaccgacccccagccactgaaagaacagcccgccctgaacgacagccggtactgcctgagcagcagactgagagtgtccgccaccttctggcagaacccccggaaccacttcagatgccaggtgcagttctacggcctgagcgagaacgacgagtggacccaggacagagccaagcccgtgacccagatcgtgtctgccgaagcctggggcagagccgattgcgacgtgaagctggtggaaaagagcttcgagacagacaccaacctgaacttccagaacctgagcgtgatcggcttcagaatcctgctgctgaaagtggccggctttaacctgctgatgaccctgcggctgtggtccagcagggccaagcgatctggatctggagcaacaaacttctcactactcaaacaagcaggtgacgtggaggagaatcccgggcctactagtgccaccatggactggatttggcgcatccttttccttgtcggcgctgctaccggcgcccattccgggcccgaagtgcaactggttgaatccggtggcggcctggtgcaagcaggcggatctctcagacttagctgtgccgcctccggcagaaccttcacaatgggatggtttaggcaggctccagggaaagagagagagttcgtcgccgccatctctctgtctcccacactggcctactacgccgactctgtgaaaggccggttcaccatctccagagataatgccaagaacaccgtggtgctgcaaatgaactctctgaaacccgaggatacagccctgtactattgtgccgctgaccggaagtccgtgatgagcatcagacccgattactggggacagggcacacaagtcacagtgtcctctggatccggcggcggaggatctggcggaggcggatctgggggcggaggctctttcgaacaggtccaactggtgcagagcggagccgaggtcgtgaagcctggcgcttccgtgaagattagctgcaaagccagcggctacacctttaccggctactttatgcactgggtcaagcagagccctggccagagcctggaatggatcggcagaatccacccctacgacggcgacaccttctacaaccagaagttccagggcaaggccaccctgacagtggacaagagcagcaacaccgcccacatggaactgctgagcctgaccagcgaggacttcgccgtgtactactgcaccagatacgacggcagccgggctatggactattggggccagggcaccaccgtgaccgtgtctagtacgcgtatccagaaccctgatcctgccgtgtaccagctgcgggatagcaagagcagcgacaagagcgtgtgtctgttcaccgacttcgacagccagaccaacgtgtcccagagcaaggactccgacgtgtacatcaccgataagtgcgtgctggacatgcggagcatggacttcaagagcaactccgccgtggcctggtccaacaagtccgatttcgcctgcgccaacgccttcaacaacagcattatccccgaggacacattcttcccaagccccgagagcagctgcggctttaccagcgagagctaccagcagggcgtgctgagcgccaccatcctgtacgagatcctgctgggcaaggccaccctgtacgccgtgctggtgtctgccctggtgctgatggctatggtcaagcggaaggacagccggggacgcgccaagagaagcggatctggcgtgaagcagaccctgaatttcgacctgctgaagctggctggcgacgtggaatccaacccaggcccttctagaggccatatgaccgagtacaagcccacggtgcgcctcgccacccgcgacgacgtccccagggccgtacgcaccctcgccgccgcgttcgccgactaccccgccacgcgccacaccgtcgatccggaccgccacatcgagcgggtcaccgagctgcaagaactcttcctcacgcgcgtcgggctcgacatcggcaaggtgtgggtcgcggacgacggcgccgcggtggcggtctggaccacgccggagagcgtcgaagcgggggcggtgttcgccgagatcggcccgcgcatggccgagttgagcggttcccggctggccgcgcagcaacagatggaaggcctcctggcgccgcaccggcccaaggagcccgcgtggttcctggccaccgtcggcgtctcgcccgaccaccagggcaagggtctgggcagcgccgtcgtgctccccggagtggaggcggccgagcgcgccggggtgcccgccttcctggagacctccgcgccccgcaacctccccttctacgagcggctcggcttcaccgtcaccgccgacgtcgaggtgcccgaaggaccgcgcacctggtgcatgacccgcaagcccggtgcctga

SEQ ID NO: 35499 - DNA, 2313 bp, synthetic construct
  source 1..2313: mol_type = other DNA
atggccttaccagtgaccgccttgctcctgccgctggccttgctgctccacgccgccaggccggaagtgcagctggttgaatctggcggaggactggttcagcctggcggatctctgagactgtcttgtgccgcctctggcttcgccagcgactactatatcatcggctggttcagacaggcccctggcaaagagagagagggcgtcagctgtatcagcagcagatacgccaacaccaactacgccgacagcgtgaagggcagattcaccatcagccgggacaacgccaagaacaccgtgtacctccagatgaacagcctgaagcctgaggacaccgccgtgtactactgtgccgccgacaccagaagatacacctgtcctgacattgccaccatgcaccggaacttcgattcttggggccagggcacactggtcaccgtttcttctggtaccggcggaggcggatctggcggcggaggtagcggtggcggaggatctgaattcgacatcgtgctgacccagagccctctgagcctggccgtgtctctgggacagcctgccatcatcagctgtagggccagccagagcgtgtcctttgccggcacctctctgatgcactggtatcaccagaagcccggccagcagcccagactgctgatctacagagccagcaacctggaagccggcgtgcccgatagattttccggcagcggcagcaagaccgacttcaccctgaccatcagccccgtggaagccgaagatgccgccacctactactgccagcagagcagagagtacccctacaccttcggcggaggcaccaagctggaaatcaagaggctcgaggacctgaagaacgtgttcccacctgaggtggccgtgttcgagcctagcgaggccgagatcagccacacccagaaagccaccctcgtgtgcctggctaccggcttctaccccgaccatgtggaactgtcttggtgggtcaacggcaaagaggtgcacagcggcgtgtgtaccgacccccagccactgaaagaacagcccgccctgaacgacagccggtactgcctgagcagcagactgagagtgtccgccaccttctggcagaacccccggaaccacttcagatgccaggtgcagttctacggcctgagcgagaacgacgagtggacccaggacagagccaagcccgtgacccagatcgtgtctgccgaagcctggggcagagccgattgcgacgtgaagctggtggaaaagagcttcgagacagacaccaacctgaacttccagaacctgagcgtgatcggcttcagaatcctgctgctgaaagtggccggctttaacctgctgatgaccctgcggctgtggtccagcagggccaagcgatctggatctggagcaacaaacttctcactactcaaacaagcaggtgacgtggaggagaatcccgggcctactagtatggactggatttggcgcatccttttccttgtcggcgctgctaccggcgcgcattccttcgaacaggtccaactggtgcagagcggagccgaggtcgtgaagcctggcgcttccgtgaagattagctgcaaagccagcggctacacctttaccggctactttatgcactgggtcaagcagagccctggccagagcctggaatggatcggcagaatccacccctacgacggcgacaccttctacaaccagaagttccagggcaaggccaccctgacagtggacaagagcagcaacaccgcccacatggaactgctgagcctgaccagcgaggacttcgccgtgtactactgcaccagatacgacggcagccgggctatggactattggggccagggcaccaccgtgaccgtgtctagtacgcgtatccagaaccctgatcctgccgtgtaccagctgcgggatagcaagagcagcgacaagagcgtgtgtctgttcaccgacttcgacagccagaccaacgtgtcccagagcaaggactccgacgtgtacatcaccgataagtgcgtgctggacatgcggagcatggacttcaagagcaactccgccgtggcctggtccaacaagtccgatttcgcctgcgccaacgccttcaacaacagcattatccccgaggacacattcttcccaagccccgagagcagctgcggctttaccagcgagagctaccagcagggcgtgctgagcgccaccatcctgtacgagatcctgctgggcaaggccaccctgtacgccgtgctggtgtctgccctggtgctgatggctatggtcaagcggaaggacagccggggataa

SEQ ID NO: 35500 - DNA, 2313 bp, synthetic construct
  source 1..2313: mol_type = other DNA
atggccttaccagtgaccgccttgctcctgccgctggccttgctgctccacgccgccaggccggaagtgcagctggttgaatctggcggaggactggttcagcctggcggatctctgagactgagctgtgaagccagcggcttcgccagcgacgattacatcatcggctggttcagacaggcccctggcaaagagagagagggcgtcagctgcatcagctctaagtacgccaacaccgtgtacaccgacagcgtgaagggcagattcagactgagcagaggcaccgccaagaataccgtgtacctccagatgagcgccctgaagcctgaggataccgccgtgtactactgcgctatggacagccgcagagtgacatgccctgagatcagcaccatgcaccggaacttcgattcttggggccagggcacactggtcacagtgtcatctggtaccggcggaggcggatctggcggcggaggtagcggtggcggaggatctgaattcgacatcgtgctgacccagagccctctgagcctggccgtgtctctgggacagcctgccatcatcagctgtagggccagccagagcgtgtcctttgccggcacctctctgatgcactggtatcaccagaagcccggccagcagcccagactgctgatctacagagccagcaacctggaagccggcgtgcccgatagattttccggcagcggcagcaagaccgacttcaccctgaccatcagccccgtggaagccgaagatgccgccacctactactgccagcagagcagagagtacccctacaccttcggcggaggcaccaagctggaaatcaagaggctcgaggacctgaagaacgtgttcccacctgaggtggccgtgttcgagcctagcgaggccgagatcagccacacccagaaagccaccctcgtgtgcctggctaccggcttctaccccgaccatgtggaactgtcttggtgggtcaacggcaaagaggtgcacagcggcgtgtgtaccgacccccagccactgaaagaacagcccgccctgaacgacagccggtactgcctgagcagcagactgagagtgtccgccaccttctggcagaacccccggaaccacttcagatgccaggtgcagttctacggcctgagcgagaacgacgagtggacccaggacagagccaagcccgtgacccagatcgtgtctgccgaagcctggggcagagccgattgcgacgtgaagctggtggaaaagagcttcgagacagacaccaacctgaacttccagaacctgagcgtgatcggcttcagaatcctgctgctgaaagtggccggctttaacctgctgatgaccctgcggctgtggtccagcagggccaagcgatctggatctggagcaacaaacttctcactactcaaacaagcaggtgacgtggaggagaatcccgggcctactagtatggactggatttggcgcatccttttccttgtcggcgctgctaccggcgcgcattccttcgaacaggtccaactggtgcagagcggagccgaggtcgtgaagcctggcgcttccgtgaagattagctgcaaagccagcggctacacctttaccggctactttatgcactgggtcaagcagagccctggccagagcctggaatggatcggcagaatccacccctacgacggcgacaccttctacaaccagaagttccagggcaaggccaccctgacagtggacaagagcagcaacaccgcccacatggaactgctgagcctgaccagcgaggacttcgccgtgtactactgcaccagatacgacggcagccgggctatggactattggggccagggcaccaccgtgaccgtgtctagtacgcgtatccagaaccctgatcctgccgtgtaccagctgcgggatagcaagagcagcgacaagagcgtgtgtctgttcaccgacttcgacagccagaccaacgtgtcccagagcaaggactccgacgtgtacatcaccgataagtgcgtgctggacatgcggagcatggacttcaagagcaactccgccgtggcctggtccaacaagtccgatttcgcctgcgccaacgccttcaacaacagcattatccccgaggacacattcttcccaagccccgagagcagctgcggctttaccagcgagagctaccagcagggcgtgctgagcgccaccatcctgtacgagatcctgctgggcaaggccaccctgtacgccgtgctggtgtctgccctggtgctgatggctatggtcaagcggaaggacagccggggataa

SEQ ID NO: 35501 - DNA, 2310 bp, synthetic construct
  source 1..2310: mol_type = other DNA
atggccttaccagtgaccgccttgctcctgccgctggccttgctgctccacgccgccaggccggaagtgcagctggttgaatctggcggaggactggttcagcctggcggatctctgagactgtcttgtgccgcctctggcttcgccagcgactactatatcatcggctggttcagacaggcccctggcaaagagagagagggcgtcagctgtatcagcagcagatacgccaacaccaactacgccgacagcgtgaagggcagattcaccatcagccgggacaacgccaagaacaccgtgtacctccagatgaacagcctgaagcctgaggacaccgccgtgtactactgtgccgccgacaccagaagatacacctgtcctgacattgccaccatgcaccggaacttcgattcttggggccagggcacactggtcaccgtttcttctggtaccggcggaggcggatctggcggcggaggtagcggtggcggaggatctgaattcgacatcgtgctgacccagagccctctgagcctggccgtgtctctgggacagcctgccatcatcagctgtagggccagccagagcgtgtcctttgccggcacctctctgatgcactggtatcaccagaagcccggccagcagcccagactgctgatctacagagccagcaacctggaagccggcgtgcccgatagattttccggcagcggcagcaagaccgacttcaccctgaccatcagccccgtggaagccgaagatgccgccacctactactgccagcagagcagagagtacccctacaccttcggcggaggcaccaagctggaaatcaagaggctcgagatccagaaccctgatcctgccgtgtaccagctgcgggatagcaagagcagcgacaagagcgtgtgtctgttcaccgacttcgacagccagaccaacgtgtcccagagcaaggactccgacgtgtacatcaccgataagtgcgtgctggacatgcggagcatggacttcaagagcaactccgccgtggcctggtccaacaagtccgatttcgcctgcgccaacgccttcaacaacagcattatccccgaggacacattcttcccaagccccgagagcagctgcggctttaccagcgagagctaccagcagggcgtgctgagcgccaccatcctgtacgagatcctgctgggcaaggccaccctgtacgccgtgctggtgtctgccctggtgctgatggctatggtcaagcggaaggacagccggggaagggccaagcgatctggatctggagcaacaaacttctcactactcaaacaagcaggtgacgtggaggagaatcccgggcctactagtatggactggatttggcgcatccttttccttgtcggcgctgctaccggcgcgcattccttcgaacaggtccaactggtgcagagcggagccgaggtcgtgaagcctggcgcttccgtgaagattagctgcaaagccagcggctacacctttaccggctactttatgcactgggtcaagcagagccctggccagagcctggaatggatcggcagaatccacccctacgacggcgacaccttctacaaccagaagttccagggcaaggccaccctgacagtggacaagagcagcaacaccgcccacatggaactgctgagcctgaccagcgaggacttcgccgtgtactactgcaccagatacgacggcagccgggctatggactattggggccagggcaccaccgtgaccgtgtctagtacgcgtgacctgaagaacgtgttcccacctgaggtggccgtgttcgagcctagcgaggccgagatcagccacacccagaaagccaccctcgtgtgcctggctaccggcttctaccccgaccatgtggaactgtcttggtgggtcaacggcaaagaggtgcacagcggcgtgtgtaccgacccccagccactgaaagaacagcccgccctgaacgacagccggtactgcctgagcagcagactgagagtgtccgccaccttctggcagaacccccggaaccacttcagatgccaggtgcagttctacggcctgagcgagaacgacgagtggacccaggacagagccaagcccgtgacccagatcgtgtctgccgaagcctggggcagagccgattgcgacgtgaagctggtggaaaagagcttcgagacagacaccaacctgaacttccagaacctgagcgtgatcggcttcagaatcctgctgctgaaagtggccggctttaacctgctgatgaccctgcggctgtggtccagc

SEQ ID NO: 35502 - DNA, 2310 bp, synthetic construct
  source 1..2310: mol_type = other DNA
atggccttaccagtgaccgccttgctcctgccgctggccttgctgctccacgccgccaggccggaagtgcagctggttgaatctggcggaggactggttcagcctggcggatctctgagactgagctgtgaagccagcggcttcgccagcgacgattacatcatcggctggttcagacaggcccctggcaaagagagagagggcgtcagctgcatcagctctaagtacgccaacaccgtgtacaccgacagcgtgaagggcagattcagactgagcagaggcaccgccaagaataccgtgtacctccagatgagcgccctgaagcctgaggataccgccgtgtactactgcgctatggacagccgcagagtgacatgccctgagatcagcaccatgcaccggaacttcgattcttggggccagggcacactggtcacagtgtcatctggtaccggcggaggcggatctggcggcggaggtagcggtggcggaggatctgaattcgacatcgtgctgacccagagccctctgagcctggccgtgtctctgggacagcctgccatcatcagctgtagggccagccagagcgtgtcctttgccggcacctctctgatgcactggtatcaccagaagcccggccagcagcccagactgctgatctacagagccagcaacctggaagccggcgtgcccgatagattttccggcagcggcagcaagaccgacttcaccctgaccatcagccccgtggaagccgaagatgccgccacctactactgccagcagagcagagagtacccctacaccttcggcggaggcaccaagctggaaatcaagaggctcgagatccagaaccctgatcctgccgtgtaccagctgcgggatagcaagagcagcgacaagagcgtgtgtctgttcaccgacttcgacagccagaccaacgtgtcccagagcaaggactccgacgtgtacatcaccgataagtgcgtgctggacatgcggagcatggacttcaagagcaactccgccgtggcctggtccaacaagtccgatttcgcctgcgccaacgccttcaacaacagcattatccccgaggacacattcttcccaagccccgagagcagctgcggctttaccagcgagagctaccagcagggcgtgctgagcgccaccatcctgtacgagatcctgctgggcaaggccaccctgtacgccgtgctggtgtctgccctggtgctgatggctatggtcaagcggaaggacagccggggaagggccaagcgatctggatctggagcaacaaacttctcactactcaaacaagcaggtgacgtggaggagaatcccgggcctactagtatggactggatttggcgcatccttttccttgtcggcgctgctaccggcgcgcattccttcgaacaggtccaactggtgcagagcggagccgaggtcgtgaagcctggcgcttccgtgaagattagctgcaaagccagcggctacacctttaccggctactttatgcactgggtcaagcagagccctggccagagcctggaatggatcggcagaatccacccctacgacggcgacaccttctacaaccagaagttccagggcaaggccaccctgacagtggacaagagcagcaacaccgcccacatggaactgctgagcctgaccagcgaggacttcgccgtgtactactgcaccagatacgacggcagccgggctatggactattggggccagggcaccaccgtgaccgtgtctagtacgcgtgacctgaagaacgtgttcccacctgaggtggccgtgttcgagcctagcgaggccgagatcagccacacccagaaagccaccctcgtgtgcctggctaccggcttctaccccgaccatgtggaactgtcttggtgggtcaacggcaaagaggtgcacagcggcgtgtgtaccgacccccagccactgaaagaacagcccgccctgaacgacagccggtactgcctgagcagcagactgagagtgtccgccaccttctggcagaacccccggaaccacttcagatgccaggtgcagttctacggcctgagcgagaacgacgagtggacccaggacagagccaagcccgtgacccagatcgtgtctgccgaagcctggggcagagccgattgcgacgtgaagctggtggaaaagagcttcgagacagacaccaacctgaacttccagaacctgagcgtgatcggcttcagaatcctgctgctgaaagtggccggctttaacctgctgatgaccctgcggctgtggtccagc

SEQ ID NO: 35503 - DNA, 2283 bp, synthetic construct
  source 1..2283: mol_type = other DNA
atggccttaccagtgaccgccttgctcctgccgctggccttgctgctccacgccgccaggccgcaagtcaaactggaagaaagcggtggcggcctggtgcaacctggcgaatctctgagactgagctgtagcgccagcggctccatcttcaaggtgttcagagtgttcgccatgagctggtacaggcaaggccctggcaagcagagagagctggtcgcctctatcagcagcggcgagacaaccacatacgccgaatctgtgaaaggccggttcaccatcagccgggataatgccaagaataccgcctatctccagatggactccctgaagcctgaagatacagctgtgtactactgcaacgccgaccataccttcaccggcgatttttggggccagggaacccaagtgaccgtgtctagtggtaccggcggaggcggatctggcggcggaggtagcggtggcggaggatctgaattcgacatcgtgctgacccagagccctctgagcctggccgtgtctctgggacagcctgccatcatcagctgtagggccagccagagcgtgtcctttgccggcacctctctgatgcactggtatcaccagaagcccggccagcagcccagactgctgatctacagagccagcaacctggaagccggcgtgcccgatagattttccggcagcggcagcaagaccgacttcaccctgaccatcagccccgtggaagccgaagatgccgccacctactactgccagcagagcagagagtacccctacaccttcggcggaggcaccaagctggaaatcaagaggctcgagatccagaaccctgatcctgccgtgtaccagctgcgggatagcaagagcagcgacaagagcgtgtgtctgttcaccgacttcgacagccagaccaacgtgtcccagagcaaggactccgacgtgtacatcaccgataagtgcgtgctggacatgcggagcatggacttcaagagcaactccgccgtggcctggtccaacaagtccgatttcgcctgcgccaacgccttcaacaacagcattatccccgaggacacattcttcccaagccccgagagcagctgcggctttaccagcgagagctaccagcagggcgtgctgagcgccaccatcctgtacgagatcctgctgggcaaggccaccctgtacgccgtgctggtgtctgccctggtgctgatggctatggtcaagcggaaggacagccggggaagggccaagcgatctggatctggagcaacaaacttctcactactcaaacaagcaggtgacgtggaggagaatcccgggcctactagtatggactggatttggcgcatccttttccttgtcggcgctgctaccggcgcgcattccttcgaacaggtccaactggtgcagagcggagccgaggtcgtgaagcctggcgcttccgtgaagattagctgcaaagccagcggctacacctttaccggctactttatgcactgggtcaagcagagccctggccagagcctggaatggatcggcagaatccacccctacgacggcgacaccttctacaaccagaagttccagggcaaggccaccctgacagtggacaagagcagcaacaccgcccacatggaactgctgagcctgaccagcgaggacttcgccgtgtactactgcaccagatacgacggcagccgggctatggactattggggccagggcaccaccgtgaccgtgtctagtacgcgtgacctgaagaacgtgttcccacctgaggtggccgtgttcgagcctagcgaggccgagatcagccacacccagaaagccaccctcgtgtgcctggctaccggcttctaccccgaccatgtggaactgtcttggtgggtcaacggcaaagaggtgcacagcggcgtgtgtaccgacccccagccactgaaagaacagcccgccctgaacgacagccggtactgcctgagcagcagactgagagtgtccgccaccttctggcagaacccccggaaccacttcagatgccaggtgcagttctacggcctgagcgagaacgacgagtggacccaggacagagccaagcccgtgacccagatcgtgtctgccgaagcctggggcagagccgattgcgacgtgaagctggtggaaaagagcttcgagacagacaccaacctgaacttccagaacctgagcgtgatcggcttcagaatcctgctgctgaaagtggccggctttaacctgctgatgaccctgcggctgtggtccagc

SEQ ID NO: 35504 - DNA, 2289 bp, synthetic construct
  source 1..2289: mol_type = other DNA
atggccttaccagtgaccgccttgctcctgccgctggccttgctgctccacgccgccaggccggacatcgtgctgacccagagccctctgagcctggccgtgtctctgggacagcctgccatcatcagctgtagggccagccagagcgtgtcctttgccggcacctctctgatgcactggtatcaccagaagcccggccagcagcccagactgctgatctacagagccagcaacctggaagccggcgtgcccgatagattttccggcagcggcagcaagaccgacttcaccctgaccatcagccccgtggaagccgaagatgccgccacctactactgccagcagagcagagagtacccctacaccttcggcggaggcaccaagctggaaatcaagaggctcgaggacctgaagaacgtgttcccacctgaggtggccgtgttcgagcctagcgaggccgagatcagccacacccagaaagccaccctcgtgtgcctggctaccggcttctaccccgaccatgtggaactgtcttggtgggtcaacggcaaagaggtgcacagcggcgtgtgtaccgacccccagccactgaaagaacagcccgccctgaacgacagccggtactgcctgagcagcagactgagagtgtccgccaccttctggcagaacccccggaaccacttcagatgccaggtgcagttctacggcctgagcgagaacgacgagtggacccaggacagagccaagcccgtgacccagatcgtgtctgccgaagcctggggcagagccgattgcgacgtgaagctggtggaaaagagcttcgagacagacaccaacctgaacttccagaacctgagcgtgatcggcttcagaatcctgctgctgaaagtggccggctttaacctgctgatgaccctgcggctgtggtccagcagggccaagcgatctggatctggagcaacaaacttctcactactcaaacaagcaggtgacgtggaggagaatcccgggcctactagtgccaccatggactggatttggcgcatccttttccttgtcggcgctgctaccggcgcccattccgggcccgaagtgcagctggttgaatctggcggaggactggttcaggctggcggatctctgagactgtcttgtgccgccagcggcagaacctttagcatgggctggtttagacaggcccctggcaaagagagagagttcgtcgccgccatcacatactctggcggcagcccttactacgccgactctgtgaagggcagattcaccatcagccgggacaacgccaagaacaccgtgtacctccagatgaacagcctgaagcctgaggacaccgccgtgtactactgcgccgccaatccaacatacggcagcgactggaacgccgagaattggggccagggaacccaagtgacagtgtctagcggatccggcggcggaggatctggcggaggcggatctgggggcggaggctctttcgaacaggtccaactggtgcagagcggagccgaggtcgtgaagcctggcgcttccgtgaagattagctgcaaagccagcggctacacctttaccggctactttatgcactgggtcaagcagagccctggccagagcctggaatggatcggcagaatccacccctacgacggcgacaccttctacaaccagaagttccagggcaaggccaccctgacagtggacaagagcagcaacaccgcccacatggaactgctgagcctgaccagcgaggacttcgccgtgtactactgcaccagatacgacggcagccgggctatggactattggggccagggcaccaccgtgaccgtgtctagtacgcgtatccagaaccctgatcctgccgtgtaccagctgcgggatagcaagagcagcgacaagagcgtgtgtctgttcaccgacttcgacagccagaccaacgtgtcccagagcaaggactccgacgtgtacatcaccgataagtgcgtgctggacatgcggagcatggacttcaagagcaactccgccgtggcctggtccaacaagtccgatttcgcctgcgccaacgccttcaacaacagcattatccccgaggacacattcttcccaagccccgagagcagctgcggctttaccagcgagagctaccagcagggcgtgctgagcgccaccatcctgtacgagatcctgctgggcaaggccaccctgtacgccgtgctggtgtctgccctggtgctgatggctatggtcaagcggaaggacagccggggataa

SEQ ID NO: 35505 - DNA, 2292 bp, synthetic construct
  source 1..2292: mol_type = other DNA
atggccttaccagtgaccgccttgctcctgccgctggccttgctgctccacgccgccaggccggacatcgtgctgacccagagccctctgagcctggccgtgtctctgggacagcctgccatcatcagctgtagggccagccagagcgtgtcctttgccggcacctctctgatgcactggtatcaccagaagcccggccagcagcccagactgctgatctacagagccagcaacctggaagccggcgtgcccgatagattttccggcagcggcagcaagaccgacttcaccctgaccatcagccccgtggaagccgaagatgccgccacctactactgccagcagagcagagagtacccctacaccttcggcggaggcaccaagctggaaatcaagaggctcgaggacctgaagaacgtgttcccacctgaggtggccgtgttcgagcctagcgaggccgagatcagccacacccagaaagccaccctcgtgtgcctggctaccggcttctaccccgaccatgtggaactgtcttggtgggtcaacggcaaagaggtgcacagcggcgtgtgtaccgacccccagccactgaaagaacagcccgccctgaacgacagccggtactgcctgagcagcagactgagagtgtccgccaccttctggcagaacccccggaaccacttcagatgccaggtgcagttctacggcctgagcgagaacgacgagtggacccaggacagagccaagcccgtgacccagatcgtgtctgccgaagcctggggcagagccgattgcgacgtgaagctggtggaaaagagcttcgagacagacaccaacctgaacttccagaacctgagcgtgatcggcttcagaatcctgctgctgaaagtggccggctttaacctgctgatgaccctgcggctgtggtccagcagggccaagcgatctggatctggagcaacaaacttctcactactcaaacaagcaggtgacgtggaggagaatcccgggcctactagtgccaccatggactggatttggcgcatccttttccttgtcggcgctgctaccggcgcccattccgggcccgaagtgcaactggtggaatctgggggcggactggtgcagccaggcggaagtctgaggctgtcttgtgccgcctccggcagcatcttcggcttcaacgacatggcctggtatcggcaggctcccggaaaacagcgcgagctggtggctctgattagcagagtgggcgtgaccagcagcgccgactctgtgaagggcagattcacaatctccagagtgaacgccaaggatacagtgtacctccagatgaactctctgaaacctgaggatacagcagtgtactattgctacatggaccagcggctggacggcagcacactggcctactggggacagggaactcaagtgacagtgtctagcggatccggcggcggaggatctggcggaggcggatctgggggcggaggctctttcgaacaggtccaactggtgcagagcggagccgaggtcgtgaagcctggcgcttccgtgaagattagctgcaaagccagcggctacacctttaccggctactttatgcactgggtcaagcagagccctggccagagcctggaatggatcggcagaatccacccctacgacggcgacaccttctacaaccagaagttccagggcaaggccaccctgacagtggacaagagcagcaacaccgcccacatggaactgctgagcctgaccagcgaggacttcgccgtgtactactgcaccagatacgacggcagccgggctatggactattggggccagggcaccaccgtgaccgtgtctagtacgcgtatccagaaccctgatcctgccgtgtaccagctgcgggatagcaagagcagcgacaagagcgtgtgtctgttcaccgacttcgacagccagaccaacgtgtcccagagcaaggactccgacgtgtacatcaccgataagtgcgtgctggacatgcggagcatggacttcaagagcaactccgccgtggcctggtccaacaagtccgatttcgcctgcgccaacgccttcaacaacagcattatccccgaggacacattcttcccaagccccgagagcagctgcggctttaccagcgagagctaccagcagggcgtgctgagcgccaccatcctgtacgagatcctgctgggcaaggccaccctgtacgccgtgctggtgtctgccctggtgctgatggctatggtcaagcggaaggacagccggggataa

SEQ ID NO: 35506 - DNA, 2280 bp, synthetic construct
  source 1..2280: mol_type = other DNA
atggccttaccagtgaccgccttgctcctgccgctggccttgctgctccacgccgccaggccggacatcgtgctgacccagagccctctgagcctggccgtgtctctgggacagcctgccatcatcagctgtagggccagccagagcgtgtcctttgccggcacctctctgatgcactggtatcaccagaagcccggccagcagcccagactgctgatctacagagccagcaacctggaagccggcgtgcccgatagattttccggcagcggcagcaagaccgacttcaccctgaccatcagccccgtggaagccgaagatgccgccacctactactgccagcagagcagagagtacccctacaccttcggcggaggcaccaagctggaaatcaagaggctcgaggacctgaagaacgtgttcccacctgaggtggccgtgttcgagcctagcgaggccgagatcagccacacccagaaagccaccctcgtgtgcctggctaccggcttctaccccgaccatgtggaactgtcttggtgggtcaacggcaaagaggtgcacagcggcgtgtgtaccgacccccagccactgaaagaacagcccgccctgaacgacagccggtactgcctgagcagcagactgagagtgtccgccaccttctggcagaacccccggaaccacttcagatgccaggtgcagttctacggcctgagcgagaacgacgagtggacccaggacagagccaagcccgtgacccagatcgtgtctgccgaagcctggggcagagccgattgcgacgtgaagctggtggaaaagagcttcgagacagacaccaacctgaacttccagaacctgagcgtgatcggcttcagaatcctgctgctgaaagtggccggctttaacctgctgatgaccctgcggctgtggtccagcagggccaagcgatctggatctggagcaacaaacttctcactactcaaacaagcaggtgacgtggaggagaatcccgggcctactagtgccaccatggactggatttggcgcatccttttccttgtcggcgctgctaccggcgcccattccgggcccgaggtgcagctggttgaatctggcggaggactggttcaggctggcggatctctgagactgtcttgtgccgccagcggctctgtgttcagcggcaatgtgatgggctggtacagacaggcccctggcaaagaaagagagtgggttgccgccattgccagcggcggcagcatctactacagagactctgtgaagggcagattcaccatcagccgggacaacgccaagaacaccgtgtacctccagatgaacagcctgaagcctgaggacaccgccgtgtactactgcaactctcaccctcctacactgccctattggggcctgggaacccaagtgacagtgtcctctggatccggcggcggaggatctggcggaggcggatctgggggcggaggctctttcgaacaggtccaactggtgcagagcggagccgaggtcgtgaagcctggcgcttccgtgaagattagctgcaaagccagcggctacacctttaccggctactttatgcactgggtcaagcagagccctggccagagcctggaatggatcggcagaatccacccctacgacggcgacaccttctacaaccagaagttccagggcaaggccaccctgacagtggacaagagcagcaacaccgcccacatggaactgctgagcctgaccagcgaggacttcgccgtgtactactgcaccagatacgacggcagccgggctatggactattggggccagggcaccaccgtgaccgtgtctagtacgcgtatccagaaccctgatcctgccgtgtaccagctgcgggatagcaagagcagcgacaagagcgtgtgtctgttcaccgacttcgacagccagaccaacgtgtcccagagcaaggactccgacgtgtacatcaccgataagtgcgtgctggacatgcggagcatggacttcaagagcaactccgccgtggcctggtccaacaagtccgatttcgcctgcgccaacgccttcaacaacagcattatccccgaggacacattcttcccaagccccgagagcagctgcggctttaccagcgagagctaccagcagggcgtgctgagcgccaccatcctgtacgagatcctgctgggcaaggccaccctgtacgccgtgctggtgtctgccctggtgctgatggctatggtcaagcggaaggacagccggggataa

SEQ ID NO: 35507 - DNA, 2274 bp, synthetic construct
  source 1..2274: mol_type = other DNA
atggccttaccagtgaccgccttgctcctgccgctggccttgctgctccacgccgccaggccggacatcgtgctgacccagagccctctgagcctggccgtgtctctgggacagcctgccatcatcagctgtagggccagccagagcgtgtcctttgccggcacctctctgatgcactggtatcaccagaagcccggccagcagcccagactgctgatctacagagccagcaacctggaagccggcgtgcccgatagattttccggcagcggcagcaagaccgacttcaccctgaccatcagccccgtggaagccgaagatgccgccacctactactgccagcagagcagagagtacccctacaccttcggcggaggcaccaagctggaaatcaagaggctcgaggacctgaagaacgtgttcccacctgaggtggccgtgttcgagcctagcgaggccgagatcagccacacccagaaagccaccctcgtgtgcctggctaccggcttctaccccgaccatgtggaactgtcttggtgggtcaacggcaaagaggtgcacagcggcgtgtgtaccgacccccagccactgaaagaacagcccgccctgaacgacagccggtactgcctgagcagcagactgagagtgtccgccaccttctggcagaacccccggaaccacttcagatgccaggtgcagttctacggcctgagcgagaacgacgagtggacccaggacagagccaagcccgtgacccagatcgtgtctgccgaagcctggggcagagccgattgcgacgtgaagctggtggaaaagagcttcgagacagacaccaacctgaacttccagaacctgagcgtgatcggcttcagaatcctgctgctgaaagtggccggctttaacctgctgatgaccctgcggctgtggtccagcagggccaagcgatctggatctggagcaacaaacttctcactactcaaacaagcaggtgacgtggaggagaatcccgggcctactagtgccaccatggactggatttggcgcatccttttccttgtcggcgctgctaccggcgcccattccgggcccgaagttcagctgctggaatctggcggaggactcgttcaacctggcggctctctgagactgagctgtgccgcttctggcttcagcttctctagctacgccctgagctgggttcgacaagctcccggaaagggccttgaatgggtgtccagcatcggcgagaatgacggcaccacagactatgccgatgccgtgaaaggccggtttaccatcagcagagacaattccaagaacacgctctatctgcaaatgaactccctgcgcgtggaagatacagccgtgtattattgcgtgaaggacggcatccactggggacagggaaccctggttacagtgtctagcggatccggcggcggaggatctggcggaggcggatctgggggcggaggctctttcgaacaggtccaactggtgcagagcggagccgaggtcgtgaagcctggcgcttccgtgaagattagctgcaaagccagcggctacacctttaccggctactttatgcactgggtcaagcagagccctggccagagcctggaatggatcggcagaatccacccctacgacggcgacaccttctacaaccagaagttccagggcaaggccaccctgacagtggacaagagcagcaacaccgcccacatggaactgctgagcctgaccagcgaggacttcgccgtgtactactgcaccagatacgacggcagccgggctatggactattggggccagggcaccaccgtgaccgtgtctagtacgcgtatccagaaccctgatcctgccgtgtaccagctgcgggatagcaagagcagcgacaagagcgtgtgtctgttcaccgacttcgacagccagaccaacgtgtcccagagcaaggactccgacgtgtacatcaccgataagtgcgtgctggacatgcggagcatggacttcaagagcaactccgccgtggcctggtccaacaagtccgatttcgcctgcgccaacgccttcaacaacagcattatccccgaggacacattcttcccaagccccgagagcagctgcggctttaccagcgagagctaccagcagggcgtgctgagcgccaccatcctgtacgagatcctgctgggcaaggccaccctgtacgccgtgctggtgtctgccctggtgctgatggctatggtcaagcggaaggacagccggggataa

SEQ ID NO: 35508 - DNA, 3381 bp, synthetic construct
  source 1..3381: mol_type = other DNA
atgggacccagactgctgttttgggctctgctgtgtctgctcggcacaggacctgttgaagctggcgtgacacagagccccacacacctgattaagaccagaggccagcaggccacactgagatgcagccctatcagcggccacaccagcgtgtactggtatcagcaggctctcggactgggcctccagttcctgctttggtacgacgagggcgaagagagaaaccggggcaacttccctcctcggttttccggcagacagttccccaactacagcagcgagctgaacgtgaacgccctggaactggaagatagcgccctgtacctgtgtgcctcttctcttggtggacctcgcggactggctggactgagaggggatgagcagtttttcggccctggcaccagactgaccgtgctggaaggtaccggcggaggcggatctggcggcggagaattcgacatcgtgctgacccagagccctctgagcctggccgtgtctctgggacagcctgccatcatcagctgtagggccagccagagcgtgtcctttgccggcacctctctgatgcactggtatcaccagaagcccggccagcagcccagactgctgatctacagagccagcaacctggaagccggcgtgcccgatagattttccggcagcggcagcaagaccgacttcaccctgaccatcagccccgtggaagccgaagatgccgccacctactactgccagcagagcagagagtacccctacaccttcggcggaggcaccaagctggaaatcaagaggctcgaggacctgaagaacgtgttcccacctgaggtggccgtgttcgagcctagcgaggccgagatcagccacacccagaaagccaccctcgtgtgcctggctaccggcttctaccccgaccatgtggaactgtcttggtgggtcaacggcaaagaggtgcacagcggcgtgtgtaccgacccccagccactgaaagaacagcccgccctgaacgacagccggtactgcctgagcagcagactgagagtgtccgccaccttctggcagaacccccggaaccacttcagatgccaggtgcagttctacggcctgagcgagaacgacgagtggacccaggacagagccaagcccgtgacccagatcgtgtctgccgaagcctggggcagagccgattgcgacgtgaagctggtggaaaagagcttcgagacagacaccaacctgaacttccagaacctgagcgtgatcggcttcagaatcctgctgctgaaagtggccggctttaacctgctgatgaccctgcggctgtggtccagcagggccaagcgatctggatctggagcaacaaacttctcactactcaaacaagcaggtgacgtggaggagaatcccgggcctactagtgccaccatggactggatttggcgcatccttttccttgtcggcgctgctaccggcgcccattccgggcccgaagtgcagctggttgaatctggcggaggactggttcaggctggcggatctctgagactgtcttgtgccgccagcggcagaacctttagcatgggctggtttagacaggcccctggcaaagagagagagttcgtcgccgccatcacatactctggcggcagcccttactacgccgactctgtgaagggcagattcaccatcagccgggacaacgccaagaacaccgtgtacctccagatgaacagcctgaagcctgaggacaccgccgtgtactactgcgccgccaatccaacatacggcagcgactggaacgccgagaattggggccagggaacccaagtgacagtgtctagcggatccggcggcggaggatctggcggaggcggatctgggggcggaggctctttcgaacaggtccaactggtgcagagcggagccgaggtcgtgaagcctggcgcttccgtgaagattagctgcaaagccagcggctacacctttaccggctactttatgcactgggtcaagcagagccctggccagagcctggaatggatcggcagaatccacccctacgacggcgacaccttctacaaccagaagttccagggcaaggccaccctgacagtggacaagagcagcaacaccgcccacatggaactgctgagcctgaccagcgaggacttcgccgtgtactactgcaccagatacgacggcagccgggctatggactattggggccagggcaccaccgtgaccgtgtctagtacgcgtatccagaaccctgatcctgccgtgtaccagctgcgggatagcaagagcagcgacaagagcgtgtgtctgttcaccgacttcgacagccagaccaacgtgtcccagagcaaggactccgacgtgtacatcaccgataagtgcgtgctggacatgcggagcatggacttcaagagcaactccgccgtggcctggtccaacaagtccgatttcgcctgcgccaacgccttcaacaacagcattatccccgaggacacattcttcccaagccccgagagcagctgcggctttaccagcgagagctaccagcagggcgtgctgagcgccaccatcctgtacgagatcctgctgggcaaggccaccctgtacgccgtgctggtgtctgccctggtgctgatggctatggtcaagcggaaggacagccggggacgcgccaagagaagcggatctggcgtgaagcagaccctgaatttcgacctgctgaagctggctggcgacgtggaatccaacccaggcccttctagaggccatatgaccgagtacaagcccacggtgcgcctcgccacccgcgacgacgtccccagggccgtacgcaccctcgccgccgcgttcgccgactaccccgccacgcgccacaccgtcgatccggaccgccacatcgagcgggtcaccgagctgcaagaactcttcctcacgcgcgtcgggctcgacatcggcaaggtgtgggtcgcggacgacggcgccgcggtggcggtctggaccacgccggagagcgtcgaagcgggggcggtgttcgccgagatcggcccgcgcatggccgagttgagcggttcccggctggccgcgcagcaacagatggaaggcctcctggcgccgcaccggcccaaggagcccgcgtggttcctggccaccgtcggcgtctcgcccgaccaccagggcaagggtctgggcagcgccgtcgtgctccccggagtggaggcggccgagcgcgccggggtgcccgccttcctggagacctccgcgccccgcaacctccccttctacgagcggctcggcttcaccgtcaccgccgacgtcgaggtgcccgaaggaccgcgcacctggtgcatgacccgcaagcccggtgcctga

SEQ ID NO: 35509 - DNA, 3378 bp, synthetic construct
  source 1..3378: mol_type = other DNA
atgggacccagactgctgttttgggctctgctgtgtctgctcggcacaggacctgttgaagctggcgtgacacagagccccacacacctgattaagaccagaggccagcaggccacactgagatgcagccctatcagcggccacaccagcgtgtactggtatcagcaggctctcggactgggcctccagttcctgctttggtacgacgagggcgaagagagaaaccggggcaacttccctcctcggttttccggcagacagttccccaactacagcagcgagctgaacgtgaacgccctggaactggaagatagcgccctgtacctgtgtgccagctctctcggcggagatgaactgggagccgatggcaacgagcagttctttggccctggcaccagactgaccgtgctggaaggtaccggcggaggcggatctggcggcggaagcgaattcgacatcgtgctgacccagagccctctgagcctggccgtgtctctgggacagcctgccatcatcagctgtagggccagccagagcgtgtcctttgccggcacctctctgatgcactggtatcaccagaagcccggccagcagcccagactgctgatctacagagccagcaacctggaagccggcgtgcccgatagattttccggcagcggcagcaagaccgacttcaccctgaccatcagccccgtggaagccgaagatgccgccacctactactgccagcagagcagagagtacccctacaccttcggcggaggcaccaagctggaaatcaagaggctcgaggacctgaagaacgtgttcccacctgaggtggccgtgttcgagcctagcgaggccgagatcagccacacccagaaagccaccctcgtgtgcctggctaccggcttctaccccgaccatgtggaactgtcttggtgggtcaacggcaaagaggtgcacagcggcgtgtgtaccgacccccagccactgaaagaacagcccgccctgaacgacagccggtactgcctgagcagcagactgagagtgtccgccaccttctggcagaacccccggaaccacttcagatgccaggtgcagttctacggcctgagcgagaacgacgagtggacccaggacagagccaagcccgtgacccagatcgtgtctgccgaagcctggggcagagccgattgcgacgtgaagctggtggaaaagagcttcgagacagacaccaacctgaacttccagaacctgagcgtgatcggcttcagaatcctgctgctgaaagtggccggctttaacctgctgatgaccctgcggctgtggtccagcagggccaagcgatctggatctggagcaacaaacttctcactactcaaacaagcaggtgacgtggaggagaatcccgggcctactagtgccaccatggactggatttggcgcatccttttccttgtcggcgctgctaccggcgcccattccgggcccgaagtgcagctggttgaatctggcggaggactggttcaggctggcggatctctgagactgtcttgtgccgccagcggcagaacctttagcatgggctggtttagacaggcccctggcaaagagagagagttcgtcgccgccatcacatactctggcggcagcccttactacgccgactctgtgaagggcagattcaccatcagccgggacaacgccaagaacaccgtgtacctccagatgaacagcctgaagcctgaggacaccgccgtgtactactgcgccgccaatccaacatacggcagcgactggaacgccgagaattggggccagggaacccaagtgacagtgtctagcggatccggcggcggaggatctggcggaggcggatctgggggcggaggctctttcgaacaggtccaactggtgcagagcggagccgaggtcgtgaagcctggcgcttccgtgaagattagctgcaaagccagcggctacacctttaccggctactttatgcactgggtcaagcagagccctggccagagcctggaatggatcggcagaatccacccctacgacggcgacaccttctacaaccagaagttccagggcaaggccaccctgacagtggacaagagcagcaacaccgcccacatggaactgctgagcctgaccagcgaggacttcgccgtgtactactgcaccagatacgacggcagccgggctatggactattggggccagggcaccaccgtgaccgtgtctagtacgcgtatccagaaccctgatcctgccgtgtaccagctgcgggatagcaagagcagcgacaagagcgtgtgtctgttcaccgacttcgacagccagaccaacgtgtcccagagcaaggactccgacgtgtacatcaccgataagtgcgtgctggacatgcggagcatggacttcaagagcaactccgccgtggcctggtccaacaagtccgatttcgcctgcgccaacgccttcaacaacagcattatccccgaggacacattcttcccaagccccgagagcagctgcggctttaccagcgagagctaccagcagggcgtgctgagcgccaccatcctgtacgagatcctgctgggcaaggccaccctgtacgccgtgctggtgtctgccctggtgctgatggctatggtcaagcggaaggacagccggggacgcgccaagagaagcggatctggcgtgaagcagaccctgaatttcgacctgctgaagctggctggcgacgtggaatccaacccaggcccttctagaggccatatgaccgagtacaagcccacggtgcgcctcgccacccgcgacgacgtccccagggccgtacgcaccctcgccgccgcgttcgccgactaccccgccacgcgccacaccgtcgatccggaccgccacatcgagcgggtcaccgagctgcaagaactcttcctcacgcgcgtcgggctcgacatcggcaaggtgtgggtcgcggacgacggcgccgcggtggcggtctggaccacgccggagagcgtcgaagcgggggcggtgttcgccgagatcggcccgcgcatggccgagttgagcggttcccggctggccgcgcagcaacagatggaaggcctcctggcgccgcaccggcccaaggagcccgcgtggttcctggccaccgtcggcgtctcgcccgaccaccagggcaagggtctgggcagcgccgtcgtgctccccggagtggaggcggccgagcgcgccggggtgcccgccttcctggagacctccgcgccccgcaacctccccttctacgagcggctcggcttcaccgtcaccgccgacgtcgaggtgcccgaaggaccgcgcacctggtgcatgacccgcaagcccggtgcctga

SEQ ID NO: 35510 - DNA, 2853 bp, synthetic construct
  source 1..2853: mol_type = other DNA
atggccttaccagtgaccgccttgctcctgccgctggccttgctgctccacgccgccaggccggacatcgtgctgacccagagccctctgagcctggccgtgtctctgggacagcctgccatcatcagctgtagggccagccagagcgtgtcctttgccggcacctctctgatgcactggtatcaccagaagcccggccagcagcccagactgctgatctacagagccagcaacctggaagccggcgtgcccgatagattttccggcagcggcagcaagaccgacttcaccctgaccatcagccccgtggaagccgaagatgccgccacctactactgccagcagagcagagagtacccctacaccttcggcggaggcaccaagctggaaatcaagaggctcgaggacctgaagaacgtgttcccacctgaggtggccgtgttcgagcctagcgaggccgagatcagccacacccagaaagccaccctcgtgtgcctggctaccggcttctaccccgaccatgtggaactgtcttggtgggtcaacggcaaagaggtgcacagcggcgtgtgtaccgacccccagccactgaaagaacagcccgccctgaacgacagccggtactgcctgagcagcagactgagagtgtccgccaccttctggcagaacccccggaaccacttcagatgccaggtgcagttctacggcctgagcgagaacgacgagtggacccaggacagagccaagcccgtgacccagatcgtgtctgccgaagcctggggcagagccgattgcgacgtgaagctggtggaaaagagcttcgagacagacaccaacctgaacttccagaacctgagcgtgatcggcttcagaatcctgctgctgaaagtggccggctttaacctgctgatgaccctgcggctgtggtccagcagggccaagcgatctggatctggagcaacaaacttctcactactcaaacaagcaggtgacgtggaggagaatcccgggcctactagtgccaccatggactggatttggcgcatccttttccttgtcggcgctgctaccggcgcccattccgggcccatgggaagctggcttgagttctaccacagactcaacgccattgacagcaggctgtgggcacttggcggaagcgaagctgaactcgccgcttttgaaaaagaaattgccgctttcgagtccgagcttcaggcttacaaaggcaaagggaatcctgaggtcgagagcctgagagatcacgctgcccacattagagagtggttgcaggcataccggcacaatggatccggcggcggaggatctggcggaggcggatctgggggcggaggctctttcgaacaggtccaactggtgcagagcggagccgaggtcgtgaagcctggcgcttccgtgaagattagctgcaaagccagcggctacacctttaccggctactttatgcactgggtcaagcagagccctggccagagcctggaatggatcggcagaatccacccctacgacggcgacaccttctacaaccagaagttccagggcaaggccaccctgacagtggacaagagcagcaacaccgcccacatggaactgctgagcctgaccagcgaggacttcgccgtgtactactgcaccagatacgacggcagccgggctatggactattggggccagggcaccaccgtgaccgtgtctagtacgcgtatccagaaccctgatcctgccgtgtaccagctgcgggatagcaagagcagcgacaagagcgtgtgtctgttcaccgacttcgacagccagaccaacgtgtcccagagcaaggactccgacgtgtacatcaccgataagtgcgtgctggacatgcggagcatggacttcaagagcaactccgccgtggcctggtccaacaagtccgatttcgcctgcgccaacgccttcaacaacagcattatccccgaggacacattcttcccaagccccgagagcagctgcggctttaccagcgagagctaccagcagggcgtgctgagcgccaccatcctgtacgagatcctgctgggcaaggccaccctgtacgccgtgctggtgtctgccctggtgctgatggctatggtcaagcggaaggacagccggggacgcgccaagagaagcggatctggcgtgaagcagaccctgaatttcgacctgctgaagctggctggcgacgtggaatccaacccaggcccttctagaggccatatgaccgagtacaagcccacggtgcgcctcgccacccgcgacgacgtccccagggccgtacgcaccctcgccgccgcgttcgccgactaccccgccacgcgccacaccgtcgatccggaccgccacatcgagcgggtcaccgagctgcaagaactcttcctcacgcgcgtcgggctcgacatcggcaaggtgtgggtcgcggacgacggcgccgcggtggcggtctggaccacgccggagagcgtcgaagcgggggcggtgttcgccgagatcggcccgcgcatggccgagttgagcggttcccggctggccgcgcagcaacagatggaaggcctcctggcgccgcaccggcccaaggagcccgcgtggttcctggccaccgtcggcgtctcgcccgaccaccagggcaagggtctgggcagcgccgtcgtgctccccggagtggaggcggccgagcgcgccggggtgcccgccttcctggagacctccgcgccccgcaacctccccttctacgagcggctcggcttcaccgtcaccgccgacgtcgaggtgcccgaaggaccgcgcacctggtgcatgacccgcaagcccggtgcctga

SEQ ID NO: 35511 - DNA, 2853 bp, synthetic construct
  source 1..2853: mol_type = other DNA
atggccttaccagtgaccgccttgctcctgccgctggccttgctgctccacgccgccaggccggcatgcatgggcagttggttcgagttctacgaccggctgaatgccatcgacgccagactgtgggctctcggaggatctgaagctgagctggccgccttcgagaaagagatcgccgcctttgagagcgagctgcaagcctacaaaggcaagggcaaccccgaggtggaaaacctgagagtgcacgccgctgccatcagagaatggctccaggcttacagacacaacggtaccggcggaggcggatctggcggcggaggtagcggtggcggaggatctgaattcgacatcgtgctgacccagagccctctgagcctggccgtgtctctgggacagcctgccatcatcagctgtagggccagccagagcgtgtcctttgccggcacctctctgatgcactggtatcaccagaagcccggccagcagcccagactgctgatctacagagccagcaacctggaagccggcgtgcccgatagattttccggcagcggcagcaagaccgacttcaccctgaccatcagccccgtggaagccgaagatgccgccacctactactgccagcagagcagagagtacccctacaccttcggcggaggcaccaagctggaaatcaagaggctcgaggacctgaagaacgtgttcccacctgaggtggccgtgttcgagcctagcgaggccgagatcagccacacccagaaagccaccctcgtgtgcctggctaccggcttctaccccgaccatgtggaactgtcttggtgggtcaacggcaaagaggtgcacagcggcgtgtgtaccgacccccagccactgaaagaacagcccgccctgaacgacagccggtactgcctgagcagcagactgagagtgtccgccaccttctggcagaacccccggaaccacttcagatgccaggtgcagttctacggcctgagcgagaacgacgagtggacccaggacagagccaagcccgtgacccagatcgtgtctgccgaagcctggggcagagccgattgcgacgtgaagctggtggaaaagagcttcgagacagacaccaacctgaacttccagaacctgagcgtgatcggcttcagaatcctgctgctgaaagtggccggctttaacctgctgatgaccctgcggctgtggtccagcagggccaagcgatctggatctggagcaacaaacttctcactactcaaacaagcaggtgacgtggaggagaatcccgggcctactagtatggactggatttggcgcatccttttccttgtcggcgctgctaccggcgcgcattccttcgaacaggtccaactggtgcagagcggagccgaggtcgtgaagcctggcgcttccgtgaagattagctgcaaagccagcggctacacctttaccggctactttatgcactgggtcaagcagagccctggccagagcctggaatggatcggcagaatccacccctacgacggcgacaccttctacaaccagaagttccagggcaaggccaccctgacagtggacaagagcagcaacaccgcccacatggaactgctgagcctgaccagcgaggacttcgccgtgtactactgcaccagatacgacggcagccgggctatggactattggggccagggcaccaccgtgaccgtgtctagtacgcgtatccagaaccctgatcctgccgtgtaccagctgcgggatagcaagagcagcgacaagagcgtgtgtctgttcaccgacttcgacagccagaccaacgtgtcccagagcaaggactccgacgtgtacatcaccgataagtgcgtgctggacatgcggagcatggacttcaagagcaactccgccgtggcctggtccaacaagtccgatttcgcctgcgccaacgccttcaacaacagcattatccccgaggacacattcttcccaagccccgagagcagctgcggctttaccagcgagagctaccagcagggcgtgctgagcgccaccatcctgtacgagatcctgctgggcaaggccaccctgtacgccgtgctggtgtctgccctggtgctgatggctatggtcaagcggaaggacagccggggacgcgccaagagaagcggatctggcgtgaagcagaccctgaatttcgacctgctgaagctggctggcgacgtggaatccaacccaggcccttctagaggccatatgaccgagtacaagcccacggtgcgcctcgccacccgcgacgacgtccccagggccgtacgcaccctcgccgccgcgttcgccgactaccccgccacgcgccacaccgtcgatccggaccgccacatcgagcgggtcaccgagctgcaagaactcttcctcacgcgcgtcgggctcgacatcggcaaggtgtgggtcgcggacgacggcgccgcggtggcggtctggaccacgccggagagcgtcgaagcgggggcggtgttcgccgagatcggcccgcgcatggccgagttgagcggttcccggctggccgcgcagcaacagatggaaggcctcctggcgccgcaccggcccaaggagcccgcgtggttcctggccaccgtcggcgtctcgcccgaccaccagggcaagggtctgggcagcgccgtcgtgctccccggagtggaggcggccgagcgcgccggggtgcccgccttcctggagacctccgcgccccgcaacctccccttctacgagcggctcggcttcaccgtcaccgccgacgtcgaggtgcccgaaggaccgcgcacctggtgcatgacccgcaagcccggtgcctga

SEQ ID NO: 35512 - DNA, 3204 bp, synthetic construct
  source 1..3204: mol_type = other DNA
atggccttaccagtgaccgccttgctcctgccgctggccttgctgctccacgccgccaggccggcatgcatggaccccgacctggaaatcagagccgccttcctgcggcagagaaacacagccctgagaacagaggtggccgagctggaacaagaggtgcagcggctggaaaacgaggtgtcccagtacgagacaagatacggccctctcggaggcggaaaaggtaccggcggaggcggatctggcggcggaggtagcggtggcggaggatctgaattcgacatcgtgctgacccagagccctctgagcctggccgtgtctctgggacagcctgccatcatcagctgtagggccagccagagcgtgtcctttgccggcacctctctgatgcactggtatcaccagaagcccggccagcagcccagactgctgatctacagagccagcaacctggaagccggcgtgcccgatagattttccggcagcggcagcaagaccgacttcaccctgaccatcagccccgtggaagccgaagatgccgccacctactactgccagcagagcagagagtacccctacaccttcggcggaggcaccaagctggaaatcaagaggctcgaggacctgaagaacgtgttcccacctgaggtggccgtgttcgagcctagcgaggccgagatcagccacacccagaaagccaccctcgtgtgcctggctaccggcttctaccccgaccatgtggaactgtcttggtgggtcaacggcaaagaggtgcacagcggcgtgtgtaccgacccccagccactgaaagaacagcccgccctgaacgacagccggtactgcctgagcagcagactgagagtgtccgccaccttctggcagaacccccggaaccacttcagatgccaggtgcagttctacggcctgagcgagaacgacgagtggacccaggacagagccaagcccgtgacccagatcgtgtctgccgaagcctggggcagagccgattgcgacgtgaagctggtggaaaagagcttcgagacagacaccaacctgaacttccagaacctgagcgtgatcggcttcagaatcctgctgctgaaagtggccggctttaacctgctgatgaccctgcggctgtggtccagcagggccaagcgatctggatctggagcaacaaacttctcactactcaaacaagcaggtgacgtggaggagaatcccgggcctactagtgccaccatggactggatttggcgcatccttttccttgtcggcgctgctaccggcgcccattccgggcccgaagtgcagctggttgaatctggcggaggactggttcaggctggcggatctctgagactgtcttgtgccgccagcggcagaacctttagcatgggctggtttagacaggcccctggcaaagagagagagttcgtcgccgccatcacatactctggcggcagcccttactacgccgactctgtgaagggcagattcaccatcagccgggacaacgccaagaacaccgtgtacctccagatgaacagcctgaagcctgaggacaccgccgtgtactactgcgccgccaatccaacatacggcagcgactggaacgccgagaattggggccagggaacccaagtgacagtgtctagcggatccggcggcggaggatctggcggaggcggatctgggggcggaggctctttcgaacaggtccaactggtgcagagcggagccgaggtcgtgaagcctggcgcttccgtgaagattagctgcaaagccagcggctacacctttaccggctactttatgcactgggtcaagcagagccctggccagagcctggaatggatcggcagaatccacccctacgacggcgacaccttctacaaccagaagttccagggcaaggccaccctgacagtggacaagagcagcaacaccgcccacatggaactgctgagcctgaccagcgaggacttcgccgtgtactactgcaccagatacgacggcagccgggctatggactattggggccagggcaccaccgtgaccgtgtctagtacgcgtatccagaaccctgatcctgccgtgtaccagctgcgggatagcaagagcagcgacaagagcgtgtgtctgttcaccgacttcgacagccagaccaacgtgtcccagagcaaggactccgacgtgtacatcaccgataagtgcgtgctggacatgcggagcatggacttcaagagcaactccgccgtggcctggtccaacaagtccgatttcgcctgcgccaacgccttcaacaacagcattatccccgaggacacattcttcccaagccccgagagcagctgcggctttaccagcgagagctaccagcagggcgtgctgagcgccaccatcctgtacgagatcctgctgggcaaggccaccctgtacgccgtgctggtgtctgccctggtgctgatggctatggtcaagcggaaggacagccggggacgcgccaagagaagcggatctggcgtgaagcagaccctgaatttcgacctgctgaagctggctggcgacgtggaatccaacccaggcccttctagaggccatatgaccgagtacaagcccacggtgcgcctcgccacccgcgacgacgtccccagggccgtacgcaccctcgccgccgcgttcgccgactaccccgccacgcgccacaccgtcgatccggaccgccacatcgagcgggtcaccgagctgcaagaactcttcctcacgcgcgtcgggctcgacatcggcaaggtgtgggtcgcggacgacggcgccgcggtggcggtctggaccacgccggagagcgtcgaagcgggggcggtgttcgccgagatcggcccgcgcatggccgagttgagcggttcccggctggccgcgcagcaacagatggaaggcctcctggcgccgcaccggcccaaggagcccgcgtggttcctggccaccgtcggcgtctcgcccgaccaccagggcaagggtctgggcagcgccgtcgtgctccccggagtggaggcggccgagcgcgccggggtgcccgccttcctggagacctccgcgccccgcaacctccccttctacgagcggctcggcttcaccgtcaccgccgacgtcgaggtgcccgaaggaccgcgcacctggtgcatgacccgcaagcccggtgcctga

SEQ ID NO: 35513 - DNA, 2853 bp, synthetic construct
  source 1..2853: mol_type = other DNA
atggccttaccagtgaccgccttgctcctgccgctggccttgctgctccacgccgccaggccggacatcgtgctgacccagagccctctgagcctggccgtgtctctgggacagcctgccatcatcagctgtagggccagccagagcgtgtcctttgccggcacctctctgatgcactggtatcaccagaagcccggccagcagcccagactgctgatctacagagccagcaacctggaagccggcgtgcccgatagattttccggcagcggcagcaagaccgacttcaccctgaccatcagccccgtggaagccgaagatgccgccacctactactgccagcagagcagagagtacccctacaccttcggcggaggcaccaagctggaaatcaagaggctcgaggacctgaagaacgtgttcccacctgaggtggccgtgttcgagcctagcgaggccgagatcagccacacccagaaagccaccctcgtgtgcctggctaccggcttctaccccgaccatgtggaactgtcttggtgggtcaacggcaaagaggtgcacagcggcgtgtgtaccgacccccagccactgaaagaacagcccgccctgaacgacagccggtactgcctgagcagcagactgagagtgtccgccaccttctggcagaacccccggaaccacttcagatgccaggtgcagttctacggcctgagcgagaacgacgagtggacccaggacagagccaagcccgtgacccagatcgtgtctgccgaagcctggggcagagccgattgcgacgtgaagctggtggaaaagagcttcgagacagacaccaacctgaacttccagaacctgagcgtgatcggcttcagaatcctgctgctgaaagtggccggctttaacctgctgatgaccctgcggctgtggtccagcagggccaagcgatctggatctggagcaacaaacttctcactactcaaacaagcaggtgacgtggaggagaatcccgggcctactagtgccaccatggactggatttggcgcatccttttccttgtcggcgctgctaccggcgcccattccgggcccatgggatcttggagcgagttttacgatcggctgcacgccattcaccaccggctgtatgctctcggaggaagcgaagctgagctggccgcttttgaaaaagaaattgccgctttcgagtccgagcttcaggcttacaaaggcaaagggaatcctgaggtcgaggccctgagagataccgccgccttcatcagaacccggttgcaggcataccggcacaacggatccggcggcggaggatctggcggaggcggatctgggggcggaggctctttcgaacaggtccaactggtgcagagcggagccgaggtcgtgaagcctggcgcttccgtgaagattagctgcaaagccagcggctacacctttaccggctactttatgcactgggtcaagcagagccctggccagagcctggaatggatcggcagaatccacccctacgacggcgacaccttctacaaccagaagttccagggcaaggccaccctgacagtggacaagagcagcaacaccgcccacatggaactgctgagcctgaccagcgaggacttcgccgtgtactactgcaccagatacgacggcagccgggctatggactattggggccagggcaccaccgtgaccgtgtctagtacgcgtatccagaaccctgatcctgccgtgtaccagctgcgggatagcaagagcagcgacaagagcgtgtgtctgttcaccgacttcgacagccagaccaacgtgtcccagagcaaggactccgacgtgtacatcaccgataagtgcgtgctggacatgcggagcatggacttcaagagcaactccgccgtggcctggtccaacaagtccgatttcgcctgcgccaacgccttcaacaacagcattatccccgaggacacattcttcccaagccccgagagcagctgcggctttaccagcgagagctaccagcagggcgtgctgagcgccaccatcctgtacgagatcctgctgggcaaggccaccctgtacgccgtgctggtgtctgccctggtgctgatggctatggtcaagcggaaggacagccggggacgcgccaagagaagcggatctggcgtgaagcagaccctgaatttcgacctgctgaagctggctggcgacgtggaatccaacccaggcccttctagaggccatatgaccgagtacaagcccacggtgcgcctcgccacccgcgacgacgtccccagggccgtacgcaccctcgccgccgcgttcgccgactaccccgccacgcgccacaccgtcgatccggaccgccacatcgagcgggtcaccgagctgcaagaactcttcctcacgcgcgtcgggctcgacatcggcaaggtgtgggtcgcggacgacggcgccgcggtggcggtctggaccacgccggagagcgtcgaagcgggggcggtgttcgccgagatcggcccgcgcatggccgagttgagcggttcccggctggccgcgcagcaacagatggaaggcctcctggcgccgcaccggcccaaggagcccgcgtggttcctggccaccgtcggcgtctcgcccgaccaccagggcaagggtctgggcagcgccgtcgtgctccccggagtggaggcggccgagcgcgccggggtgcccgccttcctggagacctccgcgccccgcaacctccccttctacgagcggctcggcttcaccgtcaccgccgacgtcgaggtgcccgaaggaccgcgcacctggtgcatgacccgcaagcccggtgcctga

SEQ ID NO: 35514 - DNA, 3483 bp, synthetic construct
  source 1..3483: mol_type = other DNA
atggccttaccagtgaccgccttgctcctgccgctggccttgctgctccacgccgccaggccggacatcgtgctgacccagagccctctgagcctggccgtgtctctgggacagcctgccatcatcagctgtagggccagccagagcgtgtcctttgccggcacctctctgatgcactggtatcaccagaagcccggccagcagcccagactgctgatctacagagccagcaacctggaagccggcgtgcccgatagattttccggcagcggcagcaagaccgacttcaccctgaccatcagccccgtggaagccgaagatgccgccacctactactgccagcagagcagagagtacccctacaccttcggcggaggcaccaagctggaaatcaagaggctcgaggacctgaagaacgtgttcccacctgaggtggccgtgttcgagcctagcgaggccgagatcagccacacccagaaagccaccctcgtgtgcctggctaccggcttctaccccgaccatgtggaactgtcttggtgggtcaacggcaaagaggtgcacagcggcgtgtgtaccgacccccagccactgaaagaacagcccgccctgaacgacagccggtactgcctgagcagcagactgagagtgtccgccaccttctggcagaacccccggaaccacttcagatgccaggtgcagttctacggcctgagcgagaacgacgagtggacccaggacagagccaagcccgtgacccagatcgtgtctgccgaagcctggggcagagccgattgcgacgtgaagctggtggaaaagagcttcgagacagacaccaacctgaacttccagaacctgagcgtgatcggcttcagaatcctgctgctgaaagtggccggctttaacctgctgatgaccctgcggctgtggtccagcagggccaagcgatctggatctggagcaacaaacttctcactactcaaacaagcaggtgacgtggaggagaatcccgggcctactagtaccatggactggatttggcgcatccttttccttgtcggcgctgctaccggcgcccattccctgttcaatcaagaggtgcagatccctctgaccgagagctactgtggcccctgtcctaagaactggatctgctacaagaacaactgctaccagttcttcgacgagagcaagaattggtacgagagccaggccagctgcatgagccagaatgccagcctgctgaaggtgtacagcaaagaggaccaggacctgctgaaactggtcaagagcgcccactggatgggccttgtgcacatccccaccaatggctcttggcagtgggaggacggcagcattctgagccctaacctgctgaccatcatcgagatgcagaagggcgactgcgccctgtacgccagcagctttaagggctacatcgagaattgcagcaccccgaacacctacatctgtatgcagagaaccgtttctggcggaggcggctctggaggaggcggaagtggcggcggaggcgacctctttaatcaagaagtccagattccactcaccgaatcctactgcggaccttgtccaaaaaattggatttgttataagaacaactgttatcaattctttgatgagtctaaaaattggtatgagtcccaggcttcctgcatgtctcagaacgcttctctgctgaaagtctactctaaagaagatcaggatctcctgaagctcgtcaagtctgcccattggatggggctcgtccacattcctaccaacggaagctggcaatgggaagatggctccatcctgtctccaaatctgctcacgattattgaaatgcagaaaggggattgtgctctctacgccagctccttcaagggatatattgagaactgtagcacgcccaatacttatatctgtatgcaacggaccgtgggatccggcggcggaggatctggcggaggcggatctgggggcggaggctctttcgaacaggtccaactggtgcagagcggagccgaggtcgtgaagcctggcgcttccgtgaagattagctgcaaagccagcggctacacctttaccggctactttatgcactgggtcaagcagagccctggccagagcctggaatggatcggcagaatccacccctacgacggcgacaccttctacaaccagaagttccagggcaaggccaccctgacagtggacaagagcagcaacaccgcccacatggaactgctgagcctgaccagcgaggacttcgccgtgtactactgcaccagatacgacggcagccgggctatggactattggggccagggcaccaccgtgaccgtgtctagtacgcgtatccagaaccctgatcctgccgtgtaccagctgcgggatagcaagagcagcgacaagagcgtgtgtctgttcaccgacttcgacagccagaccaacgtgtcccagagcaaggactccgacgtgtacatcaccgataagtgcgtgctggacatgcggagcatggacttcaagagcaactccgccgtggcctggtccaacaagtccgatttcgcctgcgccaacgccttcaacaacagcattatccccgaggacacattcttcccaagccccgagagcagctgcggctttaccagcgagagctaccagcagggcgtgctgagcgccaccatcctgtacgagatcctgctgggcaaggccaccctgtacgccgtgctggtgtctgccctggtgctgatggctatggtcaagcggaaggacagccggggacgcgccaagagaagcggatctggcgtgaagcagaccctgaatttcgacctgctgaagctggctggcgacgtggaatccaacccaggcccttctagaggccatatgaccgagtacaagcccacggtgcgcctcgccacccgcgacgacgtccccagggccgtacgcaccctcgccgccgcgttcgccgactaccccgccacgcgccacaccgtcgatccggaccgccacatcgagcgggtcaccgagctgcaagaactcttcctcacgcgcgtcgggctcgacatcggcaaggtgtgggtcgcggacgacggcgccgcggtggcggtctggaccacgccggagagcgtcgaagcgggggcggtgttcgccgagatcggcccgcgcatggccgagttgagcggttcccggctggccgcgcagcaacagatggaaggcctcctggcgccgcaccggcccaaggagcccgcgtggttcctggccaccgtcggcgtctcgcccgaccaccagggcaagggtctgggcagcgccgtcgtgctccccggagtggaggcggccgagcgcgccggggtgcccgccttcctggagacctccgcgccccgcaacctccccttctacgagcggctcggcttcaccgtcaccgccgacgtcgaggtgcccgaaggaccgcgcacctggtgcatgacccgcaagcccggtgcctga

SEQ ID NO: 35515 - DNA, 1869 bp, synthetic construct
  source 1..1869: mol_type = other DNA
atggccttaccagtgaccgccttgctcctgccgctggccttgctgctccacgccgccaggccggacatcgtgctgacccagagccctctgagcctggccgtgtctctgggacagcctgccatcatcagctgtagggccagccagagcgtgtcctttgccggcacctctctgatgcactggtatcaccagaagcccggccagcagcccagactgctgatctacagagccagcaacctggaagccggcgtgcccgatagattttccggcagcggcagcaagaccgacttcaccctgaccatcagccccgtggaagccgaagatgccgccacctactactgccagcagagcagagagtacccctacaccttcggcggaggcaccaagctggaaatcaagaggctcgaggacctgaagaacgtgttcccacctgaggtggccgtgttcgagcctagcgaggccgagatcagccacacccagaaagccaccctcgtgtgcctggctaccggcttctaccccgaccatgtggaactgtcttggtgggtcaacggcaaagaggtgcacagcggcgtgtgtaccgacccccagccactgaaagaacagcccgccctgaacgacagccggtactgcctgagcagcagactgagagtgtccgccaccttctggcagaacccccggaaccacttcagatgccaggtgcagttctacggcctgagcgagaacgacgagtggacccaggacagagccaagcccgtgacccagatcgtgtctgccgaagcctggggcagagccgattgcggctttaccagcgagagctaccagcagggcgtgctgagcgccaccaacctgagcgtgatcggcttcagaatcctgctgctgaaagtggccggctttaacctgctgatgaccctgcggctgtggtccagcagggccaagcgatctggatctggagcaacaaacttctcactactcaaacaagcaggtgacgtggaggagaatcccgggcctactagtatggactggatttggcgcatccttttccttgtcggcgctgctaccggcgcgcattccttcgaacaggtccaactggtgcagagcggagccgaggtcgtgaagcctggcgcttccgtgaagattagctgcaaagccagcggctacacctttaccggctactttatgcactgggtcaagcagagccctggccagagcctggaatggatcggcagaatccacccctacgacggcgacaccttctacaaccagaagttccagggcaaggccaccctgacagtggacaagagcagcaacaccgcccacatggaactgctgagcctgaccagcgaggacttcgccgtgtactactgcaccagatacgacggcagccgggctatggactattggggccagggcaccaccgtgaccgtgtctagtacgcgtatccagaaccctgatcctgccgtgtaccagctgcgggatagcaagagcagcgacaagagcgtgtgtctgttcaccgacttcgacagccagaccaacgtgtcccagagcaaggactccgacgtgtacatcaccgataagtgcgtgctggacatgcggagcatggacttcaagagcaactccgccgtggcctggtccaacaagtccgatttcgcctgcgccaacgccttcaacaacagcattatccccgaggacacattcttcccaagccccgagagcagctgcgacgtgaagctggtggaaaagagcttcgagacagacaccaacctgaacttccagatcctgtacgagatcctgctgggcaaggccaccctgtacgccgtgctggtgtctgccctggtgctgatggctatggtcaagcggaaggacagccgggga

SEQ ID NO: 35516 - DNA, 1881 bp, synthetic construct
  source 1..1881: mol_type = other DNA
atggccttaccagtgaccgccttgctcctgccgctggccttgctgctccacgccgccaggccggacatcgtgctgacccagagccctctgagcctggccgtgtctctgggacagcctgccatcatcagctgtagggccagccagagcgtgtcctttgccggcacctctctgatgcactggtatcaccagaagcccggccagcagcccagactgctgatctacagagccagcaacctggaagccggcgtgcccgatagattttccggcagcggcagcaagaccgacttcaccctgaccatcagccccgtggaagccgaagatgccgccacctactactgccagcagagcagagagtacccctacaccttcggcggaggcaccaagctggaaatcaagaggctcgagatccagaaccctgatcctgccgtgtaccagctgcgggatagcaagagcagcgacaagagcgtgtgtctgttcaccgacttcgacagccagaccaacgtgtcccagagcaaggactccgacgtgtacatcaccgataagtgcgtgctggacatgcggagcatggacttcaagagcaactccgccgtggcctggtccaacaagtccgatttcgcctgcgccaacgccttcaacaacagcattatccccgaggacacattcttcccaagccccgagagcagctgcgacgtgaagctggtggaaaagagcttcgagacagacaccaacctgaacttccagatcctgtacgagatcctgctgggcaaggccaccctgtacgccgtgctggtgtctgccctggtgctgatggctatggtcaagcggaaggacagccggggacgcgccaagagaagcggatctggcgtgaagcagaccctgaatttcgacctgctgaagctggctggcgacgtggaatccaacccaggccctactagtatggactggatttggcgcatccttttccttgtcggcgctgctaccggcgcgcattccttcgaacaggtccaactggtgcagagcggagccgaggtcgtgaagcctggcgcttccgtgaagattagctgcaaagccagcggctacacctttaccggctactttatgcactgggtcaagcagagccctggccagagcctggaatggatcggcagaatccacccctacgacggcgacaccttctacaaccagaagttccagggcaaggccaccctgacagtggacaagagcagcaacaccgcccacatggaactgctgagcctgaccagcgaggacttcgccgtgtactactgcaccagatacgacggcagccgggctatggactattggggccagggcaccaccgtgaccgtgtctagtacgcgtgaggacctgaagaacgtgttcccacctgaggtggccgtgttcgagcctagcgaggccgagatcagccacacccagaaagccaccctcgtgtgcctggctaccggcttctaccccgaccatgtggaactgtcttggtgggtcaacggcaaagaggtgcacagcggcgtgtgtaccgacccccagccactgaaagaacagcccgccctgaacgacagccggtactgcctgagcagcagactgagagtgtccgccaccttctggcagaacccccggaaccacttcagatgccaggtgcagttctacggcctgagcgagaacgacgagtggacccaggacagagccaagcccgtgacccagatcgtgtctgccgaagcctggggcagagccgattgcggctttaccagcgagagctaccagcagggcgtgctgagcgccaccaacctgagcgtgatcggcttcagaatcctgctgctgaaagtggccggctttaacctgctgatgaccctgcggctgtggtccagc

SEQ ID NO: 35517 - DNA, 2274 bp, synthetic construct
  source 1..2274: mol_type = other DNA
atggccttaccagtgaccgccttgctcctgccgctggccttgctgctccacgccgccaggccggaagtgcagctggttgaatctggcggaggactggttcagcctggcggatctctgagactgtcttgtgccgccagcggcttcagcttcagcgacttttggatgagctgggtccgacaggcccctggcaaaggacttgaatgggtcgccacaatcagccaggccggcagcgagaaggactacgtggactctgtgaagggcagattcaccatcagccgggacaacgccaagaagtccctgtacctccagatgaacagcctgagagccgaggacaccgccgtgtactattgtgcctctggcgtgtacagcttcgactacagaggccagggcaccctggtcacagtctcttctggtaccggcggaggcggatctggcggcggaggtagcggtggcggaggatctgaattcgacatcgtgctgacccagagccctctgagcctggccgtgtctctgggacagcctgccatcatcagctgtagggccagccagagcgtgtcctttgccggcacctctctgatgcactggtatcaccagaagcccggccagcagcccagactgctgatctacagagccagcaacctggaagccggcgtgcccgatagattttccggcagcggcagcaagaccgacttcaccctgaccatcagccccgtggaagccgaagatgccgccacctactactgccagcagagcagagagtacccctacaccttcggcggaggcaccaagctggaaatcaagaggctcgaggacctgaagaacgtgttcccacctgaggtggccgtgttcgagcctagcgaggccgagatcagccacacccagaaagccaccctcgtgtgcctggctaccggcttctaccccgaccatgtggaactgtcttggtgggtcaacggcaaagaggtgcacagcggcgtgtgtaccgacccccagccactgaaagaacagcccgccctgaacgacagccggtactgcctgagcagcagactgagagtgtccgccaccttctggcagaacccccggaaccacttcagatgccaggtgcagttctacggcctgagcgagaacgacgagtggacccaggacagagccaagcccgtgacccagatcgtgtctgccgaagcctggggcagagccgattgcggctttaccagcgagagctaccagcagggcgtgctgagcgccaccaacctgagcgtgatcggcttcagaatcctgctgctgaaagtggccggctttaacctgctgatgaccctgcggctgtggtccagcagggccaagcgatctggatctggagcaacaaacttctcactactcaaacaagcaggtgacgtggaggagaatcccgggcctactagtatggactggatttggcgcatccttttccttgtcggcgctgctaccggcgcgcattccttcgaacaggtccaactggtgcagagcggagccgaggtcgtgaagcctggcgcttccgtgaagattagctgcaaagccagcggctacacctttaccggctactttatgcactgggtcaagcagagccctggccagagcctggaatggatcggcagaatccacccctacgacggcgacaccttctacaaccagaagttccagggcaaggccaccctgacagtggacaagagcagcaacaccgcccacatggaactgctgagcctgaccagcgaggacttcgccgtgtactactgcaccagatacgacggcagccgggctatggactattggggccagggcaccaccgtgaccgtgtctagtacgcgtatccagaaccctgatcctgccgtgtaccagctgcgggatagcaagagcagcgacaagagcgtgtgtctgttcaccgacttcgacagccagaccaacgtgtcccagagcaaggactccgacgtgtacatcaccgataagtgcgtgctggacatgcggagcatggacttcaagagcaactccgccgtggcctggtccaacaagtccgatttcgcctgcgccaacgccttcaacaacagcattatccccgaggacacattcttcccaagccccgagagcagctgcgacgtgaagctggtggaaaagagcttcgagacagacaccaacctgaacttccagatcctgtacgagatcctgctgggcaaggccaccctgtacgccgtgctggtgtctgccctggtgctgatggctatggtcaagcggaaggacagccgggga

SEQ ID NO: 35518 - DNA, 2286 bp, synthetic construct
  source 1..2286: mol_type = other DNA
atggccttaccagtgaccgccttgctcctgccgctggccttgctgctccacgccgccaggccggaagtgcagctggttgaatctggcggaggactggttcagcctggcggatctctgagactgtcttgtgccgccagcggcttcagcttcagcgacttttggatgagctgggtccgacaggcccctggcaaaggacttgaatgggtcgccacaatcagccaggccggcagcgagaaggactacgtggactctgtgaagggcagattcaccatcagccgggacaacgccaagaagtccctgtacctccagatgaacagcctgagagccgaggacaccgccgtgtactattgtgcctctggcgtgtacagcttcgactacagaggccagggcaccctggtcacagtctcttctggtaccggcggaggcggatctggcggcggaggtagcggtggcggaggatctgaattcgacatcgtgctgacccagagccctctgagcctggccgtgtctctgggacagcctgccatcatcagctgtagggccagccagagcgtgtcctttgccggcacctctctgatgcactggtatcaccagaagcccggccagcagcccagactgctgatctacagagccagcaacctggaagccggcgtgcccgatagattttccggcagcggcagcaagaccgacttcaccctgaccatcagccccgtggaagccgaagatgccgccacctactactgccagcagagcagagagtacccctacaccttcggcggaggcaccaagctggaaatcaagaggctcgagatccagaaccctgatcctgccgtgtaccagctgcgggatagcaagagcagcgacaagagcgtgtgtctgttcaccgacttcgacagccagaccaacgtgtcccagagcaaggactccgacgtgtacatcaccgataagtgcgtgctggacatgcggagcatggacttcaagagcaactccgccgtggcctggtccaacaagtccgatttcgcctgcgccaacgccttcaacaacagcattatccccgaggacacattcttcccaagccccgagagcagctgcgacgtgaagctggtggaaaagagcttcgagacagacaccaacctgaacttccagatcctgtacgagatcctgctgggcaaggccaccctgtacgccgtgctggtgtctgccctggtgctgatggctatggtcaagcggaaggacagccggggacgcgccaagagaagcggatctggcgtgaagcagaccctgaatttcgacctgctgaagctggctggcgacgtggaatccaacccaggccctactagtatggactggatttggcgcatccttttccttgtcggcgctgctaccggcgcgcattccttcgaacaggtccaactggtgcagagcggagccgaggtcgtgaagcctggcgcttccgtgaagattagctgcaaagccagcggctacacctttaccggctactttatgcactgggtcaagcagagccctggccagagcctggaatggatcggcagaatccacccctacgacggcgacaccttctacaaccagaagttccagggcaaggccaccctgacagtggacaagagcagcaacaccgcccacatggaactgctgagcctgaccagcgaggacttcgccgtgtactactgcaccagatacgacggcagccgggctatggactattggggccagggcaccaccgtgaccgtgtctagtacgcgtgaggacctgaagaacgtgttcccacctgaggtggccgtgttcgagcctagcgaggccgagatcagccacacccagaaagccaccctcgtgtgcctggctaccggcttctaccccgaccatgtggaactgtcttggtgggtcaacggcaaagaggtgcacagcggcgtgtgtaccgacccccagccactgaaagaacagcccgccctgaacgacagccggtactgcctgagcagcagactgagagtgtccgccaccttctggcagaacccccggaaccacttcagatgccaggtgcagttctacggcctgagcgagaacgacgagtggacccaggacagagccaagcccgtgacccagatcgtgtctgccgaagcctggggcagagccgattgcggctttaccagcgagagctaccagcagggcgtgctgagcgccaccaacctgagcgtgatcggcttcagaatcctgctgctgaaagtggccggctttaacctgctgatgaccctgcggctgtggtccagc

SEQ ID NO: 35519 - DNA, 2685 bp, synthetic construct
  source 1..2685: mol_type = other DNA
atggccttaccagtgaccgccttgctcctgccgctggccttgctgctccacgccgccaggccggaagtgcagctggttgaatctggcggaggactggttcagcctggcggatctctgagactgtcttgtgccgccagcggcttcagcttcagcgacttttggatgagctgggtccgacaggcccctggcaaaggacttgaatgggtcgccacaatcagccaggccggcagcgagaaggactacgtggactctgtgaagggcagattcaccatcagccgggacaacgccaagaagtccctgtacctccagatgaacagcctgagagccgaggacaccgccgtgtactattgtgcctctggcgtgtacagcttcgactacagaggccagggcaccctggtcacagtctcttctggtaccggcggaggcggatctggcggcggaggtagcggtggcggaggatctgaattcgacatcgtgctgacccagagccctctgagcctggccgtgtctctgggacagcctgccatcatcagctgtagggccagccagagcgtgtcctttgccggcacctctctgatgcactggtatcaccagaagcccggccagcagcccagactgctgatctacagagccagcaacctggaagccggcgtgcccgatagattttccggcagcggcagcaagaccgacttcaccctgaccatcagccccgtggaagccgaagatgccgccacctactactgccagcagagcagagagtacccctacaccttcggcggaggcaccaagctggaaatcaagaggctcgaggacctgaagaacgtgttcccacctgaggtggccgtgttcgagcctagcgaggccgagatcagccacacccagaaagccaccctcgtgtgcctggctaccggcttctaccccgaccatgtggaactgtcttggtgggtcaacggcaaagaggtgcacagcggcgtgtgtaccgacccccagccactgaaagaacagcccgccctgaacgacagccggtactgcctgagcagcagactgagagtgtccgccaccttctggcagaacccccggaaccacttcagatgccaggtgcagttctacggcctgagcgagaacgacgagtggacccaggacagagccaagcccgtgacccagatcgtgtctgccgaagcctggggcagagccgattgcggctttaccagcgagagctaccagcagggcgtgctgagcgccaccaacctgagcgtgatcggcttcagaatcctgctgctgaaagtggccggctttaacctgctgatgaccctgcggctgtggtccagcagggccaagcgatctggatctggagcaacaaacttctcactactcaaacaagcaggtgacgtggaggagaatcccgggcctactagtatggactggatttggcgcatccttttccttgtcggcgctgctaccggcgcgcattccgggccccagctccagctgcaagagtctggacctggcctggtcaagcctagcgagacactgagcctgacctgtaccgtgtccggcgatagcatcagcagcggcgattactactggggctggatcagacagcctcctggcaaaggactggaatggatcggccacatctactacagcggcgtgacctactacaaccccagcctgaagtccagagtgaccatcagcgtggacaccagccggaaccagttctccctgaagctgtctagcgtgacagccgccgataccgccgtgtactactgcaccagagaggacagcagcaactggcggagtagaggccagggaacactggtcacagttagctctggatccggcggaggcggaagtggaggcggaggatctggcggcggaggctctttcgaacaggtccaactggtgcagagcggagccgaggtcgtgaagcctggcgcttccgtgaagattagctgcaaagccagcggctacacctttaccggctactttatgcactgggtcaagcagagccctggccagagcctggaatggatcggcagaatccacccctacgacggcgacaccttctacaaccagaagttccagggcaaggccaccctgacagtggacaagagcagcaacaccgcccacatggaactgctgagcctgaccagcgaggacttcgccgtgtactactgcaccagatacgacggcagccgggctatggactattggggccagggcaccaccgtgaccgtgtctagtacgcgtatccagaaccctgatcctgccgtgtaccagctgcgggatagcaagagcagcgacaagagcgtgtgtctgttcaccgacttcgacagccagaccaacgtgtcccagagcaaggactccgacgtgtacatcaccgataagtgcgtgctggacatgcggagcatggacttcaagagcaactccgccgtggcctggtccaacaagtccgatttcgcctgcgccaacgccttcaacaacagcattatccccgaggacacattcttcccaagccccgagagcagctgcgacgtgaagctggtggaaaagagcttcgagacagacaccaacctgaacttccagatcctgtacgagatcctgctgggcaaggccaccctgtacgccgtgctggtgtctgccctggtgctgatggctatggtcaagcggaaggacagccgggga

SEQ ID NO: 35520 - DNA, 2697 bp, synthetic construct
  source 1..2697: mol_type = other DNA
atggccttaccagtgaccgccttgctcctgccgctggccttgctgctccacgccgccaggccggaagtgcagctggttgaatctggcggaggactggttcagcctggcggatctctgagactgtcttgtgccgccagcggcttcagcttcagcgacttttggatgagctgggtccgacaggcccctggcaaaggacttgaatgggtcgccacaatcagccaggccggcagcgagaaggactacgtggactctgtgaagggcagattcaccatcagccgggacaacgccaagaagtccctgtacctccagatgaacagcctgagagccgaggacaccgccgtgtactattgtgcctctggcgtgtacagcttcgactacagaggccagggcaccctggtcacagtctcttctggtaccggcggaggcggatctggcggcggaggtagcggtggcggaggatctgaattcgacatcgtgctgacccagagccctctgagcctggccgtgtctctgggacagcctgccatcatcagctgtagggccagccagagcgtgtcctttgccggcacctctctgatgcactggtatcaccagaagcccggccagcagcccagactgctgatctacagagccagcaacctggaagccggcgtgcccgatagattttccggcagcggcagcaagaccgacttcaccctgaccatcagccccgtggaagccgaagatgccgccacctactactgccagcagagcagagagtacccctacaccttcggcggaggcaccaagctggaaatcaagaggctcgagatccagaaccctgatcctgccgtgtaccagctgcgggatagcaagagcagcgacaagagcgtgtgtctgttcaccgacttcgacagccagaccaacgtgtcccagagcaaggactccgacgtgtacatcaccgataagtgcgtgctggacatgcggagcatggacttcaagagcaactccgccgtggcctggtccaacaagtccgatttcgcctgcgccaacgccttcaacaacagcattatccccgaggacacattcttcccaagccccgagagcagctgcgacgtgaagctggtggaaaagagcttcgagacagacaccaacctgaacttccagatcctgtacgagatcctgctgggcaaggccaccctgtacgccgtgctggtgtctgccctggtgctgatggctatggtcaagcggaaggacagccggggacgcgccaagagaagcggatctggcgtgaagcagaccctgaatttcgacctgctgaagctggctggcgacgtggaatccaacccaggccctactagtatggactggatttggcgcatccttttccttgtcggcgctgctaccggcgcgcattccgggccccagctccagctgcaagagtctggacctggcctggtcaagcctagcgagacactgagcctgacctgtaccgtgtccggcgatagcatcagcagcggcgattactactggggctggatcagacagcctcctggcaaaggactggaatggatcggccacatctactacagcggcgtgacctactacaaccccagcctgaagtccagagtgaccatcagcgtggacaccagccggaaccagttctccctgaagctgtctagcgtgacagccgccgataccgccgtgtactactgcaccagagaggacagcagcaactggcggagtagaggccagggaacactggtcacagttagctctggatccggcggaggcggaagtggaggcggaggatctggcggcggaggctctttcgaacaggtccaactggtgcagagcggagccgaggtcgtgaagcctggcgcttccgtgaagattagctgcaaagccagcggctacacctttaccggctactttatgcactgggtcaagcagagccctggccagagcctggaatggatcggcagaatccacccctacgacggcgacaccttctacaaccagaagttccagggcaaggccaccctgacagtggacaagagcagcaacaccgcccacatggaactgctgagcctgaccagcgaggacttcgccgtgtactactgcaccagatacgacggcagccgggctatggactattggggccagggcaccaccgtgaccgtgtctagtacgcgtgaggacctgaagaacgtgttcccacctgaggtggccgtgttcgagcctagcgaggccgagatcagccacacccagaaagccaccctcgtgtgcctggctaccggcttctaccccgaccatgtggaactgtcttggtgggtcaacggcaaagaggtgcacagcggcgtgtgtaccgacccccagccactgaaagaacagcccgccctgaacgacagccggtactgcctgagcagcagactgagagtgtccgccaccttctggcagaacccccggaaccacttcagatgccaggtgcagttctacggcctgagcgagaacgacgagtggacccaggacagagccaagcccgtgacccagatcgtgtctgccgaagcctggggcagagccgattgcggctttaccagcgagagctaccagcagggcgtgctgagcgccaccaacctgagcgtgatcggcttcagaatcctgctgctgaaagtggccggctttaacctgctgatgaccctgcggctgtggtccagc

SEQ ID NO: 35521 - DNA, 2181 bp, synthetic construct
  source 1..2181: mol_type = other DNA
atggccttaccagtgaccgccttgctcctgccgctggccttgctgctccacgccgccaggccggacatcgtgctgacccagagccctctgagcctggccgtgtctctgggacagcctgccatcatcagctgtagggccagccagagcgtgtcctttgccggcacctctctgatgcactggtatcaccagaagcccggccagcagcccagactgctgatctacagagccagcaacctggaagccggcgtgcccgatagattttccggcagcggcagcaagaccgacttcaccctgaccatcagccccgtggaagccgaagatgccgccacctactactgccagcagagcagagagtacccctacaccttcggcggaggcaccaagctggaaatcaagaggctcgaggacctgaagaacgtgttcccacctgaggtggccgtgttcgagcctagcgaggccgagatcagccacacccagaaagccaccctcgtgtgcctggctaccggcttctaccccgaccatgtggaactgtcttggtgggtcaacggcaaagaggtgcacagcggcgtgtgtaccgacccccagccactgaaagaacagcccgccctgaacgacagccggtactgcctgagcagcagactgagagtgtccgccaccttctggcagaacccccggaaccacttcagatgccaggtgcagttctacggcctgagcgagaacgacgagtggacccaggacagagccaagcccgtgacccagatcgtgtctgccgaagcctggggcagagccgatgatgtgattaagatccactggcaggaaaagaagtccaacaccatcctgggcagccaggaaggcaacaccatgaagaccaacgacacctacatgaagttcagctggctgaccgtgcccgagaagtccctggacaaagaacacagatgcatcgtgcggcacgaaaacaacaagaacggcgtggaccaggaaatcatcttcccacccatcaagaccgatgtgattacaatggaccccaaggacaactgctccaaggacgccaacgataccctgctgctccagctgaccaacaccagcgcctactacatgtacttgttgctgctgctgaagtccgtggtgtacttcgccatcatcacatgctgcctgctgatggctatggtcaagcggaaggacagccggggaagggccaagcgatctggatctggagcaacaaacttctcactactcaaacaagcaggtgacgtggaggagaatcccgggcctactagtatggactggatttggcgcatccttttccttgtcggcgctgctaccggcgcgcattccttcgaacaggtccaactggtgcagagcggagccgaggtcgtgaagcctggcgcttccgtgaagattagctgcaaagccagcggctacacctttaccggctactttatgcactgggtcaagcagagccctggccagagcctggaatggatcggcagaatccacccctacgacggcgacaccttctacaaccagaagttccagggcaaggccaccctgacagtggacaagagcagcaacaccgcccacatggaactgctgagcctgaccagcgaggacttcgccgtgtactactgcaccagatacgacggcagccgggctatggactattggggccagggcaccaccgtgaccgtgtctagtacgcgtatccagaaccctgatcctgccgtgtaccagctgcgggatagcaagagcagcgacaagagcgtgtgtctgttcaccgacttcgacagccagaccaacgtgtcccagagcaaggactccgacgtgtacatcaccgataagtgcgtgctggacatgcggagcatggacttcaagagcaactccgccgtggcctggtccaacaagtccgatttcgcctgcgccaacgccttcaacaacagcattatccccgaggacacattcttcccaagccccgagagcagcgactccaccgaccacgtgaagcccaaagagacagagaacaccaagcagcccagcaagagctgccacaagcccaaggccatcgtgcacaccgagaaagtgaacatgatgagcctgaccgtgctgggcctgcggatgctgttcgccaaaaccgtggccgtgaacttcctgctgaccgccaagctgttcttcctcctcaccgcc

SEQ ID NO: 35522 - DNA, 2193 bp, synthetic construct
  source 1..2193: mol_type = other DNA
atggccttaccagtgaccgccttgctcctgccgctggccttgctgctccacgccgccaggccggacatcgtgctgacccagagccctctgagcctggccgtgtctctgggacagcctgccatcatcagctgtagggccagccagagcgtgtcctttgccggcacctctctgatgcactggtatcaccagaagcccggccagcagcccagactgctgatctacagagccagcaacctggaagccggcgtgcccgatagattttccggcagcggcagcaagaccgacttcaccctgaccatcagccccgtggaagccgaagatgccgccacctactactgccagcagagcagagagtacccctacaccttcggcggaggcaccaagctggaaatcaagaggctcgagatccagaaccctgatcctgccgtgtaccagctgcgggatagcaagagcagcgacaagagcgtgtgtctgttcaccgacttcgacagccagaccaacgtgtcccagagcaaggactccgacgtgtacatcaccgataagtgcgtgctggacatgcggagcatggacttcaagagcaactccgccgtggcctggtccaacaagtccgatttcgcctgcgccaacgccttcaacaacagcattatccccgaggacacattcttcccaagccccgagagcagcgactccaccgaccacgtgaagcccaaagagacagagaacaccaagcagcccagcaagagctgccacaagcccaaggccatcgtgcacaccgagaaagtgaacatgatgagcctgaccgtgctgggcctgcggatgctgttcgccaaaaccgtggccgtgaacttcctgctgaccgccaagctgttcttcctcctcaccgcccgcgccaagagaagcggatctggcgtgaagcagaccctgaatttcgacctgctgaagctggctggcgacgtggaatccaacccaggccctactagtatggactggatttggcgcatccttttccttgtcggcgctgctaccggcgcgcattccttcgaacaggtccaactggtgcagagcggagccgaggtcgtgaagcctggcgcttccgtgaagattagctgcaaagccagcggctacacctttaccggctactttatgcactgggtcaagcagagccctggccagagcctggaatggatcggcagaatccacccctacgacggcgacaccttctacaaccagaagttccagggcaaggccaccctgacagtggacaagagcagcaacaccgcccacatggaactgctgagcctgaccagcgaggacttcgccgtgtactactgcaccagatacgacggcagccgggctatggactattggggccagggcaccaccgtgaccgtgtctagtacgcgtgaggacctgaagaacgtgttcccacctgaggtggccgtgttcgagcctagcgaggccgagatcagccacacccagaaagccaccctcgtgtgcctggctaccggcttctaccccgaccatgtggaactgtcttggtgggtcaacggcaaagaggtgcacagcggcgtgtgtaccgacccccagccactgaaagaacagcccgccctgaacgacagccggtactgcctgagcagcagactgagagtgtccgccaccttctggcagaacccccggaaccacttcagatgccaggtgcagttctacggcctgagcgagaacgacgagtggacccaggacagagccaagcccgtgacccagatcgtgtctgccgaagcctggggcagagccgatgatgtgattaagatccactggcaggaaaagaagtccaacaccatcctgggcagccaggaaggcaacaccatgaagaccaacgacacctacatgaagttcagctggctgaccgtgcccgagaagtccctggacaaagaacacagatgcatcgtgcggcacgaaaacaacaagaacggcgtggaccaggaaatcatcttcccacccatcaagaccgatgtgattacaatggaccccaaggacaactgctccaaggacgccaacgataccctgctgctccagctgaccaacaccagcgcctactacatgtacttgttgctgctgctgaagtccgtggtgtacttcgccatcatcacatgctgcctgctgatggctatggtcaagcggaaggacagccgggga

SEQ ID NO: 35523 - DNA, 2586 bp, synthetic construct
  source 1..2586: mol_type = other DNA
atggccttaccagtgaccgccttgctcctgccgctggccttgctgctccacgccgccaggccggaagtgcagctggttgaatctggcggaggactggttcagcctggcggatctctgagactgtcttgtgccgccagcggcttcagcttcagcgacttttggatgagctgggtccgacaggcccctggcaaaggacttgaatgggtcgccacaatcagccaggccggcagcgagaaggactacgtggactctgtgaagggcagattcaccatcagccgggacaacgccaagaagtccctgtacctccagatgaacagcctgagagccgaggacaccgccgtgtactattgtgcctctggcgtgtacagcttcgactacagaggccagggcaccctggtcacagtctcttctggtaccggcggaggcggatctggcggcggaggtagcggtggcggaggatctgaattcgacatcgtgctgacccagagccctctgagcctggccgtgtctctgggacagcctgccatcatcagctgtagggccagccagagcgtgtcctttgccggcacctctctgatgcactggtatcaccagaagcccggccagcagcccagactgctgatctacagagccagcaacctggaagccggcgtgcccgatagattttccggcagcggcagcaagaccgacttcaccctgaccatcagccccgtggaagccgaagatgccgccacctactactgccagcagagcagagagtacccctacaccttcggcggaggcaccaagctggaaatcaagaggctcgaggacctgaagaacgtgttcccacctgaggtggccgtgttcgagcctagcgaggccgagatcagccacacccagaaagccaccctcgtgtgcctggctaccggcttctaccccgaccatgtggaactgtcttggtgggtcaacggcaaagaggtgcacagcggcgtgtgtaccgacccccagccactgaaagaacagcccgccctgaacgacagccggtactgcctgagcagcagactgagagtgtccgccaccttctggcagaacccccggaaccacttcagatgccaggtgcagttctacggcctgagcgagaacgacgagtggacccaggacagagccaagcccgtgacccagatcgtgtctgccgaagcctggggcagagccgatgatgtgattaagatccactggcaggaaaagaagtccaacaccatcctgggcagccaggaaggcaacaccatgaagaccaacgacacctacatgaagttcagctggctgaccgtgcccgagaagtccctggacaaagaacacagatgcatcgtgcggcacgaaaacaacaagaacggcgtggaccaggaaatcatcttcccacccatcaagaccgatgtgattacaatggaccccaaggacaactgctccaaggacgccaacgataccctgctgctccagctgaccaacaccagcgcctactacatgtacttgttgctgctgctgaagtccgtggtgtacttcgccatcatcacatgctgcctgctgatggctatggtcaagcggaaggacagccggggaagggccaagcgatctggatctggagcaacaaacttctcactactcaaacaagcaggtgacgtggaggagaatcccgggcctactagtatggactggatttggcgcatccttttccttgtcggcgctgctaccggcgcgcattccttcgaacaggtccaactggtgcagagcggagccgaggtcgtgaagcctggcgcttccgtgaagattagctgcaaagccagcggctacacctttaccggctactttatgcactgggtcaagcagagccctggccagagcctggaatggatcggcagaatccacccctacgacggcgacaccttctacaaccagaagttccagggcaaggccaccctgacagtggacaagagcagcaacaccgcccacatggaactgctgagcctgaccagcgaggacttcgccgtgtactactgcaccagatacgacggcagccgggctatggactattggggccagggcaccaccgtgaccgtgtctagtacgcgtatccagaaccctgatcctgccgtgtaccagctgcgggatagcaagagcagcgacaagagcgtgtgtctgttcaccgacttcgacagccagaccaacgtgtcccagagcaaggactccgacgtgtacatcaccgataagtgcgtgctggacatgcggagcatggacttcaagagcaactccgccgtggcctggtccaacaagtccgatttcgcctgcgccaacgccttcaacaacagcattatccccgaggacacattcttcccaagccccgagagcagcgactccaccgaccacgtgaagcccaaagagacagagaacaccaagcagcccagcaagagctgccacaagcccaaggccatcgtgcacaccgagaaagtgaacatgatgagcctgaccgtgctgggcctgcggatgctgttcgccaaaaccgtggccgtgaacttcctgctgaccgccaagctgttcttcctcctcaccgcc

SEQ ID NO: 35524 - DNA, 2598 bp, synthetic construct
  source 1..2598: mol_type = other DNA
atggccttaccagtgaccgccttgctcctgccgctggccttgctgctccacgccgccaggccggaagtgcagctggttgaatctggcggaggactggttcagcctggcggatctctgagactgtcttgtgccgccagcggcttcagcttcagcgacttttggatgagctgggtccgacaggcccctggcaaaggacttgaatgggtcgccacaatcagccaggccggcagcgagaaggactacgtggactctgtgaagggcagattcaccatcagccgggacaacgccaagaagtccctgtacctccagatgaacagcctgagagccgaggacaccgccgtgtactattgtgcctctggcgtgtacagcttcgactacagaggccagggcaccctggtcacagtctcttctggtaccggcggaggcggatctggcggcggaggtagcggtggcggaggatctgaattcgacatcgtgctgacccagagccctctgagcctggccgtgtctctgggacagcctgccatcatcagctgtagggccagccagagcgtgtcctttgccggcacctctctgatgcactggtatcaccagaagcccggccagcagcccagactgctgatctacagagccagcaacctggaagccggcgtgcccgatagattttccggcagcggcagcaagaccgacttcaccctgaccatcagccccgtggaagccgaagatgccgccacctactactgccagcagagcagagagtacccctacaccttcggcggaggcaccaagctggaaatcaagaggctcgagatccagaaccctgatcctgccgtgtaccagctgcgggatagcaagagcagcgacaagagcgtgtgtctgttcaccgacttcgacagccagaccaacgtgtcccagagcaaggactccgacgtgtacatcaccgataagtgcgtgctggacatgcggagcatggacttcaagagcaactccgccgtggcctggtccaacaagtccgatttcgcctgcgccaacgccttcaacaacagcattatccccgaggacacattcttcccaagccccgagagcagcgactccaccgaccacgtgaagcccaaagagacagagaacaccaagcagcccagcaagagctgccacaagcccaaggccatcgtgcacaccgagaaagtgaacatgatgagcctgaccgtgctgggcctgcggatgctgttcgccaaaaccgtggccgtgaacttcctgctgaccgccaagctgttcttcctcctcaccgcccgcgccaagagaagcggatctggcgtgaagcagaccctgaatttcgacctgctgaagctggctggcgacgtggaatccaacccaggccctactagtatggactggatttggcgcatccttttccttgtcggcgctgctaccggcgcgcattccttcgaacaggtccaactggtgcagagcggagccgaggtcgtgaagcctggcgcttccgtgaagattagctgcaaagccagcggctacacctttaccggctactttatgcactgggtcaagcagagccctggccagagcctggaatggatcggcagaatccacccctacgacggcgacaccttctacaaccagaagttccagggcaaggccaccctgacagtggacaagagcagcaacaccgcccacatggaactgctgagcctgaccagcgaggacttcgccgtgtactactgcaccagatacgacggcagccgggctatggactattggggccagggcaccaccgtgaccgtgtctagtacgcgtgaggacctgaagaacgtgttcccacctgaggtggccgtgttcgagcctagcgaggccgagatcagccacacccagaaagccaccctcgtgtgcctggctaccggcttctaccccgaccatgtggaactgtcttggtgggtcaacggcaaagaggtgcacagcggcgtgtgtaccgacccccagccactgaaagaacagcccgccctgaacgacagccggtactgcctgagcagcagactgagagtgtccgccaccttctggcagaacccccggaaccacttcagatgccaggtgcagttctacggcctgagcgagaacgacgagtggacccaggacagagccaagcccgtgacccagatcgtgtctgccgaagcctggggcagagccgatgatgtgattaagatccactggcaggaaaagaagtccaacaccatcctgggcagccaggaaggcaacaccatgaagaccaacgacacctacatgaagttcagctggctgaccgtgcccgagaagtccctggacaaagaacacagatgcatcgtgcggcacgaaaacaacaagaacggcgtggaccaggaaatcatcttcccacccatcaagaccgatgtgattacaatggaccccaaggacaactgctccaaggacgccaacgataccctgctgctccagctgaccaacaccagcgcctactacatgtacttgttgctgctgctgaagtccgtggtgtacttcgccatcatcacatgctgcctgctgatggctatggtcaagcggaaggacagccgggga

SEQ ID NO: 35525 - DNA, 2997 bp, synthetic construct
  source 1..2997: mol_type = other DNA
atggccttaccagtgaccgccttgctcctgccgctggccttgctgctccacgccgccaggccggaagtgcagctggttgaatctggcggaggactggttcagcctggcggatctctgagactgtcttgtgccgccagcggcttcagcttcagcgacttttggatgagctgggtccgacaggcccctggcaaaggacttgaatgggtcgccacaatcagccaggccggcagcgagaaggactacgtggactctgtgaagggcagattcaccatcagccgggacaacgccaagaagtccctgtacctccagatgaacagcctgagagccgaggacaccgccgtgtactattgtgcctctggcgtgtacagcttcgactacagaggccagggcaccctggtcacagtctcttctggtaccggcggaggcggatctggcggcggaggtagcggtggcggaggatctgaattcgacatcgtgctgacccagagccctctgagcctggccgtgtctctgggacagcctgccatcatcagctgtagggccagccagagcgtgtcctttgccggcacctctctgatgcactggtatcaccagaagcccggccagcagcccagactgctgatctacagagccagcaacctggaagccggcgtgcccgatagattttccggcagcggcagcaagaccgacttcaccctgaccatcagccccgtggaagccgaagatgccgccacctactactgccagcagagcagagagtacccctacaccttcggcggaggcaccaagctggaaatcaagaggctcgaggacctgaagaacgtgttcccacctgaggtggccgtgttcgagcctagcgaggccgagatcagccacacccagaaagccaccctcgtgtgcctggctaccggcttctaccccgaccatgtggaactgtcttggtgggtcaacggcaaagaggtgcacagcggcgtgtgtaccgacccccagccactgaaagaacagcccgccctgaacgacagccggtactgcctgagcagcagactgagagtgtccgccaccttctggcagaacccccggaaccacttcagatgccaggtgcagttctacggcctgagcgagaacgacgagtggacccaggacagagccaagcccgtgacccagatcgtgtctgccgaagcctggggcagagccgatgatgtgattaagatccactggcaggaaaagaagtccaacaccatcctgggcagccaggaaggcaacaccatgaagaccaacgacacctacatgaagttcagctggctgaccgtgcccgagaagtccctggacaaagaacacagatgcatcgtgcggcacgaaaacaacaagaacggcgtggaccaggaaatcatcttcccacccatcaagaccgatgtgattacaatggaccccaaggacaactgctccaaggacgccaacgataccctgctgctccagctgaccaacaccagcgcctactacatgtacttgttgctgctgctgaagtccgtggtgtacttcgccatcatcacatgctgcctgctgatggctatggtcaagcggaaggacagccggggaagggccaagcgatctggatctggagcaacaaacttctcactactcaaacaagcaggtgacgtggaggagaatcccgggcctactagtatggactggatttggcgcatccttttccttgtcggcgctgctaccggcgcgcattccgggccccagctccagctgcaagagtctggacctggcctggtcaagcctagcgagacactgagcctgacctgtaccgtgtccggcgatagcatcagcagcggcgattactactggggctggatcagacagcctcctggcaaaggactggaatggatcggccacatctactacagcggcgtgacctactacaaccccagcctgaagtccagagtgaccatcagcgtggacaccagccggaaccagttctccctgaagctgtctagcgtgacagccgccgataccgccgtgtactactgcaccagagaggacagcagcaactggcggagtagaggccagggaacactggtcacagttagctctggatccggcggaggcggaagtggaggcggaggatctggcggcggaggctctttcgaacaggtccaactggtgcagagcggagccgaggtcgtgaagcctggcgcttccgtgaagattagctgcaaagccagcggctacacctttaccggctactttatgcactgggtcaagcagagccctggccagagcctggaatggatcggcagaatccacccctacgacggcgacaccttctacaaccagaagttccagggcaaggccaccctgacagtggacaagagcagcaacaccgcccacatggaactgctgagcctgaccagcgaggacttcgccgtgtactactgcaccagatacgacggcagccgggctatggactattggggccagggcaccaccgtgaccgtgtctagtacgcgtatccagaaccctgatcctgccgtgtaccagctgcgggatagcaagagcagcgacaagagcgtgtgtctgttcaccgacttcgacagccagaccaacgtgtcccagagcaaggactccgacgtgtacatcaccgataagtgcgtgctggacatgcggagcatggacttcaagagcaactccgccgtggcctggtccaacaagtccgatttcgcctgcgccaacgccttcaacaacagcattatccccgaggacacattcttcccaagccccgagagcagcgactccaccgaccacgtgaagcccaaagagacagagaacaccaagcagcccagcaagagctgccacaagcccaaggccatcgtgcacaccgagaaagtgaacatgatgagcctgaccgtgctgggcctgcggatgctgttcgccaaaaccgtggccgtgaacttcctgctgaccgccaagctgttcttcctcctcaccgcc

SEQ ID NO: 35526 - DNA, 3009 bp, synthetic construct
  source 1..3009: mol_type = other DNA
atggccttaccagtgaccgccttgctcctgccgctggccttgctgctccacgccgccaggccggaagtgcagctggttgaatctggcggaggactggttcagcctggcggatctctgagactgtcttgtgccgccagcggcttcagcttcagcgacttttggatgagctgggtccgacaggcccctggcaaaggacttgaatgggtcgccacaatcagccaggccggcagcgagaaggactacgtggactctgtgaagggcagattcaccatcagccgggacaacgccaagaagtccctgtacctccagatgaacagcctgagagccgaggacaccgccgtgtactattgtgcctctggcgtgtacagcttcgactacagaggccagggcaccctggtcacagtctcttctggtaccggcggaggcggatctggcggcggaggtagcggtggcggaggatctgaattcgacatcgtgctgacccagagccctctgagcctggccgtgtctctgggacagcctgccatcatcagctgtagggccagccagagcgtgtcctttgccggcacctctctgatgcactggtatcaccagaagcccggccagcagcccagactgctgatctacagagccagcaacctggaagccggcgtgcccgatagattttccggcagcggcagcaagaccgacttcaccctgaccatcagccccgtggaagccgaagatgccgccacctactactgccagcagagcagagagtacccctacaccttcggcggaggcaccaagctggaaatcaagaggctcgagatccagaaccctgatcctgccgtgtaccagctgcgggatagcaagagcagcgacaagagcgtgtgtctgttcaccgacttcgacagccagaccaacgtgtcccagagcaaggactccgacgtgtacatcaccgataagtgcgtgctggacatgcggagcatggacttcaagagcaactccgccgtggcctggtccaacaagtccgatttcgcctgcgccaacgccttcaacaacagcattatccccgaggacacattcttcccaagccccgagagcagcgactccaccgaccacgtgaagcccaaagagacagagaacaccaagcagcccagcaagagctgccacaagcccaaggccatcgtgcacaccgagaaagtgaacatgatgagcctgaccgtgctgggcctgcggatgctgttcgccaaaaccgtggccgtgaacttcctgctgaccgccaagctgttcttcctcctcaccgcccgcgccaagagaagcggatctggcgtgaagcagaccctgaatttcgacctgctgaagctggctggcgacgtggaatccaacccaggccctactagtatggactggatttggcgcatccttttccttgtcggcgctgctaccggcgcgcattccgggccccagctccagctgcaagagtctggacctggcctggtcaagcctagcgagacactgagcctgacctgtaccgtgtccggcgatagcatcagcagcggcgattactactggggctggatcagacagcctcctggcaaaggactggaatggatcggccacatctactacagcggcgtgacctactacaaccccagcctgaagtccagagtgaccatcagcgtggacaccagccggaaccagttctccctgaagctgtctagcgtgacagccgccgataccgccgtgtactactgcaccagagaggacagcagcaactggcggagtagaggccagggaacactggtcacagttagctctggatccggcggaggcggaagtggaggcggaggatctggcggcggaggctctttcgaacaggtccaactggtgcagagcggagccgaggtcgtgaagcctggcgcttccgtgaagattagctgcaaagccagcggctacacctttaccggctactttatgcactgggtcaagcagagccctggccagagcctggaatggatcggcagaatccacccctacgacggcgacaccttctacaaccagaagttccagggcaaggccaccctgacagtggacaagagcagcaacaccgcccacatggaactgctgagcctgaccagcgaggacttcgccgtgtactactgcaccagatacgacggcagccgggctatggactattggggccagggcaccaccgtgaccgtgtctagtacgcgtgaggacctgaagaacgtgttcccacctgaggtggccgtgttcgagcctagcgaggccgagatcagccacacccagaaagccaccctcgtgtgcctggctaccggcttctaccccgaccatgtggaactgtcttggtgggtcaacggcaaagaggtgcacagcggcgtgtgtaccgacccccagccactgaaagaacagcccgccctgaacgacagccggtactgcctgagcagcagactgagagtgtccgccaccttctggcagaacccccggaaccacttcagatgccaggtgcagttctacggcctgagcgagaacgacgagtggacccaggacagagccaagcccgtgacccagatcgtgtctgccgaagcctggggcagagccgatgatgtgattaagatccactggcaggaaaagaagtccaacaccatcctgggcagccaggaaggcaacaccatgaagaccaacgacacctacatgaagttcagctggctgaccgtgcccgagaagtccctggacaaagaacacagatgcatcgtgcggcacgaaaacaacaagaacggcgtggaccaggaaatcatcttcccacccatcaagaccgatgtgattacaatggaccccaaggacaactgctccaaggacgccaacgataccctgctgctccagctgaccaacaccagcgcctactacatgtacttgttgctgctgctgaagtccgtggtgtacttcgccatcatcacatgctgcctgctgatggctatggtcaagcggaaggacagccgggga

SEQ ID NO: 35527 - DNA, 2175 bp, synthetic construct
  source 1..2175: mol_type = other DNA
atggccttaccagtgaccgccttgctcctgccgctggccttgctgctccacgccgccaggccggacatcgtgctgacccagagccctctgagcctggccgtgtctctgggacagcctgccatcatcagctgtagggccagccagagcgtgtcctttgccggcacctctctgatgcactggtatcaccagaagcccggccagcagcccagactgctgatctacagagccagcaacctggaagccggcgtgcccgatagattttccggcagcggcagcaagaccgacttcaccctgaccatcagccccgtggaagccgaagatgccgccacctactactgccagcagagcagagagtacccctacaccttcggcggaggcaccaagctggaaatcaagaggctcgaggacctgaagaacgtgttcccacctgaggtggccgtgttcgagcctagcgaggccgagatcagccacacccagaaagccaccctcgtgtgcctggctaccggcttctaccccgaccatgtggaactgtcttggtgggtcaacggcaaagaggtgcacagcggcgtgtgtaccgacccccagccactgaaagaacagcccgccctgaacgacagccggtactgcctgagcagcagactgagagtgtccgccaccttctggcagaacccccggaaccacttcagatgccaggtgcagttctacggcctgagcgagaacgacgagtggacccaggacagagccaagcccgtgacccagatcgtgtctgccgaagcctggggcagagccgatgatgtgattaagatccactggcaggaaaagaagtccaacaccatcctgggcagccaggaaggcaacaccatgaagaccaacgacacctacatgaagttcagctggctgaccgtgcccgagaagtccctggacaaagaacacagatgcatcgtgcggcacgaaaacaacaagaacggcgtggaccaggaaatcatcttcccacccatcaagaccgatgtgattacaatggaccccaaggacaactgctccaaggacgccaacgataccctgctgctccagctgaccaacaccagcgcctactacatgtacttgttgctgctgctgaagtccgtggtgtacttcgccatcatcacatgctgcctgctgcggagaaccgccttctgctgcaacggcgagaagtctagggccaagcgatctggatctggagcaacaaacttctcactactcaaacaagcaggtgacgtggaggagaatcccgggcctactagtatggactggatttggcgcatccttttccttgtcggcgctgctaccggcgcgcattccttcgaacaggtccaactggtgcagagcggagccgaggtcgtgaagcctggcgcttccgtgaagattagctgcaaagccagcggctacacctttaccggctactttatgcactgggtcaagcagagccctggccagagcctggaatggatcggcagaatccacccctacgacggcgacaccttctacaaccagaagttccagggcaaggccaccctgacagtggacaagagcagcaacaccgcccacatggaactgctgagcctgaccagcgaggacttcgccgtgtactactgcaccagatacgacggcagccgggctatggactattggggccagggcaccaccgtgaccgtgtctagtacgcgtatccagaaccctgatcctgccgtgtaccagctgcgggatagcaagagcagcgacaagagcgtgtgtctgttcaccgacttcgacagccagaccaacgtgtcccagagcaaggactccgacgtgtacatcaccgataagtgcgtgctggacatgcggagcatggacttcaagagcaactccgccgtggcctggtccaacaagtccgatttcgcctgcgccaacgccttcaacaacagcattatccccgaggacacattcttcccaagccccgagagcagcgactccaccgaccacgtgaagcccaaagagacagagaacaccaagcagcccagcaagagctgccacaagcccaaggccatcgtgcacaccgagaaagtgaacatgatgagcctgaccgtgctgggcctgcggatgctgttcgccaaaaccgtggccgtgaacttcctgctgaccgccaagctgttcttcctc

SEQ ID NO: 35528 - DNA, 2187 bp, synthetic construct
  source 1..2187: mol_type = other DNA
atggccttaccagtgaccgccttgctcctgccgctggccttgctgctccacgccgccaggccggacatcgtgctgacccagagccctctgagcctggccgtgtctctgggacagcctgccatcatcagctgtagggccagccagagcgtgtcctttgccggcacctctctgatgcactggtatcaccagaagcccggccagcagcccagactgctgatctacagagccagcaacctggaagccggcgtgcccgatagattttccggcagcggcagcaagaccgacttcaccctgaccatcagccccgtggaagccgaagatgccgccacctactactgccagcagagcagagagtacccctacaccttcggcggaggcaccaagctggaaatcaagaggctcgagatccagaaccctgatcctgccgtgtaccagctgcgggatagcaagagcagcgacaagagcgtgtgtctgttcaccgacttcgacagccagaccaacgtgtcccagagcaaggactccgacgtgtacatcaccgataagtgcgtgctggacatgcggagcatggacttcaagagcaactccgccgtggcctggtccaacaagtccgatttcgcctgcgccaacgccttcaacaacagcattatccccgaggacacattcttcccaagccccgagagcagcgactccaccgaccacgtgaagcccaaagagacagagaacaccaagcagcccagcaagagctgccacaagcccaaggccatcgtgcacaccgagaaagtgaacatgatgagcctgaccgtgctgggcctgcggatgctgttcgccaaaaccgtggccgtgaacttcctgctgaccgccaagctgttcttcctccgcgccaagagaagcggatctggcgtgaagcagaccctgaatttcgacctgctgaagctggctggcgacgtggaatccaacccaggccctactagtatggactggatttggcgcatccttttccttgtcggcgctgctaccggcgcgcattccttcgaacaggtccaactggtgcagagcggagccgaggtcgtgaagcctggcgcttccgtgaagattagctgcaaagccagcggctacacctttaccggctactttatgcactgggtcaagcagagccctggccagagcctggaatggatcggcagaatccacccctacgacggcgacaccttctacaaccagaagttccagggcaaggccaccctgacagtggacaagagcagcaacaccgcccacatggaactgctgagcctgaccagcgaggacttcgccgtgtactactgcaccagatacgacggcagccgggctatggactattggggccagggcaccaccgtgaccgtgtctagtacgcgtgaggacctgaagaacgtgttcccacctgaggtggccgtgttcgagcctagcgaggccgagatcagccacacccagaaagccaccctcgtgtgcctggctaccggcttctaccccgaccatgtggaactgtcttggtgggtcaacggcaaagaggtgcacagcggcgtgtgtaccgacccccagccactgaaagaacagcccgccctgaacgacagccggtactgcctgagcagcagactgagagtgtccgccaccttctggcagaacccccggaaccacttcagatgccaggtgcagttctacggcctgagcgagaacgacgagtggacccaggacagagccaagcccgtgacccagatcgtgtctgccgaagcctggggcagagccgatgatgtgattaagatccactggcaggaaaagaagtccaacaccatcctgggcagccaggaaggcaacaccatgaagaccaacgacacctacatgaagttcagctggctgaccgtgcccgagaagtccctggacaaagaacacagatgcatcgtgcggcacgaaaacaacaagaacggcgtggaccaggaaatcatcttcccacccatcaagaccgatgtgattacaatggaccccaaggacaactgctccaaggacgccaacgataccctgctgctccagctgaccaacaccagcgcctactacatgtacttgttgctgctgctgaagtccgtggtgtacttcgccatcatcacatgctgcctgctgcggagaaccgccttctgctgcaacggcgagaagtct

SEQ ID NO: 35529 - DNA, 2580 bp, synthetic construct
  source 1..2580: mol_type = other DNA
atggccttaccagtgaccgccttgctcctgccgctggccttgctgctccacgccgccaggccggaagtgcagctggttgaatctggcggaggactggttcagcctggcggatctctgagactgtcttgtgccgccagcggcttcagcttcagcgacttttggatgagctgggtccgacaggcccctggcaaaggacttgaatgggtcgccacaatcagccaggccggcagcgagaaggactacgtggactctgtgaagggcagattcaccatcagccgggacaacgccaagaagtccctgtacctccagatgaacagcctgagagccgaggacaccgccgtgtactattgtgcctctggcgtgtacagcttcgactacagaggccagggcaccctggtcacagtctcttctggtaccggcggaggcggatctggcggcggaggtagcggtggcggaggatctgaattcgacatcgtgctgacccagagccctctgagcctggccgtgtctctgggacagcctgccatcatcagctgtagggccagccagagcgtgtcctttgccggcacctctctgatgcactggtatcaccagaagcccggccagcagcccagactgctgatctacagagccagcaacctggaagccggcgtgcccgatagattttccggcagcggcagcaagaccgacttcaccctgaccatcagccccgtggaagccgaagatgccgccacctactactgccagcagagcagagagtacccctacaccttcggcggaggcaccaagctggaaatcaagaggctcgaggacctgaagaacgtgttcccacctgaggtggccgtgttcgagcctagcgaggccgagatcagccacacccagaaagccaccctcgtgtgcctggctaccggcttctaccccgaccatgtggaactgtcttggtgggtcaacggcaaagaggtgcacagcggcgtgtgtaccgacccccagccactgaaagaacagcccgccctgaacgacagccggtactgcctgagcagcagactgagagtgtccgccaccttctggcagaacccccggaaccacttcagatgccaggtgcagttctacggcctgagcgagaacgacgagtggacccaggacagagccaagcccgtgacccagatcgtgtctgccgaagcctggggcagagccgatgatgtgattaagatccactggcaggaaaagaagtccaacaccatcctgggcagccaggaaggcaacaccatgaagaccaacgacacctacatgaagttcagctggctgaccgtgcccgagaagtccctggacaaagaacacagatgcatcgtgcggcacgaaaacaacaagaacggcgtggaccaggaaatcatcttcccacccatcaagaccgatgtgattacaatggaccccaaggacaactgctccaaggacgccaacgataccctgctgctccagctgaccaacaccagcgcctactacatgtacttgttgctgctgctgaagtccgtggtgtacttcgccatcatcacatgctgcctgctgcggagaaccgccttctgctgcaacggcgagaagtctagggccaagcgatctggatctggagcaacaaacttctcactactcaaacaagcaggtgacgtggaggagaatcccgggcctactagtatggactggatttggcgcatccttttccttgtcggcgctgctaccggcgcgcattccttcgaacaggtccaactggtgcagagcggagccgaggtcgtgaagcctggcgcttccgtgaagattagctgcaaagccagcggctacacctttaccggctactttatgcactgggtcaagcagagccctggccagagcctggaatggatcggcagaatccacccctacgacggcgacaccttctacaaccagaagttccagggcaaggccaccctgacagtggacaagagcagcaacaccgcccacatggaactgctgagcctgaccagcgaggacttcgccgtgtactactgcaccagatacgacggcagccgggctatggactattggggccagggcaccaccgtgaccgtgtctagtacgcgtatccagaaccctgatcctgccgtgtaccagctgcgggatagcaagagcagcgacaagagcgtgtgtctgttcaccgacttcgacagccagaccaacgtgtcccagagcaaggactccgacgtgtacatcaccgataagtgcgtgctggacatgcggagcatggacttcaagagcaactccgccgtggcctggtccaacaagtccgatttcgcctgcgccaacgccttcaacaacagcattatccccgaggacacattcttcccaagccccgagagcagcgactccaccgaccacgtgaagcccaaagagacagagaacaccaagcagcccagcaagagctgccacaagcccaaggccatcgtgcacaccgagaaagtgaacatgatgagcctgaccgtgctgggcctgcggatgctgttcgccaaaaccgtggccgtgaacttcctgctgaccgccaagctgttcttcctc

SEQ ID NO: 35530 - DNA, 2991 bp, synthetic construct
  source 1..2991: mol_type = other DNA
atggccttaccagtgaccgccttgctcctgccgctggccttgctgctccacgccgccaggccggaagtgcagctggttgaatctggcggaggactggttcagcctggcggatctctgagactgtcttgtgccgccagcggcttcagcttcagcgacttttggatgagctgggtccgacaggcccctggcaaaggacttgaatgggtcgccacaatcagccaggccggcagcgagaaggactacgtggactctgtgaagggcagattcaccatcagccgggacaacgccaagaagtccctgtacctccagatgaacagcctgagagccgaggacaccgccgtgtactattgtgcctctggcgtgtacagcttcgactacagaggccagggcaccctggtcacagtctcttctggtaccggcggaggcggatctggcggcggaggtagcggtggcggaggatctgaattcgacatcgtgctgacccagagccctctgagcctggccgtgtctctgggacagcctgccatcatcagctgtagggccagccagagcgtgtcctttgccggcacctctctgatgcactggtatcaccagaagcccggccagcagcccagactgctgatctacagagccagcaacctggaagccggcgtgcccgatagattttccggcagcggcagcaagaccgacttcaccctgaccatcagccccgtggaagccgaagatgccgccacctactactgccagcagagcagagagtacccctacaccttcggcggaggcaccaagctggaaatcaagaggctcgaggacctgaagaacgtgttcccacctgaggtggccgtgttcgagcctagcgaggccgagatcagccacacccagaaagccaccctcgtgtgcctggctaccggcttctaccccgaccatgtggaactgtcttggtgggtcaacggcaaagaggtgcacagcggcgtgtgtaccgacccccagccactgaaagaacagcccgccctgaacgacagccggtactgcctgagcagcagactgagagtgtccgccaccttctggcagaacccccggaaccacttcagatgccaggtgcagttctacggcctgagcgagaacgacgagtggacccaggacagagccaagcccgtgacccagatcgtgtctgccgaagcctggggcagagccgatgatgtgattaagatccactggcaggaaaagaagtccaacaccatcctgggcagccaggaaggcaacaccatgaagaccaacgacacctacatgaagttcagctggctgaccgtgcccgagaagtccctggacaaagaacacagatgcatcgtgcggcacgaaaacaacaagaacggcgtggaccaggaaatcatcttcccacccatcaagaccgatgtgattacaatggaccccaaggacaactgctccaaggacgccaacgataccctgctgctccagctgaccaacaccagcgcctactacatgtacttgttgctgctgctgaagtccgtggtgtacttcgccatcatcacatgctgcctgctgcggagaaccgccttctgctgcaacggcgagaagtctagggccaagcgatctggatctggagcaacaaacttctcactactcaaacaagcaggtgacgtggaggagaatcccgggcctactagtatggactggatttggcgcatccttttccttgtcggcgctgctaccggcgcgcattccgggccccagctccagctgcaagagtctggacctggcctggtcaagcctagcgagacactgagcctgacctgtaccgtgtccggcgatagcatcagcagcggcgattactactggggctggatcagacagcctcctggcaaaggactggaatggatcggccacatctactacagcggcgtgacctactacaaccccagcctgaagtccagagtgaccatcagcgtggacaccagccggaaccagttctccctgaagctgtctagcgtgacagccgccgataccgccgtgtactactgcaccagagaggacagcagcaactggcggagtagaggccagggaacactggtcacagttagctctggatccggcggaggcggaagtggaggcggaggatctggcggcggaggctctttcgaacaggtccaactggtgcagagcggagccgaggtcgtgaagcctggcgcttccgtgaagattagctgcaaagccagcggctacacctttaccggctactttatgcactgggtcaagcagagccctggccagagcctggaatggatcggcagaatccacccctacgacggcgacaccttctacaaccagaagttccagggcaaggccaccctgacagtggacaagagcagcaacaccgcccacatggaactgctgagcctgaccagcgaggacttcgccgtgtactactgcaccagatacgacggcagccgggctatggactattggggccagggcaccaccgtgaccgtgtctagtacgcgtatccagaaccctgatcctgccgtgtaccagctgcgggatagcaagagcagcgacaagagcgtgtgtctgttcaccgacttcgacagccagaccaacgtgtcccagagcaaggactccgacgtgtacatcaccgataagtgcgtgctggacatgcggagcatggacttcaagagcaactccgccgtggcctggtccaacaagtccgatttcgcctgcgccaacgccttcaacaacagcattatccccgaggacacattcttcccaagccccgagagcagcgactccaccgaccacgtgaagcccaaagagacagagaacaccaagcagcccagcaagagctgccacaagcccaaggccatcgtgcacaccgagaaagtgaacatgatgagcctgaccgtgctgggcctgcggatgctgttcgccaaaaccgtggccgtgaacttcctgctgaccgccaagctgttcttcctc

SEQ ID NO: 35531 - DNA, 1869 bp, synthetic construct
  source 1..1869: mol_type = other DNA
atggccttaccagtgaccgccttgctcctgccgctggccttgctgctccacgccgccaggccggacatcgtgctgacccagagccctctgagcctggccgtgtctctgggacagcctgccatcatcagctgtagggccagccagagcgtgtcctttgccggcacctctctgatgcactggtatcaccagaagcccggccagcagcccagactgctgatctacagagccagcaacctggaagccggcgtgcccgatagattttccggcagcggcagcaagaccgacttcaccctgaccatcagccccgtggaagccgaagatgccgccacctactactgccagcagagcagagagtacccctacaccttcggcggaggcaccaagctggaaatcaagaggctcgaggacctgaagaacgtgttcccacctgaggtggccgtgttcgagcctagcgaggccgagatcagccacacccagaaagccaccctcgtgtgcctggctaccggcttctaccccgaccatgtggaactgtcttggtgggtcaacggcaaagaggtgcacagcggcgtgtctaccgacccccagccactgaaagaacagcccgccctgaacgacagccggtactgcctgagcagcagactgagagtgtccgccaccttctggcagaacccccggaaccacttcagatgccaggtgcagttctacggcctgagcgagaacgacgagtggacccaggacagagccaagcccgtgacccagatcgtgtctgccgaagcctggggcagagccgattgcgacgtgaagctggtggaaaagagcttcgagacagacaccaacctgaacttccagaacctgagcgtgatcggcttcagaatcctgctgctgaaagtggccggctttaacctgctgatgaccctgcggctgtggtccagcagggccaagcgatctggatctggagcaacaaacttctcactactcaaacaagcaggtgacgtggaggagaatcccgggcctactagtatggactggatttggcgcatccttttccttgtcggcgctgctaccggcgcgcattccttcgaacaggtccaactggtgcagagcggagccgaggtcgtgaagcctggcgcttccgtgaagattagctgcaaagccagcggctacacctttaccggctactttatgcactgggtcaagcagagccctggccagagcctggaatggatcggcagaatccacccctacgacggcgacaccttctacaaccagaagttccagggcaaggccaccctgacagtggacaagagcagcaacaccgcccacatggaactgctgagcctgaccagcgaggacttcgccgtgtactactgcaccagatacgacggcagccgggctatggactattggggccagggcaccaccgtgaccgtgtctagtacgcgtatccagaaccctgatcctgccgtgtaccagctgcgggatagcaagagcagcgacaagagcgtgtgtctgttcaccgacttcgacagccagaccaacgtgtcccagagcaaggactccgacgtgtacatcaccgataagaccgtgctggacatgcggagcatggacttcaagagcaactccgccgtggcctggtccaacaagtccgatttcgcctgcgccaacgccttcaacaacagcattatccccgaggacacattcttcccaagccccgagagcagctgcggctttaccagcgagagctaccagcagggcgtgctgagcgccaccatcctgtacgagatcctgctgggcaaggccaccctgtacgccgtgctggtgtctgccctggtgctgatggctatggtcaagcggaaggacagccgggga

SEQ ID NO: 35532 - DNA, 1869 bp, synthetic construct
  source 1..1869: mol_type = other DNA
atggccttaccagtgaccgccttgctcctgccgctggccttgctgctccacgccgccaggccggacatcgtgctgacccagagccctctgagcctggccgtgtctctgggacagcctgccatcatcagctgtagggccagccagagcgtgtcctttgccggcacctctctgatgcactggtatcaccagaagcccggccagcagcccagactgctgatctacagagccagcaacctggaagccggcgtgcccgatagattttccggcagcggcagcaagaccgacttcaccctgaccatcagccccgtggaagccgaagatgccgccacctactactgccagcagagcagagagtacccctacaccttcggcggaggcaccaagctggaaatcaagaggctcgaggacctgaagaacgtgttcccacctgaggtggccgtgttcgagcctagcgaggccgagatcagccacacccagaaagccaccctcgtgtgcctggctaccggcttctaccccgaccatgtggaactgtcttggtgggtcaacggcaaagaggtgcacagcggcgtgtctaccgacccccagccactgaaagaacagcccgccctgaacgacagccggtactgcctgagcagcagactgagagtgtccgccaccttctggcagaacccccggaaccacttcagatgccaggtgcagttctacggcctgagcgagaacgacgagtggacccaggacagagccaagcccgtgacccagatcgtgtctgccgaagcctggggcagagccgattgcggctttaccagcgagagctaccagcagggcgtgctgagcgccaccaacctgagcgtgatcggcttcagaatcctgctgctgaaagtggccggctttaacctgctgatgaccctgcggctgtggtccagcagggccaagcgatctggatctggagcaacaaacttctcactactcaaacaagcaggtgacgtggaggagaatcccgggcctactagtatggactggatttggcgcatccttttccttgtcggcgctgctaccggcgcgcattccttcgaacaggtccaactggtgcagagcggagccgaggtcgtgaagcctggcgcttccgtgaagattagctgcaaagccagcggctacacctttaccggctactttatgcactgggtcaagcagagccctggccagagcctggaatggatcggcagaatccacccctacgacggcgacaccttctacaaccagaagttccagggcaaggccaccctgacagtggacaagagcagcaacaccgcccacatggaactgctgagcctgaccagcgaggacttcgccgtgtactactgcaccagatacgacggcagccgggctatggactattggggccagggcaccaccgtgaccgtgtctagtacgcgtatccagaaccctgatcctgccgtgtaccagctgcgggatagcaagagcagcgacaagagcgtgtgtctgttcaccgacttcgacagccagaccaacgtgtcccagagcaaggactccgacgtgtacatcaccgataagaccgtgctggacatgcggagcatggacttcaagagcaactccgccgtggcctggtccaacaagtccgatttcgcctgcgccaacgccttcaacaacagcattatccccgaggacacattcttcccaagccccgagagcagctgcgacgtgaagctggtggaaaagagcttcgagacagacaccaacctgaacttccagatcctgtacgagatcctgctgggcaaggccaccctgtacgccgtgctggtgtctgccctggtgctgatggctatggtcaagcggaaggacagccgggga

SEQ ID NO: 35533 - DNA, 2181 bp, synthetic construct
  source 1..2181: mol_type = other DNA
atggccttaccagtgaccgccttgctcctgccgctggccttgctgctccacgccgccaggccggacatcgtgctgacccagagccctctgagcctggccgtgtctctgggacagcctgccatcatcagctgtagggccagccagagcgtgtcctttgccggcacctctctgatgcactggtatcaccagaagcccggccagcagcccagactgctgatctacagagccagcaacctggaagccggcgtgcccgatagattttccggcagcggcagcaagaccgacttcaccctgaccatcagccccgtggaagccgaagatgccgccacctactactgccagcagagcagagagtacccctacaccttcggcggaggcaccaagctggaaatcaagaggctcgaggacctgaagaacgtgttcccacctgaggtggccgtgttcgagcctagcgaggccgagatcagccacacccagaaagccaccctcgtgtgcctggctaccggcttctaccccgaccatgtggaactgtcttggtgggtcaacggcaaagaggtgcacagcggcgtgtctaccgacccccagccactgaaagaacagcccgccctgaacgacagccggtactgcctgagcagcagactgagagtgtccgccaccttctggcagaacccccggaaccacttcagatgccaggtgcagttctacggcctgagcgagaacgacgagtggacccaggacagagccaagcccgtgacccagatcgtgtctgccgaagcctggggcagagccgatgatgtgattaagatccactggcaggaaaagaagtccaacaccatcctgggcagccaggaaggcaacaccatgaagaccaacgacacctacatgaagttcagctggctgaccgtgcccgagaagtccctggacaaagaacacagatgcatcgtgcggcacgaaaacaacaagaacggcgtggaccaggaaatcatcttcccacccatcaagaccgatgtgattacaatggaccccaaggacaactgctccaaggacgccaacgataccctgctgctccagctgaccaacaccagcgcctactacatgtacttgttgctgctgctgaagtccgtggtgtacttcgccatcatcacatgctgcctgctgatggctatggtcaagcggaaggacagccggggaagggccaagcgatctggatctggagcaacaaacttctcactactcaaacaagcaggtgacgtggaggagaatcccgggcctactagtatggactggatttggcgcatccttttccttgtcggcgctgctaccggcgcgcattccttcgaacaggtccaactggtgcagagcggagccgaggtcgtgaagcctggcgcttccgtgaagattagctgcaaagccagcggctacacctttaccggctactttatgcactgggtcaagcagagccctggccagagcctggaatggatcggcagaatccacccctacgacggcgacaccttctacaaccagaagttccagggcaaggccaccctgacagtggacaagagcagcaacaccgcccacatggaactgctgagcctgaccagcgaggacttcgccgtgtactactgcaccagatacgacggcagccgggctatggactattggggccagggcaccaccgtgaccgtgtctagtacgcgtatccagaaccctgatcctgccgtgtaccagctgcgggatagcaagagcagcgacaagagcgtgtgtctgttcaccgacttcgacagccagaccaacgtgtcccagagcaaggactccgacgtgtacatcaccgataagaccgtgctggacatgcggagcatggacttcaagagcaactccgccgtggcctggtccaacaagtccgatttcgcctgcgccaacgccttcaacaacagcattatccccgaggacacattcttcccaagccccgagagcagcgactccaccgaccacgtgaagcccaaagagacagagaacaccaagcagcccagcaagagctgccacaagcccaaggccatcgtgcacaccgagaaagtgaacatgatgagcctgaccgtgctgggcctgcggatgctgttcgccaaaaccgtggccgtgaacttcctgctgaccgccaagctgttcttcctcctcaccgcc

SEQ ID NO: 35534 - DNA, 2175 bp, synthetic construct
  source 1..2175: mol_type = other DNA
atggccttaccagtgaccgccttgctcctgccgctggccttgctgctccacgccgccaggccggacatcgtgctgacccagagccctctgagcctggccgtgtctctgggacagcctgccatcatcagctgtagggccagccagagcgtgtcctttgccggcacctctctgatgcactggtatcaccagaagcccggccagcagcccagactgctgatctacagagccagcaacctggaagccggcgtgcccgatagattttccggcagcggcagcaagaccgacttcaccctgaccatcagccccgtggaagccgaagatgccgccacctactactgccagcagagcagagagtacccctacaccttcggcggaggcaccaagctggaaatcaagaggctcgaggacctgaagaacgtgttcccacctgaggtggccgtgttcgagcctagcgaggccgagatcagccacacccagaaagccaccctcgtgtgcctggctaccggcttctaccccgaccatgtggaactgtcttggtgggtcaacggcaaagaggtgcacagcggcgtgtctaccgacccccagccactgaaagaacagcccgccctgaacgacagccggtactgcctgagcagcagactgagagtgtccgccaccttctggcagaacccccggaaccacttcagatgccaggtgcagttctacggcctgagcgagaacgacgagtggacccaggacagagccaagcccgtgacccagatcgtgtctgccgaagcctggggcagagccgatgatgtgattaagatccactggcaggaaaagaagtccaacaccatcctgggcagccaggaaggcaacaccatgaagaccaacgacacctacatgaagttcagctggctgaccgtgcccgagaagtccctggacaaagaacacagatgcatcgtgcggcacgaaaacaacaagaacggcgtggaccaggaaatcatcttcccacccatcaagaccgatgtgattacaatggaccccaaggacaactgctccaaggacgccaacgataccctgctgctccagctgaccaacaccagcgcctactacatgtacttgttgctgctgctgaagtccgtggtgtacttcgccatcatcacatgctgcctgctgcggagaaccgccttctgctgcaacggcgagaagtctagggccaagcgatctggatctggagcaacaaacttctcactactcaaacaagcaggtgacgtggaggagaatcccgggcctactagtatggactggatttggcgcatccttttccttgtcggcgctgctaccggcgcgcattccttcgaacaggtccaactggtgcagagcggagccgaggtcgtgaagcctggcgcttccgtgaagattagctgcaaagccagcggctacacctttaccggctactttatgcactgggtcaagcagagccctggccagagcctggaatggatcggcagaatccacccctacgacggcgacaccttctacaaccagaagttccagggcaaggccaccctgacagtggacaagagcagcaacaccgcccacatggaactgctgagcctgaccagcgaggacttcgccgtgtactactgcaccagatacgacggcagccgggctatggactattggggccagggcaccaccgtgaccgtgtctagtacgcgtatccagaaccctgatcctgccgtgtaccagctgcgggatagcaagagcagcgacaagagcgtgtgtctgttcaccgacttcgacagccagaccaacgtgtcccagagcaaggactccgacgtgtacatcaccgataagaccgtgctggacatgcggagcatggacttcaagagcaactccgccgtggcctggtccaacaagtccgatttcgcctgcgccaacgccttcaacaacagcattatccccgaggacacattcttcccaagccccgagagcagcgactccaccgaccacgtgaagcccaaagagacagagaacaccaagcagcccagcaagagctgccacaagcccaaggccatcgtgcacaccgagaaagtgaacatgatgagcctgaccgtgctgggcctgcggatgctgttcgccaaaaccgtggccgtgaacttcctgctgaccgccaagctgttcttcctc

SEQ ID NO: 35535 - DNA, 2607 bp, synthetic construct
  source 1..2607: mol_type = other DNA
atggccttaccagtgaccgccttgctcctgccgctggccttgctgctccacgccgccaggccgctcgaggaggacctgaagaacgtgttcccacctgaggtggccgtgttcgagcctagcgaggccgagatcagccacacccagaaagccaccctcgtgtgcctggctaccggcttctaccccgaccatgtggaactgtcttggtgggtcaacggcaaagaggtgcacagcggcgtgtgtaccgacccccagccactgaaagaacagcccgccctgaacgacagccggtactgcctgagcagcagactgagagtgtccgccaccttctggcagaacccccggaaccacttcagatgccaggtgcagttctacggcctgagcgagaacgacgagtggacccaggacagagccaagcccgtgacccagatcgtgtctgccgaagcctggggcagagccgattgcggctttaccagcgagagctaccagcagggcgtgctgagcgccaccaacctgagcgtgatcggcttcagaatcctgctgctgaaagtggccggctttaacctgctgatgaccctgcggctgtggtccagcagggccaagcgatctggatctggagcaacaaacttctcactactcaaacaagcaggtgacgtggaggagaatcccgggcctactagcatggccttaccagtgaccgccttgctcctgccgctggccttgctgctccacgccgccaggccggacatcgtgctgacccagagccctctgagcctggccgtgtctctgggacagcctgccatcatcagctgtagggccagccagagcgtgtcctttgccggcacctctctgatgcactggtatcaccagaagcccggccagcagcccagactgctgatctacagagccagcaacctggaagccggcgtgcccgatagattttccggcagcggcagcaagaccgacttcaccctgaccatcagccccgtggaagccgaagatgccgccacctactactgccagcagagcagagagtacccctacaccttcggcggaggcaccaagctggaaatcaagaggggcggaggcggaagtggaggcggaggatctggcggcggaggctctcaggtccaactggtgcagagcggagccgaggtcgtgaagcctggcgcttccgtgaagattagctgcaaagccagcggctacacctttaccggctactttatgcactgggtcaagcagagccctggccagagcctggaatggatcggcagaatccacccctacgacggcgacaccttctacaaccagaagttccagggcaaggccaccctgacagtggacaagagcagcaacaccgcccacatggaactgctgagcctgaccagcgaggacttcgccgtgtactactgcaccagatacgacggcagccgggctatggactattggggccagggcaccaccgtgaccgtgtctagtacgcgtatccagaaccctgatcctgccgtgtaccagctgcgggatagcaagagcagcgacaagagcgtgtgtctgttcaccgacttcgacagccagaccaacgtgtcccagagcaaggactccgacgtgtacatcaccgataagtgcgtgctggacatgcggagcatggacttcaagagcaactccgccgtggcctggtccaacaagtccgatttcgcctgcgccaacgccttcaacaacagcattatccccgaggacacattcttcccaagccccgagagcagctgcgacgtgaagctggtggaaaagagcttcgagacagacaccaacctgaacttccagatcctgtacgaggtgatcggcttcagaatcctgctgctgaaagtggccggctttaacctgctgatgaccctgcggctgtggtccagccgcgccaagagaagcggatctggcgtgaagcagaccctgaatttcgacctgctgaagctggctggcgacgtggaatccaacccaggcccttctagaggccatatgaccgagtacaagcccacggtgcgcctcgccacccgcgacgacgtccccagggccgtacgcaccctcgccgccgcgttcgccgactaccccgccacgcgccacaccgtcgatccggaccgccacatcgagcgggtcaccgagctgcaagaactcttcctcacgcgcgtcgggctcgacatcggcaaggtgtgggtcgcggacgacggcgccgcggtggcggtctggaccacgccggagagcgtcgaagcgggggcggtgttcgccgagatcggcccgcgcatggccgagttgagcggttcccggctggccgcgcagcaacagatggaaggcctcctggcgccgcaccggcccaaggagcccgcgtggttcctggccaccgtcggcgtctcgcccgaccaccagggcaagggtctgggcagcgccgtcgtgctccccggagtggaggcggccgagcgcgccggggtgcccgccttcctggagacctccgcgccccgcaacctccccttctacgagcggctcggcttcaccgtcaccgccgacgtcgaggtgcccgaaggaccgcgcacctggtgcatgacccgcaagcccggtgcctga

SEQ ID NO: 35536 - DNA, 2607 bp, synthetic construct
  source 1..2607: mol_type = other DNA
atggccttaccagtgaccgccttgctcctgccgctggccttgctgctccacgccgccaggccgctcgagatccagaaccctgatcctgccgtgtaccagctgcgggatagcaagagcagcgacaagagcgtgtgtctgttcaccgacttcgacagccagaccaacgtgtcccagagcaaggactccgacgtgtacatcaccgataagtgcgtgctggacatgcggagcatggacttcaagagcaactccgccgtggcctggtccaacaagtccgatttcgcctgcgccaacgccttcaacaacagcattatccccgaggacacattcttcccaagccccgagagcagctgcgacgtgaagctggtggaaaagagcttcgagacagacaccaacctgaacttccagatcctgtacgaggtgatcggcttcagaatcctgctgctgaaagtggccggctttaacctgctgatgaccctgcggctgtggtccagcagggccaagcgatctggatctggagcaacaaacttctcactactcaaacaagcaggtgacgtggaggagaatcccgggcctactagcatggccttaccagtgaccgccttgctcctgccgctggccttgctgctccacgccgccaggccggacatcgtgctgacccagagccctctgagcctggccgtgtctctgggacagcctgccatcatcagctgtagggccagccagagcgtgtcctttgccggcacctctctgatgcactggtatcaccagaagcccggccagcagcccagactgctgatctacagagccagcaacctggaagccggcgtgcccgatagattttccggcagcggcagcaagaccgacttcaccctgaccatcagccccgtggaagccgaagatgccgccacctactactgccagcagagcagagagtacccctacaccttcggcggaggcaccaagctggaaatcaagaggggcggaggcggaagtggaggcggaggatctggcggcggaggctctcaggtccaactggtgcagagcggagccgaggtcgtgaagcctggcgcttccgtgaagattagctgcaaagccagcggctacacctttaccggctactttatgcactgggtcaagcagagccctggccagagcctggaatggatcggcagaatccacccctacgacggcgacaccttctacaaccagaagttccagggcaaggccaccctgacagtggacaagagcagcaacaccgcccacatggaactgctgagcctgaccagcgaggacttcgccgtgtactactgcaccagatacgacggcagccgggctatggactattggggccagggcaccaccgtgaccgtgtctagtacgcgtgaggacctgaagaacgtgttcccacctgaggtggccgtgttcgagcctagcgaggccgagatcagccacacccagaaagccaccctcgtgtgcctggctaccggcttctaccccgaccatgtggaactgtcttggtgggtcaacggcaaagaggtgcacagcggcgtgtgtaccgacccccagccactgaaagaacagcccgccctgaacgacagccggtactgcctgagcagcagactgagagtgtccgccaccttctggcagaacccccggaaccacttcagatgccaggtgcagttctacggcctgagcgagaacgacgagtggacccaggacagagccaagcccgtgacccagatcgtgtctgccgaagcctggggcagagccgattgcggctttaccagcgagagctaccagcagggcgtgctgagcgccaccaacctgagcgtgatcggcttcagaatcctgctgctgaaagtggccggctttaacctgctgatgaccctgcggctgtggtccagccgcgccaagagaagcggatctggcgtgaagcagaccctgaatttcgacctgctgaagctggctggcgacgtggaatccaacccaggcccttctagaggccatatgaccgagtacaagcccacggtgcgcctcgccacccgcgacgacgtccccagggccgtacgcaccctcgccgccgcgttcgccgactaccccgccacgcgccacaccgtcgatccggaccgccacatcgagcgggtcaccgagctgcaagaactcttcctcacgcgcgtcgggctcgacatcggcaaggtgtgggtcgcggacgacggcgccgcggtggcggtctggaccacgccggagagcgtcgaagcgggggcggtgttcgccgagatcggcccgcgcatggccgagttgagcggttcccggctggccgcgcagcaacagatggaaggcctcctggcgccgcaccggcccaaggagcccgcgtggttcctggccaccgtcggcgtctcgcccgaccaccagggcaagggtctgggcagcgccgtcgtgctccccggagtggaggcggccgagcgcgccggggtgcccgccttcctggagacctccgcgccccgcaacctccccttctacgagcggctcggcttcaccgtcaccgccgacgtcgaggtgcccgaaggaccgcgcacctggtgcatgacccgcaagcccggtgcctga

SEQ ID NO: 35537 - DNA, 2607 bp, synthetic construct; identical to SEQ ID NO: 35535
  source 1..2607: mol_type = other DNA

SEQ ID NO: 35538 - DNA, 2931 bp, synthetic construct
  source 1..2931: mol_type = other DNA
atggccttaccagtgaccgccttgctcctgccgctggccttgctgctccacgccgccaggccgctcgaggaggacctgaagaacgtgttcccacctgaggtggccgtgttcgagcctagcgaggccgagatcagccacacccagaaagccaccctcgtgtgcctggctaccggcttctaccccgaccatgtggaactgtcttggtgggtcaacggcaaagaggtgcacagcggcgtgtctaccgacccccagccactgaaagaacagcccgccctgaacgacagccggtactgcctgagcagcagactgagagtgtccgccaccttctggcagaacccccggaaccacttcagatgccaggtgcagttctacggcctgagcgagaacgacgagtggacccaggacagagccaagcccgtgacccagatcgtgtctgccgaagcctggggcagagccgatgatgtgattaagatccactggcaggaaaagaagtccaacaccatcctgggcagccaggaaggcaacaccatgaagaccaacgacacctacatgaagttcagctggctgaccgtgcccgagaagtccctggacaaagaacacagatgcatcgtgcggcacgaaaacaacaagaacggcgtggaccaggaaatcatcttcccacccatcaagaccgatgtgattacaatggaccccaaggacaactgctccaaggacgccaacgataccctgctgctccagctgaccaacaccagcgcctactacatgtacttgttgctgctgctgaagtccgtggtgtacttcgccatcatcacatgctgcctgctgatggctatggtcaagcggaaggacagccggggaagggccaagcgatctggatctggagcaacaaacttctcactactcaaacaagcaggtgacgtggaggagaatcccgggcctactagcatggccttaccagtgaccgccttgctcctgccgctggccttgctgctccacgccgccaggccggacatcgtgctgacccagagccctctgagcctggccgtgtctctgggacagcctgccatcatcagctgtagggccagccagagcgtgtcctttgccggcacctctctgatgcactggtatcaccagaagcccggccagcagcccagactgctgatctacagagccagcaacctggaagccggcgtgcccgatagattttccggcagcggcagcaagaccgacttcaccctgaccatcagccccgtggaagccgaagatgccgccacctactactgccagcagagcagagagtacccctacaccttcggcggaggcaccaagctggaaatcaagaggggcggaggcggaagtggaggcggaggatctggcggcggaggctctcaggtccaactggtgcagagcggagccgaggtcgtgaagcctggcgcttccgtgaagattagctgcaaagccagcggctacacctttaccggctactttatgcactgggtcaagcagagccctggccagagcctggaatggatcggcagaatccacccctacgacggcgacaccttctacaaccagaagttccagggcaaggccaccctgacagtggacaagagcagcaacaccgcccacatggaactgctgagcctgaccagcgaggacttcgccgtgtactactgcaccagatacgacggcagccgggctatggactattggggccagggcaccaccgtgaccgtgtctagtacgcgtatccagaaccctgatcctgccgtgtaccagctgcgggatagcaagagcagcgacaagagcgtgtgtctgttcaccgacttcgacagccagaccaacgtgtcccagagcaaggactccgacgtgtacatcaccgataagaccgtgctggacatgcggagcatggacttcaagagcaactccgccgtggcctggtccaacaagtccgatttcgcctgcgccaacgccttcaacaacagcattatccccgaggacacattcttcccaagccccgagagcagcgactccaccgaccacgtgaagcccaaagagacagagaacaccaagcagcccagcaagagctgccacaagcccaaggccatcgtgcacaccgagaaagtgaacatgatgagcctgaccgtgctgggcctgcggatgctgttcgccaaaaccgtggccgtgaacttcctgctgaccgccaagctgttcttcctcctcaccgcccgcgccaagagaagcggatctggcgtgaagcagaccctgaatttcgacctgctgaagctggctggcgacgtggaatccaacccaggcccttctagaggccatatgaccgagtacaagcccacggtgcgcctcgccacccgcgacgacgtccccagggccgtacgcaccctcgccgccgcgttcgccgactaccccgccacgcgccacaccgtcgatccggaccgccacatcgagcgggtcaccgagctgcaagaactcttcctcacgcgcgtcgggctcgacatcggcaaggtgtgggtcgcggacgacggcgccgcggtggcggtctggaccacgccggagagcgtcgaagcgggggcggtgttcgccgagatcggcccgcgcatggccgagttgagcggttcccggctggccgcgcagcaacagatggaaggcctcctggcgccgcaccggcccaaggagcccgcgtggttcctggccaccgtcggcgtctcgcccgaccaccagggcaagggtctgggcagcgccgtcgtgctccccggagtggaggcggccgagcgcgccggggtgcccgccttcctggagacctccgcgccccgcaacctccccttctacgagcggctcggcttcaccgtcaccgccgacgtcgaggtgcccgaaggaccgcgcacctggtgcatgacccgcaagcccggtgcctga

SEQ ID NO: 35539 - DNA, 2931 bp, synthetic construct
  source 1..2931: mol_type = other DNA
atggccttaccagtgaccgccttgctcctgccgctggccttgctgctccacgccgccaggccgctcgagatccagaaccctgatcctgccgtgtaccagctgcgggatagcaagagcagcgacaagagcgtgtgtctgttcaccgacttcgacagccagaccaacgtgtcccagagcaaggactccgacgtgtacatcaccgataagaccgtgctggacatgcggagcatggacttcaagagcaactccgccgtggcctggtccaacaagtccgatttcgcctgcgccaacgccttcaacaacagcattatccccgaggacacattcttcccaagccccgagagcagcgactccaccgaccacgtgaagcccaaagagacagagaacaccaagcagcccagcaagagctgccacaagcccaaggccatcgtgcacaccgagaaagtgaacatgatgagcctgaccgtgctgggcctgcggatgctgttcgccaaaaccgtggccgtgaacttcctgctgaccgccaagctgttcttcctcctcaccgccagggccaagcgatctggatctggagcaacaaacttctcactactcaaacaagcaggtgacgtggaggagaatcccgggcctactagcatggccttaccagtgaccgccttgctcctgccgctggccttgctgctccacgccgccaggccggacatcgtgctgacccagagccctctgagcctggccgtgtctctgggacagcctgccatcatcagctgtagggccagccagagcgtgtcctttgccggcacctctctgatgcactggtatcaccagaagcccggccagcagcccagactgctgatctacagagccagcaacctggaagccggcgtgcccgatagattttccggcagcggcagcaagaccgacttcaccctgaccatcagccccgtggaagccgaagatgccgccacctactactgccagcagagcagagagtacccctacaccttcggcggaggcaccaagctggaaatcaagaggggcggaggcggaagtggaggcggaggatctggcggcggaggctctcaggtccaactggtgcagagcggagccgaggtcgtgaagcctggcgcttccgtgaagattagctgcaaagccagcggctacacctttaccggctactttatgcactgggtcaagcagagccctggccagagcctggaatggatcggcagaatccacccctacgacggcgacaccttctacaaccagaagttccagggcaaggccaccctgacagtggacaagagcagcaacaccgcccacatggaactgctgagcctgaccagcgaggacttcgccgtgtactactgcaccagatacgacggcagccgggctatggactattggggccagggcaccaccgtgaccgtgtctagtacgcgtgaggacctgaagaacgtgttcccacctgaggtggccgtgttcgagcctagcgaggccgagatcagccacacccagaaagccaccctcgtgtgcctggctaccggcttctaccccgaccatgtggaactgtcttggtgggtcaacggcaaagaggtgcacagcggcgtgtctaccgacccccagccactgaaagaacagcccgccctgaacgacagccggtactgcctgagcagcagactgagagtgtccgccaccttctggcagaacccccggaaccacttcagatgccaggtgcagttctacggcctgagcgagaacgacgagtggacccaggacagagccaagcccgtgacccagatcgtgtctgccgaagcctggggcagagccgatgatgtgattaagatccactggcaggaaaagaagtccaacaccatcctgggcagccaggaaggcaacaccatgaagaccaacgacacctacatgaagttcagctggctgaccgtgcccgagaagtccctggacaaagaacacagatgcatcgtgcggcacgaaaacaacaagaacggcgtggaccaggaaatcatcttcccacccatcaagaccgatgtgattacaatggaccccaaggacaactgctccaaggacgccaacgataccctgctgctccagctgaccaacaccagcgcctactacatgtacttgttgctgctgctgaagtccgtggtgtacttcgccatcatcacatgctgcctgctgatggctatggtcaagcggaaggacagccggggacgcgccaagagaagcggatctggcgtgaagcagaccctgaatttcgacctgctgaagctggctggcgacgtggaatccaacccaggcccttctagaggccatatgaccgagtacaagcccacggtgcgcctcgccacccgcgacgacgtccccagggccgtacgcaccctcgccgccgcgttcgccgactaccccgccacgcgccacaccgtcgatccggaccgccacatcgagcgggtcaccgagctgcaagaactcttcctcacgcgcgtcgggctcgacatcggcaaggtgtgggtcgcggacgacggcgccgcggtggcggtctggaccacgccggagagcgtcgaagcgggggcggtgttcgccgagatcggcccgcgcatggccgagttgagcggttcccggctggccgcgcagcaacagatggaaggcctcctggcgccgcaccggcccaaggagcccgcgtggttcctggccaccgtcggcgtctcgcccgaccaccagggcaagggtctgggcagcgccgtcgtgctccccggagtggaggcggccgagcgcgccggggtgcccgccttcctggagacctccgcgccccgcaacctccccttctacgagcggctcggcttcaccgtcaccgccgacgtcgaggtgcccgaaggaccgcgcacctggtgcatgacccgcaagcccggtgcctga

SEQ ID NO: 35540 - DNA, 2925 bp, synthetic construct
  source 1..2925: mol_type = other DNA
atggccttaccagtgaccgccttgctcctgccgctggccttgctgctccacgccgccaggccgctcgaggaggacctgaagaacgtgttcccacctgaggtggccgtgttcgagcctagcgaggccgagatcagccacacccagaaagccaccctcgtgtgcctggctaccggcttctaccccgaccatgtggaactgtcttggtgggtcaacggcaaagaggtgcacagcggcgtgtgtaccgacccccagccactgaaagaacagcccgccctgaacgacagccggtactgcctgagcagcagactgagagtgtccgccaccttctggcagaacccccggaaccacttcagatgccaggtgcagttctacggcctgagcgagaacgacgagtggacccaggacagagccaagcccgtgacccagatcgtgtctgccgaagcctggggcagagccgatgatgtgattaagatccactggcaggaaaagaagtccaacaccatcctgggcagccaggaaggcaacaccatgaagaccaacgacacctacatgaagttcagctggctgaccgtgcccgagaagtccctggacaaagaacacagatgcatcgtgcggcacgaaaacaacaagaacggcgtggaccaggaaatcatcttcccacccatcaagaccgatgtgattacaatggaccccaaggacaactgctccaaggacgccaacgataccctgctgctccagctgaccaacaccagcgcctactacatgtacttgttgctgctgctgaagtccgtggtgtacttcgccatcatcacatgctgcctgctgcggagaaccgccttctgctgcaacggcgagaagtctagggccaagcgatctggatctggagcaacaaacttctcactactcaaacaagcaggtgacgtggaggagaatcccgggcctactagcatggccttaccagtgaccgccttgctcctgccgctggccttgctgctccacgccgccaggccggacatcgtgctgacccagagccctctgagcctggccgtgtctctgggacagcctgccatcatcagctgtagggccagccagagcgtgtcctttgccggcacctctctgatgcactggtatcaccagaagcccggccagcagcccagactgctgatctacagagccagcaacctggaagccggcgtgcccgatagattttccggcagcggcagcaagaccgacttcaccctgaccatcagccccgtggaagccgaagatgccgccacctactactgccagcagagcagagagtacccctacaccttcggcggaggcaccaagctggaaatcaagaggggcggaggcggaagtggaggcggaggatctggcggcggaggctctcaggtccaactggtgcagagcggagccgaggtcgtgaagcctggcgcttccgtgaagattagctgcaaagccagcggctacacctttaccggctactttatgcactgggtcaagcagagccctggccagagcctggaatggatcggcagaatccacccctacgacggcgacaccttctacaaccagaagttccagggcaaggccaccctgacagtggacaagagcagcaacaccgcccacatggaactgctgagcctgaccagcgaggacttcgccgtgtactactgcaccagatacgacggcagccgggctatggactattggggccagggcaccaccgtgaccgtgtctagtacgcgtatccagaaccctgatcctgccgtgtaccagctgcgggatagcaagagcagcgacaagagcgtgtgtctgttcaccgacttcgacagccagaccaacgtgtcccagagcaaggactccgacgtgtacatcaccgataagtgcgtgctggacatgcggagcatggacttcaagagcaactccgccgtggcctggtccaacaagtccgatttcgcctgcgccaacgccttcaacaacagcattatccccgaggacacattcttcccaagccccgagagcagcgactccaccgaccacgtgaagcccaaagagacagagaacaccaagcagcccagcaagagctgccacaagcccaaggccatcgtgcacaccgagaaagtgaacatgatgagcctgaccgtgctgggcctgcggatgctgttcgccaaaaccgtggccgtgaacttcctgctgaccgccaagctgttcttcctccgcgccaagagaagcggatctggcgtgaagcagaccctgaatttcgacctgctgaagctggctggcgacgtggaatccaacccaggcccttctagaggccatatgaccgagtacaagcccacggtgcgcctcgccacccgcgacgacgtccccagggccgtacgcaccctcgccgccgcgttcgccgactaccccgccacgcgccacaccgtcgatccggaccgccacatcgagcgggtcaccgagctgcaagaactcttcctcacgcgcgtcgggctcgacatcggcaaggtgtgggtcgcggacgacggcgccgcggtggcggtctggaccacgccggagagcgtcgaagcgggggcggtgttcgccgagatcggcccgcgcatggccgagttgagcggttcccggctggccgcgcagcaacagatggaaggcctcctggcgccgcaccggcccaaggagcccgcgtggttcctggccaccgtcggcgtctcgcccgaccaccagggcaagggtctgggcagcgccgtcgtgctccccggagtggaggcggccgagcgcgccggggtgcccgccttcctggagacctccgcgccccgcaacctccccttctacgagcggctcggcttcaccgtcaccgccgacgtcgaggtgcccgaaggaccgcgcacctggtgcatgacccgcaagcccggtgcctga

SEQ ID NO: 35541 - DNA, 2925 bp, synthetic construct
  source 1..2925: mol_type = other DNA
atggccttaccagtgaccgccttgctcctgccgctggccttgctgctccacgccgccaggccgctcgagatccagaaccctgatcctgccgtgtaccagctgcgggatagcaagagcagcgacaagagcgtgtgtctgttcaccgacttcgacagccagaccaacgtgtcccagagcaaggactccgacgtgtacatcaccgataagtgcgtgctggacatgcggagcatggacttcaagagcaactccgccgtggcctggtccaacaagtccgatttcgcctgcgccaacgccttcaacaacagcattatccccgaggacacattcttcccaagccccgagagcagcgactccaccgaccacgtgaagcccaaagagacagagaacaccaagcagcccagcaagagctgccacaagcccaaggccatcgtgcacaccgagaaagtgaacatgatgagcctgaccgtgctgggcctgcggatgctgttcgccaaaaccgtggccgtgaacttcctgctgaccgccaagctgttcttcctcagggccaagcgatctggatctggagcaacaaacttctcactactcaaacaagcaggtgacgtggaggagaatcccgggcctactagcatggccttaccagtgaccgccttgctcctgccgctggccttgctgctccacgccgccaggccggacatcgtgctgacccagagccctctgagcctggccgtgtctctgggacagcctgccatcatcagctgtagggccagccagagcgtgtcctttgccggcacctctctgatgcactggtatcaccagaagcccggccagcagcccagactgctgatctacagagccagcaacctggaagccggcgtgcccgatagattttccggcagcggcagcaagaccgacttcaccctgaccatcagccccgtggaagccgaagatgccgccacctactactgccagcagagcagagagtacccctacaccttcggcggaggcaccaagctggaaatcaagaggggcggaggcggaagtggaggcggaggatctggcggcggaggctctcaggtccaactggtgcagagcggagccgaggtcgtgaagcctggcgcttccgtgaagattagctgcaaagccagcggctacacctttaccggctactttatgcactgggtcaagcagagccctggccagagcctggaatggatcggcagaatccacccctacgacggcgacaccttctacaaccagaagttccagggcaaggccaccctgacagtggacaagagcagcaacaccgcccacatggaactgctgagcctgaccagcgaggacttcgccgtgtactactgcaccagatacgacggcagccgggctatggactattggggccagggcaccaccgtgaccgtgtctagtacgcgtgaggacctgaagaacgtgttcccacctgaggtggccgtgttcgagcctagcgaggccgagatcagccacacccagaaagccaccctcgtgtgcctggctaccggcttctaccccgaccatgtggaactgtcttggtgggtcaacggcaaagaggtgcacagcggcgtgtgtaccgacccccagccactgaaagaacagcccgccctgaacgacagccggtactgcctgagcagcagactgagagtgtccgccaccttctggcagaacccccggaaccacttcagatgccaggtgcagttctacggcctgagcgagaacgacgagtggacccaggacagagccaagcccgtgacccagatcgtgtctgccgaagcctggggcagagccgatgatgtgattaagatccactggcaggaaaagaagtccaacaccatcctgggcagccaggaaggcaacaccatgaagaccaacgacacctacatgaagttcagctggctgaccgtgcccgagaagtccctggacaaagaacacagatgcatcgtgcggcacgaaaacaacaagaacggcgtggaccaggaaatcatcttcccacccatcaagaccgatgtgattacaatggaccccaaggacaactgctccaaggacgccaacgataccctgctgctccagctgaccaacaccagcgcctactacatgtacttgttgctgctgctgaagtccgtggtgtacttcgccatcatcacatgctgcctgctgcggagaaccgccttctgctgcaacggcgagaagtctcgcgccaagagaagcggatctggcgtgaagcagaccctgaatttcgacctgctgaagctggctggcgacgtggaatccaacccaggcccttctagaggccatatgaccgagtacaagcccacggtgcgcctcgccacccgcgacgacgtccccagggccgtacgcaccctcgccgccgcgttcgccgactaccccgccacgcgccacaccgtcgatccggaccgccacatcgagcgggtcaccgagctgcaagaactcttcctcacgcgcgtcgggctcgacatcggcaaggtgtgggtcgcggacgacggcgccgcggtggcggtctggaccacgccggagagcgtcgaagcgggggcggtgttcgccgagatcggcccgcgcatggccgagttgagcggttcccggctggccgcgcagcaacagatggaaggcctcctggcgccgcaccggcccaaggagcccgcgtggttcctggccaccgtcggcgtctcgcccgaccaccagggcaagggtctgggcagcgccgtcgtgctccccggagtggaggcggccgagcgcgccggggtgcccgccttcctggagacctccgcgccccgcaacctccccttctacgagcggctcggcttcaccgtcaccgccgacgtcgaggtgcccgaaggaccgcgcacctggtgcatgacccgcaagcccggtgcctga

SEQ ID NO: 35542 - DNA, 2925 bp, synthetic construct
  source 1..2925: mol_type = other DNA
atggccttaccagtgaccgccttgctcctgccgctggccttgctgctccacgccgccaggccgctcgaggaggacctgaagaacgtgttcccacctgaggtggccgtgttcgagcctagcgaggccgagatcagccacacccagaaagccaccctcgtgtgcctggctaccggcttctaccccgaccatgtggaactgtcttggtgggtcaacggcaaagaggtgcacagcggcgtgtctaccgacccccagccactgaaagaacagcccgccctgaacgacagccggtactgcctgagcagcagactgagagtgtccgccaccttctggcagaacccccggaaccacttcagatgccaggtgcagttctacggcctgagcgagaacgacgagtggacccaggacagagccaagcccgtgacccagatcgtgtctgccgaagcctggggcagagccgatgatgtgattaagatccactggcaggaaaagaagtccaacaccatcctgggcagccaggaaggcaacaccatgaagaccaacgacacctacatgaagttcagctggctgaccgtgcccgagaagtccctggacaaagaacacagatgcatcgtgcggcacgaaaacaacaagaacggcgtggaccaggaaatcatcttcccacccatcaagaccgatgtgattacaatggaccccaaggacaactgctccaaggacgccaacgataccctgctgctccagctgaccaacaccagcgcctactacatgtacttgttgctgctgctgaagtccgtggtgtacttcgccatcatcacatgctgcctgctgcggagaaccgccttctgctgcaacggcgagaagtctagggccaagcgatctggatctggagcaacaaacttctcactactcaaacaagcaggtgacgtggaggagaatcccgggcctactagcatggccttaccagtgaccgccttgctcctgccgctggccttgctgctccacgccgccaggccggacatcgtgctgacccagagccctctgagcctggccgtgtctctgggacagcctgccatcatcagctgtagggccagccagagcgtgtcctttgccggcacctctctgatgcactggtatcaccagaagcccggccagcagcccagactgctgatctacagagccagcaacctggaagccggcgtgcccgatagattttccggcagcggcagcaagaccgacttcaccctgaccatcagccccgtggaagccgaagatgccgccacctactactgccagcagagcagagagtacccctacaccttcggcggaggcaccaagctggaaatcaagaggggcggaggcggaagtggaggcggaggatctggcggcggaggctctcaggtccaactggtgcagagcggagccgaggtcgtgaagcctggcgcttccgtgaagattagctgcaaagccagcggctacacctttaccggctactttatgcactgggtcaagcagagccctggccagagcctggaatggatcggcagaatccacccctacgacggcgacaccttctacaaccagaagttccagggcaaggccaccctgacagtggacaagagcagcaacaccgcccacatggaactgctgagcctgaccagcgaggacttcgccgtgtactactgcaccagatacgacggcagccgggctatggactattggggccagggcaccaccgtgaccgtgtctagtacgcgtatccagaaccctgatcctgccgtgtaccagctgcgggatagcaagagcagcgacaagagcgtgtgtctgttcaccgacttcgacagccagaccaacgtgtcccagagcaaggactccgacgtgtacatcaccgataagaccgtgctggacatgcggagcatggacttcaagagcaactccgccgtggcctggtccaacaagtccgatttcgcctgcgccaacgccttcaacaacagcattatccccgaggacacattcttcccaagccccgagagcagcgactccaccgaccacgtgaagcccaaagagacagagaacaccaagcagcccagcaagagctgccacaagcccaaggccatcgtgcacaccgagaaagtgaacatgatgagcctgaccgtgctgggcctgcggatgctgttcgccaaaaccgtggccgtgaacttcctgctgaccgccaagctgttcttcctccgcgccaagagaagcggatctggcgtgaagcagaccctgaatttcgacctgctgaagctggctggcgacgtggaatccaacccaggcccttctagaggccatatgaccgagtacaagcccacggtgcgcctcgccacccgcgacgacgtccccagggccgtacgcaccctcgccgccgcgttcgccgactaccccgccacgcgccacaccgtcgatccggaccgccacatcgagcgggtcaccgagctgcaagaactcttcctcacgcgcgtcgggctcgacatcggcaaggtgtgggtcgcggacgacggcgccgcggtggcggtctggaccacgccggagagcgtcgaagcgggggcggtgttcgccgagatcggcccgcgcatggccgagttgagcggttcccggctggccgcgcagcaacagatggaaggcctcctggcgccgcaccggcccaaggagcccgcgtggttcctggccaccgtcggcgtctcgcccgaccaccagggcaagggtctgggcagcgccgtcgtgctccccggagtggaggcggccgagcgcgccggggtgcccgccttcctggagacctccgcgccccgcaacctccccttctacgagcggctcggcttcaccgtcaccgccgacgtcgaggtgcccgaaggaccgcgcacctggtgcatgacccgcaagcccggtgcctga

SEQ ID NO: 35543 - DNA, 2925 bp, synthetic construct
  source 1..2925: mol_type = other DNA
atggccttaccagtgaccgccttgctcctgccgctggccttgctgctccacgccgccaggccgctcgagatccagaaccctgatcctgccgtgtaccagctgcgggatagcaagagcagcgacaagagcgtgtgtctgttcaccgacttcgacagccagaccaacgtgtcccagagcaaggactccgacgtgtacatcaccgataagaccgtgctggacatgcggagcatggacttcaagagcaactccgccgtggcctggtccaacaagtccgatttcgcctgcgccaacgccttcaacaacagcattatccccgaggacacattcttcccaagccccgagagcagcgactccaccgaccacgtgaagcccaaagagacagagaacaccaagcagcccagcaagagctgccacaagcccaaggccatcgtgcacaccgagaaagtgaacatgatgagcctgaccgtgctgggcctgcggatgctgttcgccaaaaccgtggccgtgaacttcctgctgaccgccaagctgttcttcctcagggccaagcgatctggatctggagcaacaaacttctcactactcaaacaagcaggtgacgtggaggagaatcccgggcctactagcatggccttaccagtgaccgccttgctcctgccgctggccttgctgctccacgccgccaggccggacatcgtgctgacccagagccctctgagcctggccgtgtctctgggacagcctgccatcatcagctgtagggccagccagagcgtgtcctttgccggcacctctctgatgcactggtatcaccagaagcccggccagcagcccagactgctgatctacagagccagcaacctggaagccggcgtgcccgatagattttccggcagcggcagcaagaccgacttcaccctgaccatcagccccgtggaagccgaagatgccgccacctactactgccagcagagcagagagtacccctacaccttcggcggaggcaccaagctggaaatcaagaggggcggaggcggaagtggaggcggaggatctggcggcggaggctctcaggtccaactggtgcagagcggagccgaggtcgtgaagcctggcgcttccgtgaagattagctgcaaagccagcggctacacctttaccggctactttatgcactgggtcaagcagagccctggccagagcctggaatggatcggcagaatccacccctacgacggcgacaccttctacaaccagaagttccagggcaaggccaccctgacagtggacaagagcagcaacaccgcccacatggaactgctgagcctgaccagcgaggacttcgccgtgtactactgcaccagatacgacggcagccgggctatggactattggggccagggcaccaccgtgaccgtgtctagtacgcgtgaggacctgaagaacgtgttcccacctgaggtggccgtgttcgagcctagcgaggccgagatcagccacacccagaaagccaccctcgtgtgcctggctaccggcttctaccccgaccatgtggaactgtcttggtgggtcaacggcaaagaggtgcacagcggcgtgtctaccgacccccagccactgaaagaacagcccgccctgaacgacagccggtactgcctgagcagcagactgagagtgtccgccaccttctggcagaacccccggaaccacttcagatgccaggtgcagttctacggcctgagcgagaacgacgagtggacccaggacagagccaagcccgtgacccagatcgtgtctgccgaagcctggggcagagccgatgatgtgattaagatccactggcaggaaaagaagtccaacaccatcctgggcagccaggaaggcaacaccatgaagaccaacgacacctacatgaagttcagctggctgaccgtgcccgagaagtccctggacaaagaacacagatgcatcgtgcggcacgaaaacaacaagaacggcgtggaccaggaaatcatcttcccacccatcaagaccgatgtgattacaatggaccccaaggacaactgctccaaggacgccaacgataccctgctgctccagctgaccaacaccagcgcctactacatgtacttgttgctgctgctgaagtccgtggtgtacttcgccatcatcacatgctgcctgctgcggagaaccgccttctgctgcaacggcgagaagtctcgcgccaagagaagcggatctggcgtgaagcagaccctgaatttcgacctgctgaagctggctggcgacgtggaatccaacccaggcccttctagaggccatatgaccgagtacaagcccacggtgcgcctcgccacccgcgacgacgtccccagggccgtacgcaccctcgccgccgcgttcgccgactaccccgccacgcgccacaccgtcgatccggaccgccacatcgagcgggtcaccgagctgcaagaactcttcctcacgcgcgtcgggctcgacatcggcaaggtgtgggtcgcggacgacggcgccgcggtggcggtctggaccacgccggagagcgtcgaagcgggggcggtgttcgccgagatcggcccgcgcatggccgagttgagcggttcccggctggccgcgcagcaacagatggaaggcctcctggcgccgcaccggcccaaggagcccgcgtggttcctggccaccgtcggcgtctcgcccgaccaccagggcaagggtctgggcagcgccgtcgtgctccccggagtggaggcggccgagcgcgccggggtgcccgccttcctggagacctccgcgccccgcaacctccccttctacgagcggctcggcttcaccgtcaccgccgacgtcgaggtgcccgaaggaccgcgcacctggtgcatgacccgcaagcccggtgcctga

SEQ ID NO: 35544 - DNA, 2619 bp, synthetic construct
  source 1..2619: mol_type = other DNA
atggccttaccagtgaccgccttgctcctgccgctggccttgctgctccacgccgccaggccgctcgaggaggacctgaagaacgtgttcccacctgaggtggccgtgttcgagcctagcaaggccgagatcgcccacacccagaaagccaccctcgtgtgcctggctaccggcttctaccccgaccatgtggaactgtcttggtgggtcaacggcaaagaggtgcacagcggcgtgtgtaccgacccccagccactgaaagaacagcccgccctgaacgacagccggtactgcctgagcagcagactgagagtgtccgccaccttctggcagaacccccggaaccacttcagatgccaggtgcagttctacggcctgagcgagaacgacgagtggacccaggacagagccaagcccgtgacccagatcgtgtctgccgaagcctggggcagagccgattgcggcatcaccagcgccagctaccaccagggcgtgctgagcgccaccatcctgtacgagatcctgctgggcaaggccaccctgtacgccgtgctggtgtctgccctggtgctgatggctatggtcaagcggaaggacagccggggaagggccaagcgatctggatctggagcaacaaacttctcactactcaaacaagcaggtgacgtggaggagaatcccgggcctactagcatggccttaccagtgaccgccttgctcctgccgctggccttgctgctccacgccgccaggccggacatcgtgctgacccagagccctctgagcctggccgtgtctctgggacagcctgccatcatcagctgtagggccagccagagcgtgtcctttgccggcacctctctgatgcactggtatcaccagaagcccggccagcagcccagactgctgatctacagagccagcaacctggaagccggcgtgcccgatagattttccggcagcggcagcaagaccgacttcaccctgaccatcagccccgtggaagccgaagatgccgccacctactactgccagcagagcagagagtacccctacaccttcggcggaggcaccaagctggaaatcaagaggggcggaggcggaagtggaggcggaggatctggcggcggaggctctcaggtccaactggtgcagagcggagccgaggtcgtgaagcctggcgcttccgtgaagattagctgcaaagccagcggctacacctttaccggctactttatgcactgggtcaagcagagccctggccagagcctggaatggatcggcagaatccacccctacgacggcgacaccttctacaaccagaagttccagggcaaggccaccctgacagtggacaagagcagcaacaccgcccacatggaactgctgagcctgaccagcgaggacttcgccgtgtactactgcaccagatacgacggcagccgggctatggactattggggccagggcaccaccgtgaccgtgtctagtacgcgtatccagaaccctgatcctgccgtgtaccagctgcgggatagcaagagcagcgacaagagcgtgtgtctgttcaccgacttcgacagccagaccaacgtgtcccagagcaaggactccgacgtgtacatcaccgataagtgcgtgctggacatgcggagcatggacttcaagagcaactccgccgtggcctggtccaacaagtccgatttcgcctgcgccaacgccttcaacaacagcattatccccgaggacacattcttcccaagcagcgacgtgccctgcgacgtgaagctggtggaaaagagcttcgagacagacaccaacctgaacttccagaacctgagcgtgatcggcttcagaatcctgctgctgaaagtggccggctttaacctgctgatgaccctgcggctgtggtccagccgcgccaagagaagcggatctggcgtgaagcagaccctgaatttcgacctgctgaagctggctggcgacgtggaatccaacccaggcccttctagaggccatatgaccgagtacaagcccacggtgcgcctcgccacccgcgacgacgtccccagggccgtacgcaccctcgccgccgcgttcgccgactaccccgccacgcgccacaccgtcgatccggaccgccacatcgagcgggtcaccgagctgcaagaactcttcctcacgcgcgtcgggctcgacatcggcaaggtgtgggtcgcggacgacggcgccgcggtggcggtctggaccacgccggagagcgtcgaagcgggggcggtgttcgccgagatcggcccgcgcatggccgagttgagcggttcccggctggccgcgcagcaacagatggaaggcctcctggcgccgcaccggcccaaggagcccgcgtggttcctggccaccgtcggcgtctcgcccgaccaccagggcaagggtctgggcagcgccgtcgtgctccccggagtggaggcggccgagcgcgccggggtgcccgccttcctggagacctccgcgccccgcaacctccccttctacgagcggctcggcttcaccgtcaccgccgacgtcgaggtgcccgaaggaccgcgcacctggtgcatgacccgcaagcccggtgcctga

SEQ ID NO: 35545 - DNA, 2619 bp, synthetic construct
  source 1..2619: mol_type = other DNA
atggccttaccagtgaccgccttgctcctgccgctggccttgctgctccacgccgccaggccgctcgagatccagaaccctgatcctgccgtgtaccagctgcgggatagcaagagcagcgacaagagcgtgtgtctgttcaccgacttcgacagccagaccaacgtgtcccagagcaaggactccgacgtgtacatcaccgataagtgcgtgctggacatgcggagcatggacttcaagagcaactccgccgtggcctggtccaacaagtccgatttcgcctgcgccaacgccttcaacaacagcattatccccgaggacacattcttcccaagcagcgacgtgccctgcgacgtgaagctggtggaaaagagcttcgagacagacaccaacctgaacttccagaacctgagcgtgatcggcttcagaatcctgctgctgaaagtggccggctttaacctgctgatgaccctgcggctgtggtccagcagggccaagcgatctggatctggagcaacaaacttctcactactcaaacaagcaggtgacgtggaggagaatcccgggcctactagcatggccttaccagtgaccgccttgctcctgccgctggccttgctgctccacgccgccaggccggacatcgtgctgacccagagccctctgagcctggccgtgtctctgggacagcctgccatcatcagctgtagggccagccagagcgtgtcctttgccggcacctctctgatgcactggtatcaccagaagcccggccagcagcccagactgctgatctacagagccagcaacctggaagccggcgtgcccgatagattttccggcagcggcagcaagaccgacttcaccctgaccatcagccccgtggaagccgaagatgccgccacctactactgccagcagagcagagagtacccctacaccttcggcggaggcaccaagctggaaatcaagaggggcggaggcggaagtggaggcggaggatctggcggcggaggctctcaggtccaactggtgcagagcggagccgaggtcgtgaagcctggcgcttccgtgaagattagctgcaaagccagcggctacacctttaccggctactttatgcactgggtcaagcagagccctggccagagcctggaatggatcggcagaatccacccctacgacggcgacaccttctacaaccagaagttccagggcaaggccaccctgacagtggacaagagcagcaacaccgcccacatggaactgctgagcctgaccagcgaggacttcgccgtgtactactgcaccagatacgacggcagccgggctatggactattggggccagggcaccaccgtgaccgtgtctagtacgcgtgaggacctgaagaacgtgttcccacctgaggtggccgtgttcgagcctagcaaggccgagatcgcccacacccagaaagccaccctcgtgtgcctggctaccggcttctaccccgaccatgtggaactgtcttggtgggtcaacggcaaagaggtgcacagcggcgtgtgtaccgacccccagccactgaaagaacagcccgccctgaacgacagccggtactgcctgagcagcagactgagagtgtccgccaccttctggcagaacccccggaaccacttcagatgccaggtgcagttctacggcctgagcgagaacgacgagtggacccaggacagagccaagcccgtgacccagatcgtgtctgccgaagcctggggcagagccgattgcggcatcaccagcgccagctaccaccagggcgtgctgagcgccaccatcctgtacgagatcctgctgggcaaggccaccctgtacgccgtgctggtgtctgccctggtgctgatggctatggtcaagcggaaggacagccggggacgcgccaagagaagcggatctggcgtgaagcagaccctgaatttcgacctgctgaagctggctggcgacgtggaatccaacccaggcccttctagaggccatatgaccgagtacaagcccacggtgcgcctcgccacccgcgacgacgtccccagggccgtacgcaccctcgccgccgcgttcgccgactaccccgccacgcgccacaccgtcgatccggaccgccacatcgagcgggtcaccgagctgcaagaactcttcctcacgcgcgtcgggctcgacatcggcaaggtgtgggtcgcggacgacggcgccgcggtggcggtctggaccacgccggagagcgtcgaagcgggggcggtgttcgccgagatcggcccgcgcatggccgagttgagcggttcccggctggccgcgcagcaacagatggaaggcctcctggcgccgcaccggcccaaggagcccgcgtggttcctggccaccgtcggcgtctcgcccgaccaccagggcaagggtctgggcagcgccgtcgtgctccccggagtggaggcggccgagcgcgccggggtgcccgccttcctggagacctccgcgccccgcaacctccccttctacgagcggctcggcttcaccgtcaccgccgacgtcgaggtgcccgaaggaccgcgcacctggtgcatgacccgcaagcccggtgcctga

SEQ ID NO: 35546 - DNA, 2298 bp, synthetic construct
  source 1..2298: mol_type = other DNA
atggccttaccagtgaccgccttgctcctgccgctggccttgctgctccacgccgccaggccgctcgagcagagttttgggttgttggaccctaaattgtgctatctgttggacggaatcctgttcatttacggagtgatcctgaccgcattgttcctgcgggttaagttttccagatccgcagacgcacccgcttaccaacaagggcagaaccaactctacaatgaacttaatttggggcggagggaagagtacgacgttctggacaaaaggaggggacgagatcccgagatgggcggaaagcctcagcgaaggaagaatccgcaagaggggctttataacgaactccagaaagataaaatggcagaagcctatagtgagattgggatgaagggagaaaggaggaggggtaaaggtcacgatgggttgtaccaaggattgagcacagccactaaagatacctatgatgcgctccacatgcaggccctgccgccaagaagggccaagcgatctggatctggagcaacaaacttctcactactcaaacaagcaggtgacgtggaggagaatcccgggcctactagcatggccttaccagtgaccgccttgctcctgccgctggccttgctgctccacgccgccaggccggacatcgtgctgacccagagccctctgagcctggccgtgtctctgggacagcctgccatcatcagctgtagggccagccagagcgtgtcctttgccggcacctctctgatgcactggtatcaccagaagcccggccagcagcccagactgctgatctacagagccagcaacctggaagccggcgtgcccgatagattttccggcagcggcagcaagaccgacttcaccctgaccatcagccccgtggaagccgaagatgccgccacctactactgccagcagagcagagagtacccctacaccttcggcggaggcaccaagctggaaatcaagaggggcggaggcggaagtggaggcggaggatctggcggcggaggctctcaggtccaactggtgcagagcggagccgaggtcgtgaagcctggcgcttccgtgaagattagctgcaaagccagcggctacacctttaccggctactttatgcactgggtcaagcagagccctggccagagcctggaatggatcggcagaatccacccctacgacggcgacaccttctacaaccagaagttccagggcaaggccaccctgacagtggacaagagcagcaacaccgcccacatggaactgctgagcctgaccagcgaggacttcgccgtgtactactgcaccagatacgacggcagccgggctatggactattggggccagggcaccaccgtgaccgtgtctagtacgcgtgagctgggagagcctcagctgtgctatatcctggacgccatcctgtttctgtacggcatcgtgctgaccctgctgtactgccggctgaagatccaagtgcggaaggccgccatcaccagctacgagaaatccgacggcgtgtacaccggcctgagcaccagaaatcaagagacatacgagacactgaagcacgaaaagcctccacaacgcgccaagagaagcggatctggcgtgaagcagaccctgaatttcgacctgctgaagctggctggcgacgtggaatccaacccaggcccttctagaggccatatgaccgagtacaagcccacggtgcgcctcgccacccgcgacgacgtccccagggccgtacgcaccctcgccgccgcgttcgccgactaccccgccacgcgccacaccgtcgatccggaccgccacatcgagcgggtcaccgagctgcaagaactcttcctcacgcgcgtcgggctcgacatcggcaaggtgtgggtcgcggacgacggcgccgcggtggcggtctggaccacgccggagagcgtcgaagcgggggcggtgttcgccgagatcggcccgcgcatggccgagttgagcggttcccggctggccgcgcagcaacagatggaaggcctcctggcgccgcaccggcccaaggagcccgcgtggttcctggccaccgtcggcgtctcgcccgaccaccagggcaagggtctgggcagcgccgtcgtgctccccggagtggaggcggccgagcgcgccggggtgcccgccttcctggagacctccgcgccccgcaacctccccttctacgagcggctcggcttcaccgtcaccgccgacgtcgaggtgcccgaaggaccgcgcacctggtgcatgacccgcaagcccggtgcctga

SEQ ID NO: 35547 - DNA, 2931 bp, synthetic construct; identical to SEQ ID NO: 35538
  source 1..2931: mol_type = other DNA

SEQ ID NO: 35548 - DNA, 2931 bp, synthetic construct; identical to SEQ ID NO: 35539
  source 1..2931: mol_type = other DNA

SEQ ID NO: 35549 - DNA, 2928 bp, synthetic construct
  source 1..2928: mol_type = other DNA
atggccttaccagtgaccgccttgctcctgccgctggccttgctgctccacgccgccaggccgctcgaggaggaggacctgaagaacgtgttcccacctgaggtggccgtgttcgagcctagcgaggccgagatcagccacacccagaaagccaccctcgtgtgcctggctaccggcttctaccccgaccatgtggaactgtcttggtgggtcaacggcaaagaggtgcacagcggcgtgtgtaccgacccccagccactgaaagaacagcccgccctgaacgacagccggtactgcctgagcagcagactgagagtgtccgccaccttctggcagaacccccggaaccacttcagatgccaggtgcagttctacggcctgagcgagaacgacgagtggacccaggacagagccaagcccgtgacccagatcgtgtctgccgaagcctggggcagagccgatgatgtgattaagatccactggcaggaaaagaagtccaacaccatcctgggcagccaggaaggcaacaccatgaagaccaacgacacctacatgaagttcagctggctgaccgtgcccgagaagtccctggacaaagaacacagatgcatcgtgcggcacgaaaacaacaagaacggcgtggaccaggaaatcatcttcccacccatcaagaccgatgtgattacaatggaccccaaggacaactgctccaaggacgccaacgataccctgctgctccagctgaccaacaccagcgcctactacatgtacttgttgctgctgctgaagtccgtggtgtacttcgccatcatcacatgctgcctgctgcggagaaccgccttctgctgcaacggcgagaagtctagggccaagcgatctggatctggagcaacaaacttctcactactcaaacaagcaggtgacgtggaggagaatcccgggcctactagcatggccttaccagtgaccgccttgctcctgccgctggccttgctgctccacgccgccaggccggacatcgtgctgacccagagccctctgagcctggccgtgtctctgggacagcctgccatcatcagctgtagggccagccagagcgtgtcctttgccggcacctctctgatgcactggtatcaccagaagcccggccagcagcccagactgctgatctacagagccagcaacctggaagccggcgtgcccgatagattttccggcagcggcagcaagaccgacttcaccctgaccatcagccccgtggaagccgaagatgccgccacctactactgccagcagagcagagagtacccctacaccttcggcggaggcaccaagctggaaatcaagaggggcggaggcggaagtggaggcggaggatctggcggcggaggctctcaggtccaactggtgcagagcggagccgaggtcgtgaagcctggcgcttccgtgaagattagctgcaaagccagcggctacacctttaccggctactttatgcactgggtcaagcagagccctggccagagcctggaatggatcggcagaatccacccctacgacggcgacaccttctacaaccagaagttccagggcaaggccaccctgacagtggacaagagcagcaacaccgcccacatggaactgctgagcctgaccagcgaggacttcgccgtgtactactgcaccagatacgacggcagccgggctatggactattggggccagggcaccaccgtgaccgtgtctagtacgcgtatccagaaccctgatcctgccgtgtaccagctgcgggatagcaagagcagcgacaagagcgtgtgtctgttcaccgacttcgacagccagaccaacgtgtcccagagcaaggactccgacgtgtacatcaccgataagtgcgtgctggacatgcggagcatggacttcaagagcaactccgccgtggcctggtccaacaagtccgatttcgcctgcgccaacgccttcaacaacagcattatccccgaggacacattcttcccaagccccgagagcagcgactccaccgaccacgtgaagcccaaagagacagagaacaccaagcagcccagcaagagctgccacaagcccaaggccatcgtgcacaccgagaaagtgaacatgatgagcctgaccgtgctgggcctgcggatgctgttcgccaaaaccgtggccgtgaacttcctgctgaccgccaagctgttcttcctccgcgccaagagaagcggatctggcgtgaagcagaccctgaatttcgacctgctgaagctggctggcgacgtggaatccaacccaggcccttctagaggccatatgaccgagtacaagcccacggtgcgcctcgccacccgcgacgacgtccccagggccgtacgcaccctcgccgccgcgttcgccgactaccccgccacgcgccacaccgtcgatccggaccgccacatcgagcgggtcaccgagctgcaagaactcttcctcacgcgcgtcgggctcgacatcggcaaggtgtgggtcgcggacgacggcgccgcggtggcggtctggaccacgccggagagcgtcgaagcgggggcggtgttcgccgagatcggcccgcgcatggccgagttgagcggttcccggctggccgcgcagcaacagatggaaggcctcctggcgccgcaccggcccaaggagcccgcgtggttcctggccaccgtcggcgtctcgcccgaccaccagggcaagggtctgggcagcgccgtcgtgctccccggagtggaggcggccgagcgcgccggggtgcccgccttcctggagacctccgcgccccgcaacctccccttctacgagcggctcggcttcaccgtcaccgccgacgtcgaggtgcccgaaggaccgcgcacctggtgcatgacccgcaagcccggtgcctga

SEQ ID NO: 35550 - DNA, 2928 bp, synthetic construct
  source 1..2928: mol_type = other DNA
atggccttaccagtgaccgccttgctcctgccgctggccttgctgctccacgccgccaggccgctcgagatccagaaccctgatcctgccgtgtaccagctgcgggatagcaagagcagcgacaagagcgtgtgtctgttcaccgacttcgacagccagaccaacgtgtcccagagcaaggactccgacgtgtacatcaccgataagtgcgtgctggacatgcggagcatggacttcaagagcaactccgccgtggcctggtccaacaagtccgatttcgcctgcgccaacgccttcaacaacagcattatccccgaggacacattcttcccaagccccgagagcagcgactccaccgaccacgtgaagcccaaagagacagagaacaccaagcagcccagcaagagctgccacaagcccaaggccatcgtgcacaccgagaaagtgaacatgatgagcctgaccgtgctgggcctgcggatgctgttcgccaaaaccgtggccgtgaacttcctgctgaccgccaagctgttcttcctcagggccaagcgatctggatctggagcaacaaacttctcactactcaaacaagcaggtgacgtggaggagaatcccgggcctactagcatggccttaccagtgaccgccttgctcctgccgctggccttgctgctccacgccgccaggccggacatcgtgctgacccagagccctctgagcctggccgtgtctctgggacagcctgccatcatcagctgtagggccagccagagcgtgtcctttgccggcacctctctgatgcactggtatcaccagaagcccggccagcagcccagactgctgatctacagagccagcaacctggaagccggcgtgcccgatagattttccggcagcggcagcaagaccgacttcaccctgaccatcagccccgtggaagccgaagatgccgccacctactactgccagcagagcagagagtacccctacaccttcggcggaggcaccaagctggaaatcaagaggggcggaggcggaagtggaggcggaggatctggcggcggaggctctcaggtccaactggtgcagagcggagccgaggtcgtgaagcctggcgcttccgtgaagattagctgcaaagccagcggctacacctttaccggctactttatgcactgggtcaagcagagccctggccagagcctggaatggatcggcagaatccacccctacgacggcgacaccttctacaaccagaagttccagggcaaggccaccctgacagtggacaagagcagcaacaccgcccacatggaactgctgagcctgaccagcgaggacttcgccgtgtactactgcaccagatacgacggcagccgggctatggactattggggccagggcaccaccgtgaccgtgtctagtacgcgtgaggaggacctgaagaacgtgttcccacctgaggtggccgtgttcgagcctagcgaggccgagatcagccacacccagaaagccaccctcgtgtgcctggctaccggcttctaccccgaccatgtggaactgtcttggtgggtcaacggcaaagaggtgcacagcggcgtgtgtaccgacccccagccactgaaagaacagcccgccctgaacgacagccggtactgcctgagcagcagactgagagtgtccgccaccttctggcagaacccccggaaccacttcagatgccaggtgcagttctacggcctgagcgagaacgacgagtggacccaggacagagccaagcccgtgacccagatcgtgtctgccgaagcctggggcagagccgatgatgtgattaagatccactggcaggaaaagaagtccaacaccatcctgggcagccaggaaggcaacaccatgaagaccaacgacacctacatgaagttcagctggctgaccgtgcccgagaagtccctggacaaagaacacagatgcatcgtgcggcacgaaaacaacaagaacggcgtggaccaggaaatcatcttcccacccatcaagaccgatgtgattacaatggaccccaaggacaactgctccaaggacgccaacgataccctgctgctccagctgaccaacaccagcgcctactacatgtacttgttgctgctgctgaagtccgtggtgtacttcgccatcatcacatgctgcctgctgcggagaaccgccttctgctgcaacggcgagaagtctcgcgccaagagaagcggatctggcgtgaagcagaccctgaatttcgacctgctgaagctggctggcgacgtggaatccaacccaggcccttctagaggccatatgaccgagtacaagcccacggtgcgcctcgccacccgcgacgacgtccccagggccgtacgcaccctcgccgccgcgttcgccgactaccccgccacgcgccacaccgtcgatccggaccgccacatcgagcgggtcaccgagctgcaagaactcttcctcacgcgcgtcgggctcgacatcggcaaggtgtgggtcgcggacgacggcgccgcggtggcggtctggaccacgccggagagcgtcgaagcgggggcggtgttcgccgagatcggcccgcgcatggccgagttgagcggttcccggctggccgcgcagcaacagatggaaggcctcctggcgccgcaccggcccaaggagcccgcgtggttcctggccaccgtcggcgtctcgcccgaccaccagggcaagggtctgggcagcgccgtcgtgctccccggagtggaggcggccgagcgcgccggggtgcccgccttcctggagacctccgcgccccgcaacctccccttctacgagcggctcggcttcaccgtcaccgccgacgtcgaggtgcccgaaggaccgcgcacctggtgcatgacccgcaagcccggtgcctga

SEQ ID NO: 35551 - DNA, 2619 bp, synthetic construct
  source 1..2619: mol_type = other DNA
atggccttaccagtgaccgccttgctcctgccgctggccttgctgctccacgccgccaggccgctcgaggaggacctgaagaacgtgttcccacctgaggtggccgtgttcgagcctagcgaggccgagatcagccacacccagaaagccaccctcgtgtgcctggctaccggcttctaccccgaccatgtggaactgtcttggtgggtcaacggcaaagaggtgcacagcggcgtgtctaccgacccccagccactgaaagaacagcccgccctgaacgacagccggtactgcctgagcagcagactgagagtgtccgccaccttctggcagaacccccggaaccacttcagatgccaggtgcagttctacggcctgagcgagaacgacgagtggacccaggacagagccaagcccgtgacccagatcgtgtctgccgaagcctggggcagagccgattgcggctttaccagcgagagctaccagcagggcgtgctgagcgccaccaacctgagcgtgatcggcttcagaatcctgctgctgaaagtggccggctttaacctgctgatgaccctgcggctgtggtccagcagggccaagcgatctggatctggagcaacaaacttctcactactcaaacaagcaggtgacgtggaggagaatcccgggcctactagcatggccttaccagtgaccgccttgctcctgccgctggccttgctgctccacgccgccaggccggacatcgtgctgacccagagccctctgagcctggccgtgtctctgggacagcctgccatcatcagctgtagggccagccagagcgtgtcctttgccggcacctctctgatgcactggtatcaccagaagcccggccagcagcccagactgctgatctacagagccagcaacctggaagccggcgtgcccgatagattttccggcagcggcagcaagaccgacttcaccctgaccatcagccccgtggaagccgaagatgccgccacctactactgccagcagagcagagagtacccctacaccttcggcggaggcaccaagctggaaatcaagaggggcggaggcggaagtggaggcggaggatctggcggcggaggctctcaggtccaactggtgcagagcggagccgaggtcgtgaagcctggcgcttccgtgaagattagctgcaaagccagcggctacacctttaccggctactttatgcactgggtcaagcagagccctggccagagcctggaatggatcggcagaatccacccctacgacggcgacaccttctacaaccagaagttccagggcaaggccaccctgacagtggacaagagcagcaacaccgcccacatggaactgctgagcctgaccagcgaggacttcgccgtgtactactgcaccagatacgacggcagccgggctatggactattggggccagggcaccaccgtgaccgtgtctagtacgcgtatccagaaccctgatcctgccgtgtaccagctgcgggatagcaagagcagcgacaagagcgtgtgtctgttcaccgacttcgacagccagaccaacgtgtcccagagcaaggactccgacgtgtacatcaccgataagaccgtgctggacatgcggagcatggacttcaagagcaactccgccgtggcctggtccaacaagtccgatttcgcctgcgccaacgccttcaacaacagcattatccccgaggacacattcttcccaagccccgagagcagctgcgacgtgaagctggtggaaaagagcttcgagacagacaccaacctgaacttccagatcctgtacgagatcctgctgggcaaggccaccctgtacgccgtgctggtgtctgccctggtgctgatggctatggtcaagcggaaggacagccggggacgcgccaagagaagcggatctggcgtgaagcagaccctgaatttcgacctgctgaagctggctggcgacgtggaatccaacccaggcccttctagaggccatatgaccgagtacaagcccacggtgcgcctcgccacccgcgacgacgtccccagggccgtacgcaccctcgccgccgcgttcgccgactaccccgccacgcgccacaccgtcgatccggaccgccacatcgagcgggtcaccgagctgcaagaactcttcctcacgcgcgtcgggctcgacatcggcaaggtgtgggtcgcggacgacggcgccgcggtggcggtctggaccacgccggagagcgtcgaagcgggggcggtgttcgccgagatcggcccgcgcatggccgagttgagcggttcccggctggccgcgcagcaacagatggaaggcctcctggcgccgcaccggcccaaggagcccgcgtggttcctggccaccgtcggcgtctcgcccgaccaccagggcaagggtctgggcagcgccgtcgtgctccccggagtggaggcggccgagcgcgccggggtgcccgccttcctggagacctccgcgccccgcaacctccccttctacgagcggctcggcttcaccgtcaccgccgacgtcgaggtgcccgaaggaccgcgcacctggtgcatgacccgcaagcccggtgcctga

SEQ ID NO: 35552 - DNA, 2619 bp, synthetic construct
  source 1..2619: mol_type = other DNA
atggccttaccagtgaccgccttgctcctgccgctggccttgctgctccacgccgccaggccgctcgagatccagaaccctgatcctgccgtgtaccagctgcgggatagcaagagcagcgacaagagcgtgtgtctgttcaccgacttcgacagccagaccaacgtgtcccagagcaaggactccgacgtgtacatcaccgataagaccgtgctggacatgcggagcatggacttcaagagcaactccgccgtggcctggtccaacaagtccgatttcgcctgcgccaacgccttcaacaacagcattatccccgaggacacattcttcccaagccccgagagcagctgcgacgtgaagctggtggaaaagagcttcgagacagacaccaacctgaacttccagatcctgtacgagatcctgctgggcaaggccaccctgtacgccgtgctggtgtctgccctggtgctgatggctatggtcaagcggaaggacagccggggaagggccaagcgatctggatctggagcaacaaacttctcactactcaaacaagcaggtgacgtggaggagaatcccgggcctactagcatggccttaccagtgaccgccttgctcctgccgctggccttgctgctccacgccgccaggccggacatcgtgctgacccagagccctctgagcctggccgtgtctctgggacagcctgccatcatcagctgtagggccagccagagcgtgtcctttgccggcacctctctgatgcactggtatcaccagaagcccggccagcagcccagactgctgatctacagagccagcaacctggaagccggcgtgcccgatagattttccggcagcggcagcaagaccgacttcaccctgaccatcagccccgtggaagccgaagatgccgccacctactactgccagcagagcagagagtacccctacaccttcggcggaggcaccaagctggaaatcaagaggggcggaggcggaagtggaggcggaggatctggcggcggaggctctcaggtccaactggtgcagagcggagccgaggtcgtgaagcctggcgcttccgtgaagattagctgcaaagccagcggctacacctttaccggctactttatgcactgggtcaagcagagccctggccagagcctggaatggatcggcagaatccacccctacgacggcgacaccttctacaaccagaagttccagggcaaggccaccctgacagtggacaagagcagcaacaccgcccacatggaactgctgagcctgaccagcgaggacttcgccgtgtactactgcaccagatacgacggcagccgggctatggactattggggccagggcaccaccgtgaccgtgtctagtacgcgtgaggacctgaagaacgtgttcccacctgaggtggccgtgttcgagcctagcgaggccgagatcagccacacccagaaagccaccctcgtgtgcctggctaccggcttctaccccgaccatgtggaactgtcttggtgggtcaacggcaaagaggtgcacagcggcgtgtctaccgacccccagccactgaaagaacagcccgccctgaacgacagccggtactgcctgagcagcagactgagagtgtccgccaccttctggcagaacccccggaaccacttcagatgccaggtgcagttctacggcctgagcgagaacgacgagtggacccaggacagagccaagcccgtgacccagatcgtgtctgccgaagcctggggcagagccgattgcggctttaccagcgagagctaccagcagggcgtgctgagcgccaccaacctgagcgtgatcggcttcagaatcctgctgctgaaagtggccggctttaacctgctgatgaccctgcggctgtggtccagccgcgccaagagaagcggatctggcgtgaagcagaccctgaatttcgacctgctgaagctggctggcgacgtggaatccaacccaggcccttctagaggccatatgaccgagtacaagcccacggtgcgcctcgccacccgcgacgacgtccccagggccgtacgcaccctcgccgccgcgttcgccgactaccccgccacgcgccacaccgtcgatccggaccgccacatcgagcgggtcaccgagctgcaagaactcttcctcacgcgcgtcgggctcgacatcggcaaggtgtgggtcgcggacgacggcgccgcggtggcggtctggaccacgccggagagcgtcgaagcgggggcggtgttcgccgagatcggcccgcgcatggccgagttgagcggttcccggctggccgcgcagcaacagatggaaggcctcctggcgccgcaccggcccaaggagcccgcgtggttcctggccaccgtcggcgtctcgcccgaccaccagggcaagggtctgggcagcgccgtcgtgctccccggagtggaggcggccgagcgcgccggggtgcccgccttcctggagacctccgcgccccgcaacctccccttctacgagcggctcggcttcaccgtcaccgccgacgtcgaggtgcccgaaggaccgcgcacctggtgcatgacccgcaagcccggtgcctga

SEQ ID NO: 35553 - DNA, 2619 bp, synthetic construct
  source 1..2619: mol_type = other DNA
atggccttaccagtgaccgccttgctcctgccgctggccttgctgctccacgccgccaggccgctcgaggaggacctgaagaacgtgttcccacctgaggtggccgtgttcgagcctagcgaggccgagatcagccacacccagaaagccaccctcgtgtgcctggctaccggcttctaccccgaccatgtggaactgtcttggtgggtcaacggcaaagaggtgcacagcggcgtgtgtaccgacccccagccactgaaagaacagcccgccctgaacgacagccggtactgcctgagcagcagactgagagtgtccgccaccttctggcagaacccccggaaccacttcagatgccaggtgcagttctacggcctgagcgagaacgacgagtggacccaggacagagccaagcccgtgacccagatcgtgtctgccgaagcctggggcagagccgattgcgacgtgaagctggtggaaaagagcttcgagacagacaccaacctgaacttccagaacctgagcgtgatcggcttcagaatcctgctgctgaaagtggccggctttaacctgctgatgaccctgcggctgtggtccagcagggccaagcgatctggatctggagcaacaaacttctcactactcaaacaagcaggtgacgtggaggagaatcccgggcctactagcatggccttaccagtgaccgccttgctcctgccgctggccttgctgctccacgccgccaggccggacatcgtgctgacccagagccctctgagcctggccgtgtctctgggacagcctgccatcatcagctgtagggccagccagagcgtgtcctttgccggcacctctctgatgcactggtatcaccagaagcccggccagcagcccagactgctgatctacagagccagcaacctggaagccggcgtgcccgatagattttccggcagcggcagcaagaccgacttcaccctgaccatcagccccgtggaagccgaagatgccgccacctactactgccagcagagcagagagtacccctacaccttcggcggaggcaccaagctggaaatcaagaggggcggaggcggaagtggaggcggaggatctggcggcggaggctctcaggtccaactggtgcagagcggagccgaggtcgtgaagcctggcgcttccgtgaagattagctgcaaagccagcggctacacctttaccggctactttatgcactgggtcaagcagagccctggccagagcctggaatggatcggcagaatccacccctacgacggcgacaccttctacaaccagaagttccagggcaaggccaccctgacagtggacaagagcagcaacaccgcccacatggaactgctgagcctgaccagcgaggacttcgccgtgtactactgcaccagatacgacggcagccgggctatggactattggggccagggcaccaccgtgaccgtgtctagtacgcgtatccagaaccctgatcctgccgtgtaccagctgcgggatagcaagagcagcgacaagagcgtgtgtctgttcaccgacttcgacagccagaccaacgtgtcccagagcaaggactccgacgtgtacatcaccgataagtgcgtgctggacatgcggagcatggacttcaagagcaactccgccgtggcctggtccaacaagtccgatttcgcctgcgccaacgccttcaacaacagcattatccccgaggacacattcttcccaagccccgagagcagctgcggctttaccagcgagagctaccagcagggcgtgctgagcgccaccatcctgtacgagatcctgctgggcaaggccaccctgtacgccgtgctggtgtctgccctggtgctgatggctatggtcaagcggaaggacagccggggacgcgccaagagaagcggatctggcgtgaagcagaccctgaatttcgacctgctgaagctggctggcgacgtggaatccaacccaggcccttctagaggccatatgaccgagtacaagcccacggtgcgcctcgccacccgcgacgacgtccccagggccgtacgcaccctcgccgccgcgttcgccgactaccccgccacgcgccacaccgtcgatccggaccgccacatcgagcgggtcaccgagctgcaagaactcttcctcacgcgcgtcgggctcgacatcggcaaggtgtgggtcgcggacgacggcgccgcggtggcggtctggaccacgccggagagcgtcgaagcgggggcggtgttcgccgagatcggcccgcgcatggccgagttgagcggttcccggctggccgcgcagcaacagatggaaggcctcctggcgccgcaccggcccaaggagcccgcgtggttcctggccaccgtcggcgtctcgcccgaccaccagggcaagggtctgggcagcgccgtcgtgctccccggagtggaggcggccgagcgcgccggggtgcccgccttcctggagacctccgcgccccgcaacctccccttctacgagcggctcggcttcaccgtcaccgccgacgtcgaggtgcccgaaggaccgcgcacctggtgcatgacccgcaagcccggtgcctga

SEQ ID NO: 35554 - DNA, 2619 bp, synthetic construct
  source 1..2619: mol_type = other DNA
atggccttaccagtgaccgccttgctcctgccgctggccttgctgctccacgccgccaggccgctcgaggaggacctgaagaacgtgttcccacctgaggtggccgtgttcgagcctagcgaggccgagatcagccacacccagaaagccaccctcgtgtgcctggctaccggcttctaccccgaccatgtggaactgtcttggtgggtcaacggcaaagaggtgcacagcggcgtgtctaccgacccccagccactgaaagaacagcccgccctgaacgacagccggtactgcctgagcagcagactgagagtgtccgccaccttctggcagaacccccggaaccacttcagatgccaggtgcagttctacggcctgagcgagaacgacgagtggacccaggacagagccaagcccgtgacccagatcgtgtctgccgaagcctggggcagagccgattgcgacgtgaagctggtggaaaagagcttcgagacagacaccaacctgaacttccagaacctgagcgtgatcggcttcagaatcctgctgctgaaagtggccggctttaacctgctgatgaccctgcggctgtggtccagcagggccaagcgatctggatctggagcaacaaacttctcactactcaaacaagcaggtgacgtggaggagaatcccgggcctactagcatggccttaccagtgaccgccttgctcctgccgctggccttgctgctccacgccgccaggccggacatcgtgctgacccagagccctctgagcctggccgtgtctctgggacagcctgccatcatcagctgtagggccagccagagcgtgtcctttgccggcacctctctgatgcactggtatcaccagaagcccggccagcagcccagactgctgatctacagagccagcaacctggaagccggcgtgcccgatagattttccggcagcggcagcaagaccgacttcaccctgaccatcagccccgtggaagccgaagatgccgccacctactactgccagcagagcagagagtacccctacaccttcggcggaggcaccaagctggaaatcaagaggggcggaggcggaagtggaggcggaggatctggcggcggaggctctcaggtccaactggtgcagagcggagccgaggtcgtgaagcctggcgcttccgtgaagattagctgcaaagccagcggctacacctttaccggctactttatgcactgggtcaagcagagccctggccagagcctggaatggatcggcagaatccacccctacgacggcgacaccttctacaaccagaagttccagggcaaggccaccctgacagtggacaagagcagcaacaccgcccacatggaactgctgagcctgaccagcgaggacttcgccgtgtactactgcaccagatacgacggcagccgggctatggactattggggccagggcaccaccgtgaccgtgtctagtacgcgtatccagaaccctgatcctgccgtgtaccagctgcgggatagcaagagcagcgacaagagcgtgtgtctgttcaccgacttcgacagccagaccaacgtgtcccagagcaaggactccgacgtgtacatcaccgataagaccgtgctggacatgcggagcatggacttcaagagcaactccgccgtggcctggtccaacaagtccgatttcgcctgcgccaacgccttcaacaacagcattatccccgaggacacattcttcccaagccccgagagcagctgcggctttaccagcgagagctaccagcagggcgtgctgagcgccaccatcctgtacgagatcctgctgggcaaggccaccctgtacgccgtgctggtgtctgccctggtgctgatggctatggtcaagcggaaggacagccggggacgcgccaagagaagcggatctggcgtgaagcagaccctgaatttcgacctgctgaagctggctggcgacgtggaatccaacccaggcccttctagaggccatatgaccgagtacaagcccacggtgcgcctcgccacccgcgacgacgtccccagggccgtacgcaccctcgccgccgcgttcgccgactaccccgccacgcgccacaccgtcgatccggaccgccacatcgagcgggtcaccgagctgcaagaactcttcctcacgcgcgtcgggctcgacatcggcaaggtgtgggtcgcggacgacggcgccgcggtggcggtctggaccacgccggagagcgtcgaagcgggggcggtgttcgccgagatcggcccgcgcatggccgagttgagcggttcccggctggccgcgcagcaacagatggaaggcctcctggcgccgcaccggcccaaggagcccgcgtggttcctggccaccgtcggcgtctcgcccgaccaccagggcaagggtctgggcagcgccgtcgtgctccccggagtggaggcggccgagcgcgccggggtgcccgccttcctggagacctccgcgccccgcaacctccccttctacgagcggctcggcttcaccgtcaccgccgacgtcgaggtgcccgaaggaccgcgcacctggtgcatgacccgcaagcccggtgcctga

SEQ ID NO: 35555 - DNA, 2928 bp, synthetic construct
  source 1..2928: mol_type = other DNA
atggccttaccagtgaccgccttgctcctgccgctggccttgctgctccacgccgccaggccgctcgaggaggaggacctgaagaacgtgttcccacctgaggtggccgtgttcgagcctagcgaggccgagatcagccacacccagaaagccaccctcgtgtgcctggctaccggcttctaccccgaccatgtggaactgtcttggtgggtcaacggcaaagaggtgcacagcggcgtgtctaccgacccccagccactgaaagaacagcccgccctgaacgacagccggtactgcctgagcagcagactgagagtgtccgccaccttctggcagaacccccggaaccacttcagatgccaggtgcagttctacggcctgagcgagaacgacgagtggacccaggacagagccaagcccgtgacccagatcgtgtctgccgaagcctggggcagagccgatgatgtgattaagatccactggcaggaaaagaagtccaacaccatcctgggcagccaggaaggcaacaccatgaagaccaacgacacctacatgaagttcagctggctgaccgtgcccgagaagtccctggacaaagaacacagatgcatcgtgcggcacgaaaacaacaagaacggcgtggaccaggaaatcatcttcccacccatcaagaccgatgtgattacaatggaccccaaggacaactgctccaaggacgccaacgataccctgctgctccagctgaccaacaccagcgcctactacatgtacttgttgctgctgctgaagtccgtggtgtacttcgccatcatcacatgctgcctgctgcggagaaccgccttctgctgcaacggcgagaagtctagggccaagcgatctggatctggagcaacaaacttctcactactcaaacaagcaggtgacgtggaggagaatcccgggcctactagcatggccttaccagtgaccgccttgctcctgccgctggccttgctgctccacgccgccaggccggacatcgtgctgacccagagccctctgagcctggccgtgtctctgggacagcctgccatcatcagctgtagggccagccagagcgtgtcctttgccggcacctctctgatgcactggtatcaccagaagcccggccagcagcccagactgctgatctacagagccagcaacctggaagccggcgtgcccgatagattttccggcagcggcagcaagaccgacttcaccctgaccatcagccccgtggaagccgaagatgccgccacctactactgccagcagagcagagagtacccctacaccttcggcggaggcaccaagctggaaatcaagaggggcggaggcggaagtggaggcggaggatctggcggcggaggctctcaggtccaactggtgcagagcggagccgaggtcgtgaagcctggcgcttccgtgaagattagctgcaaagccagcggctacacctttaccggctactttatgcactgggtcaagcagagccctggccagagcctggaatggatcggcagaatccacccctacgacggcgacaccttctacaaccagaagttccagggcaaggccaccctgacagtggacaagagcagcaacaccgcccacatggaactgctgagcctgaccagcgaggacttcgccgtgtactactgcaccagatacgacggcagccgggctatggactattggggccagggcaccaccgtgaccgtgtctagtacgcgtatccagaaccctgatcctgccgtgtaccagctgcgggatagcaagagcagcgacaagagcgtgtgtctgttcaccgacttcgacagccagaccaacgtgtcccagagcaaggactccgacgtgtacatcaccgataagaccgtgctggacatgcggagcatggacttcaagagcaactccgccgtggcctggtccaacaagtccgatttcgcctgcgccaacgccttcaacaacagcattatccccgaggacacattcttcccaagccccgagagcagcgactccaccgaccacgtgaagcccaaagagacagagaacaccaagcagcccagcaagagctgccacaagcccaaggccatcgtgcacaccgagaaagtgaacatgatgagcctgaccgtgctgggcctgcggatgctgttcgccaaaaccgtggccgtgaacttcctgctgaccgccaagctgttcttcctccgcgccaagagaagcggatctggcgtgaagcagaccctgaatttcgacctgctgaagctggctggcgacgtggaatccaacccaggcccttctagaggccatatgaccgagtacaagcccacggtgcgcctcgccacccgcgacgacgtccccagggccgtacgcaccctcgccgccgcgttcgccgactaccccgccacgcgccacaccgtcgatccggaccgccacatcgagcgggtcaccgagctgcaagaactcttcctcacgcgcgtcgggctcgacatcggcaaggtgtgggtcgcggacgacggcgccgcggtggcggtctggaccacgccggagagcgtcgaagcgggggcggtgttcgccgagatcggcccgcgcatggccgagttgagcggttcccggctggccgcgcagcaacagatggaaggcctcctggcgccgcaccggcccaaggagcccgcgtggttcctggccaccgtcggcgtctcgcccgaccaccagggcaagggtctgggcagcgccgtcgtgctccccggagtggaggcggccgagcgcgccggggtgcccgccttcctggagacctccgcgccccgcaacctccccttctacgagcggctcggcttcaccgtcaccgccgacgtcgaggtgcccgaaggaccgcgcacctggtgcatgacccgcaagcccggtgcctga

SEQ ID NO: 35556 - DNA, 2619 bp, synthetic construct
  source 1..2619: mol_type = other DNA
atggccttaccagtgaccgccttgctcctgccgctggccttgctgctccacgccgccaggccgctcgaggaggacctgaagaacgtgttcccacctgaggtggccgtgttcgagcctagcgaggccgagatcagccacacccagaaagccaccctcgtgtgcctggctaccggcttctaccccgaccatgtggaactgtcttggtgggtcaacggcaaagaggtgcacagcggcgtgtgtaccgacccccagccactgaaagaacagcccgccctgaacgacagccggtactgcctgagcagcagactgagagtgtccgccaccttctggcagaacccccggaaccacttcagatgccaggtgcagttctacggcctgagcgagaacgacgagtggacccaggacagagccaagcccgtgacccagatcgtgtctgccgaagcctggggcagagccgattgcggctttaccagcgagagctaccagcagggcgtgctgagcgccaccaacctgagcgtgatcggcttcagaatcctgctgctgaaagtggccggctttaacctgctgatgaccctgcggctgtggtccagcagggccaagcgatctggatctggagcaacaaacttctcactactcaaacaagcaggtgacgtggaggagaatcccgggcctactagcatggccttaccagtgaccgccttgctcctgccgctggccttgctgctccacgccgccaggccggacatcgtgctgacccagagccctctgagcctggccgtgtctctgggacagcctgccatcatcagctgtagggccagccagagcgtgtcctttgccggcacctctctgatgcactggtatcaccagaagcccggccagcagcccagactgctgatctacagagccagcaacctggaagccggcgtgcccgatagattttccggcagcggcagcaagaccgacttcaccctgaccatcagccccgtggaagccgaagatgccgccacctactactgccagcagagcagagagtacccctacaccttcggcggaggcaccaagctggaaatcaagaggggcggaggcggaagtggaggcggaggatctggcggcggaggctctcaggtccaactggtgcagagcggagccgaggtcgtgaagcctggcgcttccgtgaagattagctgcaaagccagcggctacacctttaccggctactttatgcactgggtcaagcagagccctggccagagcctggaatggatcggcagaatccacccctacgacggcgacaccttctacaaccagaagttccagggcaaggccaccctgacagtggacaagagcagcaacaccgcccacatggaactgctgagcctgaccagcgaggacttcgccgtgtactactgcaccagatacgacggcagccgggctatggactattggggccagggcaccaccgtgaccgtgtctagtacgcgtatccagaaccctgatcctgccgtgtaccagctgcgggatagcaagagcagcgacaagagcgtgtgtctgttcaccgacttcgacagccagaccaacgtgtcccagagcaaggactccgacgtgtacatcaccgataagtgcgtgctggacatgcggagcatggacttcaagagcaactccgccgtggcctggtccaacaagtccgatttcgcctgcgccaacgccttcaacaacagcattatccccgaggacacattcttcccaagccccgagagcagctgcgacgtgaagctggtggaaaagagcttcgagacagacaccaacctgaacttccagatcctgtacgagatcctgctgggcaaggccaccctgtacgccgtgctggtgtctgccctggtgctgatggctatggtcaagcggaaggacagccggggacgcgccaagagaagcggatctggcgtgaagcagaccctgaatttcgacctgctgaagctggctggcgacgtggaatccaacccaggcccttctagaggccatatgaccgagtacaagcccacggtgcgcctcgccacccgcgacgacgtccccagggccgtacgcaccctcgccgccgcgttcgccgactaccccgccacgcgccacaccgtcgatccggaccgccacatcgagcgggtcaccgagctgcaagaactcttcctcacgcgcgtcgggctcgacatcggcaaggtgtgggtcgcggacgacggcgccgcggtggcggtctggaccacgccggagagcgtcgaagcgggggcggtgttcgccgagatcggcccgcgcatggccgagttgagcggttcccggctggccgcgcagcaacagatggaaggcctcctggcgccgcaccggcccaaggagcccgcgtggttcctggccaccgtcggcgtctcgcccgaccaccagggcaagggtctgggcagcgccgtcgtgctccccggagtggaggcggccgagcgcgccggggtgcccgccttcctggagacctccgcgccccgcaacctccccttctacgagcggctcggcttcaccgtcaccgccgacgtcgaggtgcccgaaggaccgcgcacctggtgcatgacccgcaagcccggtgcctga

SEQ ID NO: 35557 - DNA, 2706 bp, synthetic construct
  source 1..2706: mol_type = other DNA
atggccttaccagtgaccgccttgctcctgccgctggccttgctgctccacgccgccaggccgctcgaggaggaggacctgaagaacgtgttcccacctgaggtggccgtgttcgagcctagcgaggccgagatcagccacacccagaaagccaccctcgtgtgcctggctaccggcttctaccccgaccatgtggaactgtcttggtgggtcaacggcaaagaggtgcacagcggcgtgtgtaccgacccccagccactgaaagaacagcccgccctgaacgacagccggtactgcctgagcagcagactgagagtgtccgccaccttctggcagaacccccggaaccacttcagatgccaggtgcagttctacggcctgagcgagaacgacgagtggacccaggacagagccaagcccgtgacccagatcgtgtctgccgaagcctggggcagagccgattgcggctttaccagcgagagctaccagcagggcgtgctgagcgccaccaacctgagcgtgatcggcttcagaatcctgctgctgaaagtggccggctttaacctgctgatgaccctgcggctgtggtccagcagggccaagcgatctggatctggagcaacaaacttctcactactcaaacaagcaggtgacgtggaggagaatcccgggcctactagcatggccttaccagtgaccgccttgctcctgccgctggccttgctgctccacgccgccaggccggacatcgtgctgacccagagccctctgagcctggccgtgtctctgggacagcctgccatcatcagctgtagggccagccagagcgtgtcctttgccggcacctctctgatgcactggtatcaccagaagcccggccagcagcccagactgctgatctacagagccagcaacctggaagccggcgtgcccgatagattttccggcagcggcagcaagaccgacttcaccctgaccatcagccccgtggaagccgaagatgccgccacctactactgccagcagagcagagagtacccctacaccttcggcggaggcaccaagctggaaatcaagaggggcggaggcggaagtggaggcggaggatctggcggcggaggctctcaggtccaactggtgcagagcggagccgaggtcgtgaagcctggcgcttccgtgaagattagctgcaaagccagcggctacacctttaccggctactttatgcactgggtcaagcagagccctggccagagcctggaatggatcggcagaatccacccctacgacggcgacaccttctacaaccagaagttccagggcaaggccaccctgacagtggacaagagcagcaacaccgcccacatggaactgctgagcctgaccagcgaggacttcgccgtgtactactgcaccagatacgacggcagccgggctatggactattggggccagggcaccaccgtgaccgtgtctagtacgcgtggacagcctaaggccaatcctaccgtgacactgttccctccaagcagcgaagaactccaggccaacaaggccacacttgtgtgcctgatctccgacttctaccctggggctgtgacagtggcttggaaggccgatggatctcctgtgaaagccggcgtggaaaccaccaagccatccaagcagagcaacaacaaatacgccgccagctcctacctgagcctgacacctgagcagtggaagtcccacagatcctacagctgccaagtgacccacgaaggcagcaccgtggaaaagacagtggcccctacagagtgcagccccatcaagaccgatgtgattacaatggaccccaaggacaactgctccaaggacgccaacgataccctgctgctccagctgaccaacaccagcgcctactacatgtacttgttgctgctgctgaagtccgtggtgtacttcgccatcatcacatgctgcctgctgcggagaaccgccttctgctgcaacggcgagaagtctcgcgccaagagaagcggatctggcgtgaagcagaccctgaatttcgacctgctgaagctggctggcgacgtggaatccaacccaggcccttctagaggccatatgaccgagtacaagcccacggtgcgcctcgccacccgcgacgacgtccccagggccgtacgcaccctcgccgccgcgttcgccgactaccccgccacgcgccacaccgtcgatccggaccgccacatcgagcgggtcaccgagctgcaagaactcttcctcacgcgcgtcgggctcgacatcggcaaggtgtgggtcgcggacgacggcgccgcggtggcggtctggaccacgccggagagcgtcgaagcgggggcggtgttcgccgagatcggcccgcgcatggccgagttgagcggttcccggctggccgcgcagcaacagatggaaggcctcctggcgccgcaccggcccaaggagcccgcgtggttcctggccaccgtcggcgtctcgcccgaccaccagggcaagggtctgggcagcgccgtcgtgctccccggagtggaggcggccgagcgcgccggggtgcccgccttcctggagacctccgcgccccgcaacctccccttctacgagcggctcggcttcaccgtcaccgccgacgtcgaggtgcccgaaggaccgcgcacctggtgcatgacccgcaagcccggtgcctga

SEQ ID NO: 35558 - DNA, 2706 bp, synthetic construct
  source 1..2706: mol_type = other DNA
atggccttaccagtgaccgccttgctcctgccgctggccttgctgctccacgccgccaggccgctcgagggacagcctaaggccaatcctaccgtgacactgttccctccaagcagcgaagaactccaggccaacaaggccacacttgtgtgcctgatctccgacttctaccctggggctgtgacagtggcttggaaggccgatggatctcctgtgaaagccggcgtggaaaccaccaagccatccaagcagagcaacaacaaatacgccgccagctcctacctgagcctgacacctgagcagtggaagtcccacagatcctacagctgccaagtgacccacgaaggcagcaccgtggaaaagacagtggcccctacagagtgcagccccatcaagaccgatgtgattacaatggaccccaaggacaactgctccaaggacgccaacgataccctgctgctccagctgaccaacaccagcgcctactacatgtacttgttgctgctgctgaagtccgtggtgtacttcgccatcatcacatgctgcctgctgcggagaaccgccttctgctgcaacggcgagaagtctagggccaagcgatctggatctggagcaacaaacttctcactactcaaacaagcaggtgacgtggaggagaatcccgggcctactagcatggccttaccagtgaccgccttgctcctgccgctggccttgctgctccacgccgccaggccggacatcgtgctgacccagagccctctgagcctggccgtgtctctgggacagcctgccatcatcagctgtagggccagccagagcgtgtcctttgccggcacctctctgatgcactggtatcaccagaagcccggccagcagcccagactgctgatctacagagccagcaacctggaagccggcgtgcccgatagattttccggcagcggcagcaagaccgacttcaccctgaccatcagccccgtggaagccgaagatgccgccacctactactgccagcagagcagagagtacccctacaccttcggcggaggcaccaagctggaaatcaagaggggcggaggcggaagtggaggcggaggatctggcggcggaggctctcaggtccaactggtgcagagcggagccgaggtcgtgaagcctggcgcttccgtgaagattagctgcaaagccagcggctacacctttaccggctactttatgcactgggtcaagcagagccctggccagagcctggaatggatcggcagaatccacccctacgacggcgacaccttctacaaccagaagttccagggcaaggccaccctgacagtggacaagagcagcaacaccgcccacatggaactgctgagcctgaccagcgaggacttcgccgtgtactactgcaccagatacgacggcagccgggctatggactattggggccagggcaccaccgtgaccgtgtctagtacgcgtgaggaggacctgaagaacgtgttcccacctgaggtggccgtgttcgagcctagcgaggccgagatcagccacacccagaaagccaccctcgtgtgcctggctaccggcttctaccccgaccatgtggaactgtcttggtgggtcaacggcaaagaggtgcacagcggcgtgtgtaccgacccccagccactgaaagaacagcccgccctgaacgacagccggtactgcctgagcagcagactgagagtgtccgccaccttctggcagaacccccggaaccacttcagatgccaggtgcagttctacggcctgagcgagaacgacgagtggacccaggacagagccaagcccgtgacccagatcgtgtctgccgaagcctggggcagagccgattgcggctttaccagcgagagctaccagcagggcgtgctgagcgccaccaacctgagcgtgatcggcttcagaatcctgctgctgaaagtggccggctttaacctgctgatgaccctgcggctgtggtccagccgcgccaagagaagcggatctggcgtgaagcagaccctgaatttcgacctgctgaagctggctggcgacgtggaatccaacccaggcccttctagaggccatatgaccgagtacaagcccacggtgcgcctcgccacccgcgacgacgtccccagggccgtacgcaccctcgccgccgcgttcgccgactaccccgccacgcgccacaccgtcgatccggaccgccacatcgagcgggtcaccgagctgcaagaactcttcctcacgcgcgtcgggctcgacatcggcaaggtgtgggtcgcggacgacggcgccgcggtggcggtctggaccacgccggagagcgtcgaagcgggggcggtgttcgccgagatcggcccgcgcatggccgagttgagcggttcccggctggccgcgcagcaacagatggaaggcctcctggcgccgcaccggcccaaggagcccgcgtggttcctggccaccgtcggcgtctcgcccgaccaccagggcaagggtctgggcagcgccgtcgtgctccccggagtggaggcggccgagcgcgccggggtgcccgccttcctggagacctccgcgccccgcaacctccccttctacgagcggctcggcttcaccgtcaccgccgacgtcgaggtgcccgaaggaccgcgcacctggtgcatgacccgcaagcccggtgcctga

SEQ ID NO: 35559 - DNA, 2697 bp, synthetic construct
  source 1..2697: mol_type = other DNA
atggccttaccagtgaccgccttgctcctgccgctggccttgctgctccacgccgccaggccgctcgaggaggcctctacaaagggaccctccgtgtttcctctggctcccagcagcaagtctacaagcggaggaacagccgctctgggctgcctggtcaaggattactttcccgagcctgtgaccgtgtcctggaatagcggagcactgacaagcggcgtgcacacctttccagccgtgctgcaaagcagcggcctgtactctctgagcagcgtggtcacagtgcctagctctagcctgggcacccagacctacatctgcaatgtgaaccacaagcctagcaacaccaaggtggacaagagagtggaacccaagagctgtcccatcaagaccgatgtgattacaatggaccccaaggacaactgctccaaggacgccaacgataccctgctgctccagctgaccaacaccagcgcctactacatgtacttgttgctgctgctgaagtccgtggtgtacttcgccatcatcacatgctgcctgctgcggagaaccgccttctgctgcaacggcgagaagtctagggccaagcgatctggatctggagcaacaaacttctcactactcaaacaagcaggtgacgtggaggagaatcccgggcctactagcatggccttaccagtgaccgccttgctcctgccgctggccttgctgctccacgccgccaggccggacatcgtgctgacccagagccctctgagcctggccgtgtctctgggacagcctgccatcatcagctgtagggccagccagagcgtgtcctttgccggcacctctctgatgcactggtatcaccagaagcccggccagcagcccagactgctgatctacagagccagcaacctggaagccggcgtgcccgatagattttccggcagcggcagcaagaccgacttcaccctgaccatcagccccgtggaagccgaagatgccgccacctactactgccagcagagcagagagtacccctacaccttcggcggaggcaccaagctggaaatcaagaggggcggaggcggaagtggaggcggaggatctggcggcggaggctctcaggtccaactggtgcagagcggagccgaggtcgtgaagcctggcgcttccgtgaagattagctgcaaagccagcggctacacctttaccggctactttatgcactgggtcaagcagagccctggccagagcctggaatggatcggcagaatccacccctacgacggcgacaccttctacaaccagaagttccagggcaaggccaccctgacagtggacaagagcagcaacaccgcccacatggaactgctgagcctgaccagcgaggacttcgccgtgtactactgcaccagatacgacggcagccgggctatggactattggggccagggcaccaccgtgaccgtgtctagtacgcgtggacagcctaaggccaatcctaccgtgacactgttccctccaagcagcgaagaactccaggccaacaaggccacacttgtgtgcctgatctccgacttctaccctggggctgtgacagtggcttggaaggccgatggatctcctgtgaaagccggcgtggaaaccaccaagccatccaagcagagcaacaacaaatacgccgccagctcctacctgagcctgacacctgagcagtggaagtcccacagatcctacagctgccaagtgacccacgaaggcagcaccgtggaaaagacagtggcccctacagagtgcagcgaagtgaaaaccgactccaccgaccacgtgaagcccaaagagacagagaacaccaagcagcccagcaagagctgccacaagcccaaggccatcgtgcacaccgagaaagtgaacatgatgagcctgaccgtgctgggcctgcggatgctgttcgccaaaaccgtggccgtgaacttcctgctgaccgccaagctgttcttcctccgcgccaagagaagcggatctggcgtgaagcagaccctgaatttcgacctgctgaagctggctggcgacgtggaatccaacccaggcccttctagaggccatatgaccgagtacaagcccacggtgcgcctcgccacccgcgacgacgtccccagggccgtacgcaccctcgccgccgcgttcgccgactaccccgccacgcgccacaccgtcgatccggaccgccacatcgagcgggtcaccgagctgcaagaactcttcctcacgcgcgtcgggctcgacatcggcaaggtgtgggtcgcggacgacggcgccgcggtggcggtctggaccacgccggagagcgtcgaagcgggggcggtgttcgccgagatcggcccgcgcatggccgagttgagcggttcccggctggccgcgcagcaacagatggaaggcctcctggcgccgcaccggcccaaggagcccgcgtggttcctggccaccgtcggcgtctcgcccgaccaccagggcaagggtctgggcagcgccgtcgtgctccccggagtggaggcggccgagcgcgccggggtgcccgccttcctggagacctccgcgccccgcaacctccccttctacgagcggctcggcttcaccgtcaccgccgacgtcgaggtgcccgaaggaccgcgcacctggtgcatgacccgcaagcccggtgcctga

SEQ ID NO: 35560 - DNA, 2631 bp, synthetic construct
  source 1..2631: mol_type = other DNA
atggccttaccagtgaccgccttgctcctgccgctggccttgctgctccacgccgccaggccgctcgaggaggcctctacaaagggaccctccgtgtttcctctggctcccagcagcaagtctacaagcggaggaacagccgctctgggctgcctggtcaaggattactttcccgagcctgtgaccgtgtcctggaatagcggagcactgacaagcggcgtgcacacctttccagccgtgctgcaaagcagcggcctgtactctctgagcagcgtggtcacagtgcctagctctagcctgggcacccagacctacatctgcaatgtgaaccacaagcctagcaacaccaaggtggacaagagagtggaacccaagagctgtggcagagccgattgcggctttaccagcgagagctaccagcagggcgtgctgagcgccaccatcctgtacgagatcctgctgggcaaggccaccctgtacgccgtgctggtgtctgccctggtgctgatggctatggtcaagcggaaggacagccggggaagggccaagcgatctggatctggagcaacaaacttctcactactcaaacaagcaggtgacgtggaggagaatcccgggcctactagcatggccttaccagtgaccgccttgctcctgccgctggccttgctgctccacgccgccaggccggacatcgtgctgacccagagccctctgagcctggccgtgtctctgggacagcctgccatcatcagctgtagggccagccagagcgtgtcctttgccggcacctctctgatgcactggtatcaccagaagcccggccagcagcccagactgctgatctacagagccagcaacctggaagccggcgtgcccgatagattttccggcagcggcagcaagaccgacttcaccctgaccatcagccccgtggaagccgaagatgccgccacctactactgccagcagagcagagagtacccctacaccttcggcggaggcaccaagctggaaatcaagaggggcggaggcggaagtggaggcggaggatctggcggcggaggctctcaggtccaactggtgcagagcggagccgaggtcgtgaagcctggcgcttccgtgaagattagctgcaaagccagcggctacacctttaccggctactttatgcactgggtcaagcagagccctggccagagcctggaatggatcggcagaatccacccctacgacggcgacaccttctacaaccagaagttccagggcaaggccaccctgacagtggacaagagcagcaacaccgcccacatggaactgctgagcctgaccagcgaggacttcgccgtgtactactgcaccagatacgacggcagccgggctatggactattggggccagggcaccaccgtgaccgtgtctagtacgcgtggacagcctaaggccaatcctaccgtgacactgttccctccaagcagcgaagaactccaggccaacaaggccacacttgtgtgcctgatctccgacttctaccctggggctgtgacagtggcttggaaggccgatggatctcctgtgaaagccggcgtggaaaccaccaagccatccaagcagagcaacaacaaatacgccgccagctcctacctgagcctgacacctgagcagtggaagtcccacagatcctacagctgccaagtgacccacgaaggcagcaccgtggaaaagacagtggcccctacagagtgcagcatccccgaggacacattcttcccaagccccgagagcagctgcgacgtgaagctggtggaaaagagcttcgagacagacaccaacctgaacttccagaacctgagcgtgatcggcttcagaatcctgctgctgaaagtggccggctttaacctgctgatgaccctgcggctgtggtccagccgcgccaagagaagcggatctggcgtgaagcagaccctgaatttcgacctgctgaagctggctggcgacgtggaatccaacccaggcccttctagaggccatatgaccgagtacaagcccacggtgcgcctcgccacccgcgacgacgtccccagggccgtacgcaccctcgccgccgcgttcgccgactaccccgccacgcgccacaccgtcgatccggaccgccacatcgagcgggtcaccgagctgcaagaactcttcctcacgcgcgtcgggctcgacatcggcaaggtgtgggtcgcggacgacggcgccgcggtggcggtctggaccacgccggagagcgtcgaagcgggggcggtgttcgccgagatcggcccgcgcatggccgagttgagcggttcccggctggccgcgcagcaacagatggaaggcctcctggcgccgcaccggcccaaggagcccgcgtggttcctggccaccgtcggcgtctcgcccgaccaccagggcaagggtctgggcagcgccgtcgtgctccccggagtggaggcggccgagcgcgccggggtgcccgccttcctggagacctccgcgccccgcaacctccccttctacgagcggctcggcttcaccgtcaccgccgacgtcgaggtgcccgaaggaccgcgcacctggtgcatgacccgcaagcccggtgcctga

SEQ ID NO: 35561 - DNA, 2631 bp, synthetic construct
  source 1..2631: mol_type = other DNA
atggccttaccagtgaccgccttgctcctgccgctggccttgctgctccacgccgccaggccgctcgaggaggcctctacaaagggaccctccgtgtttcctctggctcccagcagcaagtctacaagcggaggaacagccgctctgggctgcctggtcaaggattactttcccgagcctgtgaccgtgtcctggaatagcggagcactgacaagcggcgtgcacacctttccagccgtgctgcaaagcagcggcctgtactctctgagcagcgtggtcacagtgcctagctctagcctgggcacccagacctacatctgcaatgtgaaccacaagcctagcaacaccaaggtggacaagagagtggaacccaagagctgtatccccgaggacacattcttcccaagccccgagagcagctgcgacgtgaagctggtggaaaagagcttcgagacagacaccaacctgaacttccagaacctgagcgtgatcggcttcagaatcctgctgctgaaagtggccggctttaacctgctgatgaccctgcggctgtggtccagcagggccaagcgatctggatctggagcaacaaacttctcactactcaaacaagcaggtgacgtggaggagaatcccgggcctactagcatggccttaccagtgaccgccttgctcctgccgctggccttgctgctccacgccgccaggccggacatcgtgctgacccagagccctctgagcctggccgtgtctctgggacagcctgccatcatcagctgtagggccagccagagcgtgtcctttgccggcacctctctgatgcactggtatcaccagaagcccggccagcagcccagactgctgatctacagagccagcaacctggaagccggcgtgcccgatagattttccggcagcggcagcaagaccgacttcaccctgaccatcagccccgtggaagccgaagatgccgccacctactactgccagcagagcagagagtacccctacaccttcggcggaggcaccaagctggaaatcaagaggggcggaggcggaagtggaggcggaggatctggcggcggaggctctcaggtccaactggtgcagagcggagccgaggtcgtgaagcctggcgcttccgtgaagattagctgcaaagccagcggctacacctttaccggctactttatgcactgggtcaagcagagccctggccagagcctggaatggatcggcagaatccacccctacgacggcgacaccttctacaaccagaagttccagggcaaggccaccctgacagtggacaagagcagcaacaccgcccacatggaactgctgagcctgaccagcgaggacttcgccgtgtactactgcaccagatacgacggcagccgggctatggactattggggccagggcaccaccgtgaccgtgtctagtacgcgtggacagcctaaggccaatcctaccgtgacactgttccctccaagcagcgaagaactccaggccaacaaggccacacttgtgtgcctgatctccgacttctaccctggggctgtgacagtggcttggaaggccgatggatctcctgtgaaagccggcgtggaaaccaccaagccatccaagcagagcaacaacaaatacgccgccagctcctacctgagcctgacacctgagcagtggaagtcccacagatcctacagctgccaagtgacccacgaaggcagcaccgtggaaaagacagtggcccctacagagtgcagcggcagagccgattgcggctttaccagcgagagctaccagcagggcgtgctgagcgccaccatcctgtacgagatcctgctgggcaaggccaccctgtacgccgtgctggtgtctgccctggtgctgatggctatggtcaagcggaaggacagccggggacgcgccaagagaagcggatctggcgtgaagcagaccctgaatttcgacctgctgaagctggctggcgacgtggaatccaacccaggcccttctagaggccatatgaccgagtacaagcccacggtgcgcctcgccacccgcgacgacgtccccagggccgtacgcaccctcgccgccgcgttcgccgactaccccgccacgcgccacaccgtcgatccggaccgccacatcgagcgggtcaccgagctgcaagaactcttcctcacgcgcgtcgggctcgacatcggcaaggtgtgggtcgcggacgacggcgccgcggtggcggtctggaccacgccggagagcgtcgaagcgggggcggtgttcgccgagatcggcccgcgcatggccgagttgagcggttcccggctggccgcgcagcaacagatggaaggcctcctggcgccgcaccggcccaaggagcccgcgtggttcctggccaccgtcggcgtctcgcccgaccaccagggcaagggtctgggcagcgccgtcgtgctccccggagtggaggcggccgagcgcgccggggtgcccgccttcctggagacctccgcgccccgcaacctccccttctacgagcggctcggcttcaccgtcaccgccgacgtcgaggtgcccgaaggaccgcgcacctggtgcatgacccgcaagcccggtgcctga

SEQ ID NO: 35562 - DNA, 1869 bp, synthetic construct
  source 1..1869: mol_type = other DNA
atggccttaccagtgaccgccttgctcctgccgctggccttgctgctccacgccgccaggccggacatcgtgctgacccagagccctctgagcctggccgtgtctctgggacagcctgccatcatcagctgtagggccagccagagcgtgtcctttgccggcacctctctgatgcactggtatcaccagaagcccggccagcagcccagactgctgatctacagagccagcaacctggaagccggcgtgcccgatagattttccggcagcggcagcaagaccgacttcaccctgaccatcagccccgtggaagccgaagatgccgccacctactactgccagcagagcagagagtacccctacaccttcggcggaggcaccaagctggaaatcaagaggctcgaggacctgaagaacgtgttcccacctgaggtggccgtgttcgagcctagcgaggccgagatcagccacacccagaaagccaccctcgtgtgcctggctaccggcttctaccccgaccatgtggaactgtcttggtgggtcaacggcaaagaggtgcacagcggcgtgtgtaccgacccccagccactgaaagaacagcccgccctgaacgacagccggtactgcctgagcagcagactgagagtgtccgccaccttctggcagaacccccggaaccacttcagatgccaggtgcagttctacggcctgagcgagaacgacgagtggacccaggacagagccaagcccgtgacccagatcgtgtctgccgaagcctggggcagagccgatagcggctttaccagcgagagctaccagcagggcgtgctgagcgccaccatcctgtacgagatcctgctgggcaaggccaccctgtacgccgtgctggtgtctgccctggtgctgatggctatggtcaagcggaaggacagccggggaagggccaagcgatctggatctggagcaacaaacttctcactactcaaacaagcaggtgacgtggaggagaatcccgggcctactagtatggactggatttggcgcatccttttccttgtcggcgctgctaccggcgcgcattccttcgaacaggtccaactggtgcagagcggagccgaggtcgtgaagcctggcgcttccgtgaagattagctgcaaagccagcggctacacctttaccggctactttatgcactgggtcaagcagagccctggccagagcctggaatggatcggcagaatccacccctacgacggcgacaccttctacaaccagaagttccagggcaaggccaccctgacagtggacaagagcagcaacaccgcccacatggaactgctgagcctgaccagcgaggacttcgccgtgtactactgcaccagatacgacggcagccgggctatggactattggggccagggcaccaccgtgaccgtgtctagtacgcgtatccagaaccctgatcctgccgtgtaccagctgcgggatagcaagagcagcgacaagagcgtgtgtctgttcaccgacttcgacagccagaccaacgtgtcccagagcaaggactccgacgtgtacatcaccgataagtgcgtgctggacatgcggagcatggacttcaagagcaactccgccgtggcctggtccaacaagtccgatttcgcctgcgccaacgccttcaacaacagcattatccccgaggacacattcttcccaagccccgagagcagcagcgacgtgaagctggtggaaaagagcttcgagacagacaccaacctgaacttccagaacctgagcgtgatcggcttcagaatcctgctgctgaaagtggccggctttaacctgctgatgaccctgcggctgtggtccagc

SEQ ID NO: 35563 - DNA, 2709 bp, synthetic construct
  source 1..2709: mol_type = other DNA
atggccttaccagtgaccgccttgctcctgccgctggccttgctgctccacgccgccaggccggaggttcagctgcttgagtctggcggaggactggttcaacctggcggaagcctgagactgtcttgtgccgcctctggcagaaccttcagcatgggctggtatagacaggcccctggcaagggcctcgaatttgtgtctgccatcacatacagcggcggcagcccttactacgccgattctgtgaagggcagattcaccatcagccgggacaacagcaagaacaccgtgtacctccagatgaacagcctgagagccgaggacaccgccgtgtactactgtgccgccaatccaacctacggcagcgactggaatgccgagaattggggccagggcacactggtcacagtgtctagtggtaccggcggaggcggatctggcggcggaggtagcggtggcggaggatctgaattcgacatcgtgctgacccagagccctctgagcctggccgtgtctctgggacagcctgccatcatcagctgtagggccagccagagcgtgtcctttgccggcacctctctgatgcactggtatcaccagaagcccggccagcagcccagactgctgatctacagagccagcaacctggaagccggcgtgcccgatagattttccggcagcggcagcaagaccgacttcaccctgaccatcagccccgtggaagccgaagatgccgccacctactactgccagcagagcagagagtacccctacaccttcggcggaggcaccaagctggaaatcaagaggctcgagatccagaaccctgatcctgccgtgtaccagctgcgggatagcaagagcagcgacaagagcgtgtgtctgttcaccgacttcgacagccagaccaacgtgtcccagagcaaggactccgacgtgtacatcaccgataagtgcgtgctggacatgcggagcatggacttcaagagcaactccgccgtggcctggtccaacaagtccgatttcgcctgcgccaacgccttcaacaacagcattatccccgaggacacattcttcccaagcagcgacgtgccctgcgacgtgaagctggtggaaaagagcttcgagacagacaccaacctgaacttccagaacctgagcgtgatcggcttcagaatcctgctgctgaaagtggccggctttaacctgctgatgaccctgcggctgtggtccagccgcgccaagagaagcggatctggcgtgaagcagaccctgaatttcgacctgctgaagctggctggcgacgtggaatccaacccaggccctactagtaccatggactggatttggcgcatccttttccttgtcggcgctgctaccggcacccattccgggcccgaagtgcaactggttgaatccggtggcggcctggtgcaacccggcggatctctcagacttagctgtgccgcctccggcagaaccttcacaatgggatggtacaggcaggctccagggaaagagagagagttcgtcgccgccatctctctgtctcccacactggcctactacgccgactctgtgaaaggccggttcaccatctccagagataatagcaagaacaccgtggtgctgcaaatgaactctctgagagccgaggatacagccctgtactattgtgccgctgaccggaagtccgtgatgagcatcagacccgattactggggacagggcacactggtcacagtgtctagtggatccggcggcggaggatctggcggaggcggatctgggggcggaggctctttcgaacaggtccaactggtgcagagcggagccgaggtcgtgaagcctggcgcttccgtgaagattagctgcaaagccagcggctacacctttaccggctactttatgcactgggtcaagcagagccctggccagagcctggaatggatcggcagaatccacccctacgacggcgacaccttctacaaccagaagttccagggcaaggccaccctgacagtggacaagagcagcaacaccgcccacatggaactgctgagcctgaccagcgaggacttcgccgtgtactactgcaccagatacgacggcagccgggctatggactattggggccagggcaccaccgtgaccgtgtctagtacgcgtgaggacctgaagaacgtgttcccacctgaggtggccgtgttcgagcctagcaaggccgagatcgcccacacccagaaagccaccctcgtgtgcctggctaccggcttctaccccgaccatgtggaactgtcttggtgggtcaacggcaaagaggtgcacagcggcgtgtgtaccgacccccagccactgaaagaacagcccgccctgaacgacagccggtactgcctgagcagcagactgagagtgtccgccaccttctggcagaacccccggaaccacttcagatgccaggtgcagttctacggcctgagcgagaacgacgagtggacccaggacagagccaagcccgtgacccagatcgtgtctgccgaagcctggggcagagccgattgcggcatcaccagcgccagctaccaccagggcgtgctgagcgccaccatcctgtacgagatcctgctgggcaaggccaccctgtacgccgtgctggtgtctgccctggtgctgatggctatggtcaagcggaaggacagccggggataa

SEQ ID NO: 35564 - DNA, 2709 bp, synthetic construct
  source 1..2709: mol_type = other DNA
atggccttaccagtgaccgccttgctcctgccgctggccttgctgctccacgccgccaggccggaagtgcagctggttgaatctggcggaggactggttcaggctggcggatctctgagactgtcttgtgccgccagcggcagaacctttagcatgggctggtttagacaggcccctggcaaagagagagagttcgtcgccgccatcacatactctggcggcagcccttactacgccgactctgtgaagggcagattcaccatcagccgggacaacgccaagaacaccgtgtacctccagatgaacagcctgaagcctgaggacaccgccgtgtactactgcgccgccaatccaacatacggcagcgactggaacgccgagaattggggccagggaacccaagtgacagtgtctagcggtaccggcggaggcggatctggcggcggaggtagcggtggcggaggatctgaattcgacatcgtgctgacccagagccctctgagcctggccgtgtctctgggacagcctgccatcatcagctgtagggccagccagagcgtgtcctttgccggcacctctctgatgcactggtatcaccagaagcccggccagcagcccagactgctgatctacagagccagcaacctggaagccggcgtgcccgatagattttccggcagcggcagcaagaccgacttcaccctgaccatcagccccgtggaagccgaagatgccgccacctactactgccagcagagcagagagtacccctacaccttcggcggaggcaccaagctggaaatcaagaggctcgagatccagaaccctgatcctgccgtgtaccagctgcgggatagcaagagcagcgacaagagcgtgtgtctgttcaccgacttcgacagccagaccaacgtgtcccagagcaaggactccgacgtgtacatcaccgataagtgcgtgctggacatgcggagcatggacttcaagagcaactccgccgtggcctggtccaacaagtccgatttcgcctgcgccaacgccttcaacaacagcattatccccgaggacacattcttcccaagcagcgacgtgccctgcgacgtgaagctggtggaaaagagcttcgagacagacaccaacctgaacttccagaacctgagcgtgatcggcttcagaatcctgctgctgaaagtggccggctttaacctgctgatgaccctgcggctgtggtccagccgcgccaagagaagcggatctggcgtgaagcagaccctgaatttcgacctgctgaagctggctggcgacgtggaatccaacccaggccctactagtaccatggactggatttggcgcatccttttccttgtcggcgctgctaccggcgcccattccgggcccgaagtgcaactggttgaatccggtggcggcctggtgcaacccggcggatctctcagacttagctgtgccgcctccggcagaaccttcacaatgggatggtacaggcaggctccagggaaagagagagagttcgtcgccgccatctctctgtctcccacactggcctactacgccgactctgtgaaaggccggttcaccatctccagagataatagcaagaacaccgtggtgctgcaaatgaactctctgagagccgaggatacagccctgtactattgtgccgctgaccggaagtccgtgatgagcatcagacccgattactggggacagggcacactggtcacagtgtctagtggatccggcggcggaggatctggcggaggcggatctgggggcggaggctctttcgaacaggtccaactggtgcagagcggagccgaggtcgtgaagcctggcgcttccgtgaagattagctgcaaagccagcggctacacctttaccggctactttatgcactgggtcaagcagagccctggccagagcctggaatggatcggcagaatccacccctacgacggcgacaccttctacaaccagaagttccagggcaaggccaccctgacagtggacaagagcagcaacaccgcccacatggaactgctgagcctgaccagcgaggacttcgccgtgtactactgcaccagatacgacggcagccgggctatggactattggggccagggcaccaccgtgaccgtgtctagtacgcgtgaggacctgaagaacgtgttcccacctgaggtggccgtgttcgagcctagcaaggccgagatcgcccacacccagaaagccaccctcgtgtgcctggctaccggcttctaccccgaccatgtggaactgtcttggtgggtcaacggcaaagaggtgcacagcggcgtgtgtaccgacccccagccactgaaagaacagcccgccctgaacgacagccggtactgcctgagcagcagactgagagtgtccgccaccttctggcagaacccccggaaccacttcagatgccaggtgcagttctacggcctgagcgagaacgacgagtggacccaggacagagccaagcccgtgacccagatcgtgtctgccgaagcctggggcagagccgattgcggcatcaccagcgccagctaccaccagggcgtgctgagcgccaccatcctgtacgagatcctgctgggcaaggccaccctgtacgccgtgctggtgtctgccctggtgctgatggctatggtcaagcggaaggacagccggggataa

SEQ ID NO: 35565 - DNA, 2700 bp, synthetic construct
  source 1..2700: mol_type = other DNA
atggccttaccagtgaccgccttgctcctgccgctggccttgctgctccacgccgccaggccggaagtgcagctggttgaatctggcggaggactggttcaggctggcggatctctgagactgtcttgtgccgccagcggcagaacctttagcatgggctggtttagacaggcccctggcaaagagagagagttcgtcgccgccatcacatactctggcggcagcccttactacgccgactctgtgaagggcagattcaccatcagccgggacaacgccaagaacaccgtgtacctccagatgaacagcctgaagcctgaggacaccgccgtgtactactgcgccgccaatccaacatacggcagcgactggaacgccgagaattggggccagggaacccaagtgacagtgtctagcggtaccggcggaggcggatctggcggcggaggtagcggtggcggaggatctgaattcgacatcgtgctgacccagagccctctgagcctggccgtgtctctgggacagcctgccatcatcagctgtagggccagccagagcgtgtcctttgccggcacctctctgatgcactggtatcaccagaagcccggccagcagcccagactgctgatctacagagccagcaacctggaagccggcgtgcccgatagattttccggcagcggcagcaagaccgacttcaccctgaccatcagccccgtggaagccgaagatgccgccacctactactgccagcagagcagagagtacccctacaccttcggcggaggcaccaagctggaaatcaagaggctcgaggacctgaagaacgtgttcccacctgaggtggccgtgttcgagcctagcgaggccgagatcagccacacccagaaagccaccctcgtgtgcctggctaccggcttctaccccgaccatgtggaactgtcttggtgggtcaacggcaaagaggtgcacagcggcgtgtgtaccgacccccagccactgaaagaacagcccgccctgaacgacagccggtactgcctgagcagcagactgagagtgtccgccaccttctggcagaacccccggaaccacttcagatgccaggtgcagttctacggcctgagcgagaacgacgagtggacccaggacagagccaagcccgtgacccagatcgtgtctgccgaagcctggggcagagccgattgcggctttaccagcgagagctaccagcagggcgtgctgagcgccaccatcctgtacgagatcctgctgggcaaggccaccctgtacgccgtgctggtgtctgccctggtgctgatggctatggtcaagcggaaggacagccggggaagggccaagcgatctggatctggagcaacaaacttctcactactcaaacaagcaggtgacgtggaggagaatcccgggcctactagtgccaccatggactggatttggcgcatccttttccttgtcggcgctgctaccggcgcccattccgggcccgaagtgcaactggttgaatccggtggcggcctggtgcaagcaggcggatctctcagacttagctgtgccgcctccggcagaaccttcacaatgggatggtttaggcaggctccagggaaagagagagagttcgtcgccgccatctctctgtctcccacactggcctactacgccgactctgtgaaaggccggttcaccatctccagagataatgccaagaacaccgtggtgctgcaaatgaactctctgaaacccgaggatacagccctgtactattgtgccgctgaccggaagtccgtgatgagcatcagacccgattactggggacagggcacacaagtcacagtgtcctctggatccggcggcggaggatctggcggaggcggatctgggggcggaggctctttcgaacaggtccaactggtgcagagcggagccgaggtcgtgaagcctggcgcttccgtgaagattagctgcaaagccagcggctacacctttaccggctactttatgcactgggtcaagcagagccctggccagagcctggaatggatcggcagaatccacccctacgacggcgacaccttctacaaccagaagttccagggcaaggccaccctgacagtggacaagagcagcaacaccgcccacatggaactgctgagcctgaccagcgaggacttcgccgtgtactactgcaccagatacgacggcagccgggctatggactattggggccagggcaccaccgtgaccgtgtctagtacgcgtatccagaaccctgatcctgccgtgtaccagctgcgggatagcaagagcagcgacaagagcgtgtgtctgttcaccgacttcgacagccagaccaacgtgtcccagagcaaggactccgacgtgtacatcaccgataagtgcgtgctggacatgcggagcatggacttcaagagcaactccgccgtggcctggtccaacaagtccgatttcgcctgcgccaacgccttcaacaacagcattatccccgaggacacattcttcccaagccccgagagcagctgcgacgtgaagctggtggaaaagagcttcgagacagacaccaacctgaacttccagaacctgagcgtgatcggcttcagaatcctgctgctgaaagtggccggctttaacctgctgatgaccctgcggctgtggtccagctaa

SEQ ID NO: 35566 - DNA, 2313 bp, synthetic construct
  source 1..2313: mol_type = other DNA
atggccttaccagtgaccgccttgctcctgccgctggccttgctgctccacgccgccaggccggaagtgcagctggttgaatctggcggaggactggttcagcctggcggatctctgagactgagctgtgaagccagcggcttcgccagcgacgattacatcatcggctggttcagacaggcccctggcaaagagagagagggcgtcagctgcatcagctctaagtacgccaacaccgtgtacaccgacagcgtgaagggcagattcagactgagcagaggcaccgccaagaataccgtgtacctccagatgagcgccctgaagcctgaggataccgccgtgtactactgcgctatggacagccgcagagtgacatgccctgagatcagcaccatgcaccggaacttcgattcttggggccagggcacactggtcacagtgtcatctggtaccggcggaggcggatctggcggcggaggtagcggtggcggaggatctgaattcgacatcgtgctgacccagagccctctgagcctggccgtgtctctgggacagcctgccatcatcagctgtagggccagccagagcgtgtcctttgccggcacctctctgatgcactggtatcaccagaagcccggccagcagcccagactgctgatctacagagccagcaacctggaagccggcgtgcccgatagattttccggcagcggcagcaagaccgacttcaccctgaccatcagccccgtggaagccgaagatgccgccacctactactgccagcagagcagagagtacccctacaccttcggcggaggcaccaagctggaaatcaagaggctcgaggacctgaagaacgtgttcccacctgaggtggccgtgttcgagcctagcaaggccgagatcgcccacacccagaaagccaccctcgtgtgcctggctaccggcttctaccccgaccatgtggaactgtcttggtgggtcaacggcaaagaggtgcacagcggcgtgtgtaccgacccccagccactgaaagaacagcccgccctgaacgacagccggtactgcctgagcagcagactgagagtgtccgccaccttctggcagaacccccggaaccacttcagatgccaggtgcagttctacggcctgagcgagaacgacgagtggacccaggacagagccaagcccgtgacccagatcgtgtctgccgaagcctggggcagagccgattgcggcatcaccagcgccagctaccaccagggcgtgctgagcgccaccatcctgtacgagatcctgctgggcaaggccaccctgtacgccgtgctggtgtctgccctggtgctgatggctatggtcaagcggaaggacagccggggaagggccaagcgatctggatctggagcaacaaacttctcactactcaaacaagcaggtgacgtggaggagaatcccgggcctactagtatggactggatttggcgcatccttttccttgtcggcgctgctaccggcgcgcattccttcgaacaggtccaactggtgcagagcggagccgaggtcgtgaagcctggcgcttccgtgaagattagctgcaaagccagcggctacacctttaccggctactttatgcactgggtcaagcagagccctggccagagcctggaatggatcggcagaatccacccctacgacggcgacaccttctacaaccagaagttccagggcaaggccaccctgacagtggacaagagcagcaacaccgcccacatggaactgctgagcctgaccagcgaggacttcgccgtgtactactgcaccagatacgacggcagccgggctatggactattggggccagggcaccaccgtgaccgtgtctagtacgcgtatccagaaccctgatcctgccgtgtaccagctgcgggatagcaagagcagcgacaagagcgtgtgtctgttcaccgacttcgacagccagaccaacgtgtcccagagcaaggactccgacgtgtacatcaccgataagtgcgtgctggacatgcggagcatggacttcaagagcaactccgccgtggcctggtccaacaagtccgatttcgcctgcgccaacgccttcaacaacagcattatccccgaggacacattcttcccaagcagcgacgtgccctgcgacgtgaagctggtggaaaagagcttcgagacagacaccaacctgaacttccagaacctgagcgtgatcggcttcagaatcctgctgctgaaagtggccggctttaacctgctgatgaccctgcggctgtggtccagctaa

SEQ ID NO: 35567 - DNA, 2286 bp, synthetic construct
  source 1..2286: mol_type = other DNA
atggccttaccagtgaccgccttgctcctgccgctggccttgctgctccacgccgccaggccggacatcgtgctgacccagagccctctgagcctggccgtgtctctgggacagcctgccatcatcagctgtagggccagccagagcgtgtcctttgccggcacctctctgatgcactggtatcaccagaagcccggccagcagcccagactgctgatctacagagccagcaacctggaagccggcgtgcccgatagattttccggcagcggcagcaagaccgacttcaccctgaccatcagccccgtggaagccgaagatgccgccacctactactgccagcagagcagagagtacccctacaccttcggcggaggcaccaagctggaaatcaagaggctcgaggacctgaagaacgtgttcccacctgaggtggccgtgttcgagcctagcgaggccgagatcagccacacccagaaagccaccctcgtgtgcctggctaccggcttctaccccgaccatgtggaactgtcttggtgggtcaacggcaaagaggtgcacagcggcgtgtgtaccgacccccagccactgaaagaacagcccgccctgaacgacagccggtactgcctgagcagcagactgagagtgtccgccaccttctggcagaacccccggaaccacttcagatgccaggtgcagttctacggcctgagcgagaacgacgagtggacccaggacagagccaagcccgtgacccagatcgtgtctgccgaagcctggggcagagccgattgcggctttaccagcgagagctaccagcagggcgtgctgagcgccaccatcctgtacgagatcctgctgggcaaggccaccctgtacgccgtgctggtgtctgccctggtgctgatggctatggtcaagcggaaggacagccggggaagggccaagcgatctggatctggagcaacaaacttctcactactcaaacaagcaggtgacgtggaggagaatcccgggcctactagtaccatggactggatttggcgcatccttttccttgtcggcgctgctaccggcgcccattccgggcccgaagtgcaactggttgaatccggtggcggcctggtgcaacccggcggatctctcagacttagctgtgccgcctccggcagaaccttcacaatgggatggtacaggcaggctccagggaaagagagagagttcgtcgccgccatctctctgtctcccacactggcctactacgccgactctgtgaaaggccggttcaccatctccagagataatagcaagaacaccgtggtgctgcaaatgaactctctgagagccgaggatacagccctgtactattgtgccgctgaccggaagtccgtgatgagcatcagacccgattactggggacagggcacactggtcacagtgtctagtggatccggcggcggaggatctggcggaggcggatctgggggcggaggctctttcgaacaggtccaactggtgcagagcggagccgaggtcgtgaagcctggcgcttccgtgaagattagctgcaaagccagcggctacacctttaccggctactttatgcactgggtcaagcagagccctggccagagcctggaatggatcggcagaatccacccctacgacggcgacaccttctacaaccagaagttccagggcaaggccaccctgacagtggacaagagcagcaacaccgcccacatggaactgctgagcctgaccagcgaggacttcgccgtgtactactgcaccagatacgacggcagccgggctatggactattggggccagggcaccaccgtgaccgtgtctagtacgcgtatccagaaccctgatcctgccgtgtaccagctgcgggatagcaagagcagcgacaagagcgtgtgtctgttcaccgacttcgacagccagaccaacgtgtcccagagcaaggactccgacgtgtacatcaccgataagtgcgtgctggacatgcggagcatggacttcaagagcaactccgccgtggcctggtccaacaagtccgatttcgcctgcgccaacgccttcaacaacagcattatccccgaggacacattcttcccaagccccgagagcagctgcgacgtgaagctggtggaaaagagcttcgagacagacaccaacctgaacttccagaacctgagcgtgatcggcttcagaatcctgctgctgaaagtggccggctttaacctgctgatgaccctgcggctgtggtccagctaa

SEQ ID NO: 35568 - DNA, 2304 bp, synthetic construct
  source 1..2304: mol_type = other DNA
atggccttaccagtgaccgccttgctcctgccgctggccttgctgctccacgccgccaggccggacatcgtgctgacccagagccctctgagcctggccgtgtctctgggacagcctgccatcatcagctgtagggccagccagagcgtgtcctttgccggcacctctctgatgcactggtatcaccagaagcccggccagcagcccagactgctgatctacagagccagcaacctggaagccggcgtgcccgatagattttccggcagcggcagcaagaccgacttcaccctgaccatcagccccgtggaagccgaagatgccgccacctactactgccagcagagcagagagtacccctacaccttcggcggaggcaccaagctggaaatcaagaggctcgaggacctgaagaacgtgttcccacctgaggtggccgtgttcgagcctagcgaggccgagatcagccacacccagaaagccaccctcgtgtgcctggctaccggcttctaccccgaccatgtggaactgtcttggtgggtcaacggcaaagaggtgcacagcggcgtgtgtaccgacccccagccactgaaagaacagcccgccctgaacgacagccggtactgcctgagcagcagactgagagtgtccgccaccttctggcagaacccccggaaccacttcagatgccaggtgcagttctacggcctgagcgagaacgacgagtggacccaggacagagccaagcccgtgacccagatcgtgtctgccgaagcctggggcagagccgattgcggctttaccagcgagagctaccagcagggcgtgctgagcgccaccatcctgtacgagatcctgctgggcaaggccaccctgtacgccgtgctggtgtctgccctggtgctgatggctatggtcaagcggaaggacagccggggaagggccaagcgatctggatctggagcaacaaacttctcactactcaaacaagcaggtgacgtggaggagaatcccgggcctactagtaccatggactggatttggcgcatccttttccttgtcggcgctgctaccggcgcccattccgggccccaggtgcagctggttgaatctggcggaggactggttcagcctggcggatctctgagactgtcttgtgccgccagcggcaacatcaacagcagaaactgcatgggctggttcagacaggcccctggcaagggaagagaaggcgtggcagctatcggccaagtgaccggcagaacctactacgtggacagcgtgaagggcagattcaccatcagcctggacaacagcaagaacaccctgtacctccagatgaacagcctgagagccgaggacaccgccgtgtactattgtgctgctgcccctggctgtctgctgtctgcacttagaagcgccgactacagaaactggggccagggcacactggtcaccgtttcttctggatccggcggcggaggatctggcggaggcggatctgggggcggaggctctttcgaacaggtccaactggtgcagagcggagccgaggtcgtgaagcctggcgcttccgtgaagattagctgcaaagccagcggctacacctttaccggctactttatgcactgggtcaagcagagccctggccagagcctggaatggatcggcagaatccacccctacgacggcgacaccttctacaaccagaagttccagggcaaggccaccctgacagtggacaagagcagcaacaccgcccacatggaactgctgagcctgaccagcgaggacttcgccgtgtactactgcaccagatacgacggcagccgggctatggactattggggccagggcaccaccgtgaccgtgtctagtacgcgtatccagaaccctgatcctgccgtgtaccagctgcgggatagcaagagcagcgacaagagcgtgtgtctgttcaccgacttcgacagccagaccaacgtgtcccagagcaaggactccgacgtgtacatcaccgataagtgcgtgctggacatgcggagcatggacttcaagagcaactccgccgtggcctggtccaacaagtccgatttcgcctgcgccaacgccttcaacaacagcattatccccgaggacacattcttcccaagccccgagagcagctgcgacgtgaagctggtggaaaagagcttcgagacagacaccaacctgaacttccagaacctgagcgtgatcggcttcagaatcctgctgctgaaagtggccggctttaacctgctgatgaccctgcggctgtggtccagc

SEQ ID NO: 35569 - DNA, 2307 bp, synthetic construct
  source 1..2307: mol_type = other DNA
atggccttaccagtgaccgccttgctcctgccgctggccttgctgctccacgccgccaggccggacatcgtgctgacccagagccctctgagcctggccgtgtctctgggacagcctgccatcatcagctgtagggccagccagagcgtgtcctttgccggcacctctctgatgcactggtatcaccagaagcccggccagcagcccagactgctgatctacagagccagcaacctggaagccggcgtgcccgatagattttccggcagcggcagcaagaccgacttcaccctgaccatcagccccgtggaagccgaagatgccgccacctactactgccagcagagcagagagtacccctacaccttcggcggaggcaccaagctggaaatcaagaggctcgaggacctgaagaacgtgttcccacctgaggtggccgtgttcgagcctagcgaggccgagatcagccacacccagaaagccaccctcgtgtgcctggctaccggcttctaccccgaccatgtggaactgtcttggtgggtcaacggcaaagaggtgcacagcggcgtgtgtaccgacccccagccactgaaagaacagcccgccctgaacgacagccggtactgcctgagcagcagactgagagtgtccgccaccttctggcagaacccccggaaccacttcagatgccaggtgcagttctacggcctgagcgagaacgacgagtggacccaggacagagccaagcccgtgacccagatcgtgtctgccgaagcctggggcagagccgattgcggctttaccagcgagagctaccagcagggcgtgctgagcgccaccatcctgtacgagatcctgctgggcaaggccaccctgtacgccgtgctggtgtctgccctggtgctgatggctatggtcaagcggaaggacagccggggaagggccaagcgatctggatctggagcaacaaacttctcactactcaaacaagcaggtgacgtggaggagaatcccgggcctactagtaccatggactggatttggcgcatccttttccttgtcggcgctgctaccggcgcccattccgggccccaggtgcagctggttgaatctggcggaggatctgttcaggctggcggctctctgagactgtcttgtggcgcttccggcaacatcagcagcagaaactgcatgggctggttcagacaggcccctggcaaagagagagaaggcgttgccgccatcggacaagtgaccggcagatcctactacgtggacagcgtgaagggcagattcaccatcagcctggacaacgccaagaacaccctgtacctccagatgaacacactgaagcccgaggacaccgccatgtactactgtgctgctgcccctggctgtctgctgtctgcacttagaagcgccgactacagaaactggggccagggaacccaagtgacagtgtctagtggatccggcggcggaggatctggcggaggcggatctgggggcggaggctctttcgaacaggtccaactggtgcagagcggagccgaggtcgtgaagcctggcgcttccgtgaagattagctgcaaagccagcggctacacctttaccggctactttatgcactgggtcaagcagagccctggccagagcctggaatggatcggcagaatccacccctacgacggcgacaccttctacaaccagaagttccagggcaaggccaccctgacagtggacaagagcagcaacaccgcccacatggaactgctgagcctgaccagcgaggacttcgccgtgtactactgcaccagatacgacggcagccgggctatggactattggggccagggcaccaccgtgaccgtgtctagtacgcgtatccagaaccctgatcctgccgtgtaccagctgcgggatagcaagagcagcgacaagagcgtgtgtctgttcaccgacttcgacagccagaccaacgtgtcccagagcaaggactccgacgtgtacatcaccgataagtgcgtgctggacatgcggagcatggacttcaagagcaactccgccgtggcctggtccaacaagtccgatttcgcctgcgccaacgccttcaacaacagcattatccccgaggacacattcttcccaagccccgagagcagctgcgacgtgaagctggtggaaaagagcttcgagacagacaccaacctgaacttccagaacctgagcgtgatcggcttcagaatcctgctgctgaaagtggccggctttaacctgctgatgaccctgcggctgtggtccagctaa

SEQ ID NO: 35570 - DNA, 2730 bp, synthetic construct
  source 1..2730: mol_type = other DNA
atggccttaccagtgaccgccttgctcctgccgctggccttgctgctccacgccgccaggccggaagtgcagctggttgaatctggcggaggactggttcaggctggcggatctctgagactgtcttgtgccgccagcggcagaacctttagcatgggctggtttagacaggcccctggcaaagagagagagttcgtcgccgccatcacatactctggcggcagcccttactacgccgactctgtgaagggcagattcaccatcagccgggacaacgccaagaacaccgtgtacctccagatgaacagcctgaagcctgaggacaccgccgtgtactactgcgccgccaatccaacatacggcagcgactggaacgccgagaattggggccagggaacccaagtgacagtgtctagcggtaccggcggaggcggatctggcggcggaggtagcggtggcggaggatctgaattcgacatcgtgctgacccagagccctctgagcctggccgtgtctctgggacagcctgccatcatcagctgtagggccagccagagcgtgtcctttgccggcacctctctgatgcactggtatcaccagaagcccggccagcagcccagactgctgatctacagagccagcaacctggaagccggcgtgcccgatagattttccggcagcggcagcaagaccgacttcaccctgaccatcagccccgtggaagccgaagatgccgccacctactactgccagcagagcagagagtacccctacaccttcggcggaggcaccaagctggaaatcaagaggctcgagatccagaaccctgatcctgccgtgtaccagctgcgggatagcaagagcagcgacaagagcgtgtgtctgttcaccgacttcgacagccagaccaacgtgtcccagagcaaggactccgacgtgtacatcaccgataagtgcgtgctggacatgcggagcatggacttcaagagcaactccgccgtggcctggtccaacaagtccgatttcgcctgcgccaacgccttcaacaacagcattatccccgaggacacattcttcccaagcagcgacgtgccctgcgacgtgaagctggtggaaaagagcttcgagacagacaccaacctgaacttccagaacctgagcgtgatcggcttcagaatcctgctgctgaaagtggccggctttaacctgctgatgaccctgcggctgtggtccagccgcgccaagagaagcggatctggcgtgaagcagaccctgaatttcgacctgctgaagctggctggcgacgtggaatccaacccaggccctactagtaccatggactggatttggcgcatccttttccttgtcggcgctgctaccggcgcccattccgggccccaggtgcagctggttgaatctggcggaggatctgttcaggctggcggctctctgagactgtcttgtggcgcttccggcaacatcagcagcagaaactgcatgggctggttcagacaggcccctggcaaagagagagaaggcgttgccgccatcggacaagtgaccggcagatcctactacgtggacagcgtgaagggcagattcaccatcagcctggacaacgccaagaacaccctgtacctccagatgaacacactgaagcccgaggacaccgccatgtactactgtgctgctgcccctggctgtctgctgtctgcacttagaagcgccgactacagaaactggggccagggaacccaagtgacagtgtctagtggatccggcggcggaggatctggcggaggcggatctgggggcggaggctctttcgaacaggtccaactggtgcagagcggagccgaggtcgtgaagcctggcgcttccgtgaagattagctgcaaagccagcggctacacctttaccggctactttatgcactgggtcaagcagagccctggccagagcctggaatggatcggcagaatccacccctacgacggcgacaccttctacaaccagaagttccagggcaaggccaccctgacagtggacaagagcagcaacaccgcccacatggaactgctgagcctgaccagcgaggacttcgccgtgtactactgcaccagatacgacggcagccgggctatggactattggggccagggcaccaccgtgaccgtgtctagtacgcgtgaggacctgaagaacgtgttcccacctgaggtggccgtgttcgagcctagcaaggccgagatcgcccacacccagaaagccaccctcgtgtgcctggctaccggcttctaccccgaccatgtggaactgtcttggtgggtcaacggcaaagaggtgcacagcggcgtgtgtaccgacccccagccactgaaagaacagcccgccctgaacgacagccggtactgcctgagcagcagactgagagtgtccgccaccttctggcagaacccccggaaccacttcagatgccaggtgcagttctacggcctgagcgagaacgacgagtggacccaggacagagccaagcccgtgacccagatcgtgtctgccgaagcctggggcagagccgattgcggcatcaccagcgccagctaccaccagggcgtgctgagcgccaccatcctgtacgagatcctgctgggcaaggccaccctgtacgccgtgctggtgtctgccctggtgctgatggctatggtcaagcggaaggacagccggggataa

SEQ ID NO: 35571 - DNA, 2721 bp, synthetic construct
  source 1..2721: mol_type = other DNA
atggccttaccagtgaccgccttgctcctgccgctggccttgctgctccacgccgccaggccgcaggtgcagctggttgaatctggcggaggatctgttcaggctggcggctctctgagactgtcttgtggcgcttccggcaacatcagcagcagaaactgcatgggctggttcagacaggcccctggcaaagagagagaaggcgttgccgccatcggacaagtgaccggcagatcctactacgtggacagcgtgaagggcagattcaccatcagcctggacaacgccaagaacaccctgtacctccagatgaacacactgaagcccgaggacaccgccatgtactactgtgctgctgcccctggctgtctgctgtctgcacttagaagcgccgactacagaaactggggccagggaacccaagtgacagtgtctagtggtaccggcggaggcggatctggcggcggaggtagcggtggcggaggatctgaattcgacatcgtgctgacccagagccctctgagcctggccgtgtctctgggacagcctgccatcatcagctgtagggccagccagagcgtgtcctttgccggcacctctctgatgcactggtatcaccagaagcccggccagcagcccagactgctgatctacagagccagcaacctggaagccggcgtgcccgatagattttccggcagcggcagcaagaccgacttcaccctgaccatcagccccgtggaagccgaagatgccgccacctactactgccagcagagcagagagtacccctacaccttcggcggaggcaccaagctggaaatcaagaggctcgaggacctgaagaacgtgttcccacctgaggtggccgtgttcgagcctagcgaggccgagatcagccacacccagaaagccaccctcgtgtgcctggctaccggcttctaccccgaccatgtggaactgtcttggtgggtcaacggcaaagaggtgcacagcggcgtgtgtaccgacccccagccactgaaagaacagcccgccctgaacgacagccggtactgcctgagcagcagactgagagtgtccgccaccttctggcagaacccccggaaccacttcagatgccaggtgcagttctacggcctgagcgagaacgacgagtggacccaggacagagccaagcccgtgacccagatcgtgtctgccgaagcctggggcagagccgattgcggctttaccagcgagagctaccagcagggcgtgctgagcgccaccatcctgtacgagatcctgctgggcaaggccaccctgtacgccgtgctggtgtctgccctggtgctgatggctatggtcaagcggaaggacagccggggaagggccaagcgatctggatctggagcaacaaacttctcactactcaaacaagcaggtgacgtggaggagaatcccgggcctactagtgccaccatggactggatttggcgcatccttttccttgtcggcgctgctaccggcgcccattccgggcccgaagtgcaactggttgaatccggtggcggcctggtgcaagcaggcggatctctcagacttagctgtgccgcctccggcagaaccttcacaatgggatggtttaggcaggctccagggaaagagagagagttcgtcgccgccatctctctgtctcccacactggcctactacgccgactctgtgaaaggccggttcaccatctccagagataatgccaagaacaccgtggtgctgcaaatgaactctctgaaacccgaggatacagccctgtactattgtgccgctgaccggaagtccgtgatgagcatcagacccgattactggggacagggcacacaagtcacagtgtcctctggatccggcggcggaggatctggcggaggcggatctgggggcggaggctctttcgaacaggtccaactggtgcagagcggagccgaggtcgtgaagcctggcgcttccgtgaagattagctgcaaagccagcggctacacctttaccggctactttatgcactgggtcaagcagagccctggccagagcctggaatggatcggcagaatccacccctacgacggcgacaccttctacaaccagaagttccagggcaaggccaccctgacagtggacaagagcagcaacaccgcccacatggaactgctgagcctgaccagcgaggacttcgccgtgtactactgcaccagatacgacggcagccgggctatggactattggggccagggcaccaccgtgaccgtgtctagtacgcgtatccagaaccctgatcctgccgtgtaccagctgcgggatagcaagagcagcgacaagagcgtgtgtctgttcaccgacttcgacagccagaccaacgtgtcccagagcaaggactccgacgtgtacatcaccgataagtgcgtgctggacatgcggagcatggacttcaagagcaactccgccgtggcctggtccaacaagtccgatttcgcctgcgccaacgccttcaacaacagcattatccccgaggacacattcttcccaagccccgagagcagctgcgacgtgaagctggtggaaaagagcttcgagacagacaccaacctgaacttccagaacctgagcgtgatcggcttcagaatcctgctgctgaaagtggccggctttaacctgctgatgaccctgcggctgtggtccagctaa

SEQ ID NO: 35572 - DNA, 2310 bp, synthetic construct
  source 1..2310: mol_type = other DNA
atggccttaccagtgaccgccttgctcctgccgctggccttgctgctccacgccgccaggccgcaggtgcagctggttgaatctggcggaggatctgttcaggctggcggctctctgagactgtcttgtggcgcttccggcaacatcagcagcagaaactgcatgggctggttcagacaggcccctggcaaagagagagaaggcgttgccgccatcggacaagtgaccggcagatcctactacgtggacagcgtgaagggcagattcaccatcagcctggacaacgccaagaacaccctgtacctccagatgaacacactgaagcccgaggacaccgccatgtactactgtgctgctgcccctggctgtctgctgtctgcacttagaagcgccgactacagaaactggggccagggaacccaagtgacagtgtctagtggtaccggcggaggcggatctggcggcggaggtagcggtggcggaggatctgaattcgacatcgtgctgacccagagccctctgagcctggccgtgtctctgggacagcctgccatcatcagctgtagggccagccagagcgtgtcctttgccggcacctctctgatgcactggtatcaccagaagcccggccagcagcccagactgctgatctacagagccagcaacctggaagccggcgtgcccgatagattttccggcagcggcagcaagaccgacttcaccctgaccatcagccccgtggaagccgaagatgccgccacctactactgccagcagagcagagagtacccctacaccttcggcggaggcaccaagctggaaatcaagaggctcgaggacctgaagaacgtgttcccacctgaggtggccgtgttcgagcctagcgaggccgagatcagccacacccagaaagccaccctcgtgtgcctggctaccggcttctaccccgaccatgtggaactgtcttggtgggtcaacggcaaagaggtgcacagcggcgtgtgtaccgacccccagccactgaaagaacagcccgccctgaacgacagccggtactgcctgagcagcagactgagagtgtccgccaccttctggcagaacccccggaaccacttcagatgccaggtgcagttctacggcctgagcgagaacgacgagtggacccaggacagagccaagcccgtgacccagatcgtgtctgccgaagcctggggcagagccgattgcggctttaccagcgagagctaccagcagggcgtgctgagcgccaccatcctgtacgagatcctgctgggcaaggccaccctgtacgccgtgctggtgtctgccctggtgctgatggctatggtcaagcggaaggacagccggggaagggccaagcgatctggatctggagcaacaaacttctcactactcaaacaagcaggtgacgtggaggagaatcccgggcctactagtgccaccatggactggatttggcgcatccttttccttgtcggcgctgctaccggcgcccattccttcgaacaggtccaactggtgcagagcggagccgaggtcgtgaagcctggcgcttccgtgaagattagctgcaaagccagcggctacacctttaccggctactttatgcactgggtcaagcagagccctggccagagcctggaatggatcggcagaatccacccctacgacggcgacaccttctacaaccagaagttccagggcaaggccaccctgacagtggacaagagcagcaacaccgcccacatggaactgctgagcctgaccagcgaggacttcgccgtgtactactgcaccagatacgacggcagccgggctatggactattggggccagggcaccaccgtgaccgtgtctagtacgcgtatccagaaccctgatcctgccgtgtaccagctgcgggatagcaagagcagcgacaagagcgtgtgtctgttcaccgacttcgacagccagaccaacgtgtcccagagcaaggactccgacgtgtacatcaccgataagtgcgtgctggacatgcggagcatggacttcaagagcaactccgccgtggcctggtccaacaagtccgatttcgcctgcgccaacgccttcaacaacagcattatccccgaggacacattcttcccaagccccgagagcagctgcgacgtgaagctggtggaaaagagcttcgagacagacaccaacctgaacttccagaacctgagcgtgatcggcttcagaatcctgctgctgaaagtggccggctttaacctgctgatgaccctgcggctgtggtccagctaa

SEQ ID NO: 35573 - DNA, 2310 bp, synthetic construct
  source 1..2310: mol_type = other DNA
atggccttaccagtgaccgccttgctcctgccgctggccttgctgctccacgccgccaggccgcaagttcagctggtggaaagcggtggtggcgttgtgcaacctggtggaagtctgaggctgagctgtgccgcttctggcctgagctttagcacctacactgtggcctggttcaggcaggctcccggaaagggtcttgaaggcgtggccgccattccttacaccagccagcacatggtgtacacagacagcgtcagaggccggttcaccatcagcagagacaactccaagaatacgctctatctccagatgaactctctgcgcgccgaagatacagccgtgtattactgcgccaccgacagacggcctggcacctctatgctggctatcaacggctacaacagatggggacagggaaccaccgtgaccgtgtcatctggtaccggcggaggcggatctggcggcggaggtagcggtggcggaggatctgaattcgacatcgtgctgacccagagccctctgagcctggccgtgtctctgggacagcctgccatcatcagctgtagggccagccagagcgtgtcctttgccggcacctctctgatgcactggtatcaccagaagcccggccagcagcccagactgctgatctacagagccagcaacctggaagccggcgtgcccgatagattttccggcagcggcagcaagaccgacttcaccctgaccatcagccccgtggaagccgaagatgccgccacctactactgccagcagagcagagagtacccctacaccttcggcggaggcaccaagctggaaatcaagaggctcgaggacctgaagaacgtgttcccacctgaggtggccgtgttcgagcctagcgaggccgagatcagccacacccagaaagccaccctcgtgtgcctggctaccggcttctaccccgaccatgtggaactgtcttggtgggtcaacggcaaagaggtgcacagcggcgtgtgtaccgacccccagccactgaaagaacagcccgccctgaacgacagccggtactgcctgagcagcagactgagagtgtccgccaccttctggcagaacccccggaaccacttcagatgccaggtgcagttctacggcctgagcgagaacgacgagtggacccaggacagagccaagcccgtgacccagatcgtgtctgccgaagcctggggcagagccgattgcggctttaccagcgagagctaccagcagggcgtgctgagcgccaccatcctgtacgagatcctgctgggcaaggccaccctgtacgccgtgctggtgtctgccctggtgctgatggctatggtcaagcggaaggacagccggggaagggccaagcgatctggatctggagcaacaaacttctcactactcaaacaagcaggtgacgtggaggagaatcccgggcctactagtgccaccatggactggatttggcgcatccttttccttgtcggcgctgctaccggcgcccattccttcgaacaggtccaactggtgcagagcggagccgaggtcgtgaagcctggcgcttccgtgaagattagctgcaaagccagcggctacacctttaccggctactttatgcactgggtcaagcagagccctggccagagcctggaatggatcggcagaatccacccctacgacggcgacaccttctacaaccagaagttccagggcaaggccaccctgacagtggacaagagcagcaacaccgcccacatggaactgctgagcctgaccagcgaggacttcgccgtgtactactgcaccagatacgacggcagccgggctatggactattggggccagggcaccaccgtgaccgtgtctagtacgcgtatccagaaccctgatcctgccgtgtaccagctgcgggatagcaagagcagcgacaagagcgtgtgtctgttcaccgacttcgacagccagaccaacgtgtcccagagcaaggactccgacgtgtacatcaccgataagtgcgtgctggacatgcggagcatggacttcaagagcaactccgccgtggcctggtccaacaagtccgatttcgcctgcgccaacgccttcaacaacagcattatccccgaggacacattcttcccaagccccgagagcagctgcgacgtgaagctggtggaaaagagcttcgagacagacaccaacctgaacttccagaacctgagcgtgatcggcttcagaatcctgctgctgaaagtggccggctttaacctgctgatgaccctgcggctgtggtccagctaa

SEQ ID NO: 35574 - DNA, 2307 bp, synthetic construct
  source 1..2307: mol_type = other DNA
atggccttaccagtgaccgccttgctcctgccgctggccttgctgctccacgccgccaggccggacatcgtgctgacccagagccctctgagcctggccgtgtctctgggacagcctgccatcatcagctgtagggccagccagagcgtgtcctttgccggcacctctctgatgcactggtatcaccagaagcccggccagcagcccagactgctgatctacagagccagcaacctggaagccggcgtgcccgatagattttccggcagcggcagcaagaccgacttcaccctgaccatcagccccgtggaagccgaagatgccgccacctactactgccagcagagcagagagtacccctacaccttcggcggaggcaccaagctggaaatcaagaggctcgaggacctgaagaacgtgttcccacctgaggtggccgtgttcgagcctagcgaggccgagatcagccacacccagaaagccaccctcgtgtgcctggctaccggcttctaccccgaccatgtggaactgtcttggtgggtcaacggcaaagaggtgcacagcggcgtgtgtaccgacccccagccactgaaagaacagcccgccctgaacgacagccggtactgcctgagcagcagactgagagtgtccgccaccttctggcagaacccccggaaccacttcagatgccaggtgcagttctacggcctgagcgagaacgacgagtggacccaggacagagccaagcccgtgacccagatcgtgtctgccgaagcctggggcagagccgattgcggctttaccagcgagagctaccagcagggcgtgctgagcgccaccatcctgtacgagatcctgctgggcaaggccaccctgtacgccgtgctggtgtctgccctggtgctgatggctatggtcaagcggaaggacagccggggaagggccaagcgatctggatctggagcaacaaacttctcactactcaaacaagcaggtgacgtggaggagaatcccgggcctactagtaccatggactggatttggcgcatccttttccttgtcggcgctgctaccggcgcccattccgggccccaagttcagctggtggaaagcggtggtggcgttgtgcaacctggtggaagtctgaggctgagctgtgccgcttctggcctgagctttagcacctacactgtggcctggttcaggcaggctcccggaaagggtcttgaaggcgtggccgccattccttacaccagccagcacatggtgtacacagacagcgtcagaggccggttcaccatcagcagagacaactccaagaatacgctctatctccagatgaactctctgcgcgccgaagatacagccgtgtattactgcgccaccgacagacggcctggcacctctatgctggctatcaacggctacaacagatggggacagggaaccaccgtgaccgtgtcatctggatccggcggcggaggatctggcggaggcggatctgggggcggaggctctttcgaacaggtccaactggtgcagagcggagccgaggtcgtgaagcctggcgcttccgtgaagattagctgcaaagccagcggctacacctttaccggctactttatgcactgggtcaagcagagccctggccagagcctggaatggatcggcagaatccacccctacgacggcgacaccttctacaaccagaagttccagggcaaggccaccctgacagtggacaagagcagcaacaccgcccacatggaactgctgagcctgaccagcgaggacttcgccgtgtactactgcaccagatacgacggcagccgggctatggactattggggccagggcaccaccgtgaccgtgtctagtacgcgtatccagaaccctgatcctgccgtgtaccagctgcgggatagcaagagcagcgacaagagcgtgtgtctgttcaccgacttcgacagccagaccaacgtgtcccagagcaaggactccgacgtgtacatcaccgataagtgcgtgctggacatgcggagcatggacttcaagagcaactccgccgtggcctggtccaacaagtccgatttcgcctgcgccaacgccttcaacaacagcattatccccgaggacacattcttcccaagccccgagagcagctgcgacgtgaagctggtggaaaagagcttcgagacagacaccaacctgaacttccagaacctgagcgtgatcggcttcagaatcctgctgctgaaagtggccggctttaacctgctgatgaccctgcggctgtggtccagctaa

SEQ ID NO: 35575 - DNA, 2313 bp, synthetic construct
  source 1..2313: mol_type = other DNA
atggccttaccagtgaccgccttgctcctgccgctggccttgctgctccacgccgccaggccggacatcgtgctgacccagagccctctgagcctggccgtgtctctgggacagcctgccatcatcagctgtagggccagccagagcgtgtcctttgccggcacctctctgatgcactggtatcaccagaagcccggccagcagcccagactgctgatctacagagccagcaacctggaagccggcgtgcccgatagattttccggcagcggcagcaagaccgacttcaccctgaccatcagccccgtggaagccgaagatgccgccacctactactgccagcagagcagagagtacccctacaccttcggcggaggcaccaagctggaaatcaagaggctcgaggacctgaagaacgtgttcccacctgaggtggccgtgttcgagcctagcgaggccgagatcagccacacccagaaagccaccctcgtgtgcctggctaccggcttctaccccgaccatgtggaactgtcttggtgggtcaacggcaaagaggtgcacagcggcgtgtgtaccgacccccagccactgaaagaacagcccgccctgaacgacagccggtactgcctgagcagcagactgagagtgtccgccaccttctggcagaacccccggaaccacttcagatgccaggtgcagttctacggcctgagcgagaacgacgagtggacccaggacagagccaagcccgtgacccagatcgtgtctgccgaagcctggggcagagccgattgcggctttaccagcgagagctaccagcagggcgtgctgagcgccaccatcctgtacgagatcctgctgggcaaggccaccctgtacgccgtgctggtgtctgccctggtgctgatggctatggtcaagcggaaggacagccggggaagggccaagcgatctggatctggagcaacaaacttctcactactcaaacaagcaggtgacgtggaggagaatcccgggcctactagtaccatggactggatttggcgcatccttttccttgtcggcgctgctaccggcgcccattccgggcccgaggtgcagctggttgaatctggcggaggatctgttcaggctggcggctctctgagactgtcttgtgccgccagcggctacacctacagcatcaactgcatgggctggttcagacaggcccctggcaaagagagagaaggcgttgccgccatctctaccggcggaggcagaaccgattaccgggattctgtgaagggcagattcaccatcagccaggacaacgccaagaacaccgtgtacctccagatgaacagcctgaagcctgaggacaccgccatgtactactgtgccggcaagaccacctatcctggctacggatgtggcctgggcagaagcgcctacaattattggggccagggcacccaagtgaccgtgtcatctggatccggcggcggaggatctggcggaggcggatctgggggcggaggctctttcgaacaggtccaactggtgcagagcggagccgaggtcgtgaagcctggcgcttccgtgaagattagctgcaaagccagcggctacacctttaccggctactttatgcactgggtcaagcagagccctggccagagcctggaatggatcggcagaatccacccctacgacggcgacaccttctacaaccagaagttccagggcaaggccaccctgacagtggacaagagcagcaacaccgcccacatggaactgctgagcctgaccagcgaggacttcgccgtgtactactgcaccagatacgacggcagccgggctatggactattggggccagggcaccaccgtgaccgtgtctagtacgcgtatccagaaccctgatcctgccgtgtaccagctgcgggatagcaagagcagcgacaagagcgtgtgtctgttcaccgacttcgacagccagaccaacgtgtcccagagcaaggactccgacgtgtacatcaccgataagtgcgtgctggacatgcggagcatggacttcaagagcaactccgccgtggcctggtccaacaagtccgatttcgcctgcgccaacgccttcaacaacagcattatccccgaggacacattcttcccaagccccgagagcagctgcgacgtgaagctggtggaaaagagcttcgagacagacaccaacctgaacttccagaacctgagcgtgatcggcttcagaatcctgctgctgaaagtggccggctttaacctgctgatgaccctgcggctgtggtccagctaa

SEQ ID NO: 35576 - DNA, 1869 bp, synthetic construct
  source 1..1869: mol_type = other DNA
atggccttaccagtgaccgccttgctcctgccgctggccttgctgctccacgccgccaggccggacatcgtgctgacccagagccctctgagcctggccgtgtctctgggacagcctgccatcatcagctgtagggccagccagagcgtgtcctttgccggcacctctctgatgcactggtatcaccagaagcccggccagcagcccagactgctgatctacagagccagcaacctggaagccggcgtgcccgatagattttccggcagcggcagcaagaccgacttcaccctgaccatcagccccgtggaagccgaagatgccgccacctactactgccagcagagcagagagtacccctacaccttcggcggaggcaccaagctggaaatcaagaggctcgaggacctgaagcacgtgttcccacctgaggtggccgtgttcgagcctagcgacgccgagatctggcacacccagaaagccaccctcgtgtgcctggctaccggcttctaccccgaccatgtggaactgtcttggtgggtcaacggcaaagaggtgcacagcggcgtgtctaccgacccccagccactgaaagaacagcccgccctgaacgacagccggtactgcctgagcagcagactgagagtgtccgccaccttctggcagaacccccggaaccacttcagatgccaggtgcagttctacggcctgagcgagaacgacgagtggacccaggacagagccaagcccgtgacccagatcgtgtctgccgaagcctggggcagagccgattgcggctttaccagcgagagctaccagcagggcgtgctgagcgccaccatcctgtacgagatcctgctgggcaaggccaccctgtacgccgtgctggtgtctgccctggtgctgatggctatggtcaagcggaaggacagccggggaagggccaagcgatctggatctggagcaacaaacttctcactactcaaacaagcaggtgacgtggaggagaatcccgggcctactagtatggactggatttggcgcatccttttccttgtcggcgctgctaccggcgcgcattccttcgaacaggtccaactggtgcagagcggagccgaggtcgtgaagcctggcgcttccgtgaagattagctgcaaagccagcggctacacctttaccggctactttatgcactgggtcaagcagagccctggccagagcctggaatggatcggcagaatccacccctacgacggcgacaccttctacaaccagaagttccagggcaaggccaccctgacagtggacaagagcagcaacaccgcccacatggaactgctgagcctgaccagcgaggacttcgccgtgtactactgcaccagatacgacggcagccgggctatggactattggggccagggcaccaccgtgaccgtgtctagtacgcgtatccagaaccctgatcctgccgtgtaccagctgcgggatagcaagagcagcgacaagagcgtgtgtctgttcaccgacttcgacagccagaccaacgtgtcccagagcaaggactccgacgtgtacatcaccgataagaccgtgctggacatgcggagcatggacttcaagagcaactccgccgtggcctggtccagcaagtccgatttcgcctgcgccaacgccttcaacaacagcattatccccgaggacacattcttcccaagccccgagatggcctgcgacgtgaagctggtggaaaagagcttcgagacagacaccaacctgaacttccagaacctgctcgtgatctggctgagaatcctgctgctgaaagtggccggctttaacctgctgatgaccctgcggctgtggtccagc

SEQ ID NO: 35577 - DNA, 1869 bp, synthetic construct
  source 1..1869: mol_type = other DNA
atggccttaccagtgaccgccttgctcctgccgctggccttgctgctccacgccgccaggccggacatcgtgctgacccagagccctctgagcctggccgtgtctctgggacagcctgccatcatcagctgtagggccagccagagcgtgtcctttgccggcacctctctgatgcactggtatcaccagaagcccggccagcagcccagactgctgatctacagagccagcaacctggaagccggcgtgcccgatagattttccggcagcggcagcaagaccgacttcaccctgaccatcagccccgtggaagccgaagatgccgccacctactactgccagcagagcagagagtacccctacaccttcggcggaggcaccaagctggaaatcaagaggctcgaggacctgaagcacgtgttcccacctgaggtggccgtgttcgagcctagcgacgccgagatctggcacacccagaaagccaccctcgtgtgcctggctaccggcttctaccccgaccatgtggaactgtcttggtgggtcaacggcaaagaggtgcacagcggcgtgtctaccgacccccagccactgaaagaacagcccgccctgaacgacagccggtactgcctgagcagcagactgagagtgtccgccaccttctggcagaacccccggaaccacttcagatgccaggtgcagttctacggcctgagcgagaacgacgagtggacccaggacagagccaagcccgtgacccagatcgtgtctgccgaagcctggggcagagccgattgcggctttaccagcgagagctaccagcagggcgtgctgagcgccaccatcctgtacgagatcctgctgggcaaggccaccctgtacgccgtgctggtgtctgccctggtgctgatggctatggtcaagcggaaggacagccggggaagggccaagcgatctggatctggagcaacaaacttctcactactcaaacaagcaggtgacgtggaggagaatcccgggcctactagtatggactggatttggcgcatccttttccttgtcggcgctgctaccggcgcgcattccttcgaacaggtccaactggtgcagagcggagccgaggtcgtgaagcctggcgcttccgtgaagattagctgcaaagccagcggctacacctttaccggctactttatgcactgggtcaagcagagccctggccagagcctggaatggatcggcagaatccacccctacgacggcgacaccttctacaaccagaagttccagggcaaggccaccctgacagtggacaagagcagcaacaccgcccacatggaactgctgagcctgaccagcgaggacttcgccgtgtactactgcaccagatacgacggcagccgggctatggactattggggccagggcaccaccgtgaccgtgtctagtacgcgtatccagaaccctgatcctgccgtgtaccagctgcgggatagcaagagcagcgacaagagcgtgtgtctgttcaccgacttcgacagccagaccaacgtgtcccagagcaaggactccgacgtgtacatcaccgataagaccgtgctggacatgcggagcatggacttcaagagcaactccgccgtggcctggtccaccaagtccgatttcgcctgcgccaacgccttcaacaacagcattatccccgaggacacattcttcccaagccccgaggtggtgtgcgacgtgaagctggtggaaaagagcttcgagacagacaccaacctgaacttccagaacctggtggtgatcggcgccagaatcctgctgctgaaagtggccggctttaacctgctgatgaccctgcggctgtggtccagc

SEQ ID NO: 35578 - DNA, 1869 bp, synthetic construct
  source 1..1869: mol_type = other DNA
atggccttaccagtgaccgccttgctcctgccgctggccttgctgctccacgccgccaggccggacatcgtgctgacccagagccctctgagcctggccgtgtctctgggacagcctgccatcatcagctgtagggccagccagagcgtgtcctttgccggcacctctctgatgcactggtatcaccagaagcccggccagcagcccagactgctgatctacagagccagcaacctggaagccggcgtgcccgatagattttccggcagcggcagcaagaccgacttcaccctgaccatcagccccgtggaagccgaagatgccgccacctactactgccagcagagcagagagtacccctacaccttcggcggaggcaccaagctggaaatcaagaggctcgaggacctgaagaacgtgttcccacctgaggtggccgtgttcgagcctagcaaggccgagatcagcagaacccagaaagccaccctcgtgtgcctggctaccggcttctaccctcctcatgtggaactgtcttggtgggtcaacggcaaagaggtgcacgacggcgtgtgtaccgacccccagccactgaaagaacagcccgccctgaacgacagccggtactgcctgagcagcagactgagagtgtccgccaccttctggcagaacccccggaaccacttcagatgccaggtgcagttctacggcctgagcgagaacgacgagtggacccaggacagagccaagcccgtgacccagatcgtgtctgccgaagcctggggcagagccgattgcggctttaccagcgagagctaccagcagggcgtgctgagcgccaccatcctgtacgagatcctgctgggcaaggccaccctgtacgccgtgctggtgtctgccctggtgctgatggctatggtcaagcggaaggacagccggggaagggccaagcgatctggatctggagcaacaaacttctcactactcaaacaagcaggtgacgtggaggagaatcccgggcctactagtatggactggatttggcgcatccttttccttgtcggcgctgctaccggcgcgcattccttcgaacaggtccaactggtgcagagcggagccgaggtcgtgaagcctggcgcttccgtgaagattagctgcaaagccagcggctacacctttaccggctactttatgcactgggtcaagcagagccctggccagagcctggaatggatcggcagaatccacccctacgacggcgacaccttctacaaccagaagttccagggcaaggccaccctgacagtggacaagagcagcaacaccgcccacatggaactgctgagcctgaccagcgaggacttcgccgtgtactactgcaccagatacgacggcagccgggctatggactattggggccagggcaccaccgtgaccgtgtctagtacgcgtatccagaaccctgatcctgccgtgtaccagctgcgggatagcaagagcagcgacaagttcgtgtgtctgttcaccgacttcgacagccagatcaacgtgtcccagagcaaggactccgacgtgtacatcaccgataagtgcgtgctggacatgcggagcatggacttcaagagcaactccgccgtggcctggtccaacaagtccgatttcacctgcgccaacgccttcaacaacagcattatccccgaggacacattcttcccaagccccgagagcagctgcgacgtgaagctggtggaaaagagcttcgagacagacaccaacctgaacttccagaacctgagcgtgatcggcttcagaatcctgctgctgaaagtggccggctttaacctgctgatgaccctgcggctgtggtccagc

SEQ ID NO: 35579 - DNA, 2295 bp, synthetic construct
  source 1..2295: mol_type = other DNA
atggccttaccagtgaccgccttgctcctgccgctggccttgctgctccacgccgccaggccggacatcgtgctgacccagagccctctgagcctggccgtgtctctgggacagcctgccatcatcagctgtagggccagccagagcgtgtcctttgccggcacctctctgatgcactggtatcaccagaagcccggccagcagcccagactgctgatctacagagccagcaacctggaagccggcgtgcccgatagattttccggcagcggcagcaagaccgacttcaccctgaccatcagccccgtggaagccgaagatgccgccacctactactgccagcagagcagagagtacccctacaccttcggcggaggcaccaagctggaaatcaagaggctcgaggacctgaagaacgtgttcccacctgaggtggccgtgttcgagcctagcgaggccgagatcagccacacccagaaagccaccctcgtgtgcctggctaccggcttctaccccgaccatgtggaactgtcttggtgggtcaacggcaaagaggtgcacagcggcgtgtgtaccgacccccagccactgaaagaacagcccgccctgaacgacagccggtactgcctgagcagcagactgagagtgtccgccaccttctggcagaacccccggaaccacttcagatgccaggtgcagttctacggcctgagcgagaacgacgagtggacccaggacagagccaagcccgtgacccagatcgtgtctgccgaagcctggggcagagccgattgcggctttaccagcgagagctaccagcagggcgtgctgagcgccaccatcctgtacgagatcctgctgggcaaggccaccctgtacgccgtgctggtgtctgccctggtgctgatggctatggtcaagcggaaggacagccggggaagggccaagcgatctggatctggagcaacaaacttctcactactcaaacaagcaggtgacgtggaggagaatcccgggcctactagtaccatggactggatttggcgcatccttttccttgtcggcgctgctaccggcgcccattccgggccccaggtgcagctccaagaaagcggacccggactggttaagccctctcagaccctgtctctgacctgcacagttagcggagccagcattaccacaggcgagtattattggaattggtttcggcagccaccaggcaaggggcttgagtggatgggtgctattgctgcctctggcagcaccacctactctcccagctttgagagcagaacctccatcagccgggacacctccaaaaaccagttctctctgaagctgtcctccgtgaccgctgctgacaccgccgtctattattgtggccggtctttcggcgtggcagctgtgaccacaggacagaacagaggccagggaacacttgtgaccgtgtcctctggatccggcggcggaggatctggcggaggcggatctgggggcggaggctctttcgaacaggtccaactggtgcagagcggagccgaggtcgtgaagcctggcgcttccgtgaagattagctgcaaagccagcggctacacctttaccggctactttatgcactgggtcaagcagagccctggccagagcctggaatggatcggcagaatccacccctacgacggcgacaccttctacaaccagaagttccagggcaaggccaccctgacagtggacaagagcagcaacaccgcccacatggaactgctgagcctgaccagcgaggacttcgccgtgtactactgcaccagatacgacggcagccgggctatggactattggggccagggcaccaccgtgaccgtgtctagtacgcgtatccagaaccctgatcctgccgtgtaccagctgcgggatagcaagagcagcgacaagagcgtgtgtctgttcaccgacttcgacagccagaccaacgtgtcccagagcaaggactccgacgtgtacatcaccgataagtgcgtgctggacatgcggagcatggacttcaagagcaactccgccgtggcctggtccaacaagtccgatttcgcctgcgccaacgccttcaacaacagcattatccccgaggacacattcttcccaagccccgagagcagctgcgacgtgaagctggtggaaaagagcttcgagacagacaccaacctgaacttccagaacctgagcgtgatcggcttcagaatcctgctgctgaaagtggccggctttaacctgctgatgaccctgcggctgtggtccagc

SEQ ID NO: 35580 - DNA, 2718 bp, synthetic construct
  source 1..2718: mol_type = other DNA
atggccttaccagtgaccgccttgctcctgccgctggccttgctgctccacgccgccaggccgcaggttcagctgcaagagtctggccctggcctggtcaagcctagccaaacactgagcctgacctgtaccgtgtctggcggctctatcaccaccggcgagttctactggaactggttcagacagcctcctggcaaaggactggaatggatgggagccattgccgccagcggcagcacaacatacagccctagcttcgagagccggaccagcatcagcagagacaccagcaagaatcagttcagcctgaagctgagcagcgtgacagccgccgatacagccgtgtattactgcggcagatcctttggagtggccgccgtgacaaccggccagaatagaggacagggcaccctggtcacagtgtctagcggtaccggcggaggcggatctggcggcggaggtagcggtggcggaggatctgaattcgacatcgtgctgacccagagccctctgagcctggccgtgtctctgggacagcctgccatcatcagctgtagggccagccagagcgtgtcctttgccggcacctctctgatgcactggtatcaccagaagcccggccagcagcccagactgctgatctacagagccagcaacctggaagccggcgtgcccgatagattttccggcagcggcagcaagaccgacttcaccctgaccatcagccccgtggaagccgaagatgccgccacctactactgccagcagagcagagagtacccctacaccttcggcggaggcaccaagctggaaatcaagaggctcgagatccagaaccctgatcctgccgtgtaccagctgcgggatagcaagagcagcgacaagagcgtgtgtctgttcaccgacttcgacagccagaccaacgtgtcccagagcaaggactccgacgtgtacatcaccgataagtgcgtgctggacatgcggagcatggacttcaagagcaactccgccgtggcctggtccaacaagtccgatttcgcctgcgccaacgccttcaacaacagcattatccccgaggacacattcttcccaagcagcgacgtgccctgcgacgtgaagctggtggaaaagagcttcgagacagacaccaacctgaacttccagaacctgagcgtgatcggcttcagaatcctgctgctgaaagtggccggctttaacctgctgatgaccctgcggctgtggtccagccgcgccaagagaagcggatctggcgtgaagcagaccctgaatttcgacctgctgaagctggctggcgacgtggaatccaacccaggccctactagtaccatggactggatttggcgcatccttttccttgtcggcgctgctaccggcgcccattccgggcccgaagtgcaactggttgaatccggtggcggcctggtgcaacccggcggatctctcagacttagctgtgccgcctccggcagaaccttcacaatgggatggtacaggcaggctccagggaaagagagagagttcgtcgccgccatctctctgtctcccacactggcctactacgccgactctgtgaaaggccggttcaccatctccagagataatagcaagaacaccgtggtgctgcaaatgaactctctgagagccgaggatacagccctgtactattgtgccgctgaccggaagtccgtgatgagcatcagacccgattactggggacagggcacactggtcacagtgtctagtggatccggcggcggaggatctggcggaggcggatctgggggcggaggctctttcgaacaggtccaactggtgcagagcggagccgaggtcgtgaagcctggcgcttccgtgaagattagctgcaaagccagcggctacacctttaccggctactttatgcactgggtcaagcagagccctggccagagcctggaatggatcggcagaatccacccctacgacggcgacaccttctacaaccagaagttccagggcaaggccaccctgacagtggacaagagcagcaacaccgcccacatggaactgctgagcctgaccagcgaggacttcgccgtgtactactgcaccagatacgacggcagccgggctatggactattggggccagggcaccaccgtgaccgtgtctagtacgcgtgaggacctgaagaacgtgttcccacctgaggtggccgtgttcgagcctagcaaggccgagatcgcccacacccagaaagccaccctcgtgtgcctggctaccggcttctaccccgaccatgtggaactgtcttggtgggtcaacggcaaagaggtgcacagcggcgtgtgtaccgacccccagccactgaaagaacagcccgccctgaacgacagccggtactgcctgagcagcagactgagagtgtccgccaccttctggcagaacccccggaaccacttcagatgccaggtgcagttctacggcctgagcgagaacgacgagtggacccaggacagagccaagcccgtgacccagatcgtgtctgccgaagcctggggcagagccgattgcggcatcaccagcgccagctaccaccagggcgtgctgagcgccaccatcctgtacgagatcctgctgggcaaggccaccctgtacgccgtgctggtgtctgccctggtgctgatggctatggtcaagcggaaggacagccgggga

SEQ ID NO: 35581 - DNA, 2307 bp, synthetic construct
  source 1..2307: mol_type = other DNA
atggccttaccagtgaccgccttgctcctgccgctggccttgctgctccacgccgccaggccgcaggttcagctgcaagagtctggccctggcctggtcaagcctagccaaacactgagcctgacctgtaccgtgtctggcggctctatcaccaccggcgagttctactggaactggttcagacagcctcctggcaaaggactggaatggatgggagccattgccgccagcggcagcacaacatacagccctagcttcgagagccggaccagcatcagcagagacaccagcaagaatcagttcagcctgaagctgagcagcgtgacagccgccgatacagccgtgtattactgcggcagatcctttggagtggccgccgtgacaaccggccagaatagaggacagggcaccctggtcacagtgtctagcggtaccggcggaggcggatctggcggcggaggtagcggtggcggaggatctgaattcgacatcgtgctgacccagagccctctgagcctggccgtgtctctgggacagcctgccatcatcagctgtagggccagccagagcgtgtcctttgccggcacctctctgatgcactggtatcaccagaagcccggccagcagcccagactgctgatctacagagccagcaacctggaagccggcgtgcccgatagattttccggcagcggcagcaagaccgacttcaccctgaccatcagccccgtggaagccgaagatgccgccacctactactgccagcagagcagagagtacccctacaccttcggcggaggcaccaagctggaaatcaagaggctcgagatccagaaccctgatcctgccgtgtaccagctgcgggatagcaagagcagcgacaagagcgtgtgtctgttcaccgacttcgacagccagaccaacgtgtcccagagcaaggactccgacgtgtacatcaccgataagtgcgtgctggacatgcggagcatggacttcaagagcaactccgccgtggcctggtccaacaagtccgatttcgcctgcgccaacgccttcaacaacagcattatccccgaggacacattcttcccaagcagcgacgtgccctgcgacgtgaagctggtggaaaagagcttcgagacagacaccaacctgaacttccagaacctgagcgtgatcggcttcagaatcctgctgctgaaagtggccggctttaacctgctgatgaccctgcggctgtggtccagccgcgccaagagaagcggatctggcgtgaagcagaccctgaatttcgacctgctgaagctggctggcgacgtggaatccaacccaggccctactagtaccatggactggatttggcgcatccttttccttgtcggcgctgctaccggcgcccattccttcgaacaggtccaactggtgcagagcggagccgaggtcgtgaagcctggcgcttccgtgaagattagctgcaaagccagcggctacacctttaccggctactttatgcactgggtcaagcagagccctggccagagcctggaatggatcggcagaatccacccctacgacggcgacaccttctacaaccagaagttccagggcaaggccaccctgacagtggacaagagcagcaacaccgcccacatggaactgctgagcctgaccagcgaggacttcgccgtgtactactgcaccagatacgacggcagccgggctatggactattggggccagggcaccaccgtgaccgtgtctagtacgcgtgaggacctgaagaacgtgttcccacctgaggtggccgtgttcgagcctagcaaggccgagatcgcccacacccagaaagccaccctcgtgtgcctggctaccggcttctaccccgaccatgtggaactgtcttggtgggtcaacggcaaagaggtgcacagcggcgtgtgtaccgacccccagccactgaaagaacagcccgccctgaacgacagccggtactgcctgagcagcagactgagagtgtccgccaccttctggcagaacccccggaaccacttcagatgccaggtgcagttctacggcctgagcgagaacgacgagtggacccaggacagagccaagcccgtgacccagatcgtgtctgccgaagcctggggcagagccgattgcggcatcaccagcgccagctaccaccagggcgtgctgagcgccaccatcctgtacgagatcctgctgggcaaggccaccctgtacgccgtgctggtgtctgccctggtgctgatggctatggtcaagcggaaggacagccgggga

SEQ ID NO: 35582 - DNA, 2706 bp, synthetic construct
  source 1..2706: mol_type = other DNA
atggccttaccagtgaccgccttgctcctgccgctggccttgctgctccacgccgccaggccggaagtgcagctggttgaatctggcggaggactggttcaggctggcggatctctgagactgtcttgtgccgccagcggcagaacctttagcatgggctggtttagacaggcccctggcaaagagagagagttcgtcgccgccatcacatactctggcggcagcccttactacgccgactctgtgaagggcagattcaccatcagccgggacaacgccaagaacaccgtgtacctccagatgaacagcctgaagcctgaggacaccgccgtgtactactgcgccgccaatccaacatacggcagcgactggaacgccgagaattggggccagggaacccaagtgacagtgtctagcggtaccggcggaggcggatctggcggcggaggtagcggtggcggaggatctgaattcgacatcgtgctgacccagagccctctgagcctggccgtgtctctgggacagcctgccatcatcagctgtagggccagccagagcgtgtcctttgccggcacctctctgatgcactggtatcaccagaagcccggccagcagcccagactgctgatctacagagccagcaacctggaagccggcgtgcccgatagattttccggcagcggcagcaagaccgacttcaccctgaccatcagccccgtggaagccgaagatgccgccacctactactgccagcagagcagagagtacccctacaccttcggcggaggcaccaagctggaaatcaagaggctcgaggacctgaagaacgtgttcccacctgaggtggccgtgttcgagcctagcgaggccgagatcagccacacccagaaagccaccctcgtgtgcctggctaccggcttctaccccgaccatgtggaactgtcttggtgggtcaacggcaaagaggtgcacagcggcgtgtgtaccgacccccagccactgaaagaacagcccgccctgaacgacagccggtactgcctgagcagcagactgagagtgtccgccaccttctggcagaacccccggaaccacttcagatgccaggtgcagttctacggcctgagcgagaacgacgagtggacccaggacagagccaagcccgtgacccagatcgtgtctgccgaagcctggggcagagccgattgcggctttaccagcgagagctaccagcagggcgtgctgagcgccaccatcctgtacgagatcctgctgggcaaggccaccctgtacgccgtgctggtgtctgccctggtgctgatggctatggtcaagcggaaggacagccggggaagggccaagcgatctggatctggagcaacaaacttctcactactcaaacaagcaggtgacgtggaggagaatcccgggcctactagtaccatggactggatttggcgcatccttttccttgtcggcgctgctaccggcgcccattccgggccccaggtgcagctccaagaaagcggacccggactggttaagccctctcagaccctgtctctgacctgcacagttagcggagccagcattaccacaggcgagtattattggaattggtttcggcagccaccaggcaaggggcttgagtggatgggtgctattgctgcctctggcagcaccacctactctcccagctttgagagcagaacctccatcagccgggacacctccaaaaaccagttctctctgaagctgtcctccgtgaccgctgctgacaccgccgtctattattgtggccggtctttcggcgtggcagctgtgaccacaggacagaacagaggccagggaacacttgtgaccgtgtcctctggatccggcggcggaggatctggcggaggcggatctgggggcggaggctctttcgaacaggtccaactggtgcagagcggagccgaggtcgtgaagcctggcgcttccgtgaagattagctgcaaagccagcggctacacctttaccggctactttatgcactgggtcaagcagagccctggccagagcctggaatggatcggcagaatccacccctacgacggcgacaccttctacaaccagaagttccagggcaaggccaccctgacagtggacaagagcagcaacaccgcccacatggaactgctgagcctgaccagcgaggacttcgccgtgtactactgcaccagatacgacggcagccgggctatggactattggggccagggcaccaccgtgaccgtgtctagtacgcgtatccagaaccctgatcctgccgtgtaccagctgcgggatagcaagagcagcgacaagagcgtgtgtctgttcaccgacttcgacagccagaccaacgtgtcccagagcaaggactccgacgtgtacatcaccgataagtgcgtgctggacatgcggagcatggacttcaagagcaactccgccgtggcctggtccaacaagtccgatttcgcctgcgccaacgccttcaacaacagcattatccccgaggacacattcttcccaagccccgagagcagctgcgacgtgaagctggtggaaaagagcttcgagacagacaccaacctgaacttccagaacctgagcgtgatcggcttcagaatcctgctgctgaaagtggccggctttaacctgctgatgaccctgcggctgtggtccagc

SEQ ID NO: 35583 - DNA, 2727 bp, synthetic construct
  source 1..2727: mol_type = other DNA
atggccttaccagtgaccgccttgctcctgccgctggccttgctgctccacgccgccaggccggaagtgcagctggttgaatctggcggaggactggttcaggctggcggatctctgagactgtcttgtgccgccagcggcagaacctttagcatgggctggtttagacaggcccctggcaaagagagagagttcgtcgccgccatcacatactctggcggcagcccttactacgccgactctgtgaagggcagattcaccatcagccgggacaacgccaagaacaccgtgtacctccagatgaacagcctgaagcctgaggacaccgccgtgtactactgcgccgccaatccaacatacggcagcgactggaacgccgagaattggggccagggaacccaagtgacagtgtctagcggtaccggcggaggcggatctggcggcggaggtagcggtggcggaggatctgaattcgacatcgtgctgacccagagccctctgagcctggccgtgtctctgggacagcctgccatcatcagctgtagggccagccagagcgtgtcctttgccggcacctctctgatgcactggtatcaccagaagcccggccagcagcccagactgctgatctacagagccagcaacctggaagccggcgtgcccgatagattttccggcagcggcagcaagaccgacttcaccctgaccatcagccccgtggaagccgaagatgccgccacctactactgccagcagagcagagagtacccctacaccttcggcggaggcaccaagctggaaatcaagaggctcgagatccagaaccctgatcctgccgtgtaccagctgcgggatagcaagagcagcgacaagagcgtgtgtctgttcaccgacttcgacagccagaccaacgtgtcccagagcaaggactccgacgtgtacatcaccgataagtgcgtgctggacatgcggagcatggacttcaagagcaactccgccgtggcctggtccaacaagtccgatttcgcctgcgccaacgccttcaacaacagcattatccccgaggacacattcttcccaagcagcgacgtgccctgcgacgtgaagctggtggaaaagagcttcgagacagacaccaacctgaacttccagaacctgagcgtgatcggcttcagaatcctgctgctgaaagtggccggctttaacctgctgatgaccctgcggctgtggtccagccgcgccaagagaagcggatctggcgtgaagcagaccctgaatttcgacctgctgaagctggctggcgacgtggaatccaacccaggccctactagtaccatggactggatttggcgcatccttttccttgtcggcgctgctaccggcgcccattccgggccccaggtgcagctggttgaatctggcggaggactggttcagcctggcggatctctgagactgtcttgtgccgccagcggcaacatcaacagcagaaactgcatgggctggttcagacaggcccctggcaagggaagagaaggcgtggcagctatcggccaagtgaccggcagaacctactacgtggacagcgtgaagggcagattcaccatcagcctggacaacagcaagaacaccctgtacctccagatgaacagcctgagagccgaggacaccgccgtgtactattgtgctgctgcccctggctgtctgctgtctgcacttagaagcgccgactacagaaactggggccagggcacactggtcaccgtttcttctggatccggcggcggaggatctggcggaggcggatctgggggcggaggctctttcgaacaggtccaactggtgcagagcggagccgaggtcgtgaagcctggcgcttccgtgaagattagctgcaaagccagcggctacacctttaccggctactttatgcactgggtcaagcagagccctggccagagcctggaatggatcggcagaatccacccctacgacggcgacaccttctacaaccagaagttccagggcaaggccaccctgacagtggacaagagcagcaacaccgcccacatggaactgctgagcctgaccagcgaggacttcgccgtgtactactgcaccagatacgacggcagccgggctatggactattggggccagggcaccaccgtgaccgtgtctagtacgcgtgaggacctgaagaacgtgttcccacctgaggtggccgtgttcgagcctagcaaggccgagatcgcccacacccagaaagccaccctcgtgtgcctggctaccggcttctaccccgaccatgtggaactgtcttggtgggtcaacggcaaagaggtgcacagcggcgtgtgtaccgacccccagccactgaaagaacagcccgccctgaacgacagccggtactgcctgagcagcagactgagagtgtccgccaccttctggcagaacccccggaaccacttcagatgccaggtgcagttctacggcctgagcgagaacgacgagtggacccaggacagagccaagcccgtgacccagatcgtgtctgccgaagcctggggcagagccgattgcggcatcaccagcgccagctaccaccagggcgtgctgagcgccaccatcctgtacgagatcctgctgggcaaggccaccctgtacgccgtgctggtgtctgccctggtgctgatggctatggtcaagcggaaggacagccgggga

SEQ ID NO: 35584 - DNA, 2715 bp, synthetic construct
  source 1..2715: mol_type = other DNA
atggccttaccagtgaccgccttgctcctgccgctggccttgctgctccacgccgccaggccggaagtgcagctggttgaatctggcggaggactggttcaggctggcggatctctgagactgtcttgtgccgccagcggcagaacctttagcatgggctggtttagacaggcccctggcaaagagagagagttcgtcgccgccatcacatactctggcggcagcccttactacgccgactctgtgaagggcagattcaccatcagccgggacaacgccaagaacaccgtgtacctccagatgaacagcctgaagcctgaggacaccgccgtgtactactgcgccgccaatccaacatacggcagcgactggaacgccgagaattggggccagggaacccaagtgacagtgtctagcggtaccggcggaggcggatctggcggcggaggtagcggtggcggaggatctgaattcgacatcgtgctgacccagagccctctgagcctggccgtgtctctgggacagcctgccatcatcagctgtagggccagccagagcgtgtcctttgccggcacctctctgatgcactggtatcaccagaagcccggccagcagcccagactgctgatctacagagccagcaacctggaagccggcgtgcccgatagattttccggcagcggcagcaagaccgacttcaccctgaccatcagccccgtggaagccgaagatgccgccacctactactgccagcagagcagagagtacccctacaccttcggcggaggcaccaagctggaaatcaagaggctcgaggacctgaagaacgtgttcccacctgaggtggccgtgttcgagcctagcgaggccgagatcagccacacccagaaagccaccctcgtgtgcctggctaccggcttctaccccgaccatgtggaactgtcttggtgggtcaacggcaaagaggtgcacagcggcgtgtgtaccgacccccagccactgaaagaacagcccgccctgaacgacagccggtactgcctgagcagcagactgagagtgtccgccaccttctggcagaacccccggaaccacttcagatgccaggtgcagttctacggcctgagcgagaacgacgagtggacccaggacagagccaagcccgtgacccagatcgtgtctgccgaagcctggggcagagccgattgcggctttaccagcgagagctaccagcagggcgtgctgagcgccaccatcctgtacgagatcctgctgggcaaggccaccctgtacgccgtgctggtgtctgccctggtgctgatggctatggtcaagcggaaggacagccggggaagggccaagcgatctggatctggagcaacaaacttctcactactcaaacaagcaggtgacgtggaggagaatcccgggcctactagtaccatggactggatttggcgcatccttttccttgtcggcgctgctaccggcgcccattccgggccccaggtgcagctggttgaatctggcggaggactggttcagcctggcggatctctgagactgtcttgtgccgccagcggcaacatcaacagcagaaactgcatgggctggttcagacaggcccctggcaagggaagagaaggcgtggcagctatcggccaagtgaccggcagaacctactacgtggacagcgtgaagggcagattcaccatcagcctggacaacagcaagaacaccctgtacctccagatgaacagcctgagagccgaggacaccgccgtgtactattgtgctgctgcccctggctgtctgctgtctgcacttagaagcgccgactacagaaactggggccagggcacactggtcaccgtttcttctggatccggcggcggaggatctggcggaggcggatctgggggcggaggctctttcgaacaggtccaactggtgcagagcggagccgaggtcgtgaagcctggcgcttccgtgaagattagctgcaaagccagcggctacacctttaccggctactttatgcactgggtcaagcagagccctggccagagcctggaatggatcggcagaatccacccctacgacggcgacaccttctacaaccagaagttccagggcaaggccaccctgacagtggacaagagcagcaacaccgcccacatggaactgctgagcctgaccagcgaggacttcgccgtgtactactgcaccagatacgacggcagccgggctatggactattggggccagggcaccaccgtgaccgtgtctagtacgcgtatccagaaccctgatcctgccgtgtaccagctgcgggatagcaagagcagcgacaagagcgtgtgtctgttcaccgacttcgacagccagaccaacgtgtcccagagcaaggactccgacgtgtacatcaccgataagtgcgtgctggacatgcggagcatggacttcaagagcaactccgccgtggcctggtccaacaagtccgatttcgcctgcgccaacgccttcaacaacagcattatccccgaggacacattcttcccaagccccgagagcagctgcgacgtgaagctggtggaaaagagcttcgagacagacaccaacctgaacttccagaacctgagcgtgatcggcttcagaatcctgctgctgaaagtggccggctttaacctgctgatgaccctgcggctgtggtccagc

SEQ ID NO: 35585 - DNA, 2715 bp, synthetic construct
  source 1..2715: mol_type = other DNA
atggccttaccagtgaccgccttgctcctgccgctggccttgctgctccacgccgccaggccggaagtgcaactggttgaatccggtggcggcctggtgcaagcaggcggatctctcagacttagctgtgccgcctccggcagaaccttcacaatgggatggtttaggcaggctccagggaaagagagagagttcgtcgccgccatctctctgtctcccacactggcctactacgccgactctgtgaaaggccggttcaccatctccagagataatgccaagaacaccgtggtgctgcaaatgaactctctgaaacccgaggatacagccctgtactattgtgccgctgaccggaagtccgtgatgagcatcagacccgattactggggacagggcacacaagtcacagtgtcctctggtaccggcggaggcggatctggcggcggaggtagcggtggcggaggatctgaattcgacatcgtgctgacccagagccctctgagcctggccgtgtctctgggacagcctgccatcatcagctgtagggccagccagagcgtgtcctttgccggcacctctctgatgcactggtatcaccagaagcccggccagcagcccagactgctgatctacagagccagcaacctggaagccggcgtgcccgatagattttccggcagcggcagcaagaccgacttcaccctgaccatcagccccgtggaagccgaagatgccgccacctactactgccagcagagcagagagtacccctacaccttcggcggaggcaccaagctggaaatcaagaggctcgaggacctgaagaacgtgttcccacctgaggtggccgtgttcgagcctagcgaggccgagatcagccacacccagaaagccaccctcgtgtgcctggctaccggcttctaccccgaccatgtggaactgtcttggtgggtcaacggcaaagaggtgcacagcggcgtgtgtaccgacccccagccactgaaagaacagcccgccctgaacgacagccggtactgcctgagcagcagactgagagtgtccgccaccttctggcagaacccccggaaccacttcagatgccaggtgcagttctacggcctgagcgagaacgacgagtggacccaggacagagccaagcccgtgacccagatcgtgtctgccgaagcctggggcagagccgattgcggctttaccagcgagagctaccagcagggcgtgctgagcgccaccatcctgtacgagatcctgctgggcaaggccaccctgtacgccgtgctggtgtctgccctggtgctgatggctatggtcaagcggaaggacagccggggaagggccaagcgatctggatctggagcaacaaacttctcactactcaaacaagcaggtgacgtggaggagaatcccgggcctactagtaccatggactggatttggcgcatccttttccttgtcggcgctgctaccggcgcccattccgggccccaggtgcagctggttgaatctggcggaggactggttcagcctggcggatctctgagactgtcttgtgccgccagcggcaacatcaacagcagaaactgcatgggctggttcagacaggcccctggcaagggaagagaaggcgtggcagctatcggccaagtgaccggcagaacctactacgtggacagcgtgaagggcagattcaccatcagcctggacaacagcaagaacaccctgtacctccagatgaacagcctgagagccgaggacaccgccgtgtactattgtgctgctgcccctggctgtctgctgtctgcacttagaagcgccgactacagaaactggggccagggcacactggtcaccgtttcttctggatccggcggcggaggatctggcggaggcggatctgggggcggaggctctttcgaacaggtccaactggtgcagagcggagccgaggtcgtgaagcctggcgcttccgtgaagattagctgcaaagccagcggctacacctttaccggctactttatgcactgggtcaagcagagccctggccagagcctggaatggatcggcagaatccacccctacgacggcgacaccttctacaaccagaagttccagggcaaggccaccctgacagtggacaagagcagcaacaccgcccacatggaactgctgagcctgaccagcgaggacttcgccgtgtactactgcaccagatacgacggcagccgggctatggactattggggccagggcaccaccgtgaccgtgtctagtacgcgtatccagaaccctgatcctgccgtgtaccagctgcgggatagcaagagcagcgacaagagcgtgtgtctgttcaccgacttcgacagccagaccaacgtgtcccagagcaaggactccgacgtgtacatcaccgataagtgcgtgctggacatgcggagcatggacttcaagagcaactccgccgtggcctggtccaacaagtccgatttcgcctgcgccaacgccttcaacaacagcattatccccgaggacacattcttcccaagccccgagagcagctgcgacgtgaagctggtggaaaagagcttcgagacagacaccaacctgaacttccagaacctgagcgtgatcggcttcagaatcctgctgctgaaagtggccggctttaacctgctgatgaccctgcggctgtggtccagc

SEQ ID NO: 35586 - DNA, 2727 bp, synthetic construct
  source 1..2727: mol_type = other DNA
atggccttaccagtgaccgccttgctcctgccgctggccttgctgctccacgccgccaggccgcaggttcagctgcaagagtctggccctggcctggtcaagcctagccaaacactgagcctgacctgtaccgtgtctggcggctctatcaccaccggcgagttctactggaactggttcagacagcctcctggcaaaggactggaatggatgggagccattgccgccagcggcagcacaacatacagccctagcttcgagagccggaccagcatcagcagagacaccagcaagaatcagttcagcctgaagctgagcagcgtgacagccgccgatacagccgtgtattactgcggcagatcctttggagtggccgccgtgacaaccggccagaatagaggacagggcaccctggtcacagtgtctagcggtaccggcggaggcggatctggcggcggaggtagcggtggcggaggatctgaattcgacatcgtgctgacccagagccctctgagcctggccgtgtctctgggacagcctgccatcatcagctgtagggccagccagagcgtgtcctttgccggcacctctctgatgcactggtatcaccagaagcccggccagcagcccagactgctgatctacagagccagcaacctggaagccggcgtgcccgatagattttccggcagcggcagcaagaccgacttcaccctgaccatcagccccgtggaagccgaagatgccgccacctactactgccagcagagcagagagtacccctacaccttcggcggaggcaccaagctggaaatcaagaggctcgaggacctgaagaacgtgttcccacctgaggtggccgtgttcgagcctagcgaggccgagatcagccacacccagaaagccaccctcgtgtgcctggctaccggcttctaccccgaccatgtggaactgtcttggtgggtcaacggcaaagaggtgcacagcggcgtgtgtaccgacccccagccactgaaagaacagcccgccctgaacgacagccggtactgcctgagcagcagactgagagtgtccgccaccttctggcagaacccccggaaccacttcagatgccaggtgcagttctacggcctgagcgagaacgacgagtggacccaggacagagccaagcccgtgacccagatcgtgtctgccgaagcctggggcagagccgattgcggctttaccagcgagagctaccagcagggcgtgctgagcgccaccatcctgtacgagatcctgctgggcaaggccaccctgtacgccgtgctggtgtctgccctggtgctgatggctatggtcaagcggaaggacagccggggaagggccaagcgatctggatctggagcaacaaacttctcactactcaaacaagcaggtgacgtggaggagaatcccgggcctactagtaccatggactggatttggcgcatccttttccttgtcggcgctgctaccggcgcccattccgggccccaggtgcagctggttgaatctggcggaggactggttcagcctggcggatctctgagactgtcttgtgccgccagcggcaacatcaacagcagaaactgcatgggctggttcagacaggcccctggcaagggaagagaaggcgtggcagctatcggccaagtgaccggcagaacctactacgtggacagcgtgaagggcagattcaccatcagcctggacaacagcaagaacaccctgtacctccagatgaacagcctgagagccgaggacaccgccgtgtactattgtgctgctgcccctggctgtctgctgtctgcacttagaagcgccgactacagaaactggggccagggcacactggtcaccgtttcttctggatccggcggcggaggatctggcggaggcggatctgggggcggaggctctttcgaacaggtccaactggtgcagagcggagccgaggtcgtgaagcctggcgcttccgtgaagattagctgcaaagccagcggctacacctttaccggctactttatgcactgggtcaagcagagccctggccagagcctggaatggatcggcagaatccacccctacgacggcgacaccttctacaaccagaagttccagggcaaggccaccctgacagtggacaagagcagcaacaccgcccacatggaactgctgagcctgaccagcgaggacttcgccgtgtactactgcaccagatacgacggcagccgggctatggactattggggccagggcaccaccgtgaccgtgtctagtacgcgtatccagaaccctgatcctgccgtgtaccagctgcgggatagcaagagcagcgacaagagcgtgtgtctgttcaccgacttcgacagccagaccaacgtgtcccagagcaaggactccgacgtgtacatcaccgataagtgcgtgctggacatgcggagcatggacttcaagagcaactccgccgtggcctggtccaacaagtccgatttcgcctgcgccaacgccttcaacaacagcattatccccgaggacacattcttcccaagccccgagagcagctgcgacgtgaagctggtggaaaagagcttcgagacagacaccaacctgaacttccagaacctgagcgtgatcggcttcagaatcctgctgctgaaagtggccggctttaacctgctgatgaccctgcggctgtggtccagc

SEQ ID NO: 35587 - DNA, 1446 bp, synthetic construct
  source 1..1446: mol_type = other DNA
atggccttaccagtgaccgccttgctcctgccgctggccttgctgctccacgccgccaggccggacatccagatgacacagagccctagcagcctgtctgccagcgtgggagacagagtgaccatcacatgcaaggccagccagagcgtgtccaacgacgtgacctggtatcagcagaagcctggacaggcccctaagctgctgatctacagcgccagcaacagatacagcggagtgcccgccagattttccggctctggctacggcaccgagttcacctttaccatcagcagcgtgcagagcgaggacttcgccgtgtacttctgccagcaagactacagcagcttcggccagggcaccaagctggaaatcaagagaggcggaggcggaagtggaggcggaggatctggcggcggaggctctcaggtgcagctggtggaatctggacctggcgtggtgcagcctggcagaagcctgagaatcagctgtgccgtgtccggcttcagcgtgaccaactacggcgtgcactgggtgcgccagccacctggaaaaggactggaatggctgggcgtgatctgggctggcggcatcaccaactacaacagcgccttcatgtcccggctgaccatctccaaggacaacagcaagaacaccgtgtacctccagatgaacagcctgcgggccgaggacaccgccatgtactactgtgcttccagaggcggccactacggctacgccctggattattggggccagggaaccctcgtgaccgtgtcctctacgcgtaaaattgaagttatgtatcctcctccttacctagacaatgagaagagcaatggaaccattatccatgtgaaagggaaacacctttgtccaagtcccctatttcccggaccttctaagcccttttgggtgctggtggtggttgggggagtcctggcttgctatagcttgctagtaacagtggcctttattattttctgggtgaggagtaagaggagcaggctcctgcacagtgactacatgaacatgactccacgccgccccggacccacccgcaagcattaccagccctatgccccaccacgcgacttcgcagcctatcgctccagagtgaagttcagcaggagcgcagacgcccccgcgtaccagcagggccagaaccagctctataacgagctcaatctaggacgaagagaggagtacgatgttttggacaagagacgtggccgggaccctgagatggggggaaagccgagaaggaagaaccctcaggaaggcctgtacaatgaactgcagaaagataagatggcggaggcctacagtgagattgggatgaaaggcgagcgccggaggggcaaggggcacgatggcctttaccagggtctcagtacagccaccaaggacacctacgacgcccttcacatgcaggccctgccccctcgc

SEQ ID NO: 35588 - DNA, 1464 bp, synthetic construct
  source 1..1464: mol_type = other DNA
atggccttaccagtgaccgccttgctcctgccgctggccttgctgctccacgccgccaggccggacatccagatgacacagagccctagcagcctgtctgccagcgtgggagacagagtgaccatcacatgcaaggccagccagagcgtgtccaacgacgtgacctggtatcagcagaagcctggacaggcccctaagctgctgatctacagcgccagcaacagatacagcggagtgcccgccagattttccggctctggctacggcaccgagttcacctttaccatcagcagcgtgcagagcgaggacttcgccgtgtacttctgccagcaagactacagcagcttcggccagggcaccaagctggaaatcaagagaggcggaggcggaagtggaggcggaggatctggcggcggaggctctcaggtgcagctggtggaatctggacctggcgtggtgcagcctggcagaagcctgagaatcagctgtgccgtgtccggcttcagcgtgaccaactacggcgtgcactgggtgcgccagccacctggaaaaggactggaatggctgggcgtgatctgggctggcggcatcaccaactacaacagcgccttcatgtcccggctgaccatctccaaggacaacagcaagaacaccgtgtacctccagatgaacagcctgcgggccgaggacaccgccatgtactactgtgcttccagaggcggccactacggctacgccctggattattggggccagggaaccctcgtgaccgtgtcctctacgcgtgcgaagcccaccacgacgccagcgccgcgaccaccaacaccggcgcccaccatcgcgtcgcagcccctgtccctgcgcccagaggcgtgccggccagcggcggggggcgcagtgcacacgagggggctggacttcgcctgtgacatctacatctgggcgcccttggccgggacttgtggggtccttctcctgtcactggttatcaccctttactgcaaacggggcagaaagaaactcctgtatatattcaaacaaccatttatgagaccagtacaaactactcaagaggaagatggctgtagctgccgatttccagaagaagaagaaggaggatgtgaactgagagtgaagttcagcaggagcgcagacgcccccgcgtaccagcagggccagaaccagctctataacgagctgaatctaggacgaagagaggagtacgatgttttggacaagagacgtggccgggaccctgagatggggggaaagccgagaaggaagaaccctcaggaaggcctgtacaatgaactgcagaaagataagatggcggaggcctacagtgagattgggatgaaaggcgagcgccggaggggcaaggggcacgatggcctttaccagggtctcagtacagccaccaaggacacctacgacgcccttcacatgcaggccctgccccctcgc

SEQ ID NO: 35589 - DNA, 1464 bp, synthetic construct
  source 1..1464: mol_type = other DNA
atggccttaccagtgaccgccttgctcctgccgctggccttgctgctccacgccgccaggccgcaggtgcagctggtggaatctggacctggcgtggtgcagcctggcagaagcctgagaatcagctgtgccgtgtccggcttcagcgtgaccaactacggcgtgcactgggtgcgccagccacctggaaaaggactggaatggctgggcgtgatctgggctggcggcatcaccaactacaacagcgccttcatgtcccggctgaccatctccaaggacaacagcaagaacaccgtgtacctccagatgaacagcctgcgggccgaggacaccgccatgtactactgtgcttccagaggcggccactacggctacgccctggattattggggccagggaaccctcgtgaccgtgtcctctggcggaggcggaagtggaggcggaggatctggcggcggaggctctgacatccagatgacacagagccctagcagcctgtctgccagcgtgggagacagagtgaccatcacatgcaaggccagccagagcgtgtccaacgacgtgacctggtatcagcagaagcctggacaggcccctaagctgctgatctacagcgccagcaacagatacagcggagtgcccgccagattttccggctctggctacggcaccgagttcacctttaccatcagcagcgtgcagagcgaggacttcgccgtgtacttctgccagcaagactacagcagcttcggccagggcaccaagctggaaatcaagagaacgcgtgcgaagcccaccacgacgccagcgccgcgaccaccaacaccggcgcccaccatcgcgtcgcagcccctgtccctgcgcccagaggcgtgccggccagcggcggggggcgcagtgcacacgagggggctggacttcgcctgtgacatctacatctgggcgcccttggccgggacttgtggggtccttctcctgtcactggttatcaccctttactgcaaacggggcagaaagaaactcctgtatatattcaaacaaccatttatgagaccagtacaaactactcaagaggaagatggctgtagctgccgatttccagaagaagaagaaggaggatgtgaactgagagtgaagttcagcaggagcgcagacgcccccgcgtaccagcagggccagaaccagctctataacgagctgaatctaggacgaagagaggagtacgatgttttggacaagagacgtggccgggaccctgagatggggggaaagccgagaaggaagaaccctcaggaaggcctgtacaatgaactgcagaaagataagatggcggaggcctacagtgagattgggatgaaaggcgagcgccggaggggcaaggggcacgatggcctttaccagggtctcagtacagccaccaaggacacctacgacgcccttcacatgcaggccctgccccctcgc

SEQ ID NO: 35590 - DNA, 1863 bp, synthetic construct
  source 1..1863: mol_type = other DNA
atggccttaccagtgaccgccttgctcctgccgctggccttgctgctccacgccgccaggccggacatccagatgacacagagccctagcagcctgtctgccagcgtgggagacagagtgaccatcacatgcaaggccagccagagcgtgtccaacgacgtgacctggtatcagcagaagcctggacaggcccctaagctgctgatctacagcgccagcaacagatacagcggagtgcccgccagattttccggctctggctacggcaccgagttcacctttaccatcagcagcgtgcagagcgaggacttcgccgtgtacttctgccagcaagactacagcagcttcggccagggcaccaagctggaaatcaagagactcgagatccagaaccctgatcctgccgtgtaccagctgcgggatagcaagagcagcgacaagagcgtgtgtctgttcaccgacttcgacagccagaccaacgtgtcccagagcaaggactccgacgtgtacatcaccgataagtgcgtgctggacatgcggagcatggacttcaagagcaactccgccgtggcctggtccaacaagtccgatttcgcctgcgccaacgccttcaacaacagcattatccccgaggacacattcttcccaagcagcgacgtgccctgcgacgtgaagctggtggaaaagagcttcgagacagacaccaacctgaacttccagaacctgagcgtgatcggcttcagaatcctgctgctgaaagtggccggctttaacctgctgatgaccctgcggctgtggtccagccgcgccaagagaagcggatctggcgtgaagcagaccctgaatttcgacctgctgaagctggctggcgacgtggaatccaacccaggccctactagtatggactggatttggcgcatccttttccttgtcggcgctgctaccggcgcgcattccttcgaacaggtgcagctggtggaatctggacctggcgtggtgcagcctggcagaagcctgagaatcagctgtgccgtgtccggcttcagcgtgaccaactacggcgtgcactgggtgcgccagccacctggaaaaggactggaatggctgggcgtgatctgggctggcggcatcaccaactacaacagcgccttcatgtcccggctgaccatctccaaggacaacagcaagaacaccgtgtacctccagatgaacagcctgcgggccgaggacaccgccatgtactactgtgcttccagaggcggccactacggctacgccctggattattggggccagggaaccctcgtgaccgtgtcctctacgcgtgaggacctgaagaacgtgttcccacctgaggtggccgtgttcgagcctagcaaggccgagatcgcccacacccagaaagccaccctcgtgtgcctggctaccggcttctaccccgaccatgtggaactgtcttggtgggtcaacggcaaagaggtgcacagcggcgtgtgtaccgacccccagccactgaaagaacagcccgccctgaacgacagccggtactgcctgagcagcagactgagagtgtccgccaccttctggcagaacccccggaaccacttcagatgccaggtgcagttctacggcctgagcgagaacgacgagtggacccaggacagagccaagcccgtgacccagatcgtgtctgccgaagcctggggcagagccgattgcggcatcaccagcgccagctaccaccagggcgtgctgagcgccaccatcctgtacgagatcctgctgggcaaggccaccctgtacgccgtgctggtgtctgccctggtgctgatggctatggtcaagcggaaggacagccgggga

SEQ ID NO: 35591 - DNA, 1851 bp, synthetic construct
  source 1..1851: mol_type = other DNA
atggccttaccagtgaccgccttgctcctgccgctggccttgctgctccacgccgccaggccggacatccagatgacacagagccctagcagcctgtctgccagcgtgggagacagagtgaccatcacatgcaaggccagccagagcgtgtccaacgacgtgacctggtatcagcagaagcctggacaggcccctaagctgctgatctacagcgccagcaacagatacagcggagtgcccgccagattttccggctctggctacggcaccgagttcacctttaccatcagcagcgtgcagagcgaggacttcgccgtgtacttctgccagcaagactacagcagcttcggccagggcaccaagctggaaatcaagagactcgaggacctgaagaacgtgttcccacctgaggtggccgtgttcgagcctagcaaggccgagatcgcccacacccagaaagccaccctcgtgtgcctggctaccggcttctaccccgaccatgtggaactgtcttggtgggtcaacggcaaagaggtgcacagcggcgtgtgtaccgacccccagccactgaaagaacagcccgccctgaacgacagccggtactgcctgagcagcagactgagagtgtccgccaccttctggcagaacccccggaaccacttcagatgccaggtgcagttctacggcctgagcgagaacgacgagtggacccaggacagagccaagcccgtgacccagatcgtgtctgccgaagcctggggcagagccgattgcggcatcaccagcgccagctaccaccagggcgtgctgagcgccaccatcctgtacgagatcctgctgggcaaggccaccctgtacgccgtgctggtgtctgccctggtgctgatggctatggtcaagcggaaggacagccggggaagggccaagcgatctggatctggagcaacaaacttctcactactcaaacaagcaggtgacgtggaggagaatcccgggcctactagtatggactggatttggcgcatccttttccttgtcggcgctgctaccggcgcgcattccttcgaacaggtgcagctggtggaatctggacctggcgtggtgcagcctggcagaagcctgagaatcagctgtgccgtgtccggcttcagcgtgaccaactacggcgtgcactgggtgcgccagccacctggaaaaggactggaatggctgggcgtgatctgggctggcggcatcaccaactacaacagcgccttcatgtcccggctgaccatctccaaggacaacagcaagaacaccgtgtacctccagatgaacagcctgcgggccgaggacaccgccatgtactactgtgcttccagaggcggccactacggctacgccctggattattggggccagggaaccctcgtgaccgtgtcctctacgcgtatccagaaccctgatcctgccgtgtaccagctgcgggatagcaagagcagcgacaagagcgtgtgtctgttcaccgacttcgacagccagaccaacgtgtcccagagcaaggactccgacgtgtacatcaccgataagtgcgtgctggacatgcggagcatggacttcaagagcaactccgccgtggcctggtccaacaagtccgatttcgcctgcgccaacgccttcaacaacagcattatccccgaggacacattcttcccaagcagcgacgtgccctgcgacgtgaagctggtggaaaagagcttcgagacagacaccaacctgaacttccagaacctgagcgtgatcggcttcagaatcctgctgctgaaagtggccggctttaacctgctgatgaccctgcggctgtggtccagc

SEQ ID NO: 35592 - DNA, 1851 bp, synthetic construct
  source 1..1851: mol_type = other DNA
atggccttaccagtgaccgccttgctcctgccgctggccttgctgctccacgccgccaggccggacatccagatgacacagagccctagcagcctgtctgccagcgtgggagacagagtgaccatcacatgcaaggccagccagagcgtgtccaacgacgtgacctggtatcagcagaagcctggacaggcccctaagctgctgatctacagcgccagcaacagatacagcggagtgcccgccagattttccggctctggctacggcaccgagttcacctttaccatcagcagcgtgcagagcgaggacttcgccgtgtacttctgccagcaagactacagcagcttcggccagggcaccaagctggaaatcaagagactcgaggacctgaagaacgtgttcccacctgaggtggccgtgttcgagcctagcgaggccgagatcagccacacccagaaagccaccctcgtgtgcctggctaccggcttctaccccgaccatgtggaactgtcttggtgggtcaacggcaaagaggtgcacagcggcgtgtgtaccgacccccagccactgaaagaacagcccgccctgaacgacagccggtactgcctgagcagcagactgagagtgtccgccaccttctggcagaacccccggaaccacttcagatgccaggtgcagttctacggcctgagcgagaacgacgagtggacccaggacagagccaagcccgtgacccagatcgtgtctgccgaagcctggggcagagccgattgcggctttaccagcgagagctaccagcagggcgtgctgagcgccaccatcctgtacgagatcctgctgggcaaggccaccctgtacgccgtgctggtgtctgccctggtgctgatggctatggtcaagcggaaggacagccggggaagggccaagcgatctggatctggagcaacaaacttctcactactcaaacaagcaggtgacgtggaggagaatcccgggcctactagtatggactggatttggcgcatccttttccttgtcggcgctgctaccggcgcgcattccttcgaacaggtgcagctggtggaatctggacctggcgtggtgcagcctggcagaagcctgagaatcagctgtgccgtgtccggcttcagcgtgaccaactacggcgtgcactgggtgcgccagccacctggaaaaggactggaatggctgggcgtgatctgggctggcggcatcaccaactacaacagcgccttcatgtcccggctgaccatctccaaggacaacagcaagaacaccgtgtacctccagatgaacagcctgcgggccgaggacaccgccatgtactactgtgcttccagaggcggccactacggctacgccctggattattggggccagggaaccctcgtgaccgtgtcctctacgcgtatccagaaccctgatcctgccgtgtaccagctgcgggatagcaagagcagcgacaagagcgtgtgtctgttcaccgacttcgacagccagaccaacgtgtcccagagcaaggactccgacgtgtacatcaccgataagtgcgtgctggacatgcggagcatggacttcaagagcaactccgccgtggcctggtccaacaagtccgatttcgcctgcgccaacgccttcaacaacagcattatccccgaggacacattcttcccaagccccgagagcagctgcgacgtgaagctggtggaaaagagcttcgagacagacaccaacctgaacttccagaacctgagcgtgatcggcttcagaatcctgctgctgaaagtggccggctttaacctgctgatgaccctgcggctgtggtccagc

SEQ ID NO: 35593 - DNA, 1863 bp, synthetic construct
  source 1..1863: mol_type = other DNA
atggccttaccagtgaccgccttgctcctgccgctggccttgctgctccacgccgccaggccggacatccagatgacacagagccctagcagcctgtctgccagcgtgggagacagagtgaccatcacatgcaaggccagccagagcgtgtccaacgacgtgacctggtatcagcagaagcctggacaggcccctaagctgctgatctacagcgccagcaacagatacagcggagtgcccgccagattttccggctctggctacggcaccgagttcacctttaccatcagcagcgtgcagagcgaggacttcgccgtgtacttctgccagcaagactacagcagcttcggccagggcaccaagctggaaatcaagagactcgagatccagaaccctgatcctgccgtgtaccagctgcgggatagcaagagcagcgacaagagcgtgtgtctgttcaccgacttcgacagccagaccaacgtgtcccagagcaaggactccgacgtgtacatcaccgataagtgcgtgctggacatgcggagcatggacttcaagagcaactccgccgtggcctggtccaacaagtccgatttcgcctgcgccaacgccttcaacaacagcattatccccgaggacacattcttcccaagccccgagagcagctgcgacgtgaagctggtggaaaagagcttcgagacagacaccaacctgaacttccagaacctgagcgtgatcggcttcagaatcctgctgctgaaagtggccggctttaacctgctgatgaccctgcggctgtggtccagccgcgccaagagaagcggatctggcgtgaagcagaccctgaatttcgacctgctgaagctggctggcgacgtggaatccaacccaggccctactagtatggactggatttggcgcatccttttccttgtcggcgctgctaccggcgcgcattccttcgaacaggtgcagctggtggaatctggacctggcgtggtgcagcctggcagaagcctgagaatcagctgtgccgtgtccggcttcagcgtgaccaactacggcgtgcactgggtgcgccagccacctggaaaaggactggaatggctgggcgtgatctgggctggcggcatcaccaactacaacagcgccttcatgtcccggctgaccatctccaaggacaacagcaagaacaccgtgtacctccagatgaacagcctgcgggccgaggacaccgccatgtactactgtgcttccagaggcggccactacggctacgccctggattattggggccagggaaccctcgtgaccgtgtcctctacgcgtgaggacctgaagaacgtgttcccacctgaggtggccgtgttcgagcctagcgaggccgagatcagccacacccagaaagccaccctcgtgtgcctggctaccggcttctaccccgaccatgtggaactgtcttggtgggtcaacggcaaagaggtgcacagcggcgtgtgtaccgacccccagccactgaaagaacagcccgccctgaacgacagccggtactgcctgagcagcagactgagagtgtccgccaccttctggcagaacccccggaaccacttcagatgccaggtgcagttctacggcctgagcgagaacgacgagtggacccaggacagagccaagcccgtgacccagatcgtgtctgccgaagcctggggcagagccgattgcggctttaccagcgagagctaccagcagggcgtgctgagcgccaccatcctgtacgagatcctgctgggcaaggccaccctgtacgccgtgctggtgtctgccctggtgctgatggctatggtcaagcggaaggacagccgggga

SEQ ID NO: 35594 - DNA, 1899 bp, synthetic construct
  source 1..1899: mol_type = other DNA
atggccttaccagtgaccgccttgctcctgccgctggccttgctgctccacgccgccaggccgctcgaggaggacctgaagaacgtgttcccacctgaggtggccgtgttcgagcctagcaaggccgagatcgcccacacccagaaagccaccctcgtgtgcctggctaccggcttctaccccgaccatgtggaactgtcttggtgggtcaacggcaaagaggtgcacagcggcgtgtgtaccgacccccagccactgaaagaacagcccgccctgaacgacagccggtactgcctgagcagcagactgagagtgtccgccaccttctggcagaacccccggaaccacttcagatgccaggtgcagttctacggcctgagcgagaacgacgagtggacccaggacagagccaagcccgtgacccagatcgtgtctgccgaagcctggggcagagccgattgcggcatcaccagcgccagctaccaccagggcgtgctgagcgccaccatcctgtacgagatcctgctgggcaaggccaccctgtacgccgtgctggtgtctgccctggtgctgatggctatggtcaagcggaaggacagccggggaagggccaagcgatctggatctggagcaacaaacttctcactactcaaacaagcaggtgacgtggaggagaatcccgggcctactagcatggccttaccagtgaccgccttgctcctgccgctggccttgctgctccacgccgccaggccggacatccagatgacacagagccctagcagcctgtctgccagcgtgggagacagagtgaccatcacatgcaaggccagccagagcgtgtccaacgacgtgacctggtatcagcagaagcctggacaggcccctaagctgctgatctacagcgccagcaacagatacagcggagtgcccgccagattttccggctctggctacggcaccgagttcacctttaccatcagcagcgtgcagagcgaggacttcgccgtgtacttctgccagcaagactacagcagcttcggccagggcaccaagctggaaatcaagagaggcggaggcggaagtggaggcggaggatctggcggcggaggctctcaggtgcagctggtggaatctggacctggcgtggtgcagcctggcagaagcctgagaatcagctgtgccgtgtccggcttcagcgtgaccaactacggcgtgcactgggtgcgccagccacctggaaaaggactggaatggctgggcgtgatctgggctggcggcatcaccaactacaacagcgccttcatgtcccggctgaccatctccaaggacaacagcaagaacaccgtgtacctccagatgaacagcctgcgggccgaggacaccgccatgtactactgtgcttccagaggcggccactacggctacgccctggattattggggccagggaaccctcgtgaccgtgtcctctacgcgtatccagaaccctgatcctgccgtgtaccagctgcgggatagcaagagcagcgacaagagcgtgtgtctgttcaccgacttcgacagccagaccaacgtgtcccagagcaaggactccgacgtgtacatcaccgataagtgcgtgctggacatgcggagcatggacttcaagagcaactccgccgtggcctggtccaacaagtccgatttcgcctgcgccaacgccttcaacaacagcattatccccgaggacacattcttcccaagcagcgacgtgccctgcgacgtgaagctggtggaaaagagcttcgagacagacaccaacctgaacttccagaacctgagcgtgatcggcttcagaatcctgctgctgaaagtggccggctttaacctgctgatgaccctgcggctgtggtccagc

SEQ ID NO: 35595 - DNA, 1920 bp, synthetic construct
  source 1..1920: mol_type = other DNA
atggccttaccagtgaccgccttgctcctgccgctggccttgctgctccacgccgccaggccgctcgagggctccggcgatcgccctgatcctgccgtgtaccagctgcgggatagcaagagcagcgacaagagcgtgtgtctgttcaccgacttcgacagccagaccaacgtgtcccagagcaaggactccgacgtgtacatcaccgataagtgcgtgctggacatgcggagcatggacttcaagagcaactccgccgtggcctggtccaacaagtccgatttcgcctgcgccaacgccttcaacaacagcattatccccgaggacacattcttcccaagccccgagagcagctgcgacgtgaagctggtggaaaagagcttcgagacagacaccaacctgaacttccagaacctgagcgtgatcggcttcagaatcctgctgctgaaagtggccggctttaacctgctgatgaccctgcggctgtggtccagctctagtcgcgccaagagaagcggatctggcgtgaagcagaccctgaatttcgacctgctgaagctggctggcgacgtggaatccaacccaggccccactagcatggccttaccagtgaccgccttgctcctgccgctggccttgctgctccacgccgccaggccggacatccagatgacacagagccctagcagcctgtctgccagcgtgggagacagagtgaccatcacatgcaaggccagccagagcgtgtccaacgacgtgacctggtatcagcagaagcctggacaggcccctaagctgctgatctacagcgccagcaacagatacagcggagtgcccgccagattttccggctctggctacggcaccgagttcacctttaccatcagcagcgtgcagagcgaggacttcgccgtgtacttctgccagcaagactacagcagcttcggccagggcaccaagctggaaatcaagagaggcggaggcggaagtggaggcggaggatctggcggcggaggctctcaggtgcagctggtggaatctggacctggcgtggtgcagcctggcagaagcctgagaatcagctgtgccgtgtccggcttcagcgtgaccaactacggcgtgcactgggtgcgccagccacctggaaaaggactggaatggctgggcgtgatctgggctggcggcatcaccaactacaacagcgccttcatgtcccggctgaccatctccaaggacaacagcaagaacaccgtgtacctccagatgaacagcctgcgggccgaggacaccgccatgtactactgtgcttccagaggcggccactacggctacgccctggattattggggccagggaaccctcgtgaccgtgtcctctacgcgtgaggacctgaagaacgtgttcccacctgaggtggccgtgttcgagcctagcgaggccgagatcagccacacccagaaagccaccctcgtgtgcctggctaccggcttctaccccgaccatgtggaactgtcttggtgggtcaacggcaaagaggtgcacagcggcgtgtgtaccgacccccagccactgaaagaacagcccgccctgaacgacagccggtactgcctgagcagcagactgagagtgtccgccaccttctggcagaacccccggaaccacttcagatgccaggtgcagttctacggcctgagcgagaacgacgagtggacccaggacagagccaagcccgtgacccagatcgtgtctgccgaagcctggggcagagccgattgcggctttaccagcgagagctaccagcagggcgtgctgagcgccaccatcctgtacgagatcctgctgggcaaggccaccctgtacgccgtgctggtgtctgccctggtgctgatggctatggtcaagcggaaggacagccgggga

SEQ ID NO: 35596 - DNA, 1851 bp, synthetic construct
  source 1..1851: mol_type = other DNA
atggccttaccagtgaccgccttgctcctgccgctggccttgctgctccacgccgccaggccggacatccagatgacacagagccctagcagcctgtctgccagcgtgggagacagagtgaccatcacatgcaaggccagccagagcgtgtccaacgacgtgacctggtatcagcagaagcctggacaggcccctaagctgctgatctacagcgccagcaacagatacagcggagtgcccgccagattttccggctctggctacggcaccgagttcacctttaccatcagcagcgtgcagagcgaggacttcgccgtgtacttctgccagcaagactacagcagcttcggccagggcaccaagctggaaatcaagagactcgaggacctgaagaacgtgttcccacctgaggtggccgtgttcgagcctagcgaggccgagatcagccacacccagaaagccaccctcgtgtgcctggctaccggcttctaccccgaccatgtggaactgtcttggtgggtcaacggcaaagaggtgcacagcggcgtgtctaccgacccccagccactgaaagaacagcccgccctgaacgacagccggtactgcctgagcagcagactgagagtgtccgccaccttctggcagaacccccggaaccacttcagatgccaggtgcagttctacggcctgagcgagaacgacgagtggacccaggacagagccaagcccgtgacccagatcgtgtctgccgaagcctggggcagagccgattgcggctttaccagcgagagctaccagcagggcgtgctgagcgccaccatcctgtacgagatcctgctgggcaaggccaccctgtacgccgtgctggtgtctgccctggtgctgatggctatggtcaagcggaaggacagccggggaagggccaagcgatctggatctggagcaacaaacttctcactactcaaacaagcaggtgacgtggaggagaatcccgggcctactagtatggactggatttggcgcatccttttccttgtcggcgctgctaccggcgcgcattccttcgaacaggtgcagctggtggaatctggacctggcgtggtgcagcctggcagaagcctgagaatcagctgtgccgtgtccggcttcagcgtgaccaactacggcgtgcactgggtgcgccagccacctggaaaaggactggaatggctgggcgtgatctgggctggcggcatcaccaactacaacagcgccttcatgtcccggctgaccatctccaaggacaacagcaagaacaccgtgtacctccagatgaacagcctgcgggccgaggacaccgccatgtactactgtgcttccagaggcggccactacggctacgccctggattattggggccagggaaccctcgtgaccgtgtcctctacgcgtatccagaaccctgatcctgccgtgtaccagctgcgggatagcaagagcagcgacaagagcgtgtgtctgttcaccgacttcgacagccagaccaacgtgtcccagagcaaggactccgacgtgtacatcaccgataagaccgtgctggacatgcggagcatggacttcaagagcaactccgccgtggcctggtccaacaagtccgatttcgcctgcgccaacgccttcaacaacagcattatccccgaggacacattcttcccaagccccgagagcagctgcgacgtgaagctggtggaaaagagcttcgagacagacaccaacctgaacttccagaacctgagcgtgatcggcttcagaatcctgctgctgaaagtggccggctttaacctgctgatgaccctgcggctgtggtccagc

SEQ ID NO: 35597 - DNA, 1875 bp, synthetic construct
  source 1..1875: mol_type = other DNA
atggccttaccagtgaccgccttgctcctgccgctggccttgctgctccacgccgccaggccggacatccagatgacacagagccctagcagcctgtctgccagcgtgggagacagagtgaccatcacatgcaaggccagccagagcgtgtccaacgacgtgacctggtatcagcagaagcctggacaggcccctaagctgctgatctacagcgccagcaacagatacagcggagtgcccgccagattttccggctctggctacggcaccgagttcacctttaccatcagcagcgtgcagagcgaggacttcgccgtgtacttctgccagcaagactacagcagcttcggccagggcaccaagctggaaatcaagagactcgaggacaagcagctggacgccgacgtgtcccccaagcctaccatcttcctgccctctatcgccgagacaaagctccagaaggccggcacctacctgtgcctgctggaaaagttcttcccagatgtgattaagatccactggcaggaaaagaagtccaacaccatcctgggcagccaggaaggcaacaccatgaagaccaacgacacctacatgaagttcagctggctgaccgtgcccgagaagtccctggacaaagaacacagatgcatcgtgcggcacgaaaacaacaagaacggcgtggaccaggaaatcatcttcccacccatcaagaccgatgtgattacaatggaccccaaggacaactgctccaaggacgccaacgataccctgctgctccagctgaccaacaccagcgcctactacatgtacttgttgctgctgctgaagtccgtggtgtacttcgccatcatcacatgctgcctgctgcggagaaccgccttctgctgcaacggcgagaagtctagggccaagcgatctggatctggagcaacaaacttctcactactcaaacaagcaggtgacgtggaggagaatcccgggcctactagtatggactggatttggcgcatccttttccttgtcggcgctgctaccggcgcgcattccttcgaacaggtgcagctggtggaatctggacctggcgtggtgcagcctggcagaagcctgagaatcagctgtgccgtgtccggcttcagcgtgaccaactacggcgtgcactgggtgcgccagccacctggaaaaggactggaatggctgggcgtgatctgggctggcggcatcaccaactacaacagcgccttcatgtcccggctgaccatctccaaggacaacagcaagaacaccgtgtacctccagatgaacagcctgcgggccgaggacaccgccatgtactactgtgcttccagaggcggccactacggctacgccctggattattggggccagggaaccctcgtgaccgtgtcctctacgcgtagccagcctcacaccaagcccagcgtgttcgtgatgaagaacggcaccaacgtggcctgcctcgtgaaagagttctaccccaaggacatcaggatcaacctggtgtccagcaagaagatcaccgagttcgaccccgccatcgtgatctcccccagcggcaagtacaacgccgtgaagctggggaagtacgaggacagcaacagcgtgacctgctccgtgcagcacgacaacaagaccgtgcacagcaccgactttgaagtgaaaaccgactccaccgaccacgtgaagcccaaagagacagagaacaccaagcagcccagcaagagctgccacaagcccaaggccatcgtgcacaccgagaaagtgaacatgatgagcctgaccgtgctgggcctgcggatgctgttcgccaaaaccgtggccgtgaacttcctgctgaccgccaagctgttcttcctc

SEQ ID NO: 35598 - DNA, 1875 bp, synthetic construct
  source 1..1875: mol_type = other DNA
atggccttaccagtgaccgccttgctcctgccgctggccttgctgctccacgccgccaggccggacatccagatgacacagagccctagcagcctgtctgccagcgtgggagacagagtgaccatcacatgcaaggccagccagagcgtgtccaacgacgtgacctggtatcagcagaagcctggacaggcccctaagctgctgatctacagcgccagcaacagatacagcggagtgcccgccagattttccggctctggctacggcaccgagttcacctttaccatcagcagcgtgcagagcgaggacttcgccgtgtacttctgccagcaagactacagcagcttcggccagggcaccaagctggaaatcaagagactcgagagccagcctcacaccaagcccagcgtgttcgtgatgaagaacggcaccaacgtggcctgcctcgtgaaagagttctaccccaaggacatcaggatcaacctggtgtccagcaagaagatcaccgagttcgaccccgccatcgtgatctcccccagcggcaagtacaacgccgtgaagctggggaagtacgaggacagcaacagcgtgacctgctccgtgcagcacgacaacaagaccgtgcacagcaccgactttgaagtgaaaaccgactccaccgaccacgtgaagcccaaagagacagagaacaccaagcagcccagcaagagctgccacaagcccaaggccatcgtgcacaccgagaaagtgaacatgatgagcctgaccgtgctgggcctgcggatgctgttcgccaaaaccgtggccgtgaacttcctgctgaccgccaagctgttcttcctcagggccaagcgatctggatctggagcaacaaacttctcactactcaaacaagcaggtgacgtggaggagaatcccgggcctactagtatggactggatttggcgcatccttttccttgtcggcgctgctaccggcgcgcattccttcgaacaggtgcagctggtggaatctggacctggcgtggtgcagcctggcagaagcctgagaatcagctgtgccgtgtccggcttcagcgtgaccaactacggcgtgcactgggtgcgccagccacctggaaaaggactggaatggctgggcgtgatctgggctggcggcatcaccaactacaacagcgccttcatgtcccggctgaccatctccaaggacaacagcaagaacaccgtgtacctccagatgaacagcctgcgggccgaggacaccgccatgtactactgtgcttccagaggcggccactacggctacgccctggattattggggccagggaaccctcgtgaccgtgtcctctacgcgtgacaagcagctggacgccgacgtgtcccccaagcctaccatcttcctgccctctatcgccgagacaaagctccagaaggccggcacctacctgtgcctgctggaaaagttcttcccagatgtgattaagatccactggcaggaaaagaagtccaacaccatcctgggcagccaggaaggcaacaccatgaagaccaacgacacctacatgaagttcagctggctgaccgtgcccgagaagtccctggacaaagaacacagatgcatcgtgcggcacgaaaacaacaagaacggcgtggaccaggaaatcatcttcccacccatcaagaccgatgtgattacaatggaccccaaggacaactgctccaaggacgccaacgataccctgctgctccagctgaccaacaccagcgcctactacatgtacttgttgctgctgctgaagtccgtggtgtacttcgccatcatcacatgctgcctgctgcggagaaccgccttctgctgcaacggcgagaagtct

SEQ ID NO: 35599 - DNA, 1920 bp, synthetic construct
  source 1..1920: mol_type = other DNA
atggccttaccagtgaccgccttgctcctgccgctggccttgctgctccacgccgccaggccgctcgaggacaagcagctggacgccgacgtgtcccccaagcctaccatcttcctgccctctatcgccgagacaaagctccagaaggccggcacctacctgtgcctgctggaaaagttcttcccagatgtgattaagatccactggcaggaaaagaagtccaacaccatcctgggcagccaggaaggcaacaccatgaagaccaacgacacctacatgaagttcagctggctgaccgtgcccgagaagtccctggacaaagaacacagatgcatcgtgcggcacgaaaacaacaagaacggcgtggaccaggaaatcatcttcccacccatcaagaccgatgtgattacaatggaccccaaggacaactgctccaaggacgccaacgataccctgctgctccagctgaccaacaccagcgcctactacatgtacttgttgctgctgctgaagtccgtggtgtacttcgccatcatcacatgctgcctgctgcggagaaccgccttctgctgcaacggcgagaagtctagggccaagcgatctggatctggagcaacaaacttctcactactcaaacaagcaggtgacgtggaggagaatcccgggcctactagcatggccttaccagtgaccgccttgctcctgccgctggccttgctgctccacgccgccaggccggacatccagatgacacagagccctagcagcctgtctgccagcgtgggagacagagtgaccatcacatgcaaggccagccagagcgtgtccaacgacgtgacctggtatcagcagaagcctggacaggcccctaagctgctgatctacagcgccagcaacagatacagcggagtgcccgccagattttccggctctggctacggcaccgagttcacctttaccatcagcagcgtgcagagcgaggacttcgccgtgtacttctgccagcaagactacagcagcttcggccagggcaccaagctggaaatcaagagaggcggaggcggaagtggaggcggaggatctggcggcggaggctctcaggtgcagctggtggaatctggacctggcgtggtgcagcctggcagaagcctgagaatcagctgtgccgtgtccggcttcagcgtgaccaactacggcgtgcactgggtgcgccagccacctggaaaaggactggaatggctgggcgtgatctgggctggcggcatcaccaactacaacagcgccttcatgtcccggctgaccatctccaaggacaacagcaagaacaccgtgtacctccagatgaacagcctgcgggccgaggacaccgccatgtactactgtgcttccagaggcggccactacggctacgccctggattattggggccagggaaccctcgtgaccgtgtcctctacgcgtagccagcctcacaccaagcccagcgtgttcgtgatgaagaacggcaccaacgtggcctgcctcgtgaaagagttctaccccaaggacatcaggatcaacctggtgtccagcaagaagatcaccgagttcgaccccgccatcgtgatctcccccagcggcaagtacaacgccgtgaagctggggaagtacgaggacagcaacagcgtgacctgctccgtgcagcacgacaacaagaccgtgcacagcaccgactttgaagtgaaaaccgactccaccgaccacgtgaagcccaaagagacagagaacaccaagcagcccagcaagagctgccacaagcccaaggccatcgtgcacaccgagaaagtgaacatgatgagcctgaccgtgctgggcctgcggatgctgttcgccaaaaccgtggccgtgaacttcctgctgaccgccaagctgttcttcctc

SEQ ID NO: 35600 - DNA, 2382 bp, synthetic construct
  source 1..2382: mol_type = other DNA
atggccttaccagtgaccgccttgctcctgccgctggccttgctgctccacgccgccaggccggacatccagatgacacagagccctagcagcctgtctgccagcgtgggagacagagtgaccatcacatgcaaggccagccagagcgtgtccaacgacgtgacctggtatcagcagaagcctggacaggcccctaagctgctgatctacagcgccagcaacagatacagcggagtgcccgccagattttccggctctggctacggcaccgagttcacctttaccatcagcagcgtgcagagcgaggacttcgccgtgtacttctgccagcaagactacagcagcttcggccagggcaccaagctggaaatcaagagaggacagcctaaggccaatcctaccgtgacactgttccctccaagcagcgaagaactccaggccaacaaggccacacttgtgtgcctgatctccgacttctaccctggggctgtgacagtggcttggaaggccgatggatctcctgtgaaagccggcgtggaaaccaccaagccatccaagcagagcaacaacaaatacgccgccagctcctacctgagcctgacacctgagcagtggaagtcccacagatcctacagctgccaagtgacccacgaaggcagcaccgtggaaaagacagtggcccctacagagtgcagcggatcccagagcttcggcctgctggaccccaagctgtgctacctgctggatggcatcctgttcatctacggcgtgatcctgaccgccctgttcctgagagtgaagttcagcagaagcgccgacgcccctgcctaccagcagggacagaaccaactgtacaacgagctgaacctgggcagacgggaagagtacgacgtgctggacaagcggagaggcagggaccctgagatgggcggaaagccccagcggagaaagaacccccaggaaggactgtataacgaactccagaaagacaagatggccgaagcctacagcgagatcggcatgaagggcgagcggagaagaggcaagggccacgatggcctgtaccagggcctgagcaccgccaccaaggacacctatgacgccctgcacatgcaggccctgcctccaagaagggccaagcgatctggatctggagcaacaaacttctcactactcaaacaagcaggtgacgtggaggagaatcccgggcctactagtatggactggatttggcgcatccttttccttgtcggcgctgctaccggcgcgcattccttcgaacaggtgcagctggtggaatctggacctggcgtggtgcagcctggcagaagcctgagaatcagctgtgccgtgtccggcttcagcgtgaccaactacggcgtgcactgggtgcgccagccacctggaaaaggactggaatggctgggcgtgatctgggctggcggcatcaccaactacaacagcgccttcatgtcccggctgaccatctccaaggacaacagcaagaacaccgtgtacctccagatgaacagcctgcgggccgaggacaccgccatgtactactgtgcttccagaggcggccactacggctacgccctggattattggggccagggaaccctcgtgaccgtgtcctctgcctctacaaagggaccctccgtgtttcctctggctcccagcagcaagtctacaagcggaggaacagccgctctgggctgcctggtcaaggattactttcccgagcctgtgaccgtgtcctggaatagcggagcactgacaagcggcgtgcacacctttccagccgtgctgcaaagcagcggcctgtactctctgagcagcgtggtcacagtgcctagctctagcctgggcacccagacctacatctgcaatgtgaaccacaagcctagcaacaccaaggtggacaagagagtggaacccaagagctgtggtacccagagttttgggttgttggaccctaaattgtgctatctgttggacggaatcctgttcatttacggagtgatcctgaccgcattgttcctgcgggttaagttttccagatccgcagacgcacccgcttaccaacaagggcagaaccaactctacaatgaacttaatttggggcggagggaagagtacgacgttctggacaaaaggaggggacgagatcccgagatgggcggaaagcctcagcgaaggaagaatccgcaagaggggctttataacgaactccagaaagataaaatggcagaagcctatagtgagattgggatgaagggagaaaggaggaggggtaaaggtcacgatgggttgtaccaaggattgagcacagccactaaagatacctatgatgcgctccacatgcaggccctgccgccaaga

SEQ ID NO: 35601 - DNA, 2439 bp, synthetic construct
  source 1..2439: mol_type = other DNA
atggccttaccagtgaccgccttgctcctgccgctggccttgctgctccacgccgccaggccggacatccagatgacacagagccctagcagcctgtctgccagcgtgggagacagagtgaccatcacatgcaaggccagccagagcgtgtccaacgacgtgacctggtatcagcagaagcctggacaggcccctaagctgctgatctacagcgccagcaacagatacagcggagtgcccgccagattttccggctctggctacggcaccgagttcacctttaccatcagcagcgtgcagagcgaggacttcgccgtgtacttctgccagcaagactacagcagcttcggccagggcaccaagctggaaatcaagagactcgaggacctgaagaacgtgttcccacctgaggtggccgtgttcgagcctagcgaggccgagatcagccacacccagaaagccaccctcgtgtgcctggctaccggcttctaccccgaccatgtggaactgtcttggtgggtcaacggcaaagaggtgcacagcggcgtgtctaccgacccccagccactgaaagaacagcccgccctgaacgacagccggtactgcctgagcagcagactgagagtgtccgccaccttctggcagaacccccggaaccacttcagatgccaggtgcagttctacggcctgagcgagaacgacgagtggacccaggacagagccaagcccgtgacccagatcgtgtctgccgaagcctggggcagagccgattgcggatcccagagcttcggcctgctggaccccaagctgtgctacctgctggatggcatcctgttcatctacggcgtgatcctgaccgccctgttcctgagagtgaagttcagcagaagcgccgacgcccctgcctaccagcagggacagaaccaactgtacaacgagctgaacctgggcagacgggaagagtacgacgtgctggacaagcggagaggcagggaccctgagatgggcggaaagccccagcggagaaagaacccccaggaaggactgtataacgaactccagaaagacaagatggccgaagcctacagcgagatcggcatgaagggcgagcggagaagaggcaagggccacgatggcctgtaccagggcctgagcaccgccaccaaggacacctatgacgccctgcacatgcaggccctgcctccaagaagggccaagcgatctggatctggagcaacaaacttctcactactcaaacaagcaggtgacgtggaggagaatcccgggcctactagtatggactggatttggcgcatccttttccttgtcggcgctgctaccggcgcgcattccttcgaacaggtgcagctggtggaatctggacctggcgtggtgcagcctggcagaagcctgagaatcagctgtgccgtgtccggcttcagcgtgaccaactacggcgtgcactgggtgcgccagccacctggaaaaggactggaatggctgggcgtgatctgggctggcggcatcaccaactacaacagcgccttcatgtcccggctgaccatctccaaggacaacagcaagaacaccgtgtacctccagatgaacagcctgcgggccgaggacaccgccatgtactactgtgcttccagaggcggccactacggctacgccctggattattggggccagggaaccctcgtgaccgtgtcctctacgcgtatccagaaccctgatcctgccgtgtaccagctgcgggatagcaagagcagcgacaagagcgtgtgtctgttcaccgacttcgacagccagaccaacgtgtcccagagcaaggactccgacgtgtacatcaccgataagaccgtgctggacatgcggagcatggacttcaagagcaactccgccgtggcctggtccaacaagtccgatttcgcctgcgccaacgccttcaacaacagcattatccccgaggacacattcttcccaagccccgagagcagctgcggtacccagagttttgggttgttggaccctaaattgtgctatctgttggacggaatcctgttcatttacggagtgatcctgaccgcattgttcctgcgggttaagttttccagatccgcagacgcacccgcttaccaacaagggcagaaccaactctacaatgaacttaatttggggcggagggaagagtacgacgttctggacaaaaggaggggacgagatcccgagatgggcggaaagcctcagcgaaggaagaatccgcaagaggggctttataacgaactccagaaagataaaatggcagaagcctatagtgagattgggatgaagggagaaaggaggaggggtaaaggtcacgatgggttgtaccaaggattgagcacagccactaaagatacctatgatgcgctccacatgcaggccctgccgccaaga

SEQ ID NO: 35602 - DNA, 2565 bp, synthetic construct
  source 1..2565: mol_type = other DNA
atggccttaccagtgaccgccttgctcctgccgctggccttgctgctccacgccgccaggccggacatccagatgacacagagccctagcagcctgtctgccagcgtgggagacagagtgaccatcacatgcaaggccagccagagcgtgtccaacgacgtgacctggtatcagcagaagcctggacaggcccctaagctgctgatctacagcgccagcaacagatacagcggagtgcccgccagattttccggctctggctacggcaccgagttcacctttaccatcagcagcgtgcagagcgaggacttcgccgtgtacttctgccagcaagactacagcagcttcggccagggcaccaagctggaaatcaagagactcgaggaggacctgaagaacgtgttcccacctgaggtggccgtgttcgagcctagcgaggccgagatcagccacacccagaaagccaccctcgtgtgcctggctaccggcttctaccccgaccatgtggaactgtcttggtgggtcaacggcaaagaggtgcacagcggcgtgtctaccgacccccagccactgaaagaacagcccgccctgaacgacagccggtactgcctgagcagcagactgagagtgtccgccaccttctggcagaacccccggaaccacttcagatgccaggtgcagttctacggcctgagcgagaacgacgagtggacccaggacagagccaagcccgtgacccagatcgtgtctgccgaagcctggggcagagccgattgcggatcccagagcttcggcctgctggaccccaagctgtgctacctgctggatggcatcctgttcatctacggcgtgatcctgaccgccctgttcctgagagtgaagttcagcagaagcgccgacgcccctgcctaccagcagggacagaaccaactgtacaacgagctgaacctgggcagacgggaagagtacgacgtgctggacaagcggagaggcagggaccctgagatgggcggaaagccccagcggagaaagaacccccaggaaggactgtataacgaactccagaaagacaagatggccgaagcctacagcgagatcggcatgaagggcgagcggagaagaggcaagggccacgatggcctgtaccagggcctgagcaccgccaccaaggacacctatgacgccctgcacatgcaggccctgcctccaagaagggccaagcgatctggatctggagcaacaaacttctcactactcaaacaagcaggtgacgtggaggagaatcccgggcctactagtatggactggatttggcgcatccttttccttgtcggcgctgctaccggcgcgcattccttcgaacaggtgcagctggtggaatctggacctggcgtggtgcagcctggcagaagcctgagaatcagctgtgccgtgtccggcttcagcgtgaccaactacggcgtgcactgggtgcgccagccacctggaaaaggactggaatggctgggcgtgatctgggctggcggcatcaccaactacaacagcgccttcatgtcccggctgaccatctccaaggacaacagcaagaacaccgtgtacctccagatgaacagcctgcgggccgaggacaccgccatgtactactgtgcttccagaggcggccactacggctacgccctggattattggggccagggaaccctcgtgaccgtgtcctctacgcgtatccagaaccctgatcctgccgtgtaccagctgcgggatagcaagagcagcgacaagagcgtgtgtctgttcaccgacttcgacagccagaccaacgtgtcccagagcaaggactccgacgtgtacatcaccgataagaccgtgctggacatgcggagcatggacttcaagagcaactccgccgtggcctggtccaacaagtccgatttcgcctgcgccaacgccttcaacaacagcattatccccgaggacacattcttcccaagccccgagagcagctgcggtacccagagttttgggttgttggaccctaaattgtgctatctgttggacggaatcctgttcatttacggagtgatcctgaccgcattgttcctgaggagcaagcggtcacggctgctccacagcgattacatgaatatgacaccacgaagaccgggtcctactcgcaaacactaccaaccctacgcacctccccgcgactttgcagcgtaccgatctcgggttaagttttccagatccgcagacgcacccgcttaccaacaagggcagaaccaactctacaatgaacttaatttggggcggagggaagagtacgacgttctggacaaaaggaggggacgagatcccgagatgggcggaaagcctcagcgaaggaagaatccgcaagaggggctttataacgaactccagaaagataaaatggcagaagcctatagtgagattgggatgaagggagaaaggaggaggggtaaaggtcacgatgggttgtaccaaggattgagcacagccactaaagatacctatgatgcgctccacatgcaggccctgccgccaaga

SEQ ID NO: 35603 - DNA, 2694 bp, synthetic construct
  source 1..2694: mol_type = other DNA
atggccttaccagtgaccgccttgctcctgccgctggccttgctgctccacgccgccaggccggacatccagatgacacagagccctagcagcctgtctgccagcgtgggagacagagtgaccatcacatgcaaggccagccagagcgtgtccaacgacgtgacctggtatcagcagaagcctggacaggcccctaagctgctgatctacagcgccagcaacagatacagcggagtgcccgccagattttccggctctggctacggcaccgagttcacctttaccatcagcagcgtgcagagcgaggacttcgccgtgtacttctgccagcaagactacagcagcttcggccagggcaccaagctggaaatcaagagactcgaggaggacctgaagaacgtgttcccacctgaggtggccgtgttcgagcctagcgaggccgagatcagccacacccagaaagccaccctcgtgtgcctggctaccggcttctaccccgaccatgtggaactgtcttggtgggtcaacggcaaagaggtgcacagcggcgtgtctaccgacccccagccactgaaagaacagcccgccctgaacgacagccggtactgcctgagcagcagactgagagtgtccgccaccttctggcagaacccccggaaccacttcagatgccaggtgcagttctacggcctgagcgagaacgacgagtggacccaggacagagccaagcccgtgacccagatcgtgtctgccgaagcctggggcagagccgattgcggatcccagagcttcggcctgctggaccccaagctgtgctacctgctggatggcatcctgttcatctacggcgtgatcctgaccgccctgttcctgaaacggggcagaaagaaactcctgtatatattcaaacaaccatttatgagaccagtacaaactactcaagaggaagatggctgtagctgccgatttccagaagaagaagaaggaggatgtgaactgagagtgaagttcagcagaagcgccgacgcccctgcctaccagcagggacagaaccaactgtacaacgagctgaacctgggcagacgggaagagtacgacgtgctggacaagcggagaggcagggaccctgagatgggcggaaagccccagcggagaaagaacccccaggaaggactgtataacgaactccagaaagacaagatggccgaagcctacagcgagatcggcatgaagggcgagcggagaagaggcaagggccacgatggcctgtaccagggcctgagcaccgccaccaaggacacctatgacgccctgcacatgcaggccctgcctccaagaagggccaagcgatctggatctggagcaacaaacttctcactactcaaacaagcaggtgacgtggaggagaatcccgggcctactagtatggactggatttggcgcatccttttccttgtcggcgctgctaccggcgcgcattccttcgaacaggtgcagctggtggaatctggacctggcgtggtgcagcctggcagaagcctgagaatcagctgtgccgtgtccggcttcagcgtgaccaactacggcgtgcactgggtgcgccagccacctggaaaaggactggaatggctgggcgtgatctgggctggcggcatcaccaactacaacagcgccttcatgtcccggctgaccatctccaaggacaacagcaagaacaccgtgtacctccagatgaacagcctgcgggccgaggacaccgccatgtactactgtgcttccagaggcggccactacggctacgccctggattattggggccagggaaccctcgtgaccgtgtcctctacgcgtatccagaaccctgatcctgccgtgtaccagctgcgggatagcaagagcagcgacaagagcgtgtgtctgttcaccgacttcgacagccagaccaacgtgtcccagagcaaggactccgacgtgtacatcaccgataagaccgtgctggacatgcggagcatggacttcaagagcaactccgccgtggcctggtccaacaagtccgatttcgcctgcgccaacgccttcaacaacagcattatccccgaggacacattcttcccaagccccgagagcagctgcggtacccagagttttgggttgttggaccctaaattgtgctatctgttggacggaatcctgttcatttacggagtgatcctgaccgcattgttcctgaagagaggccggaagaagctgctgtacatcttcaagcagcctttcatgcggcccgtgcagaccacccaggaagaggacggctgctcctgccggttccccgaggaagaagaaggcggctgcgagctgcgggttaagttttccagatccgcagacgcacccgcttaccaacaagggcagaaccaactctacaatgaacttaatttggggcggagggaagagtacgacgttctggacaaaaggaggggacgagatcccgagatgggcggaaagcctcagcgaaggaagaatccgcaagaggggctttataacgaactccagaaagataaaatggcagaagcctatagtgagattgggatgaagggagaaaggaggaggggtaaaggtcacgatgggttgtaccaaggattgagcacagccactaaagatacctatgatgcgctccacatgcaggccctgccgccaaga

SEQ ID NO: 35604 - DNA, 1755 bp, synthetic construct
  source 1..1755: mol_type = other DNA
atggccttaccagtgaccgccttgctcctgccgctggccttgctgctccacgccgccaggccggacatccagatgacacagagccctagcagcctgtctgccagcgtgggagacagagtgaccatcacatgcaaggccagccagagcgtgtccaacgacgtgacctggtatcagcagaagcctggacaggcccctaagctgctgatctacagcgccagcaacagatacagcggagtgcccgccagattttccggctctggctacggcaccgagttcacctttaccatcagcagcgtgcagagcgaggacttcgccgtgtacttctgccagcaagactacagcagcttcggccagggcaccaagctggaaatcaagagactcgagcagagcttcggcctgctggaccccaagctgtgctacctgctggatggcatcctgttcatctacggcgtgatcctgaccgccctgttcctgagagtgaagttcagcagaagcgccgacgcccctgcctaccagcagggacagaaccaactgtacaacgagctgaacctgggcagacgggaagagtacgacgtgctggacaagcggagaggcagggaccctgagatgggcggaaagccccagcggagaaagaacccccaggaaggactgtataacgaactccagaaagacaagatggccgaagcctacagcgagatcggcatgaagggcgagcggagaagaggcaagggccacgatggcctgtaccagggcctgagcaccgccaccaaggacacctatgacgccctgcacatgcaggccctgcctccaagaagggccaagcgatctggatctggagcaacaaacttctcactactcaaacaagcaggtgacgtggaggagaatcccgggcctactagtatggactggatttggcgcatccttttccttgtcggcgctgctaccggcgcgcattccttcgaacaggtgcagctggtggaatctggacctggcgtggtgcagcctggcagaagcctgagaatcagctgtgccgtgtccggcttcagcgtgaccaactacggcgtgcactgggtgcgccagccacctggaaaaggactggaatggctgggcgtgatctgggctggcggcatcaccaactacaacagcgccttcatgtcccggctgaccatctccaaggacaacagcaagaacaccgtgtacctccagatgaacagcctgcgggccgaggacaccgccatgtactactgtgcttccagaggcggccactacggctacgccctggattattggggccagggaaccctcgtgaccgtgtcctctacgcgtcagagttttgggttgttggaccctaaattgtgctatctgttggacggaatcctgttcatttacggagtgatcctgaccgcattgttcctgcgggttaagttttccagatccgcagacgcacccgcttaccaacaagggcagaaccaactctacaatgaacttaatttggggcggagggaagagtacgacgttctggacaaaaggaggggacgagatcccgagatgggcggaaagcctcagcgaaggaagaatccgcaagaggggctttataacgaactccagaaagataaaatggcagaagcctatagtgagattgggatgaagggagaaaggaggaggggtaaaggtcacgatgggttgtaccaaggattgagcacagccactaaagatacctatgatgcgctccacatgcaggccctgccgccaaga

SEQ ID NO: 35605 - DNA, 1929 bp, synthetic construct
  source 1..1929: mol_type = other DNA
atggccttaccagtgaccgccttgctcctgccgctggccttgctgctccacgccgccaggccggacatccagatgacacagagccctagcagcctgtctgccagcgtgggagacagagtgaccatcacatgcaaggccagccagagcgtgtccaacgacgtgacctggtatcagcagaagcctggacaggcccctaagctgctgatctacagcgccagcaacagatacagcggagtgcccgccagattttccggctctggctacggcaccgagttcacctttaccatcagcagcgtgcagagcgaggacttcgccgtgtacttctgccagcaagactacagcagcttcggccagggcaccaagctggaaatcaagagactcgagggacagcctaaggccaatcctaccgtgacactgttccctccaagcagcgaagaactccaggccaacaaggccacacttgtgtgcctgatctccgacttctaccctggggctgtgacagtggcttggaaggccgatggatctcctgtgaaagccggcgtggaaaccaccaagccatccaagcagagcaacaacaaatacgccgccagctcctacctgagcctgacacctgagcagtggaagtcccacagatcctacagctgccaagtgacccacgaaggcagcaccgtggaaaagacagtggcccctacagagtgcagccccatcaagaccgatgtgattacaatggaccccaaggacaactgctccaaggacgccaacgataccctgctgctccagctgaccaacaccagcgcctactacatgtacttgttgctgctgctgaagtccgtggtgtacttcgccatcatcacatgctgcctgctgcggagaaccgccttctgctgcaacggcgagaagtctagggccaagcgatctggatctggagcaacaaacttctcactactcaaacaagcaggtgacgtggaggagaatcccgggcctactagtatggactggatttggcgcatccttttccttgtcggcgctgctaccggcgcgcattccttcgaacaggtgcagctggtggaatctggacctggcgtggtgcagcctggcagaagcctgagaatcagctgtgccgtgtccggcttcagcgtgaccaactacggcgtgcactgggtgcgccagccacctggaaaaggactggaatggctgggcgtgatctgggctggcggcatcaccaactacaacagcgccttcatgtcccggctgaccatctccaaggacaacagcaagaacaccgtgtacctccagatgaacagcctgcgggccgaggacaccgccatgtactactgtgcttccagaggcggccactacggctacgccctggattattggggccagggaaccctcgtgaccgtgtcctctacgcgtgcctctacaaagggaccctccgtgtttcctctggctcccagcagcaagtctacaagcggaggaacagccgctctgggctgcctggtcaaggattactttcccgagcctgtgaccgtgtcctggaatagcggagcactgacaagcggcgtgcacacctttccagccgtgctgcaaagcagcggcctgtactctctgagcagcgtggtcacagtgcctagctctagcctgggcacccagacctacatctgcaatgtgaaccacaagcctagcaacaccaaggtggacaagagagtggaacccaagagctgtgaagtgaaaaccgactccaccgaccacgtgaagcccaaagagacagagaacaccaagcagcccagcaagagctgccacaagcccaaggccatcgtgcacaccgagaaagtgaacatgatgagcctgaccgtgctgggcctgcggatgctgttcgccaaaaccgtggccgtgaacttcctgctgaccgccaagctgttcttcctc

SEQ ID NO: 35606 - DNA, 1863 bp, synthetic construct
  source 1..1863: mol_type = other DNA
atggccttaccagtgaccgccttgctcctgccgctggccttgctgctccacgccgccaggccggacatccagatgacacagagccctagcagcctgtctgccagcgtgggagacagagtgaccatcacatgcaaggccagccagagcgtgtccaacgacgtgacctggtatcagcagaagcctggacaggcccctaagctgctgatctacagcgccagcaacagatacagcggagtgcccgccagattttccggctctggctacggcaccgagttcacctttaccatcagcagcgtgcagagcgaggacttcgccgtgtacttctgccagcaagactacagcagcttcggccagggcaccaagctggaaatcaagagactcgagggacagcctaaggccaatcctaccgtgacactgttccctccaagcagcgaagaactccaggccaacaaggccacacttgtgtgcctgatctccgacttctaccctggggctgtgacagtggcttggaaggccgatggatctcctgtgaaagccggcgtggaaaccaccaagccatccaagcagagcaacaacaaatacgccgccagctcctacctgagcctgacacctgagcagtggaagtcccacagatcctacagctgccaagtgacccacgaaggcagcaccgtggaaaagacagtggcccctacagagtgcagcggcagagccgattgcggcatcaccagcgccagctaccaccagggcgtgctgagcgccaccatcctgtacgagatcctgctgggcaaggccaccctgtacgccgtgctggtgtctgccctggtgctgatggctatggtcaagcggaaggacagccggggaagggccaagcgatctggatctggagcaacaaacttctcactactcaaacaagcaggtgacgtggaggagaatcccgggcctactagtatggactggatttggcgcatccttttccttgtcggcgctgctaccggcgcgcattccttcgaacaggtgcagctggtggaatctggacctggcgtggtgcagcctggcagaagcctgagaatcagctgtgccgtgtccggcttcagcgtgaccaactacggcgtgcactgggtgcgccagccacctggaaaaggactggaatggctgggcgtgatctgggctggcggcatcaccaactacaacagcgccttcatgtcccggctgaccatctccaaggacaacagcaagaacaccgtgtacctccagatgaacagcctgcgggccgaggacaccgccatgtactactgtgcttccagaggcggccactacggctacgccctggattattggggccagggaaccctcgtgaccgtgtcctctacgcgtgcctctacaaagggaccctccgtgtttcctctggctcccagcagcaagtctacaagcggaggaacagccgctctgggctgcctggtcaaggattactttcccgagcctgtgaccgtgtcctggaatagcggagcactgacaagcggcgtgcacacctttccagccgtgctgcaaagcagcggcctgtactctctgagcagcgtggtcacagtgcctagctctagcctgggcacccagacctacatctgcaatgtgaaccacaagcctagcaacaccaaggtggacaagagagtggaacccaagagctgtatccccgaggacacattcttcccaagcagcgacgtgccctgcgacgtgaagctggtggaaaagagcttcgagacagacaccaacctgaacttccagaacctgagcgtgatcggcttcagaatcctgctgctgaaagtggccggctttaacctgctgatgaccctgcggctgtggtccagc

SEQ ID NO: 35607 - DNA, 1863 bp, synthetic construct
  source 1..1863: mol_type = other DNA
atggccttaccagtgaccgccttgctcctgccgctggccttgctgctccacgccgccaggccggacatccagatgacacagagccctagcagcctgtctgccagcgtgggagacagagtgaccatcacatgcaaggccagccagagcgtgtccaacgacgtgacctggtatcagcagaagcctggacaggcccctaagctgctgatctacagcgccagcaacagatacagcggagtgcccgccagattttccggctctggctacggcaccgagttcacctttaccatcagcagcgtgcagagcgaggacttcgccgtgtacttctgccagcaagactacagcagcttcggccagggcaccaagctggaaatcaagagactcgagggacagcctaaggccaatcctaccgtgacactgttccctccaagcagcgaagaactccaggccaacaaggccacacttgtgtgcctgatctccgacttctaccctggggctgtgacagtggcttggaaggccgatggatctcctgtgaaagccggcgtggaaaccaccaagccatccaagcagagcaacaacaaatacgccgccagctcctacctgagcctgacacctgagcagtggaagtcccacagatcctacagctgccaagtgacccacgaaggcagcaccgtggaaaagacagtggcccctacagagtgcagcggcagagccgattgcggctttaccagcgagagctaccagcagggcgtgctgagcgccaccatcctgtacgagatcctgctgggcaaggccaccctgtacgccgtgctggtgtctgccctggtgctgatggctatggtcaagcggaaggacagccggggaagggccaagcgatctggatctggagcaacaaacttctcactactcaaacaagcaggtgacgtggaggagaatcccgggcctactagtatggactggatttggcgcatccttttccttgtcggcgctgctaccggcgcgcattccttcgaacaggtgcagctggtggaatctggacctggcgtggtgcagcctggcagaagcctgagaatcagctgtgccgtgtccggcttcagcgtgaccaactacggcgtgcactgggtgcgccagccacctggaaaaggactggaatggctgggcgtgatctgggctggcggcatcaccaactacaacagcgccttcatgtcccggctgaccatctccaaggacaacagcaagaacaccgtgtacctccagatgaacagcctgcgggccgaggacaccgccatgtactactgtgcttccagaggcggccactacggctacgccctggattattggggccagggaaccctcgtgaccgtgtcctctacgcgtgcctctacaaagggaccctccgtgtttcctctggctcccagcagcaagtctacaagcggaggaacagccgctctgggctgcctggtcaaggattactttcccgagcctgtgaccgtgtcctggaatagcggagcactgacaagcggcgtgcacacctttccagccgtgctgcaaagcagcggcctgtactctctgagcagcgtggtcacagtgcctagctctagcctgggcacccagacctacatctgcaatgtgaaccacaagcctagcaacaccaaggtggacaagagagtggaacccaagagctgtatccccgaggacacattcttcccaagccccgagagcagctgcgacgtgaagctggtggaaaagagcttcgagacagacaccaacctgaacttccagaacctgagcgtgatcggcttcagaatcctgctgctgaaagtggccggctttaacctgctgatgaccctgcggctgtggtccagc

SEQ ID NO: 35608 - DNA, 1341 bp, synthetic construct
  source 1..1341: mol_type = other DNA
atggccttaccagtgaccgccttgctcctgccgctggccttgctgctccacgccgccaggccggacatccagatgacacagagccctagcagcctgtctgccagcgtgggagacagagtgaccatcacatgcaaggccagccagagcgtgtccaacgacgtgacctggtatcagcagaagcctggacaggcccctaagctgctgatctacagcgccagcaacagatacagcggagtgcccgccagattttccggctctggctacggcaccgagttcacctttaccatcagcagcgtgcagagcgaggacttcgccgtgtacttctgccagcaagactacagcagcttcggccagggcaccaagctggaaatcaagagaggcggaggcggaagtggaggcggaggatctggcggcggaggctctcaggtgcagctggtggaatctggacctggcgtggtgcagcctggcagaagcctgagaatcagctgtgccgtgtccggcttcagcgtgaccaactacggcgtgcactgggtgcgccagccacctggaaaaggactggaatggctgggcgtgatctgggctggcggcatcaccaactacaacagcgccttcatgtcccggctgaccatctccaaggacaacagcaagaacaccgtgtacctccagatgaacagcctgcgggccgaggacaccgccatgtactactgtgcttccagaggcggccactacggctacgccctggattattggggccagggaaccctcgtgaccgtgtcctctacgcgtgacggtaacgaggagatgggaggaatcactcaaaccccttacaaagtctcaatttcaggaacaactgttatccttacatgtccccagtatcctggcagcgagatcctttggcagcataacgacaagaatatagggggagatgaagacgataagaatatcggatctgacgaggatcacttgagcctgaaagagttctccgagcttgaacaaagcggatattatgtgtgctatccgcgcgggtcaaagccggaagacgctaacttttacctttatctccgagccagagtgtgcgaaaattgcatggaaatggacgttatgtccgttgctacaatagttatcgtagatatatgcatcacgggtggactgcttctgctggtttattattggtccaagaatagaaaggccaaagctaaacccgtgaccagaggcgctggcgcaggcggaaggcaaaggggacaaaacaaagaacggccaccaccagtgccaaatccagattatgagcctattcggaaaggacagagggacctgtactctggcctgaatcagagaagaatc

SEQ ID NO: 35609 - DNA, 1236 bp, synthetic construct
  source 1..1236: mol_type = other DNA
atggccttaccagtgaccgccttgctcctgccgctggccttgctgctccacgccgccaggccggacatccagatgacacagagccctagcagcctgtctgccagcgtgggagacagagtgaccatcacatgcaaggccagccagagcgtgtccaacgacgtgacctggtatcagcagaagcctggacaggcccctaagctgctgatctacagcgccagcaacagatacagcggagtgcccgccagattttccggctctggctacggcaccgagttcacctttaccatcagcagcgtgcagagcgaggacttcgccgtgtacttctgccagcaagactacagcagcttcggccagggcaccaagctggaaatcaagagaggcggaggcggaagtggaggcggaggatctggcggcggaggctctcaggtgcagctggtggaatctggacctggcgtggtgcagcctggcagaagcctgagaatcagctgtgccgtgtccggcttcagcgtgaccaactacggcgtgcactgggtgcgccagccacctggaaaaggactggaatggctgggcgtgatctgggctggcggcatcaccaactacaacagcgccttcatgtcccggctgaccatctccaaggacaacagcaagaacaccgtgtacctccagatgaacagcctgcgggccgaggacaccgccatgtactactgtgcttccagaggcggccactacggctacgccctggattattggggccagggaaccctcgtgaccgtgtcctctacgcgtttcaagatccccatcgaggaactggaagatcgggtgttcgtgaactgcaacacctctatcacctgggtggaaggcaccgtgggaacactgctgagcgacatcaccagactggacctcggcaagcggattctggaccctcggggcatctacagatgcaacggcaccgacatctacaaggacaaagaaagcaccgtgcaggtccactacagaatgtgccagtcctgcgtggaactggaccctgctacagtggccggcatcatcgtgaccgatgtgatcgctactctgctgctggctctgggagtgttctgcttcgccggacacgaaacaggcagactgtctggcgctgccgatacacaggccctgctgagaaacgaccaagtgtatcagcccctgcgcgacagagatgatgcccagtattctcacctcggcggcaactgggctagaaacaag

SEQ ID NO: 35610 - DNA, 1266 bp, synthetic construct
  source 1..1266: mol_type = other DNA
atggccttaccagtgaccgccttgctcctgccgctggccttgctgctccacgccgccaggccggacatccagatgacacagagccctagcagcctgtctgccagcgtgggagacagagtgaccatcacatgcaaggccagccagagcgtgtccaacgacgtgacctggtatcagcagaagcctggacaggcccctaagctgctgatctacagcgccagcaacagatacagcggagtgcccgccagattttccggctctggctacggcaccgagttcacctttaccatcagcagcgtgcagagcgaggacttcgccgtgtacttctgccagcaagactacagcagcttcggccagggcaccaagctggaaatcaagagaggcggaggcggaagtggaggcggaggatctggcggcggaggctctcaggtgcagctggtggaatctggacctggcgtggtgcagcctggcagaagcctgagaatcagctgtgccgtgtccggcttcagcgtgaccaactacggcgtgcactgggtgcgccagccacctggaaaaggactggaatggctgggcgtgatctgggctggcggcatcaccaactacaacagcgccttcatgtcccggctgaccatctccaaggacaacagcaagaacaccgtgtacctccagatgaacagcctgcgggccgaggacaccgccatgtactactgtgcttccagaggcggccactacggctacgccctggattattggggccagggaaccctcgtgaccgtgtcctctacgcgtcagagcatcaagggcaaccacctggtcaaggtgtacgactaccaagaggacggcagcgtgctgctgacatgtgatgccgaggccaagaacatcacctggtttaaggacggcaagatgatcggcttcctgaccgaggacaagaagaagtggaacctgggcagcaacgctaaggaccccagaggcatgtatcagtgcaagggcagccagaacaagagcaagcccctccaggtgtactaccggatgtgccagaactgcatcgagctgaacgccgctaccatcagcggctttctgttcgccgagatcgtgtccatcttcgtgctggccgtgggcgtgtactttatcgctggacaggatggcgtgcggcagagcagagcttccgataagcaaaccctgctgcctaacgaccagctgtaccagcctctgaaggacagagaggacgaccagtacagccacctccagggcaatcagctgagaagaaac

SEQ ID NO: 35611 - DNA, 1215 bp, synthetic construct
  source 1..1215: mol_type = other DNA
atggccttaccagtgaccgccttgctcctgccgctggccttgctgctccacgccgccaggccggacatccagatgacacagagccctagcagcctgtctgccagcgtgggagacagagtgaccatcacatgcaaggccagccagagcgtgtccaacgacgtgacctggtatcagcagaagcctggacaggcccctaagctgctgatctacagcgccagcaacagatacagcggagtgcccgccagattttccggctctggctacggcaccgagttcacctttaccatcagcagcgtgcagagcgaggacttcgccgtgtacttctgccagcaagactacagcagcttcggccagggcaccaagctggaaatcaagagaggcggaggcggaagtggaggcggaggatctggcggcggaggctctcaggtgcagctggtggaatctggacctggcgtggtgcagcctggcagaagcctgagaatcagctgtgccgtgtccggcttcagcgtgaccaactacggcgtgcactgggtgcgccagccacctggaaaaggactggaatggctgggcgtgatctgggctggcggcatcaccaactacaacagcgccttcatgtcccggctgaccatctccaaggacaacagcaagaacaccgtgtacctccagatgaacagcctgcgggccgaggacaccgccatgtactactgtgcttccagaggcggccactacggctacgccctggattattggggccagggaaccctcgtgaccgtgtcctctacgcgtcagagttttgggttgttggaccctaaattgtgctatctgttggacggaatcctgttcatttacggagtgatcctgaccgcattgttcctgcgggttaagttttccagatccgcagacgcacccgcttaccaacaagggcagaaccaactctacaatgaacttaatttggggcggagggaagagtacgacgttctggacaaaaggaggggacgagatcccgagatgggcggaaagcctcagcgaaggaagaatccgcaagaggggctttataacgaactccagaaagataaaatggcagaagcctatagtgagattgggatgaagggagaaaggaggaggggtaaaggtcacgatgggttgtaccaaggattgagcacagccactaaagatacctatgatgcgctccacatgcaggccctgccgccaaga

SEQ ID NO: 35612 - DNA, 1500 bp, synthetic construct
  source 1..1500: mol_type = other DNA
atggccttaccagtgaccgccttgctcctgccgctggccttgctgctccacgccgccaggccggacatccagatgacacagagccctagcagcctgtctgccagcgtgggagacagagtgaccatcacatgcaaggccagccagagcgtgtccaacgacgtgacctggtatcagcagaagcctggacaggcccctaagctgctgatctacagcgccagcaacagatacagcggagtgcccgccagattttccggctctggctacggcaccgagttcacctttaccatcagcagcgtgcagagcgaggacttcgccgtgtacttctgccagcaagactacagcagcttcggccagggcaccaagctggaaatcaagagaggcggaggcggaagtggaggcggaggatctggcggcggaggctctcaggtgcagctggtggaatctggacctggcgtggtgcagcctggcagaagcctgagaatcagctgtgccgtgtccggcttcagcgtgaccaactacggcgtgcactgggtgcgccagccacctggaaaaggactggaatggctgggcgtgatctgggctggcggcatcaccaactacaacagcgccttcatgtcccggctgaccatctccaaggacaacagcaagaacaccgtgtacctccagatgaacagcctgcgggccgaggacaccgccatgtactactgtgcttccagaggcggccactacggctacgccctggattattggggccagggaaccctcgtgaccgtgtcctctacgcgtggaatgaggactgaggatcttcccaaagctgtcgtctttctcgaaccccaatggtatcgggtgctcgaaaaagactctgtgacactgaaatgccaaggggcctactctcccgaggacaactccacacagtggtttcataatgagtccctcatcagctctcaggccagctcttatttcattgatgccgctacagtggacgactccggcgagtatcggtgtcagaccaatctgtctacactgtctgaccccgtgcagcttgaggtccacattggatggttgctcttgcaagccccacgctgggttttcaaagaggaagatccaatccatctgcggtgccacagctggaaaaacaccgctctccacaaagtcacatacctgcaaaatggcaaaggacgcaaatacttccatcacaattccgatttttacattccgaaggctaccctgaaagacagcggcagctatttctgccggggactcgtcggctccaagaatgtgtcctccgaaaccgtgaatatcacgattacccaaggactggctgtgcctacaatctctagcttctttccgcctggataccaagtctccttctgtcttgtgatggtcctcctgtttgctgtggacacaggactgtacttttccgtgaaaacgaacatccgcagctccacacgcgattggaaagatcacaagtttaaatggcgcaaagatccccaggacaag

SEQ ID NO: 35613 - DNA, 1425 bp, synthetic construct
  source 1..1425: mol_type = other DNA
atggccttaccagtgaccgccttgctcctgccgctggccttgctgctccacgccgccaggccggacatccagatgacacagagccctagcagcctgtctgccagcgtgggagacagagtgaccatcacatgcaaggccagccagagcgtgtccaacgacgtgacctggtatcagcagaagcctggacaggcccctaagctgctgatctacagcgccagcaacagatacagcggagtgcccgccagattttccggctctggctacggcaccgagttcacctttaccatcagcagcgtgcagagcgaggacttcgccgtgtacttctgccagcaagactacagcagcttcggccagggcaccaagctggaaatcaagagaggcggaggcggaagtggaggcggaggatctggcggcggaggctctcaggtgcagctggtggaatctggacctggcgtggtgcagcctggcagaagcctgagaatcagctgtgccgtgtccggcttcagcgtgaccaactacggcgtgcactgggtgcgccagccacctggaaaaggactggaatggctgggcgtgatctgggctggcggcatcaccaactacaacagcgccttcatgtcccggctgaccatctccaaggacaacagcaagaacaccgtgtacctccagatgaacagcctgcgggccgaggacaccgccatgtactactgtgcttccagaggcggccactacggctacgccctggattattggggccagggaaccctcgtgaccgtgtcctctacgcgtggaatgaggactgaggatcttcccaaagctgtcgtctttctcgaaccccaatggtatcgggtgctcgaaaaagactctgtgacactgaaatgccaaggggcctactctcccgaggacaactccacacagtggtttcataatgagtccctcatcagctctcaggccagctcttatttcattgatgccgctacagtggacgactccggcgagtatcggtgtcagaccaatctgtctacactgtctgaccccgtgcagcttgaggtccacattggatggttgctcttgcaagccccacgctgggttttcaaagaggaagatccaatccatctgcggtgccacagctggaaaaacaccgctctccacaaagtcacatacctgcaaaatggcaaaggacgcaaatacttccatcacaattccgatttttacattccgaaggctaccctgaaagacagcggcagctatttctgccggggactcgtcggctccaagaatgtgtcctccgaaaccgtgaatatcacgattacccaaggactggctgtgcctacaatctctagcttctttccgcctggataccaagtctccttctgtcttgtgatggtcctcctgtttgctgtggacacaggactgtacttttccgtg

SEQ ID NO: 35614 - DNA, 1428 bp, synthetic construct
  source 1..1428: mol_type = other DNA
atggccttaccagtgaccgccttgctcctgccgctggccttgctgctccacgccgccaggccggacatccagatgacacagagccctagcagcctgtctgccagcgtgggagacagagtgaccatcacatgcaaggccagccagagcgtgtccaacgacgtgacctggtatcagcagaagcctggacaggcccctaagctgctgatctacagcgccagcaacagatacagcggagtgcccgccagattttccggctctggctacggcaccgagttcacctttaccatcagcagcgtgcagagcgaggacttcgccgtgtacttctgccagcaagactacagcagcttcggccagggcaccaagctggaaatcaagagaggcggaggcggaagtggaggcggaggatctggcggcggaggctctcaggtgcagctggtggaatctggacctggcgtggtgcagcctggcagaagcctgagaatcagctgtgccgtgtccggcttcagcgtgaccaactacggcgtgcactgggtgcgccagccacctggaaaaggactggaatggctgggcgtgatctgggctggcggcatcaccaactacaacagcgccttcatgtcccggctgaccatctccaaggacaacagcaagaacaccgtgtacctccagatgaacagcctgcgggccgaggacaccgccatgtactactgtgcttccagaggcggccactacggctacgccctggattattggggccagggaaccctcgtgaccgtgtcctctacgcgtggaatgaggactgaggatcttcccaaagctgtcgtctttctcgaaccccaatggtatcgggtgctcgaaaaagactctgtgacactgaaatgccaaggggcctactctcccgaggacaactccacacagtggtttcataatgagtccctcatcagctctcaggccagctcttatttcattgatgccgctacagtggacgactccggcgagtatcggtgtcagaccaatctgtctacactgtctgaccccgtgcagcttgaggtccacattggatggttgctcttgcaagccccacgctgggttttcaaagaggaagatccaatccatctgcggtgccacagctggaaaaacaccgctctccacaaagtcacatacctgcaaaatggcaaaggacgcaaatacttccatcacaattccgatttttacattccgaaggctaccctgaaagacagcggcagctatttctgccggggactcgtcggctccaagaatgtgtcctccgaaaccgtgaatatcacgattacccaaggactggctgtgcctacaatctctagcttctttccgcctggataccaagtctccttctgtcttgtgatggtcctcctgtttgctgtggacacaggactgtacttttccgtgaaa

SEQ ID NO: 35615 - DNA, 2160 bp, synthetic construct
  source 1..2160: mol_type = other DNA
atggccttaccagtgaccgccttgctcctgccgctggccttgctgctccacgccgccaggccggacatccagatgacacagagccctagcagcctgtctgccagcgtgggagacagagtgaccatcacatgcaaggccagccagagcgtgtccaacgacgtgacctggtatcagcagaagcctggacaggcccctaagctgctgatctacagcgccagcaacagatacagcggagtgcccgccagattttccggctctggctacggcaccgagttcacctttaccatcagcagcgtgcagagcgaggacttcgccgtgtacttctgccagcaagactacagcagcttcggccagggcaccaagctggaaatcaagagactcgagggacagcctaaggccaatcctaccgtgacactgttccctccaagcagcgaagaactccaggccaacaaggccacacttgtgtgcctgatctccgacttctaccctggggctgtgacagtggcttggaaggccgatggatctcctgtgaaagccggcgtggaaaccaccaagccatccaagcagagcaacaacaaatacgccgccagctcctacctgagcctgacacctgagcagtggaagtcccacagatcctacagctgccaagtgacccacgaaggcagcaccgtggaaaagacagtggcccctacagagtgcagcggatcccagagcttcggcctgctggaccccaagctgtgctacctgctggatggcatcctgttcatctacggcgtgatcctgaccgccctgttcctgagagtgaagttcagcagaagcgccgacgcccctgcctaccagcagggacagaaccaactgtacaacgagctgaacctgggcagacgggaagagtacgacgtgctggacaagcggagaggcagggaccctgagatgggcggaaagccccagcggagaaagaacccccaggaaggactgtataacgaactccagaaagacaagatggccgaagcctacagcgagatcggcatgaagggcgagcggagaagaggcaagggccacgatggcctgtaccagggcctgagcaccgccaccaaggacacctatgacgccctgcacatgcaggccctgcctccaagaagggccaagcgatctggatctggagcaacaaacttctcactactcaaacaagcaggtgacgtggaggagaatcccgggcctactagtatggactggatttggcgcatccttttccttgtcggcgctgctaccggcgcgcattccttcgaacaggtgcagctggtggaatctggacctggcgtggtgcagcctggcagaagcctgagaatcagctgtgccgtgtccggcttcagcgtgaccaactacggcgtgcactgggtgcgccagccacctggaaaaggactggaatggctgggcgtgatctgggctggcggcatcaccaactacaacagcgccttcatgtcccggctgaccatctccaaggacaacagcaagaacaccgtgtacctccagatgaacagcctgcgggccgaggacaccgccatgtactactgtgcttccagaggcggccactacggctacgccctggattattggggccagggaaccctcgtgaccgtgtcctctacgcgtgcctctacaaagggaccctccgtgtttcctctggctcccagcagcaagtctacaagcggaggaacagccgctctgggctgcctggtcaaggattactttcccgagcctgtgaccgtgtcctggaatagcggagcactgacaagcggcgtgcacacctttccagccgtgctgcaaagcagcggcctgtactctctgagcagcgtggtcacagtgcctagctctagcctgggcacccagacctacatctgcaatgtgaaccacaagcctagcaacaccaaggtggacaagagagtggaacccaagagctgtggtaccatcactcaaggtttggcagtgtcaaccatctcatcattctttccacctggctaccaagtgtccttctgcctggtcatggtgctgctgttcgccgtggataccggcctgtacttcagcgtcaagaccaacatccggtccagcaccagagactggaaggaccacaagttcaagtggcggaaggaccctcaggacaag

SEQ ID NO: 35616 - DNA, 2205 bp, synthetic construct
  source 1..2205: mol_type = other DNA
atggccttaccagtgaccgccttgctcctgccgctggccttgctgctccacgccgccaggccggacatccagatgacacagagccctagcagcctgtctgccagcgtgggagacagagtgaccatcacatgcaaggccagccagagcgtgtccaacgacgtgacctggtatcagcagaagcctggacaggcccctaagctgctgatctacagcgccagcaacagatacagcggagtgcccgccagattttccggctctggctacggcaccgagttcacctttaccatcagcagcgtgcagagcgaggacttcgccgtgtacttctgccagcaagactacagcagcttcggccagggcaccaagctggaaatcaagagactcgaggacctgaagaacgtgttcccacctgaggtggccgtgttcgagcctagcgaggccgagatcagccacacccagaaagccaccctcgtgtgcctggctaccggcttctaccccgaccatgtggaactgtcttggtgggtcaacggcaaagaggtgcacagcggcgtgtctaccgacccccagccactgaaagaacagcccgccctgaacgacagccggtactgcctgagcagcagactgagagtgtccgccaccttctggcagaacccccggaaccacttcagatgccaggtgcagttctacggcctgagcgagaacgacgagtggacccaggacagagccaagcccgtgacccagatcgtgtctgccgaagcctggggcagagccgattgcggatcccagagcttcggcctgctggaccccaagctgtgctacctgctggatggcatcctgttcatctacggcgtgatcctgaccgccctgttcctgagagtgaagttcagcagaagcgccgacgcccctgcctaccagcagggacagaaccaactgtacaacgagctgaacctgggcagacgggaagagtacgacgtgctggacaagcggagaggcagggaccctgagatgggcggaaagccccagcggagaaagaacccccaggaaggactgtataacgaactccagaaagacaagatggccgaagcctacagcgagatcggcatgaagggcgagcggagaagaggcaagggccacgatggcctgtaccagggcctgagcaccgccaccaaggacacctatgacgccctgcacatgcaggccctgcctccaagaagggccaagcgatctggatctggagcaacaaacttctcactactcaaacaagcaggtgacgtggaggagaatcccgggcctactagtatggactggatttggcgcatccttttccttgtcggcgctgctaccggcgcgcattccttcgaacaggtgcagctggtggaatctggacctggcgtggtgcagcctggcagaagcctgagaatcagctgtgccgtgtccggcttcagcgtgaccaactacggcgtgcactgggtgcgccagccacctggaaaaggactggaatggctgggcgtgatctgggctggcggcatcaccaactacaacagcgccttcatgtcccggctgaccatctccaaggacaacagcaagaacaccgtgtacctccagatgaacagcctgcgggccgaggacaccgccatgtactactgtgcttccagaggcggccactacggctacgccctggattattggggccagggaaccctcgtgaccgtgtcctctacgcgtatccagaaccctgatcctgccgtgtaccagctgcgggatagcaagagcagcgacaagagcgtgtgtctgttcaccgacttcgacagccagaccaacgtgtcccagagcaaggactccgacgtgtacatcaccgataagaccgtgctggacatgcggagcatggacttcaagagcaactccgccgtggcctggtccaacaagtccgatttcgcctgcgccaacgccttcaacaacagcattatccccgaggacacattcttcccaagccccgagagcagctgcggtaccatcactcaaggtttggcagtgtcaaccatctcatcattctttccacctggctaccaagtgtccttctgcctggtcatggtgctgctgttcgccgtggataccggcctgtacttcagcgtcaagaccaacatccggtccagcaccagagactggaaggaccacaagttcaagtggcggaaggaccctcaggacaag

SEQ ID NO: 35617 - DNA, 2130 bp, synthetic construct
  source 1..2130: mol_type = other DNA
atggccttaccagtgaccgccttgctcctgccgctggccttgctgctccacgccgccaggccggacatccagatgacacagagccctagcagcctgtctgccagcgtgggagacagagtgaccatcacatgcaaggccagccagagcgtgtccaacgacgtgacctggtatcagcagaagcctggacaggcccctaagctgctgatctacagcgccagcaacagatacagcggagtgcccgccagattttccggctctggctacggcaccgagttcacctttaccatcagcagcgtgcagagcgaggacttcgccgtgtacttctgccagcaagactacagcagcttcggccagggcaccaagctggaaatcaagagactcgaggacctgaagaacgtgttcccacctgaggtggccgtgttcgagcctagcgaggccgagatcagccacacccagaaagccaccctcgtgtgcctggctaccggcttctaccccgaccatgtggaactgtcttggtgggtcaacggcaaagaggtgcacagcggcgtgtctaccgacccccagccactgaaagaacagcccgccctgaacgacagccggtactgcctgagcagcagactgagagtgtccgccaccttctggcagaacccccggaaccacttcagatgccaggtgcagttctacggcctgagcgagaacgacgagtggacccaggacagagccaagcccgtgacccagatcgtgtctgccgaagcctggggcagagccgattgcggatcccagagcttcggcctgctggaccccaagctgtgctacctgctggatggcatcctgttcatctacggcgtgatcctgaccgccctgttcctgagagtgaagttcagcagaagcgccgacgcccctgcctaccagcagggacagaaccaactgtacaacgagctgaacctgggcagacgggaagagtacgacgtgctggacaagcggagaggcagggaccctgagatgggcggaaagccccagcggagaaagaacccccaggaaggactgtataacgaactccagaaagacaagatggccgaagcctacagcgagatcggcatgaagggcgagcggagaagaggcaagggccacgatggcctgtaccagggcctgagcaccgccaccaaggacacctatgacgccctgcacatgcaggccctgcctccaagaagggccaagcgatctggatctggagcaacaaacttctcactactcaaacaagcaggtgacgtggaggagaatcccgggcctactagtatggactggatttggcgcatccttttccttgtcggcgctgctaccggcgcgcattccttcgaacaggtgcagctggtggaatctggacctggcgtggtgcagcctggcagaagcctgagaatcagctgtgccgtgtccggcttcagcgtgaccaactacggcgtgcactgggtgcgccagccacctggaaaaggactggaatggctgggcgtgatctgggctggcggcatcaccaactacaacagcgccttcatgtcccggctgaccatctccaaggacaacagcaagaacaccgtgtacctccagatgaacagcctgcgggccgaggacaccgccatgtactactgtgcttccagaggcggccactacggctacgccctggattattggggccagggaaccctcgtgaccgtgtcctctacgcgtatccagaaccctgatcctgccgtgtaccagctgcgggatagcaagagcagcgacaagagcgtgtgtctgttcaccgacttcgacagccagaccaacgtgtcccagagcaaggactccgacgtgtacatcaccgataagaccgtgctggacatgcggagcatggacttcaagagcaactccgccgtggcctggtccaacaagtccgatttcgcctgcgccaacgccttcaacaacagcattatccccgaggacacattcttcccaagccccgagagcagctgcggtaccatcactcaaggtttggcagtgtcaaccatctcatcattctttccacctggctaccaagtgtccttctgcctggtcatggtgctgctgttcgccgtggataccggcctgtacttcagcgtc

SEQ ID NO: 35618 - DNA, 2133 bp, synthetic construct
  source 1..2133: mol_type = other DNA
atggccttaccagtgaccgccttgctcctgccgctggccttgctgctccacgccgccaggccggacatccagatgacacagagccctagcagcctgtctgccagcgtgggagacagagtgaccatcacatgcaaggccagccagagcgtgtccaacgacgtgacctggtatcagcagaagcctggacaggcccctaagctgctgatctacagcgccagcaacagatacagcggagtgcccgccagattttccggctctggctacggcaccgagttcacctttaccatcagcagcgtgcagagcgaggacttcgccgtgtacttctgccagcaagactacagcagcttcggccagggcaccaagctggaaatcaagagactcgaggacctgaagaacgtgttcccacctgaggtggccgtgttcgagcctagcgaggccgagatcagccacacccagaaagccaccctcgtgtgcctggctaccggcttctaccccgaccatgtggaactgtcttggtgggtcaacggcaaagaggtgcacagcggcgtgtctaccgacccccagccactgaaagaacagcccgccctgaacgacagccggtactgcctgagcagcagactgagagtgtccgccaccttctggcagaacccccggaaccacttcagatgccaggtgcagttctacggcctgagcgagaacgacgagtggacccaggacagagccaagcccgtgacccagatcgtgtctgccgaagcctggggcagagccgattgcggatcccagagcttcggcctgctggaccccaagctgtgctacctgctggatggcatcctgttcatctacggcgtgatcctgaccgccctgttcctgagagtgaagttcagcagaagcgccgacgcccctgcctaccagcagggacagaaccaactgtacaacgagctgaacctgggcagacgggaagagtacgacgtgctggacaagcggagaggcagggaccctgagatgggcggaaagccccagcggagaaagaacccccaggaaggactgtataacgaactccagaaagacaagatggccgaagcctacagcgagatcggcatgaagggcgagcggagaagaggcaagggccacgatggcctgtaccagggcctgagcaccgccaccaaggacacctatgacgccctgcacatgcaggccctgcctccaagaagggccaagcgatctggatctggagcaacaaacttctcactactcaaacaagcaggtgacgtggaggagaatcccgggcctactagtatggactggatttggcgcatccttttccttgtcggcgctgctaccggcgcgcattccttcgaacaggtgcagctggtggaatctggacctggcgtggtgcagcctggcagaagcctgagaatcagctgtgccgtgtccggcttcagcgtgaccaactacggcgtgcactgggtgcgccagccacctggaaaaggactggaatggctgggcgtgatctgggctggcggcatcaccaactacaacagcgccttcatgtcccggctgaccatctccaaggacaacagcaagaacaccgtgtacctccagatgaacagcctgcgggccgaggacaccgccatgtactactgtgcttccagaggcggccactacggctacgccctggattattggggccagggaaccctcgtgaccgtgtcctctacgcgtatccagaaccctgatcctgccgtgtaccagctgcgggatagcaagagcagcgacaagagcgtgtgtctgttcaccgacttcgacagccagaccaacgtgtcccagagcaaggactccgacgtgtacatcaccgataagaccgtgctggacatgcggagcatggacttcaagagcaactccgccgtggcctggtccaacaagtccgatttcgcctgcgccaacgccttcaacaacagcattatccccgaggacacattcttcccaagccccgagagcagctgcggtaccatcactcaaggtttggcagtgtcaaccatctcatcattctttccacctggctaccaagtgtccttctgcctggtcatggtgctgctgttcgccgtggataccggcctgtacttcagcgtcaag

SEQ ID NO: 35619 - DNA, 2136 bp, synthetic construct
  source 1..2136: mol_type = other DNA
atggccttaccagtgaccgccttgctcctgccgctggccttgctgctccacgccgccaggccggacatccagatgacacagagccctagcagcctgtctgccagcgtgggagacagagtgaccatcacatgcaaggccagccagagcgtgtccaacgacgtgacctggtatcagcagaagcctggacaggcccctaagctgctgatctacagcgccagcaacagatacagcggagtgcccgccagattttccggctctggctacggcaccgagttcacctttaccatcagcagcgtgcagagcgaggacttcgccgtgtacttctgccagcaagactacagcagcttcggccagggcaccaagctggaaatcaagagactcgaggacctgaagaacgtgttcccacctgaggtggccgtgttcgagcctagcgaggccgagatcagccacacccagaaagccaccctcgtgtgcctggctaccggcttctaccccgaccatgtggaactgtcttggtgggtcaacggcaaagaggtgcacagcggcgtgtctaccgacccccagccactgaaagaacagcccgccctgaacgacagccggtactgcctgagcagcagactgagagtgtccgccaccttctggcagaacccccggaaccacttcagatgccaggtgcagttctacggcctgagcgagaacgacgagtggacccaggacagagccaagcccgtgacccagatcgtgtctgccgaagcctggggcagagccgattgcggatcccagagcttcggcctgctggaccccaagctgtgctacctgctggatggcatcctgttcatctacggcgtgatcctgaccgccctgttcctgagagtgaagttcagcagaagcgccgacgcccctgcctaccagcagggacagaaccaactgtacaacgagctgaacctgggcagacgggaagagtacgacgtgctggacaagcggagaggcagggaccctgagatgggcggaaagccccagcggagaaagaacccccaggaaggactgtataacgaactccagaaagacaagatggccgaagcctacagcgagatcggcatgaagggcgagcggagaagaggcaagggccacgatggcctgtaccagggcctgagcaccgccaccaaggacacctatgacgccctgcacatgcaggccctgcctccaagaagggccaagcgatctggatctggagcaacaaacttctcactactcaaacaagcaggtgacgtggaggagaatcccgggcctactagtatggactggatttggcgcatccttttccttgtcggcgctgctaccggcgcgcattccttcgaacaggtgcagctggtggaatctggacctggcgtggtgcagcctggcagaagcctgagaatcagctgtgccgtgtccggcttcagcgtgaccaactacggcgtgcactgggtgcgccagccacctggaaaaggactggaatggctgggcgtgatctgggctggcggcatcaccaactacaacagcgccttcatgtcccggctgaccatctccaaggacaacagcaagaacaccgtgtacctccagatgaacagcctgcgggccgaggacaccgccatgtactactgtgcttccagaggcggccactacggctacgccctggattattggggccagggaaccctcgtgaccgtgtcctctacgcgtatccagaaccctgatcctgccgtgtaccagctgcgggatagcaagagcagcgacaagagcgtgtgtctgttcaccgacttcgacagccagaccaacgtgtcccagagcaaggactccgacgtgtacatcaccgataagaccgtgctggacatgcggagcatggacttcaagagcaactccgccgtggcctggtccaacaagtccgatttcgcctgcgccaacgccttcaacaacagcattatccccgaggacacattcttcccaagccccgagagcagctgcggtaccatcactcaaggtttggcagtgtcaaccatctcatcattctttccacctggctaccaagtgtccttctgcctggtcatggtgctgctgttcgccgtggataccggcctgtacttcagcgtcaagacc

SEQ ID NO: 35620 - DNA, 1947 bp, synthetic construct
  source 1..1947: mol_type = other DNA
atggccttaccagtgaccgccttgctcctgccgctggccttgctgctccacgccgccaggccggacatccagatgacacagagccctagcagcctgtctgccagcgtgggagacagagtgaccatcacatgcaaggccagccagagcgtgtccaacgacgtgacctggtatcagcagaagcctggacaggcccctaagctgctgatctacagcgccagcaacagatacagcggagtgcccgccagattttccggctctggctacggcaccgagttcacctttaccatcagcagcgtgcagagcgaggacttcgccgtgtacttctgccagcaagactacagcagcttcggccagggcaccaagctggaaatcaagagactcgagggacagcctaaggccaatcctaccgtgacactgttccctccaagcagcgaagaactccaggccaacaaggccacacttgtgtgcctgatctccgacttctaccctggggctgtgacagtggcttggaaggccgatggatctcctgtgaaagccggcgtggaaaccaccaagccatccaagcagagcaacaacaaatacgccgccagctcctacctgagcctgacacctgagcagtggaagtcccacagatcctacagctgccaagtgacccacgaaggcagcaccgtggaaaagacagtggcccctacagagtgcagcggatccctgggagagcctcagctgtgctatatcctggacgccatcctgtttctgtacggcatcgtgctgaccctgctgtactgccggctgaagatccaagtgcggaaggccgccatcaccagctacgagaaatccgacggcgtgtacaccggcctgagcaccagaaatcaagagacatacgagacactgaagcacgaaaagcctccacaaagggccaagcgatctggatctggagcaacaaacttctcactactcaaacaagcaggtgacgtggaggagaatcccgggcctactagtatggactggatttggcgcatccttttccttgtcggcgctgctaccggcgcgcattccttcgaacaggtgcagctggtggaatctggacctggcgtggtgcagcctggcagaagcctgagaatcagctgtgccgtgtccggcttcagcgtgaccaactacggcgtgcactgggtgcgccagccacctggaaaaggactggaatggctgggcgtgatctgggctggcggcatcaccaactacaacagcgccttcatgtcccggctgaccatctccaaggacaacagcaagaacaccgtgtacctccagatgaacagcctgcgggccgaggacaccgccatgtactactgtgcttccagaggcggccactacggctacgccctggattattggggccagggaaccctcgtgaccgtgtcctctacgcgtgcctctacaaagggaccctccgtgtttcctctggctcccagcagcaagtctacaagcggaggaacagccgctctgggctgcctggtcaaggattactttcccgagcctgtgaccgtgtcctggaatagcggagcactgacaagcggcgtgcacacctttccagccgtgctgcaaagcagcggcctgtactctctgagcagcgtggtcacagtgcctagctctagcctgggcacccagacctacatctgcaatgtgaaccacaagcctagcaacaccaaggtggacaagagagtggaacccaagagctgtggtaccctcggagaaccacagctctgttacattctggatgctatcctgttcctctatgggatcgtcctgacactcctgtattgcagactcaaaattcaagttcgcaaagccgccattacctcttacgagaagagtgatggggtgtacacaggactgtctacccggaatcaagaaacctacgaaaccctcaaacatgagaagccacctcagtaa

SEQ ID NO: 35621 - DNA, 1854 bp, synthetic construct
  source 1..1854: mol_type = other DNA
atggccttaccagtgaccgccttgctcctgccgctggccttgctgctccacgccgccaggccggacatccagatgacacagagccctagcagcctgtctgccagcgtgggagacagagtgaccatcacatgcaaggccagccagagcgtgtccaacgacgtgacctggtatcagcagaagcctggacaggcccctaagctgctgatctacagcgccagcaacagatacagcggagtgcccgccagattttccggctctggctacggcaccgagttcacctttaccatcagcagcgtgcagagcgaggacttcgccgtgtacttctgccagcaagactacagcagcttcggccagggcaccaagctggaaatcaagagactcgaggacctgaagaacgtgttcccacctgaggtggccgtgttcgagcctagcgaggccgagatcagccacacccagaaagccaccctcgtgtgcctggctaccggcttctaccccgaccatgtggaactgtcttggtgggtcaacggcaaagaggtgcacagcggcgtgtgtaccgacccccagccactgaaagaacagcccgccctgaacgacagccggtactgcctgagcagcagactgagagtgtccgccaccttctggcagaacccccggaaccacttcagatgccaggtgcagttctacggcctgagcgagaacgacgagtggacccaggacagagccaagcccgtgacccagatcgtgtctgccgaagcctggggcagagccgattgcggctttaccagcgagagctaccagcagggcgtgctgagcgcctactacatgtacttgttgctgctgctgaagtccgtggtgtacttcgccatcatcacatgctgcctgctgcggagaaccgccttctgctgcaacggcgagaagtctagggccaagcgatctggatctggagcaacaaacttctcactactcaaacaagcaggtgacgtggaggagaatcccgggcctactagtatggactggatttggcgcatccttttccttgtcggcgctgctaccggcgcgcattccttcgaacaggtgcagctggtggaatctggacctggcgtggtgcagcctggcagaagcctgagaatcagctgtgccgtgtccggcttcagcgtgaccaactacggcgtgcactgggtgcgccagccacctggaaaaggactggaatggctgggcgtgatctgggctggcggcatcaccaactacaacagcgccttcatgtcccggctgaccatctccaaggacaacagcaagaacaccgtgtacctccagatgaacagcctgcgggccgaggacaccgccatgtactactgtgcttccagaggcggccactacggctacgccctggattattggggccagggaaccctcgtgaccgtgtcctctacgcgtatccagaaccctgatcctgccgtgtaccagctgcgggatagcaagagcagcgacaagagcgtgtgtctgttcaccgacttcgacagccagaccaacgtgtcccagagcaaggactccgacgtgtacatcaccgataagtgcgtgctggacatgcggagcatggacttcaagagcaactccgccgtggcctggtccaacaagtccgatttcgcctgcgccaacgccttcaacaacagcattatccccgaggacacattcttcccaagccccgagagcagctgcgacgtgaagctggtggaaaagagcttcgagacagacaccaacctgaacttccagaacctgagcgtgatcggcttcagaatcctgctgctgaaagtggccggctttaacctgctgatgaccctgcggctgtggtccagc

SEQ ID NO: 35622 - DNA, 1875 bp, synthetic construct
  source 1..1875: mol_type = other DNA
atggccttaccagtgaccgccttgctcctgccgctggccttgctgctccacgccgccaggccggacatccagatgacacagagccctagcagcctgtctgccagcgtgggagacagagtgaccatcacatgcaaggccagccagagcgtgtccaacgacgtgacctggtatcagcagaagcctggacaggcccctaagctgctgatctacagcgccagcaacagatacagcggagtgcccgccagattttccggctctggctacggcaccgagttcacctttaccatcagcagcgtgcagagcgaggacttcgccgtgtacttctgccagcaagactacagcagcttcggccagggcaccaagctggaaatcaagagactcgaggacaagcagctggacgccgacgtgtcccccaagcctaccatcttcctgccctctatcgccgagacaaagctccagaaggccggcacctacctgtgcctgctggaaaagttcttcccagatgtgattaagatccactggcaggaaaagaagtccaacaccatcctgggcagccaggaaggcaacaccatgaagaccaacgacacctacatgaagttcagctggctgaccgtgcccgagaagtccctggacaaagaacacagatgcatcgtgcggcacgaaaacaacaagaacggcgtggaccaggaaatcatcttcccacccatcaagaccgatgtgattacaatggaccccaaggacaactgctccaaggacgccaacgataccctgctgctccagctgaccaacaccagcgcctactacatgtacgagatcctgctgggcaaggccaccctgtacgccgtgctggtgtctgccctggtgctgatggctatggtcaagcggaaggacagccggggaagggccaagcgatctggatctggagcaacaaacttctcactactcaaacaagcaggtgacgtggaggagaatcccgggcctactagtatggactggatttggcgcatccttttccttgtcggcgctgctaccggcgcgcattccttcgaacaggtgcagctggtggaatctggacctggcgtggtgcagcctggcagaagcctgagaatcagctgtgccgtgtccggcttcagcgtgaccaactacggcgtgcactgggtgcgccagccacctggaaaaggactggaatggctgggcgtgatctgggctggcggcatcaccaactacaacagcgccttcatgtcccggctgaccatctccaaggacaacagcaagaacaccgtgtacctccagatgaacagcctgcgggccgaggacaccgccatgtactactgtgcttccagaggcggccactacggctacgccctggattattggggccagggaaccctcgtgaccgtgtcctctacgcgtagccagcctcacaccaagcccagcgtgttcgtgatgaagaacggcaccaacgtggcctgcctcgtgaaagagttctaccccaaggacatcaggatcaacctggtgtccagcaagaagatcaccgagttcgaccccgccatcgtgatctcccccagcggcaagtacaacgccgtgaagctggggaagtatgaggacagcaacagcgtgacctgctccgtgcagcacgacaacaagaccgtgcacagcaccgactttgaagtgaaaaccgactccaccgaccacgtgaagcccaaagagacagagaacaccaagcagcccagcaagagctgccacaagcccaaggccatcgtgcacaccgagaaagtgaacatgatgagcctgaccgtgatcggcttcagaatcctgctgctgaaagtggccggctttaacctgctgatgaccctgcggctgtggtccagctaa

SEQ ID NO: 35623 - DNA, 1875 bp, synthetic construct
  source 1..1875: mol_type = other DNA
atggccttaccagtgaccgccttgctcctgccgctggccttgctgctccacgccgccaggccggacatccagatgacacagagccctagcagcctgtctgccagcgtgggagacagagtgaccatcacatgcaaggccagccagagcgtgtccaacgacgtgacctggtatcagcagaagcctggacaggcccctaagctgctgatctacagcgccagcaacagatacagcggagtgcccgccagattttccggctctggctacggcaccgagttcacctttaccatcagcagcgtgcagagcgaggacttcgccgtgtacttctgccagcaagactacagcagcttcggccagggcaccaagctggaaatcaagagactcgaggacaagcagctggacgccgacgtgtcccccaagcctaccatcttcctgccctctatcgccgagacaaagctccagaaggccggcacctacctgtgcctgctggaaaagttcttcccagatgtgattaagatccactggcaggaaaagaagtccaacaccatcctgggcagccaggaaggcaacaccatgaagaccaacgacacctacatgaagttcagctggctgaccgtgcccgagaagtccctggacaaagaacacagatgcatcgtgcggcacgaaaacaacaagaacggcgtggaccaggaaatcatcttcccacccatcaagaccgatgtgattacaatggaccccaaggacaactgctccaaggacgccaacgataccctgctgctccagctgaccaacaccagcgccaccatcctgtacgagatcctgctgggcaaggccaccctgtacgccgtgctggtgtctgccctggtgctgatggctatggtcaagcggaaggacagccggggaagggccaagcgatctggatctggagcaacaaacttctcactactcaaacaagcaggtgacgtggaggagaatcccgggcctactagtatggactggatttggcgcatccttttccttgtcggcgctgctaccggcgcgcattccttcgaacaggtgcagctggtggaatctggacctggcgtggtgcagcctggcagaagcctgagaatcagctgtgccgtgtccggcttcagcgtgaccaactacggcgtgcactgggtgcgccagccacctggaaaaggactggaatggctgggcgtgatctgggctggcggcatcaccaactacaacagcgccttcatgtcccggctgaccatctccaaggacaacagcaagaacaccgtgtacctccagatgaacagcctgcgggccgaggacaccgccatgtactactgtgcttccagaggcggccactacggctacgccctggattattggggccagggaaccctcgtgaccgtgtcctctacgcgtagccagcctcacaccaagcccagcgtgttcgtgatgaagaacggcaccaacgtggcctgcctcgtgaaagagttctaccccaaggacatcaggatcaacctggtgtccagcaagaagatcaccgagttcgaccccgccatcgtgatctcccccagcggcaagtacaacgccgtgaagctggggaagtatgaggacagcaacagcgtgacctgctccgtgcagcacgacaacaagaccgtgcacagcaccgactttgaagtgaaaaccgactccaccgaccacgtgaagcccaaagagacagagaacaccaagcagcccagcaagagctgccacaagcccaaggccatcgtgcacaccgagaaagtgaacatgatgagcctgaccgtgatcggcttcagaatcctgctgctgaaagtggccggctttaacctgctgatgaccctgcggctgtggtccagctaa

SEQ ID NO: 35624 - DNA, 1875 bp, synthetic construct
  source 1..1875: mol_type = other DNA
atggccttaccagtgaccgccttgctcctgccgctggccttgctgctccacgccgccaggccggacatccagatgacacagagccctagcagcctgtctgccagcgtgggagacagagtgaccatcacatgcaaggccagccagagcgtgtccaacgacgtgacctggtatcagcagaagcctggacaggcccctaagctgctgatctacagcgccagcaacagatacagcggagtgcccgccagattttccggctctggctacggcaccgagttcacctttaccatcagcagcgtgcagagcgaggacttcgccgtgtacttctgccagcaagactacagcagcttcggccagggcaccaagctggaaatcaagagactcgaggacaagcagctggacgccgacgtgtcccccaagcctaccatcttcctgccctctatcgccgagacaaagctccagaaggccggcacctacctgtgcctgctggaaaagttcttcccagatgtgattaagatccactggcaggaaaagaagtccaacaccatcctgggcagccaggaaggcaacaccatgaagaccaacgacacctacatgaagttcagctggctgaccgtgcccgagaagtccctggacaaagaacacagatgcatcgtgcggcacgaaaacaacaagaacggcgtggaccaggaaatcatcttcccacccatcaagaccgatgtgattacaatggaccccaaggacaactgctccaaggacgccaacgataccctgctgctccagctgaccaacaccagcgcctactacatgtacgagatcctgctgggcaaggccaccctgtacgccgtgctggtgtctgccctggtgctgatggctatggtcaagcggaaggacagccggggaagggccaagcgatctggatctggagcaacaaacttctcactactcaaacaagcaggtgacgtggaggagaatcccgggcctactagtatggactggatttggcgcatccttttccttgtcggcgctgctaccggcgcgcattccttcgaacaggtgcagctggtggaatctggacctggcgtggtgcagcctggcagaagcctgagaatcagctgtgccgtgtccggcttcagcgtgaccaactacggcgtgcactgggtgcgccagccacctggaaaaggactggaatggctgggcgtgatctgggctggcggcatcaccaactacaacagcgccttcatgtcccggctgaccatctccaaggacaacagcaagaacaccgtgtacctccagatgaacagcctgcgggccgaggacaccgccatgtactactgtgcttccagaggcggccactacggctacgccctggattattggggccagggaaccctcgtgaccgtgtcctctacgcgtagccagcctcacaccaagcccagcgtgttcgtgatgaagaacggcaccaacgtggcctgcctcgtgaaagagttctaccccaaggacatcaggatcaacctggtgtccagcaagaagatcaccgagttcgaccccgccatcgtgatctcccccagcggcaagtacaacgccgtgaagctggggaagtacgaggacagcaacagcgtgacctgctccgtgcagcacgacaacaagaccgtgcacagcaccgactttgaagtgaaaaccgactccaccgaccacgtgaagcccaaagagacagagaacaccaagcagcccagcaagagctgccacaagcccaaggccatcgtgcacaccgagaaagtgaacatgatgagcctgaccgtgctgggcttcagaatcctgctgctgaaagtggccggctttaacctgctgatgaccctgcggctgtggtccagctaa

SEQ ID NO: 35625 - DNA, 1875 bp, synthetic construct
  source 1..1875: mol_type = other DNA
atggccttaccagtgaccgccttgctcctgccgctggccttgctgctccacgccgccaggccggacatccagatgacacagagccctagcagcctgtctgccagcgtgggagacagagtgaccatcacatgcaaggccagccagagcgtgtccaacgacgtgacctggtatcagcagaagcctggacaggcccctaagctgctgatctacagcgccagcaacagatacagcggagtgcccgccagattttccggctctggctacggcaccgagttcacctttaccatcagcagcgtgcagagcgaggacttcgccgtgtacttctgccagcaagactacagcagcttcggccagggcaccaagctggaaatcaagagactcgaggacaagcagctggacgccgacgtgtcccccaagcctaccatcttcctgccctctatcgccgagacaaagctccagaaggccggcacctacctgtgcctgctggaaaagttcttcccagatgtgattaagatccactggcaggaaaagaagtccaacaccatcctgggcagccaggaaggcaacaccatgaagaccaacgacacctacatgaagttcagctggctgaccgtgcccgagaagtccctggacaaagaacacagatgcatcgtgcggcacgaaaacaacaagaacggcgtggaccaggaaatcatcttcccacccatcaagaccgatgtgattacaatggaccccaaggacaactgctccaaggacgccaacgataccctgctgctccagctgaccaacaccagcgccaccatcctgtacgagatcctgctgggcaaggccaccctgtacgccgtgctggtgtctgccctggtgctgatggctatggtcaagcggaaggacagccggggaagggccaagcgatctggatctggagcaacaaacttctcactactcaaacaagcaggtgacgtggaggagaatcccgggcctactagtatggactggatttggcgcatccttttccttgtcggcgctgctaccggcgcgcattccttcgaacaggtgcagctggtggaatctggacctggcgtggtgcagcctggcagaagcctgagaatcagctgtgccgtgtccggcttcagcgtgaccaactacggcgtgcactgggtgcgccagccacctggaaaaggactggaatggctgggcgtgatctgggctggcggcatcaccaactacaacagcgccttcatgtcccggctgaccatctccaaggacaacagcaagaacaccgtgtacctccagatgaacagcctgcgggccgaggacaccgccatgtactactgtgcttccagaggcggccactacggctacgccctggattattggggccagggaaccctcgtgaccgtgtcctctacgcgtagccagcctcacaccaagcccagcgtgttcgtgatgaagaacggcaccaacgtggcctgcctcgtgaaagagttctaccccaaggacatcaggatcaacctggtgtccagcaagaagatcaccgagttcgaccccgccatcgtgatctcccccagcggcaagtacaacgccgtgaagctggggaagtacgaggacagcaacagcgtgacctgctccgtgcagcacgacaacaagaccgtgcacagcaccgactttgaagtgaaaaccgactccaccgaccacgtgaagcccaaagagacagagaacaccaagcagcccagcaagagctgccacaagcccaaggccatcgtgcacaccgagaaagtgaacatgatgagcctgaccgtgctgggcttcagaatcctgctgctgaaagtggccggctttaacctgctgatgaccctgcggctgtggtccagctaa

SEQ ID NO: 35626 - DNA, 1857 bp, synthetic construct
  source 1..1857: mol_type = other DNA
atggccttaccagtgaccgccttgctcctgccgctggccttgctgctccacgccgccaggccggacatccagatgacacagagccctagcagcctgtctgccagcgtgggagacagagtgaccatcacatgcaaggccagccagagcgtgtccaacgacgtgacctggtatcagcagaagcctggacaggcccctaagctgctgatctacagcgccagcaacagatacagcggagtgcccgccagattttccggctctggctacggcaccgagttcacctttaccatcagcagcgtgcagagcgaggacttcgccgtgtacttctgccagcaagactacagcagcttcggccagggcaccaagctggaaatcaagagactcgaggacctgaagaacgtgttcccacctgaggtggccgtgttcgagcctagcgaggccgagatcagccacacccagaaagccaccctcgtgtgcctggctaccggcttctaccccgaccatgtggaactgtcttggtgggtcaacggcaaagaggtgcacagcggcgtgtgtaccgacccccagccactgaaagaacagcccgccctgaacgacagccggtactgcctgagcagcagactgagagtgtccgccaccttctggcagaacccccggaaccacttcagatgccaggtgcagttctacggcctgagcgagaacgacgagtggacccaggacagagccaagcccgtgacccagatcgtgtctgccgaagcctggggcagagccgattgcggctttaccagcgagagctaccagcagggcgtgctgagcgccaccatcctgtacttgttgctgctgctgaagtccgtggtgtacttcgccatcatcacatgctgcctgctgcggagaaccgccttctgctgcaacggcgagaagtctagggccaagcgatctggatctggagcaacaaacttctcactactcaaacaagcaggtgacgtggaggagaatcccgggcctactagtatggactggatttggcgcatccttttccttgtcggcgctgctaccggcgcgcattccttcgaacaggtgcagctggtggaatctggacctggcgtggtgcagcctggcagaagcctgagaatcagctgtgccgtgtccggcttcagcgtgaccaactacggcgtgcactgggtgcgccagccacctggaaaaggactggaatggctgggcgtgatctgggctggcggcatcaccaactacaacagcgccttcatgtcccggctgaccatctccaaggacaacagcaagaacaccgtgtacctccagatgaacagcctgcgggccgaggacaccgccatgtactactgtgcttccagaggcggccactacggctacgccctggattattggggccagggaaccctcgtgaccgtgtcctctacgcgtatccagaaccctgatcctgccgtgtaccagctgcgggatagcaagagcagcgacaagagcgtgtgtctgttcaccgacttcgacagccagaccaacgtgtcccagagcaaggactccgacgtgtacatcaccgataagtgcgtgctggacatgcggagcatggacttcaagagcaactccgccgtggcctggtccaacaagtccgatttcgcctgcgccaacgccttcaacaacagcattatccccgaggacacattcttcccaagccccgagagcagctgcgacgtgaagctggtggaaaagagcttcgagacagacaccaacctgaacttccagaacctgagcgtgatcggcctgcggatgctgttcgccaaaaccgtggccgtgaacttcctgctgaccgccaagctgttcttcctctaa

SEQ ID NO: 35627 - DNA, 1944 bp, synthetic construct
  source 1..1944: mol_type = other DNA
atggccttaccagtgaccgccttgctcctgccgctggccttgctgctccacgccgccaggccggacatccagatgacacagagccctagcagcctgtctgccagcgtgggagacagagtgaccatcacatgcaaggccagccagagcgtgtccaacgacgtgacctggtatcagcagaagcctggacaggcccctaagctgctgatctacagcgccagcaacagatacagcggagtgcccgccagattttccggctctggctacggcaccgagttcacctttaccatcagcagcgtgcagagcgaggacttcgccgtgtacttctgccagcaagactacagcagcttcggccagggcaccaagctggaaatcaagagactcgaggacctgaagaacgtgttcccacctgaggtggccgtgttcgagcctagcgaggccgagatcagccacacccagaaagccaccctcgtgtgcctggctaccggcttctaccccgaccatgtggaactgtcttggtgggtcaacggcaaagaggtgcacagcggcgtgtctaccgacccccagccactgaaagaacagcccgccctgaacgacagccggtactgcctgagcagcagactgagagtgtccgccaccttctggcagaacccccggaaccacttcagatgccaggtgcagttctacggcctgagcgagaacgacgagtggacccaggacagagccaagcccgtgacccagatcgtgtctgccgaagcctggggcagagccgattgcggatcctccaaggacgccaacgataccctgctgctccagctgaccaacaccagcgcctactacatgtacttgttgctgctgctgaagtccgtggtgtacttcgccatcatcacatgctgcctgctgcggagaaccgccttctgctgcaacggcgagaagtctagggccaagcgatctggatctggagcaacaaacttctcactactcaaacaagcaggtgacgtggaggagaatcccgggcctactagtatggactggatttggcgcatccttttccttgtcggcgctgctaccggcgcgcattccttcgaacaggtgcagctggtggaatctggacctggcgtggtgcagcctggcagaagcctgagaatcagctgtgccgtgtccggcttcagcgtgaccaactacggcgtgcactgggtgcgccagccacctggaaaaggactggaatggctgggcgtgatctgggctggcggcatcaccaactacaacagcgccttcatgtcccggctgaccatctccaaggacaacagcaagaacaccgtgtacctccagatgaacagcctgcgggccgaggacaccgccatgtactactgtgcttccagaggcggccactacggctacgccctggattattggggccagggaaccctcgtgaccgtgtcctctacgcgtatccagaaccctgatcctgccgtgtaccagctgcgggatagcaagagcagcgacaagagcgtgtgtctgttcaccgacttcgacagccagaccaacgtgtcccagagcaaggactccgacgtgtacatcaccgataagaccgtgctggacatgcggagcatggacttcaagagcaactccgccgtggcctggtccaacaagtccgatttcgcctgcgccaacgccttcaacaacagcattatccccgaggacacattcttcccaagccccgagagcagctgcggtaccgaagtgaaaaccgactccaccgaccacgtgaagcccaaagagacagagaacaccaagcagcccagcaagagctgccacaagcccaaggccatcgtgcacaccgagaaagtgaacatgatgagcctgaccgtgctgggcctgcggatgctgttcgccaaaaccgtggccgtgaacttcctgctgaccgccaagctgttcttcctctaa

SEQ ID NO: 35628 - DNA, 1854 bp, synthetic construct
  source 1..1854: mol_type = other DNA
atggccttaccagtgaccgccttgctcctgccgctggccttgctgctccacgccgccaggccggacatccagatgacacagagccctagcagcctgtctgccagcgtgggagacagagtgaccatcacatgcaaggccagccagagcgtgtccaacgacgtgacctggtatcagcagaagcctggacaggcccctaagctgctgatctacagcgccagcaacagatacagcggagtgcccgccagattttccggctctggctacggcaccgagttcacctttaccatcagcagcgtgcagagcgaggacttcgccgtgtacttctgccagcaagactacagcagcttcggccagggcaccaagctggaaatcaagagactcgaggacctgaagaacgtgttcccacctgaggtggccgtgttcgagcctagcgaggccgagatcagccacacccagaaagccaccctcgtgtgcctggctaccggcttctaccccgaccatgtggaactgtcttggtgggtcaacggcaaagaggtgcacagcggcgtgtgtaccgacccccagccactgaaagaacagcccgccctgaacgacagccggtactgcctgagcagcagactgagagtgtccgccaccttctggcagaacccccggaaccacttcagatgccaggtgcagttctacggcctgagcgagaacgacgagtggacccaggacagagccaagcccgtgacccagatcgtgtctgccgaagcctggggcagagccgattgcgacgtgaagctggtggaaaagagcttcgagacagacaccaacctgaacttccagaacctgagcgtgatcggcttcagaatcctgctgctgaaagtggccggctttaacctgctgatgaccctgcggctgtggtccagcagggccaagcgatctggatctggagcaacaaacttctcactactcaaacaagcaggtgacgtggaggagaatcccgggcctactagtatggactggatttggcgcatccttttccttgtcggcgctgctaccggcgcgcattccttcgaacaggtgcagctggtggaatctggacctggcgtggtgcagcctggcagaagcctgagaatcagctgtgccgtgtccggcttcagcgtgaccaactacggcgtgcactgggtgcgccagccacctggaaaaggactggaatggctgggcgtgatctgggctggcggcatcaccaactacaacagcgccttcatgtcccggctgaccatctccaaggacaacagcaagaacaccgtgtacctccagatgaacagcctgcgggccgaggacaccgccatgtactactgtgcttccagaggcggccactacggctacgccctggattattggggccagggaaccctcgtgaccgtgtcctctacgcgtatccagaaccctgatcctgccgtgtaccagctgcgggatagcaagagcagcgacaagagcgtgtgtctgttcaccgacttcgacagccagaccaacgtgtcccagagcaaggactccgacgtgtacatcaccgataagtgcgtgctggacatgcggagcatggacttcaagagcaactccgccgtggcctggtccaacaagtccgatttcgcctgcgccaacgccttcaacaacagcattatccccgaggacacattcttcccaagccccgagagcagctgcggctttaccagcgagagctaccagcagggcgtgctgagcgccaccatcctgtacgagatcctgctgggcaaggccaccctgtacgccgtgctggtgtctgccctggtgctgatggctatggtcaagcggaaggacagccggggataa

SEQ ID NO: 35629 - DNA, 1854 bp, synthetic construct
  source 1..1854: mol_type = other DNA
atggccttaccagtgaccgccttgctcctgccgctggccttgctgctccacgccgccaggccggacatccagatgacacagagccctagcagcctgtctgccagcgtgggagacagagtgaccatcacatgcaaggccagccagagcgtgtccaacgacgtgacctggtatcagcagaagcctggacaggcccctaagctgctgatctacagcgccagcaacagatacagcggagtgcccgccagattttccggctctggctacggcaccgagttcacctttaccatcagcagcgtgcagagcgaggacttcgccgtgtacttctgccagcaagactacagcagcttcggccagggcaccaagctggaaatcaagagactcgaggacctgaagaacgtgttcccacctgaggtggccgtgttcgagcctagcgaggccgagatcagccacacccagaaagccaccctcgtgtgcctggctaccggcttctaccccgaccatgtggaactgtcttggtgggtcaacggcaaagaggtgcacagcggcgtgtgtaccgacccccagccactgaaagaacagcccgccctgaacgacagccggtactgcctgagcagcagactgagagtgtccgccaccttctggcagaacccccggaaccacttcagatgccaggtgcagttctacggcctgagcgagaacgacgagtggacccaggacagagccaagcccgtgacccagatcgtgtctgccgaagcctggggcagagccgattgcggctttaccagcgagagctaccagcagggcgtgctgagcgccaccaacctgagcgtgatcggcttcagaatcctgctgctgaaagtggccggctttaacctgctgatgaccctgcggctgtggtccagcagggccaagcgatctggatctggagcaacaaacttctcactactcaaacaagcaggtgacgtggaggagaatcccgggcctactagtatggactggatttggcgcatccttttccttgtcggcgctgctaccggcgcgcattccttcgaacaggtgcagctggtggaatctggacctggcgtggtgcagcctggcagaagcctgagaatcagctgtgccgtgtccggcttcagcgtgaccaactacggcgtgcactgggtgcgccagccacctggaaaaggactggaatggctgggcgtgatctgggctggcggcatcaccaactacaacagcgccttcatgtcccggctgaccatctccaaggacaacagcaagaacaccgtgtacctccagatgaacagcctgcgggccgaggacaccgccatgtactactgtgcttccagaggcggccactacggctacgccctggattattggggccagggaaccctcgtgaccgtgtcctctacgcgtatccagaaccctgatcctgccgtgtaccagctgcgggatagcaagagcagcgacaagagcgtgtgtctgttcaccgacttcgacagccagaccaacgtgtcccagagcaaggactccgacgtgtacatcaccgataagtgcgtgctggacatgcggagcatggacttcaagagcaactccgccgtggcctggtccaacaagtccgatttcgcctgcgccaacgccttcaacaacagcattatccccgaggacacattcttcccaagccccgagagcagctgcgacgtgaagctggtggaaaagagcttcgagacagacaccaacctgaacttccagatcctgtacgagatcctgctgggcaaggccaccctgtacgccgtgctggtgtctgccctggtgctgatggctatggtcaagcggaaggacagccggggataa

SEQ ID NO: 35630 - DNA, 1854 bp, synthetic construct; identical to SEQ ID NO: 35628
  source 1..1854: mol_type = other DNA

SEQ ID NO: 35631 - DNA, 1854 bp, synthetic construct; identical to SEQ ID NO: 35629
  source 1..1854: mol_type = other DNA

SEQ ID NO: 35632 - DNA, 1851 bp, synthetic construct
  source 1..1851: mol_type = other DNA
atggccttaccagtgaccgccttgctcctgccgctggccttgctgctccacgccgccaggccggacatccagatgacacagagccctagcagcctgtctgccagcgtgggagacagagtgaccatcacatgcaaggccagccagagcgtgtccaacgacgtgacctggtatcagcagaagcctggacaggcccctaagctgctgatctacagcgccagcaacagatacagcggagtgcccgccagattttccggctctggctacggcaccgagttcacctttaccatcagcagcgtgcagagcgaggacttcgccgtgtacttctgccagcaagactacagcagcttcggccagggcaccaagctggaaatcaagagactcgaggacctgaagaacgtgttcccacctgaggtggccgtgttcgagcctagcgaggccgagatcagccacacccagaaagccaccctcgtgtgcctggctaccggcttctaccccgaccatgtggaactgtcttggtgggtcaacggcaaagaggtgcacagcggcgtgtgtaccgacccccagccactgaaagaacagcccgccctgaacgacagccggtactgcctgagcagcagactgagagtgtccgccaccttctggcagaacccccggaaccacttcagatgccaggtgcagttctacggcctgagcgagaacgacgagtggacccaggacagagccaagcccgtgacccagatcgtgtctgccgaagcctggggcagagccgattgcgacgtgaagctggtggaaaagagcttcgagacagacaccaacctgaacttccagaacctgagcgtgatcggcttcagaatcctgctgctgaaagtggccggctttaacctgctgatgaccctgcggctgtggtccagcagggccaagcgatctggatctggagcaacaaacttctcactactcaaacaagcaggtgacgtggaggagaatcccgggcctactagtatggactggatttggcgcatccttttccttgtcggcgctgctaccggcgcgcattccttcgaacaggtgcagctggtggaatctggacctggcgtggtgcagcctggcagaagcctgagaatcagctgtgccgtgtccggcttcagcgtgaccaactacggcgtgcactgggtgcgccagccacctggaaaaggactggaatggctgggcgtgatctgggctggcggcatcaccaactacaacagcgccttcatgtcccggctgaccatctccaaggacaacagcaagaacaccgtgtacctccagatgaacagcctgcgggccgaggacaccgccatgtactactgtgcttccagaggcggccactacggctacgccctggattattggggccagggaaccctcgtgaccgtgtcctctacgcgtatccagaaccctgatcctgccgtgtaccagctgcgggatagcaagagcagcgacaagagcgtgtgtctgttcaccgacttcgacagccagaccaacgtgtcccagagcaaggactccgacgtgtacatcaccgataagtgcgtgctggacatgcggagcatggacttcaagagcaactccgccgtggcctggtccaacaagtccgatttcgcctgcgccaacgccttcaacaacagcattatccccgaggacacattcttcccaagccccgagagcagctgcggctttaccagcgagagctaccagcagggcgtgctgagcgccaccatcctgtacgagatcctgctgggcaaggccaccctgtacgccgtgctggtgtctgccctggtgctgatggctatggtcaagcggaaggacagccgggga

SEQ ID NO: 35633 - DNA, 1863 bp, synthetic construct
  source 1..1863: mol_type = other DNA
atggccttaccagtgaccgccttgctcctgccgctggccttgctgctccacgccgccaggccggacatccagatgacacagagccctagcagcctgtctgccagcgtgggagacagagtgaccatcacatgcaaggccagccagagcgtgtccaacgacgtgacctggtatcagcagaagcctggacaggcccctaagctgctgatctacagcgccagcaacagatacagcggagtgcccgccagattttccggctctggctacggcaccgagttcacctttaccatcagcagcgtgcagagcgaggacttcgccgtgtacttctgccagcaagactacagcagcttcggccagggcaccaagctggaaatcaagagactcgaggccgacgtgtcccccaagcctaccatcttcctgccctctatcgccgagacaaagctccagaaggccggcacctacctgtgcctgctggaaaagttcttcccagatgtgattaagatccactggcaggaaaagaagtccaacaccatcctgggcagccaggaaggcaacaccatgaagaccaacgacacctacatgaagttcagctggctgaccgtgcccgagaagtccctggacaaagaacacagatgcatcgtgcggcacgaaaacaacaagaacggcgtggaccaggaaatcatcttcccacccatcaagaccgatgtgattacaatggaccccaaggacaactgctccaaggacgccaacgataccctgctgctccagctgaccaacaccagcgcctactacatgtacttgttgctgctgctgaagtccgtggtgtacttcgccatcatcacatgctgcctgctgcggagaaccgccttctgctgcaacggcgagaagtctagggccaagcgatctggatctggagcaacaaacttctcactactcaaacaagcaggtgacgtggaggagaatcccgggcctactagtatggactggatttggcgcatccttttccttgtcggcgctgctaccggcgcgcattccttcgaacaggtgcagctggtggaatctggacctggcgtggtgcagcctggcagaagcctgagaatcagctgtgccgtgtccggcttcagcgtgaccaactacggcgtgcactgggtgcgccagccacctggaaaaggactggaatggctgggcgtgatctgggctggcggcatcaccaactacaacagcgccttcatgtcccggctgaccatctccaaggacaacagcaagaacaccgtgtacctccagatgaacagcctgcgggccgaggacaccgccatgtactactgtgcttccagaggcggccactacggctacgccctggattattggggccagggaaccctcgtgaccgtgtcctctacgcgtagccagcctcacaccaagcccagcgtgttcgtgatgaagaacggcaccaacgtggcctgcctcgtgaaagagttctaccccaaggacatcaggatcaacctggtgtccagcaagaagatcaccgagttcgaccccgccatcgtgatctcccccagcggcaagtacaacgccgtgaagctggggaagtatgaggacagcaacagcgtgacctgctccgtgcagcacgacaacaagaccgtgcacagcaccgactttgaagtgaaaaccgactccaccgaccacgtgaagcccaaagagacagagaacaccaagcagcccagcaagagctgccacaagcccaaggccatcgtgcacaccgagaaagtgaacatgatgagcctgaccgtgatcggcttcagaatcctgctgctgaaagtggccggctttaacctgctgatgaccctgcggctgtggtccagctaa

SEQ ID NO: 35634 - DNA, 1863 bp, synthetic construct
  source 1..1863: mol_type = other DNA
atggccttaccagtgaccgccttgctcctgccgctggccttgctgctccacgccgccaggccggacatccagatgacacagagccctagcagcctgtctgccagcgtgggagacagagtgaccatcacatgcaaggccagccagagcgtgtccaacgacgtgacctggtatcagcagaagcctggacaggcccctaagctgctgatctacagcgccagcaacagatacagcggagtgcccgccagattttccggctctggctacggcaccgagttcacctttaccatcagcagcgtgcagagcgaggacttcgccgtgtacttctgccagcaagactacagcagcttcggccagggcaccaagctggaaatcaagagactcgaggccgacgtgtcccccaagcctaccatcttcctgccctctatcgccgagacaaagctccagaaggccggcacctacctgtgcctgctggaaaagttcttcccagatgtgattaagatccactggcaggaaaagaagtccaacaccatcctgggcagccaggaaggcaacaccatgaagaccaacgacacctacatgaagttcagctggctgaccgtgcccgagaagtccctggacaaagaacacagatgcatcgtgcggcacgaaaacaacaagaacggcgtggaccaggaaatcatcttcccacccatcaagaccgatgtgattacaatggaccccaaggacaactgctccaaggacgccaacgataccctgctgctccagctgaccaacaccagcgcctactacatgtacttgttgctgctgctgaagtccgtggtgtacttcgccatcatcacatgctgcctgctgcggagaaccgccttctgctgcaacggcgagaagtctagggccaagcgatctggatctggagcaacaaacttctcactactcaaacaagcaggtgacgtggaggagaatcccgggcctactagtatggactggatttggcgcatccttttccttgtcggcgctgctaccggcgcgcattccttcgaacaggtgcagctggtggaatctggacctggcgtggtgcagcctggcagaagcctgagaatcagctgtgccgtgtccggcttcagcgtgaccaactacggcgtgcactgggtgcgccagccacctggaaaaggactggaatggctgggcgtgatctgggctggcggcatcaccaactacaacagcgccttcatgtcccggctgaccatctccaaggacaacagcaagaacaccgtgtacctccagatgaacagcctgcgggccgaggacaccgccatgtactactgtgcttccagaggcggccactacggctacgccctggattattggggccagggaaccctcgtgaccgtgtcctctacgcgtagccagcctcacaccaagcccagcgtgttcgtgatgaagaacggcaccaacgtggcctgcctcgtgaaagagttctaccccaaggacatcaggatcaacctggtgtccagcaagaagatcaccgagttcgaccccgccatcgtgatctcccccagcggcaagtacaacgccgtgaagctggggaagtacgaggacagcaacagcgtgacctgctccgtgcagcacgacaacaagaccgtgcacagcaccgactttgaagtgaaaaccgactccaccgaccacgtgaagcccaaagagacagagaacaccaagcagcccagcaagagctgccacaagcccaaggccatcgtgcacaccgagaaagtgaacatgatgagcctgaccgtgctgggcttcagaatcctgctgctgaaagtggccggctttaacctgctgatgaccctgcggctgtggtccagctaa

SEQ ID NO: 35635 - DNA, 1851 bp, synthetic construct; identical to SEQ ID NO: 35632
  source 1..1851: mol_type = other DNA

SEQ ID NO: 35636 - DNA, 1863 bp, synthetic construct
  source 1..1863: mol_type = other DNA
atggccttaccagtgaccgccttgctcctgccgctggccttgctgctccacgccgccaggccggacatccagatgacacagagccctagcagcctgtctgccagcgtgggagacagagtgaccatcacatgcaaggccagccagagcgtgtccaacgacgtgacctggtatcagcagaagcctggacaggcccctaagctgctgatctacagcgccagcaacagatacagcggagtgcccgccagattttccggctctggctacggcaccgagttcacctttaccatcagcagcgtgcagagcgaggacttcgccgtgtacttctgccagcaagactacagcagcttcggccagggcaccaagctggaaatcaagagactcgagatccagaaccctgatcctgccgtgtaccagctgcgggatagcaagagcagcgacaagagcgtgtgtctgttcaccgacttcgacagccagaccaacgtgtcccagagcaaggactccgacgtgtacatcaccgataagtgcgtgctggacatgcggagcatggacttcaagagcaactccgccgtggcctggtccaacaagtccgatttcgcctgcgccaacgccttcaacaacagcattatccccgaggacacattcttcccaagccccgagagcagctgcggctttaccagcgagagctaccagcagggcgtgctgagcgccaccatcctgtacgagatcctgctgggcaaggccaccctgtacgccgtgctggtgtctgccctggtgctgatggctatggtcaagcggaaggacagccggggacgcgccaagagaagcggatctggcgtgaagcagaccctgaatttcgacctgctgaagctggctggcgacgtggaatccaacccaggccctactagtatggactggatttggcgcatccttttccttgtcggcgctgctaccggcgcgcattccttcgaacaggtgcagctggtggaatctggacctggcgtggtgcagcctggcagaagcctgagaatcagctgtgccgtgtccggcttcagcgtgaccaactacggcgtgcactgggtgcgccagccacctggaaaaggactggaatggctgggcgtgatctgggctggcggcatcaccaactacaacagcgccttcatgtcccggctgaccatctccaaggacaacagcaagaacaccgtgtacctccagatgaacagcctgcgggccgaggacaccgccatgtactactgtgcttccagaggcggccactacggctacgccctggattattggggccagggaaccctcgtgaccgtgtcctctacgcgtgaggacctgaagaacgtgttcccacctgaggtggccgtgttcgagcctagcgaggccgagatcagccacacccagaaagccaccctcgtgtgcctggctaccggcttctaccccgaccatgtggaactgtcttggtgggtcaacggcaaagaggtgcacagcggcgtgtgtaccgacccccagccactgaaagaacagcccgccctgaacgacagccggtactgcctgagcagcagactgagagtgtccgccaccttctggcagaacccccggaaccacttcagatgccaggtgcagttctacggcctgagcgagaacgacgagtggacccaggacagagccaagcccgtgacccagatcgtgtctgccgaagcctggggcagagccgattgcgacgtgaagctggtggaaaagagcttcgagacagacaccaacctgaacttccagaacctgagcgtgatcggcttcagaatcctgctgctgaaagtggccggctttaacctgctgatgaccctgcggctgtggtccagc

SEQ ID NO: 35637 - DNA, 2256 bp, synthetic construct
  source 1..2256: mol_type = other DNA
atggccttaccagtgaccgccttgctcctgccgctggccttgctgctccacgccgccaggccggaagtgcagctggttgaatctggcggaggactggttcagcctggcggatctctgagactgtcttgtgccgccagcggcttcagcttcagcgacttttggatgagctgggtccgacaggcccctggcaaaggacttgaatgggtcgccacaatcagccaggccggcagcgagaaggactacgtggactctgtgaagggcagattcaccatcagccgggacaacgccaagaagtccctgtacctccagatgaacagcctgagagccgaggacaccgccgtgtactattgtgcctctggcgtgtacagcttcgactacagaggccagggcaccctggtcacagtctcttctggtaccggcggaggcggatctggcggcggaggtagcggtggcggaggatctgaattcgacatccagatgacacagagccctagcagcctgtctgccagcgtgggagacagagtgaccatcacatgcaaggccagccagagcgtgtccaacgacgtgacctggtatcagcagaagcctggacaggcccctaagctgctgatctacagcgccagcaacagatacagcggagtgcccgccagattttccggctctggctacggcaccgagttcacctttaccatcagcagcgtgcagagcgaggacttcgccgtgtacttctgccagcaagactacagcagcttcggccagggcaccaagctggaaatcaagagactcgaggacctgaagaacgtgttcccacctgaggtggccgtgttcgagcctagcgaggccgagatcagccacacccagaaagccaccctcgtgtgcctggctaccggcttctaccccgaccatgtggaactgtcttggtgggtcaacggcaaagaggtgcacagcggcgtgtgtaccgacccccagccactgaaagaacagcccgccctgaacgacagccggtactgcctgagcagcagactgagagtgtccgccaccttctggcagaacccccggaaccacttcagatgccaggtgcagttctacggcctgagcgagaacgacgagtggacccaggacagagccaagcccgtgacccagatcgtgtctgccgaagcctggggcagagccgattgcgacgtgaagctggtggaaaagagcttcgagacagacaccaacctgaacttccagaacctgagcgtgatcggcttcagaatcctgctgctgaaagtggccggctttaacctgctgatgaccctgcggctgtggtccagcagggccaagcgatctggatctggagcaacaaacttctcactactcaaacaagcaggtgacgtggaggagaatcccgggcctactagtatggactggatttggcgcatccttttccttgtcggcgctgctaccggcgcgcattccttcgaacaggtgcagctggtggaatctggacctggcgtggtgcagcctggcagaagcctgagaatcagctgtgccgtgtccggcttcagcgtgaccaactacggcgtgcactgggtgcgccagccacctggaaaaggactggaatggctgggcgtgatctgggctggcggcatcaccaactacaacagcgccttcatgtcccggctgaccatctccaaggacaacagcaagaacaccgtgtacctccagatgaacagcctgcgggccgaggacaccgccatgtactactgtgcttccagaggcggccactacggctacgccctggattattggggccagggaaccctcgtgaccgtgtcctctacgcgtatccagaaccctgatcctgccgtgtaccagctgcgggatagcaagagcagcgacaagagcgtgtgtctgttcaccgacttcgacagccagaccaacgtgtcccagagcaaggactccgacgtgtacatcaccgataagtgcgtgctggacatgcggagcatggacttcaagagcaactccgccgtggcctggtccaacaagtccgatttcgcctgcgccaacgccttcaacaacagcattatccccgaggacacattcttcccaagccccgagagcagctgcggctttaccagcgagagctaccagcagggcgtgctgagcgccaccatcctgtacgagatcctgctgggcaaggccaccctgtacgccgtgctggtgtctgccctggtgctgatggctatggtcaagcggaaggacagccgggga

SEQ ID NO: 35638 - DNA, 2268 bp, synthetic construct
  source 1..2268: mol_type = other DNA
atggccttaccagtgaccgccttgctcctgccgctggccttgctgctccacgccgccaggccggaagtgcagctggttgaatctggcggaggactggttcagcctggcggatctctgagactgtcttgtgccgccagcggcttcagcttcagcgacttttggatgagctgggtccgacaggcccctggcaaaggacttgaatgggtcgccacaatcagccaggccggcagcgagaaggactacgtggactctgtgaagggcagattcaccatcagccgggacaacgccaagaagtccctgtacctccagatgaacagcctgagagccgaggacaccgccgtgtactattgtgcctctggcgtgtacagcttcgactacagaggccagggcaccctggtcacagtctcttctggtaccggcggaggcggatctggcggcggaggtagcggtggcggaggatctgaattcgacatccagatgacacagagccctagcagcctgtctgccagcgtgggagacagagtgaccatcacatgcaaggccagccagagcgtgtccaacgacgtgacctggtatcagcagaagcctggacaggcccctaagctgctgatctacagcgccagcaacagatacagcggagtgcccgccagattttccggctctggctacggcaccgagttcacctttaccatcagcagcgtgcagagcgaggacttcgccgtgtacttctgccagcaagactacagcagcttcggccagggcaccaagctggaaatcaagagactcgagatccagaaccctgatcctgccgtgtaccagctgcgggatagcaagagcagcgacaagagcgtgtgtctgttcaccgacttcgacagccagaccaacgtgtcccagagcaaggactccgacgtgtacatcaccgataagtgcgtgctggacatgcggagcatggacttcaagagcaactccgccgtggcctggtccaacaagtccgatttcgcctgcgccaacgccttcaacaacagcattatccccgaggacacattcttcccaagccccgagagcagctgcggctttaccagcgagagctaccagcagggcgtgctgagcgccaccatcctgtacgagatcctgctgggcaaggccaccctgtacgccgtgctggtgtctgccctggtgctgatggctatggtcaagcggaaggacagccggggacgcgccaagagaagcggatctggcgtgaagcagaccctgaatttcgacctgctgaagctggctggcgacgtggaatccaacccaggccctactagtatggactggatttggcgcatccttttccttgtcggcgctgctaccggcgcgcattccttcgaacaggtgcagctggtggaatctggacctggcgtggtgcagcctggcagaagcctgagaatcagctgtgccgtgtccggcttcagcgtgaccaactacggcgtgcactgggtgcgccagccacctggaaaaggactggaatggctgggcgtgatctgggctggcggcatcaccaactacaacagcgccttcatgtcccggctgaccatctccaaggacaacagcaagaacaccgtgtacctccagatgaacagcctgcgggccgaggacaccgccatgtactactgtgcttccagaggcggccactacggctacgccctggattattggggccagggaaccctcgtgaccgtgtcctctacgcgtgaggacctgaagaacgtgttcccacctgaggtggccgtgttcgagcctagcgaggccgagatcagccacacccagaaagccaccctcgtgtgcctggctaccggcttctaccccgaccatgtggaactgtcttggtgggtcaacggcaaagaggtgcacagcggcgtgtgtaccgacccccagccactgaaagaacagcccgccctgaacgacagccggtactgcctgagcagcagactgagagtgtccgccaccttctggcagaacccccggaaccacttcagatgccaggtgcagttctacggcctgagcgagaacgacgagtggacccaggacagagccaagcccgtgacccagatcgtgtctgccgaagcctggggcagagccgattgcgacgtgaagctggtggaaaagagcttcgagacagacaccaacctgaacttccagaacctgagcgtgatcggcttcagaatcctgctgctgaaagtggccggctttaacctgctgatgaccctgcggctgtggtccagc

SEQ ID NO: 35639 - DNA, 2667 bp, synthetic construct
  source 1..2667: mol_type = other DNA
atggccttaccagtgaccgccttgctcctgccgctggccttgctgctccacgccgccaggccggaagtgcagctggttgaatctggcggaggactggttcagcctggcggatctctgagactgtcttgtgccgccagcggcttcagcttcagcgacttttggatgagctgggtccgacaggcccctggcaaaggacttgaatgggtcgccacaatcagccaggccggcagcgagaaggactacgtggactctgtgaagggcagattcaccatcagccgggacaacgccaagaagtccctgtacctccagatgaacagcctgagagccgaggacaccgccgtgtactattgtgcctctggcgtgtacagcttcgactacagaggccagggcaccctggtcacagtctcttctggtaccggcggaggcggatctggcggcggaggtagcggtggcggaggatctgaattcgacatccagatgacacagagccctagcagcctgtctgccagcgtgggagacagagtgaccatcacatgcaaggccagccagagcgtgtccaacgacgtgacctggtatcagcagaagcctggacaggcccctaagctgctgatctacagcgccagcaacagatacagcggagtgcccgccagattttccggctctggctacggcaccgagttcacctttaccatcagcagcgtgcagagcgaggacttcgccgtgtacttctgccagcaagactacagcagcttcggccagggcaccaagctggaaatcaagagactcgaggacctgaagaacgtgttcccacctgaggtggccgtgttcgagcctagcgaggccgagatcagccacacccagaaagccaccctcgtgtgcctggctaccggcttctaccccgaccatgtggaactgtcttggtgggtcaacggcaaagaggtgcacagcggcgtgtgtaccgacccccagccactgaaagaacagcccgccctgaacgacagccggtactgcctgagcagcagactgagagtgtccgccaccttctggcagaacccccggaaccacttcagatgccaggtgcagttctacggcctgagcgagaacgacgagtggacccaggacagagccaagcccgtgacccagatcgtgtctgccgaagcctggggcagagccgattgcgacgtgaagctggtggaaaagagcttcgagacagacaccaacctgaacttccagaacctgagcgtgatcggcttcagaatcctgctgctgaaagtggccggctttaacctgctgatgaccctgcggctgtggtccagcagggccaagcgatctggatctggagcaacaaacttctcactactcaaacaagcaggtgacgtggaggagaatcccgggcctactagtatggactggatttggcgcatccttttccttgtcggcgctgctaccggcgcgcattccgggccccagctccagctgcaagagtctggacctggcctggtcaagcctagcgagacactgagcctgacctgtaccgtgtccggcgatagcatcagcagcggcgattactactggggctggatcagacagcctcctggcaaaggactggaatggatcggccacatctactacagcggcgtgacctactacaaccccagcctgaagtccagagtgaccatcagcgtggacaccagccggaaccagttctccctgaagctgtctagcgtgacagccgccgataccgccgtgtactactgcaccagagaggacagcagcaactggcggagtagaggccagggaacactggtcacagttagctctggatccggcggaggcggaagtggaggcggaggatctggcggcggaggctctttcgaacaggtgcagctggtggaatctggacctggcgtggtgcagcctggcagaagcctgagaatcagctgtgccgtgtccggcttcagcgtgaccaactacggcgtgcactgggtgcgccagccacctggaaaaggactggaatggctgggcgtgatctgggctggcggcatcaccaactacaacagcgccttcatgtcccggctgaccatctccaaggacaacagcaagaacaccgtgtacctccagatgaacagcctgcgggccgaggacaccgccatgtactactgtgcttccagaggcggccactacggctacgccctggattattggggccagggaaccctcgtgaccgtgtcctctacgcgtatccagaaccctgatcctgccgtgtaccagctgcgggatagcaagagcagcgacaagagcgtgtgtctgttcaccgacttcgacagccagaccaacgtgtcccagagcaaggactccgacgtgtacatcaccgataagtgcgtgctggacatgcggagcatggacttcaagagcaactccgccgtggcctggtccaacaagtccgatttcgcctgcgccaacgccttcaacaacagcattatccccgaggacacattcttcccaagccccgagagcagctgcggctttaccagcgagagctaccagcagggcgtgctgagcgccaccatcctgtacgagatcctgctgggcaaggccaccctgtacgccgtgctggtgtctgccctggtgctgatggctatggtcaagcggaaggacagccgggga

SEQ ID NO: 35640 - DNA, 2679 bp, synthetic construct
  source 1..2679: mol_type = other DNA
atggccttaccagtgaccgccttgctcctgccgctggccttgctgctccacgccgccaggccggaagtgcagctggttgaatctggcggaggactggttcagcctggcggatctctgagactgtcttgtgccgccagcggcttcagcttcagcgacttttggatgagctgggtccgacaggcccctggcaaaggacttgaatgggtcgccacaatcagccaggccggcagcgagaaggactacgtggactctgtgaagggcagattcaccatcagccgggacaacgccaagaagtccctgtacctccagatgaacagcctgagagccgaggacaccgccgtgtactattgtgcctctggcgtgtacagcttcgactacagaggccagggcaccctggtcacagtctcttctggtaccggcggaggcggatctggcggcggaggtagcggtggcggaggatctgaattcgacatccagatgacacagagccctagcagcctgtctgccagcgtgggagacagagtgaccatcacatgcaaggccagccagagcgtgtccaacgacgtgacctggtatcagcagaagcctggacaggcccctaagctgctgatctacagcgccagcaacagatacagcggagtgcccgccagattttccggctctggctacggcaccgagttcacctttaccatcagcagcgtgcagagcgaggacttcgccgtgtacttctgccagcaagactacagcagcttcggccagggcaccaagctggaaatcaagagactcgagatccagaaccctgatcctgccgtgtaccagctgcgggatagcaagagcagcgacaagagcgtgtgtctgttcaccgacttcgacagccagaccaacgtgtcccagagcaaggactccgacgtgtacatcaccgataagtgcgtgctggacatgcggagcatggacttcaagagcaactccgccgtggcctggtccaacaagtccgatttcgcctgcgccaacgccttcaacaacagcattatccccgaggacacattcttcccaagccccgagagcagctgcggctttaccagcgagagctaccagcagggcgtgctgagcgccaccatcctgtacgagatcctgctgggcaaggccaccctgtacgccgtgctggtgtctgccctggtgctgatggctatggtcaagcggaaggacagccggggacgcgccaagagaagcggatctggcgtgaagcagaccctgaatttcgacctgctgaagctggctggcgacgtggaatccaacccaggccctactagtatggactggatttggcgcatccttttccttgtcggcgctgctaccggcgcgcattccgggccccagctccagctgcaagagtctggacctggcctggtcaagcctagcgagacactgagcctgacctgtaccgtgtccggcgatagcatcagcagcggcgattactactggggctggatcagacagcctcctggcaaaggactggaatggatcggccacatctactacagcggcgtgacctactacaaccccagcctgaagtccagagtgaccatcagcgtggacaccagccggaaccagttctccctgaagctgtctagcgtgacagccgccgataccgccgtgtactactgcaccagagaggacagcagcaactggcggagtagaggccagggaacactggtcacagttagctctggatccggcggaggcggaagtggaggcggaggatctggcggcggaggctctttcgaacaggtgcagctggtggaatctggacctggcgtggtgcagcctggcagaagcctgagaatcagctgtgccgtgtccggcttcagcgtgaccaactacggcgtgcactgggtgcgccagccacctggaaaaggactggaatggctgggcgtgatctgggctggcggcatcaccaactacaacagcgccttcatgtcccggctgaccatctccaaggacaacagcaagaacaccgtgtacctccagatgaacagcctgcgggccgaggacaccgccatgtactactgtgcttccagaggcggccactacggctacgccctggattattggggccagggaaccctcgtgaccgtgtcctctacgcgtgaggacctgaagaacgtgttcccacctgaggtggccgtgttcgagcctagcgaggccgagatcagccacacccagaaagccaccctcgtgtgcctggctaccggcttctaccccgaccatgtggaactgtcttggtgggtcaacggcaaagaggtgcacagcggcgtgtgtaccgacccccagccactgaaagaacagcccgccctgaacgacagccggtactgcctgagcagcagactgagagtgtccgccaccttctggcagaacccccggaaccacttcagatgccaggtgcagttctacggcctgagcgagaacgacgagtggacccaggacagagccaagcccgtgacccagatcgtgtctgccgaagcctggggcagagccgattgcgacgtgaagctggtggaaaagagcttcgagacagacaccaacctgaacttccagaacctgagcgtgatcggcttcagaatcctgctgctgaaagtggccggctttaacctgctgatgaccctgcggctgtggtccagc

SEQ ID NO: 35641 - DNA, 2061 bp, synthetic construct
  source 1..2061: mol_type = other DNA
atggccttaccagtgaccgccttgctcctgccgctggccttgctgctccacgccgccaggccggacatccagatgacacagagccctagcagcctgtctgccagcgtgggagacagagtgaccatcacatgcaaggccagccagagcgtgtccaacgacgtgacctggtatcagcagaagcctggacaggcccctaagctgctgatctacagcgccagcaacagatacagcggagtgcccgccagattttccggctctggctacggcaccgagttcacctttaccatcagcagcgtgcagagcgaggacttcgccgtgtacttctgccagcaagactacagcagcttcggccagggcaccaagctggaaatcaagagactcgaggacctgaagaacgtgttcccacctgaggtggccgtgttcgagcctagcgaggccgagatcagccacacccagaaagccaccctcgtgtgcctggctaccggcttctaccccgaccatgtggaactgtcttggtgggtcaacggcaaagaggtgcacagcggcgtgtgtaccgacccccagccactgaaagaacagcccgccctgaacgacagccggtactgcctgagcagcagactgagagtgtccgccaccttctggcagaacccccggaaccacttcagatgccaggtgcagttctacggcctgagcgagaacgacgagtggacccaggacagagccaagcccgtgacccagatcgtgtctgccgaagcctggggcagagccgattgcgacgtgaagctggtggaaaagagcttcgagacagacaccaacctgaacttccagaacctgagcgtgatcggcttcagaatcctgctgctgaaagtggccggctttaacctgctgatgaccctgcggctgtggtccagcagggccaagcgatctggatctggagcaacaaacttctcactactcaaacaagcaggtgacgtggaggagaatcccgggcctactagtatggactggatttggcgcatccttttccttgtcggcgctgctaccggcgcccattccgggcccatggaccccgacctggaaatcagagccgccttcctgcggcagagaaacacagccctgagaacagaggtggccgagctggaacaagaggtgcagcggctggaaaacgaggtgtcccagtacgagacaagatacggccctctcggaggcggaaaaggatccggcggcggaggatctggcggaggcggatctgggggcggaggctctttcgaacaggtgcagctggtggaatctggacctggcgtggtgcagcctggcagaagcctgagaatcagctgtgccgtgtccggcttcagcgtgaccaactacggcgtgcactgggtgcgccagccacctggaaaaggactggaatggctgggcgtgatctgggctggcggcatcaccaactacaacagcgccttcatgtcccggctgaccatctccaaggacaacagcaagaacaccgtgtacctccagatgaacagcctgcgggccgaggacaccgccatgtactactgtgcttccagaggcggccactacggctacgccctggattattggggccagggaaccctcgtgaccgtgtcctctacgcgtatccagaaccctgatcctgccgtgtaccagctgcgggatagcaagagcagcgacaagagcgtgtgtctgttcaccgacttcgacagccagaccaacgtgtcccagagcaaggactccgacgtgtacatcaccgataagtgcgtgctggacatgcggagcatggacttcaagagcaactccgccgtggcctggtccaacaagtccgatttcgcctgcgccaacgccttcaacaacagcattatccccgaggacacattcttcccaagccccgagagcagctgcggctttaccagcgagagctaccagcagggcgtgctgagcgccaccatcctgtacgagatcctgctgggcaaggccaccctgtacgccgtgctggtgtctgccctggtgctgatggctatggtcaagcggaaggacagccgggga

SEQ ID NO: 35642 - DNA, 2073 bp, synthetic construct
  source 1..2073: mol_type = other DNA
atggccttaccagtgaccgccttgctcctgccgctggccttgctgctccacgccgccaggccggacatccagatgacacagagccctagcagcctgtctgccagcgtgggagacagagtgaccatcacatgcaaggccagccagagcgtgtccaacgacgtgacctggtatcagcagaagcctggacaggcccctaagctgctgatctacagcgccagcaacagatacagcggagtgcccgccagattttccggctctggctacggcaccgagttcacctttaccatcagcagcgtgcagagcgaggacttcgccgtgtacttctgccagcaagactacagcagcttcggccagggcaccaagctggaaatcaagagactcgagatccagaaccctgatcctgccgtgtaccagctgcgggatagcaagagcagcgacaagagcgtgtgtctgttcaccgacttcgacagccagaccaacgtgtcccagagcaaggactccgacgtgtacatcaccgataagtgcgtgctggacatgcggagcatggacttcaagagcaactccgccgtggcctggtccaacaagtccgatttcgcctgcgccaacgccttcaacaacagcattatccccgaggacacattcttcccaagccccgagagcagctgcggctttaccagcgagagctaccagcagggcgtgctgagcgccaccatcctgtacgagatcctgctgggcaaggccaccctgtacgccgtgctggtgtctgccctggtgctgatggctatggtcaagcggaaggacagccggggacgcgccaagagaagcggatctggcgtgaagcagaccctgaatttcgacctgctgaagctggctggcgacgtggaatccaacccaggccctactagtatggactggatttggcgcatccttttccttgtcggcgctgctaccggcgcccattccgggcccatggaccccgacctggaaatcagagccgccttcctgcggcagagaaacacagccctgagaacagaggtggccgagctggaacaagaggtgcagcggctggaaaacgaggtgtcccagtacgagacaagatacggccctctcggaggcggaaaaggatccggcggcggaggatctggcggaggcggatctgggggcggaggctctttcgaacaggtgcagctggtggaatctggacctggcgtggtgcagcctggcagaagcctgagaatcagctgtgccgtgtccggcttcagcgtgaccaactacggcgtgcactgggtgcgccagccacctggaaaaggactggaatggctgggcgtgatctgggctggcggcatcaccaactacaacagcgccttcatgtcccggctgaccatctccaaggacaacagcaagaacaccgtgtacctccagatgaacagcctgcgggccgaggacaccgccatgtactactgtgcttccagaggcggccactacggctacgccctggattattggggccagggaaccctcgtgaccgtgtcctctacgcgtgaggacctgaagaacgtgttcccacctgaggtggccgtgttcgagcctagcgaggccgagatcagccacacccagaaagccaccctcgtgtgcctggctaccggcttctaccccgaccatgtggaactgtcttggtgggtcaacggcaaagaggtgcacagcggcgtgtgtaccgacccccagccactgaaagaacagcccgccctgaacgacagccggtactgcctgagcagcagactgagagtgtccgccaccttctggcagaacccccggaaccacttcagatgccaggtgcagttctacggcctgagcgagaacgacgagtggacccaggacagagccaagcccgtgacccagatcgtgtctgccgaagcctggggcagagccgattgcgacgtgaagctggtggaaaagagcttcgagacagacaccaacctgaacttccagaacctgagcgtgatcggcttcagaatcctgctgctgaaagtggccggctttaacctgctgatgaccctgcggctgtggtccagc

SEQ ID NO: 35643 - DNA, 1992 bp, synthetic construct
  source 1..1992: mol_type = other DNA
atggccttaccagtgaccgccttgctcctgccgctggccttgctgctccacgccgccaggccggacatccagatgacacagagccctagcagcctgtctgccagcgtgggagacagagtgaccatcacatgcaaggccagccagagcgtgtccaacgacgtgacctggtatcagcagaagcctggacaggcccctaagctgctgatctacagcgccagcaacagatacagcggagtgcccgccagattttccggctctggctacggcaccgagttcacctttaccatcagcagcgtgcagagcgaggacttcgccgtgtacttctgccagcaagactacagcagcttcggccagggcaccaagctggaaatcaagagactcgaggacctgaagaacgtgttcccacctgaggtggccgtgttcgagcctagcgaggccgagatcagccacacccagaaagccaccctcgtgtgcctggctaccggcttctaccccgaccatgtggaactgtcttggtgggtcaacggcaaagaggtgcacagcggcgtgtgtaccgacccccagccactgaaagaacagcccgccctgaacgacagccggtactgcctgagcagcagactgagagtgtccgccaccttctggcagaacccccggaaccacttcagatgccaggtgcagttctacggcctgagcgagaacgacgagtggacccaggacagagccaagcccgtgacccagatcgtgtctgccgaagcctggggcagagccgattgcgacgtgaagctggtggaaaagagcttcgagacagacaccaacctgaacttccagaacctgagcgtgatcggcttcagaatcctgctgctgaaagtggccggctttaacctgctgatgaccctgcggctgtggtccagcagggccaagcgatctggatctggagcaacaaacttctcactactcaaacaagcaggtgacgtggaggagaatcccgggcctactagtatggactggatttggcgcatccttttccttgtcggcgctgctaccggcgcccattccgggcccgaagttgctgccctcgagaaggaggtagcagctttggaaaaagaagtcgcagcccttgagaaagaagttgcggctctggagaagggatccggcggcggaggatctggcggaggcggatctgggggcggaggctctttcgaacaggtgcagctggtggaatctggacctggcgtggtgcagcctggcagaagcctgagaatcagctgtgccgtgtccggcttcagcgtgaccaactacggcgtgcactgggtgcgccagccacctggaaaaggactggaatggctgggcgtgatctgggctggcggcatcaccaactacaacagcgccttcatgtcccggctgaccatctccaaggacaacagcaagaacaccgtgtacctccagatgaacagcctgcgggccgaggacaccgccatgtactactgtgcttccagaggcggccactacggctacgccctggattattggggccagggaaccctcgtgaccgtgtcctctacgcgtatccagaaccctgatcctgccgtgtaccagctgcgggatagcaagagcagcgacaagagcgtgtgtctgttcaccgacttcgacagccagaccaacgtgtcccagagcaaggactccgacgtgtacatcaccgataagtgcgtgctggacatgcggagcatggacttcaagagcaactccgccgtggcctggtccaacaagtccgatttcgcctgcgccaacgccttcaacaacagcattatccccgaggacacattcttcccaagccccgagagcagctgcggctttaccagcgagagctaccagcagggcgtgctgagcgccaccatcctgtacgagatcctgctgggcaaggccaccctgtacgccgtgctggtgtctgccctggtgctgatggctatggtcaagcggaaggacagccgggga

SEQ ID NO: 35644 - DNA, 2004 bp, synthetic construct
  source 1..2004: mol_type = other DNA
atggccttaccagtgaccgccttgctcctgccgctggccttgctgctccacgccgccaggccggacatccagatgacacagagccctagcagcctgtctgccagcgtgggagacagagtgaccatcacatgcaaggccagccagagcgtgtccaacgacgtgacctggtatcagcagaagcctggacaggcccctaagctgctgatctacagcgccagcaacagatacagcggagtgcccgccagattttccggctctggctacggcaccgagttcacctttaccatcagcagcgtgcagagcgaggacttcgccgtgtacttctgccagcaagactacagcagcttcggccagggcaccaagctggaaatcaagagactcgagatccagaaccctgatcctgccgtgtaccagctgcgggatagcaagagcagcgacaagagcgtgtgtctgttcaccgacttcgacagccagaccaacgtgtcccagagcaaggactccgacgtgtacatcaccgataagtgcgtgctggacatgcggagcatggacttcaagagcaactccgccgtggcctggtccaacaagtccgatttcgcctgcgccaacgccttcaacaacagcattatccccgaggacacattcttcccaagccccgagagcagctgcggctttaccagcgagagctaccagcagggcgtgctgagcgccaccatcctgtacgagatcctgctgggcaaggccaccctgtacgccgtgctggtgtctgccctggtgctgatggctatggtcaagcggaaggacagccggggacgcgccaagagaagcggatctggcgtgaagcagaccctgaatttcgacctgctgaagctggctggcgacgtggaatccaacccaggccctactagtatggactggatttggcgcatccttttccttgtcggcgctgctaccggcgcccattccgggcccgaagttgctgccctcgagaaggaggtagcagctttggaaaaagaagtcgcagcccttgagaaagaagttgcggctctggagaagggatccggcggcggaggatctggcggaggcggatctgggggcggaggctctttcgaacaggtgcagctggtggaatctggacctggcgtggtgcagcctggcagaagcctgagaatcagctgtgccgtgtccggcttcagcgtgaccaactacggcgtgcactgggtgcgccagccacctggaaaaggactggaatggctgggcgtgatctgggctggcggcatcaccaactacaacagcgccttcatgtcccggctgaccatctccaaggacaacagcaagaacaccgtgtacctccagatgaacagcctgcgggccgaggacaccgccatgtactactgtgcttccagaggcggccactacggctacgccctggattattggggccagggaaccctcgtgaccgtgtcctctacgcgtgaggacctgaagaacgtgttcccacctgaggtggccgtgttcgagcctagcgaggccgagatcagccacacccagaaagccaccctcgtgtgcctggctaccggcttctaccccgaccatgtggaactgtcttggtgggtcaacggcaaagaggtgcacagcggcgtgtgtaccgacccccagccactgaaagaacagcccgccctgaacgacagccggtactgcctgagcagcagactgagagtgtccgccaccttctggcagaacccccggaaccacttcagatgccaggtgcagttctacggcctgagcgagaacgacgagtggacccaggacagagccaagcccgtgacccagatcgtgtctgccgaagcctggggcagagccgattgcgacgtgaagctggtggaaaagagcttcgagacagacaccaacctgaacttccagaacctgagcgtgatcggcttcagaatcctgctgctgaaagtggccggctttaacctgctgatgaccctgcggctgtggtccagc

SEQ ID NO: 35645 - DNA, 2262 bp, synthetic construct
  source 1..2262: mol_type = other DNA
atggccttaccagtgaccgccttgctcctgccgctggccttgctgctccacgccgccaggccggacatccagatgacacagagccctagcagcctgtctgccagcgtgggagacagagtgaccatcacatgcaaggccagccagagcgtgtccaacgacgtgacctggtatcagcagaagcctggacaggcccctaagctgctgatctacagcgccagcaacagatacagcggagtgcccgccagattttccggctctggctacggcaccgagttcacctttaccatcagcagcgtgcagagcgaggacttcgccgtgtacttctgccagcaagactacagcagcttcggccagggcaccaagctggaaatcaagagactcgaggacctgaagaacgtgttcccacctgaggtggccgtgttcgagcctagcgaggccgagatcagccacacccagaaagccaccctcgtgtgcctggctaccggcttctaccccgaccatgtggaactgtcttggtgggtcaacggcaaagaggtgcacagcggcgtgtgtaccgacccccagccactgaaagaacagcccgccctgaacgacagccggtactgcctgagcagcagactgagagtgtccgccaccttctggcagaacccccggaaccacttcagatgccaggtgcagttctacggcctgagcgagaacgacgagtggacccaggacagagccaagcccgtgacccagatcgtgtctgccgaagcctggggcagagccgattgcgacgtgaagctggtggaaaagagcttcgagacagacaccaacctgaacttccagaacctgagcgtgatcggcttcagaatcctgctgctgaaagtggccggctttaacctgctgatgaccctgcggctgtggtccagcagggccaagcgatctggatctggagcaacaaacttctcactactcaaacaagcaggtgacgtggaggagaatcccgggcctactagtatggactggatttggcgcatccttttccttgtcggcgctgctaccggcgcccattccgggccccaggttcagctgcaagagtctggcggaggacttgctcaagctggcggaagcctgagactgtcttgtgccgcctctggcagaaccttcagcatgggctggtttagacaggcccctggcaaagagagagagttcgtcgccgccatcacatacagcggcggcagcccttactacgcctcttctgtcagaggccggttcaccatcagccgggacaacgccaagaacaccgtgtacctccagatgaacagcctgaagccagaggacaccgccgtgtactactgtgccgccaatccaacctacggcagcgactggaatgccgagaattggggccagggcacccaagtgacagtgtctagtggatccggcggcggaggatctggcggaggcggatctgggggcggaggctctttcgaacaggtgcagctggtggaatctggacctggcgtggtgcagcctggcagaagcctgagaatcagctgtgccgtgtccggcttcagcgtgaccaactacggcgtgcactgggtgcgccagccacctggaaaaggactggaatggctgggcgtgatctgggctggcggcatcaccaactacaacagcgccttcatgtcccggctgaccatctccaaggacaacagcaagaacaccgtgtacctccagatgaacagcctgcgggccgaggacaccgccatgtactactgtgcttccagaggcggccactacggctacgccctggattattggggccagggaaccctcgtgaccgtgtcctctacgcgtatccagaaccctgatcctgccgtgtaccagctgcgggatagcaagagcagcgacaagagcgtgtgtctgttcaccgacttcgacagccagaccaacgtgtcccagagcaaggactccgacgtgtacatcaccgataagtgcgtgctggacatgcggagcatggacttcaagagcaactccgccgtggcctggtccaacaagtccgatttcgcctgcgccaacgccttcaacaacagcattatccccgaggacacattcttcccaagccccgagagcagctgcggctttaccagcgagagctaccagcagggcgtgctgagcgccaccatcctgtacgagatcctgctgggcaaggccaccctgtacgccgtgctggtgtctgccctggtgctgatggctatggtcaagcggaaggacagccgggga

SEQ ID NO: 35646 - DNA, 2274 bp, synthetic construct
  source 1..2274: mol_type = other DNA
atggccttaccagtgaccgccttgctcctgccgctggccttgctgctccacgccgccaggccggacatccagatgacacagagccctagcagcctgtctgccagcgtgggagacagagtgaccatcacatgcaaggccagccagagcgtgtccaacgacgtgacctggtatcagcagaagcctggacaggcccctaagctgctgatctacagcgccagcaacagatacagcggagtgcccgccagattttccggctctggctacggcaccgagttcacctttaccatcagcagcgtgcagagcgaggacttcgccgtgtacttctgccagcaagactacagcagcttcggccagggcaccaagctggaaatcaagagactcgagatccagaaccctgatcctgccgtgtaccagctgcgggatagcaagagcagcgacaagagcgtgtgtctgttcaccgacttcgacagccagaccaacgtgtcccagagcaaggactccgacgtgtacatcaccgataagtgcgtgctggacatgcggagcatggacttcaagagcaactccgccgtggcctggtccaacaagtccgatttcgcctgcgccaacgccttcaacaacagcattatccccgaggacacattcttcccaagccccgagagcagctgcggctttaccagcgagagctaccagcagggcgtgctgagcgccaccatcctgtacgagatcctgctgggcaaggccaccctgtacgccgtgctggtgtctgccctggtgctgatggctatggtcaagcggaaggacagccggggacgcgccaagagaagcggatctggcgtgaagcagaccctgaatttcgacctgctgaagctggctggcgacgtggaatccaacccaggccctactagtatggactggatttggcgcatccttttccttgtcggcgctgctaccggcgcccattccgggccccaggttcagctgcaagagtctggcggaggacttgctcaagctggcggaagcctgagactgtcttgtgccgcctctggcagaaccttcagcatgggctggtttagacaggcccctggcaaagagagagagttcgtcgccgccatcacatacagcggcggcagcccttactacgcctcttctgtcagaggccggttcaccatcagccgggacaacgccaagaacaccgtgtacctccagatgaacagcctgaagccagaggacaccgccgtgtactactgtgccgccaatccaacctacggcagcgactggaatgccgagaattggggccagggcacccaagtgacagtgtctagtggatccggcggcggaggatctggcggaggcggatctgggggcggaggctctttcgaacaggtgcagctggtggaatctggacctggcgtggtgcagcctggcagaagcctgagaatcagctgtgccgtgtccggcttcagcgtgaccaactacggcgtgcactgggtgcgccagccacctggaaaaggactggaatggctgggcgtgatctgggctggcggcatcaccaactacaacagcgccttcatgtcccggctgaccatctccaaggacaacagcaagaacaccgtgtacctccagatgaacagcctgcgggccgaggacaccgccatgtactactgtgcttccagaggcggccactacggctacgccctggattattggggccagggaaccctcgtgaccgtgtcctctacgcgtgaggacctgaagaacgtgttcccacctgaggtggccgtgttcgagcctagcgaggccgagatcagccacacccagaaagccaccctcgtgtgcctggctaccggcttctaccccgaccatgtggaactgtcttggtgggtcaacggcaaagaggtgcacagcggcgtgtgtaccgacccccagccactgaaagaacagcccgccctgaacgacagccggtactgcctgagcagcagactgagagtgtccgccaccttctggcagaacccccggaaccacttcagatgccaggtgcagttctacggcctgagcgagaacgacgagtggacccaggacagagccaagcccgtgacccagatcgtgtctgccgaagcctggggcagagccgattgcgacgtgaagctggtggaaaagagcttcgagacagacaccaacctgaacttccagaacctgagcgtgatcggcttcagaatcctgctgctgaaagtggccggctttaacctgctgatgaccctgcggctgtggtccagc

SEQ ID NO: 35647 - DNA, 2280 bp, synthetic construct
  source 1..2280: mol_type = other DNA
atggccttaccagtgaccgccttgctcctgccgctggccttgctgctccacgccgccaggccggaagtgcaactggtggaatctggaggctctctggtgcagccagggggaagcctgagactgtcttgtgccgcttccggcttcaccttcgacgactacgccatgagctgggtgcgccaggtgccaggcaaaggcctggaatgggtgtccagcatcaactggagcggcacccacaccgattacgccgactccgtgaaaggcagattcacaatcagcagaaacaacgccaacaataccctgtacctgcagatgaactccctgaagtctgaggatacagcagtgtattattgcgccaagaactggcgggacgccggcaccacttggtttgagaaaagcggctctgccggacagggaacccaagtgacagtgtcctccggtaccggcggaggcggatctggcggcggaggtagcggtggcggaggatctgaattcgacatccagatgacacagagccctagcagcctgtctgccagcgtgggagacagagtgaccatcacatgcaaggccagccagagcgtgtccaacgacgtgacctggtatcagcagaagcctggacaggcccctaagctgctgatctacagcgccagcaacagatacagcggagtgcccgccagattttccggctctggctacggcaccgagttcacctttaccatcagcagcgtgcagagcgaggacttcgccgtgtacttctgccagcaagactacagcagcttcggccagggcaccaagctggaaatcaagagactcgaggacctgaagaacgtgttcccacctgaggtggccgtgttcgagcctagcgaggccgagatcagccacacccagaaagccaccctcgtgtgcctggctaccggcttctaccccgaccatgtggaactgtcttggtgggtcaacggcaaagaggtgcacagcggcgtgtgtaccgacccccagccactgaaagaacagcccgccctgaacgacagccggtactgcctgagcagcagactgagagtgtccgccaccttctggcagaacccccggaaccacttcagatgccaggtgcagttctacggcctgagcgagaacgacgagtggacccaggacagagccaagcccgtgacccagatcgtgtctgccgaagcctggggcagagccgattgcgacgtgaagctggtggaaaagagcttcgagacagacaccaacctgaacttccagaacctgagcgtgatcggcttcagaatcctgctgctgaaagtggccggctttaacctgctgatgaccctgcggctgtggtccagcagggccaagcgatctggatctggagcaacaaacttctcactactcaaacaagcaggtgacgtggaggagaatcccgggcctactagtatggactggatttggcgcatccttttccttgtcggcgctgctaccggcgcgcattccttcgaacaggtgcagctggtggaatctggacctggcgtggtgcagcctggcagaagcctgagaatcagctgtgccgtgtccggcttcagcgtgaccaactacggcgtgcactgggtgcgccagccacctggaaaaggactggaatggctgggcgtgatctgggctggcggcatcaccaactacaacagcgccttcatgtcccggctgaccatctccaaggacaacagcaagaacaccgtgtacctccagatgaacagcctgcgggccgaggacaccgccatgtactactgtgcttccagaggcggccactacggctacgccctggattattggggccagggaaccctcgtgaccgtgtcctctacgcgtatccagaaccctgatcctgccgtgtaccagctgcgggatagcaagagcagcgacaagagcgtgtgtctgttcaccgacttcgacagccagaccaacgtgtcccagagcaaggactccgacgtgtacatcaccgataagtgcgtgctggacatgcggagcatggacttcaagagcaactccgccgtggcctggtccaacaagtccgatttcgcctgcgccaacgccttcaacaacagcattatccccgaggacacattcttcccaagccccgagagcagctgcggctttaccagcgagagctaccagcagggcgtgctgagcgccaccatcctgtacgagatcctgctgggcaaggccaccctgtacgccgtgctggtgtctgccctggtgctgatggctatggtcaagcggaaggacagccgggga

SEQ ID NO: 35648 - DNA, 2292 bp, synthetic construct
  source 1..2292: mol_type = other DNA
atggccttaccagtgaccgccttgctcctgccgctggccttgctgctccacgccgccaggccggaagtgcaactggtggaatctggaggctctctggtgcagccagggggaagcctgagactgtcttgtgccgcttccggcttcaccttcgacgactacgccatgagctgggtgcgccaggtgccaggcaaaggcctggaatgggtgtccagcatcaactggagcggcacccacaccgattacgccgactccgtgaaaggcagattcacaatcagcagaaacaacgccaacaataccctgtacctgcagatgaactccctgaagtctgaggatacagcagtgtattattgcgccaagaactggcgggacgccggcaccacttggtttgagaaaagcggctctgccggacagggaacccaagtgacagtgtcctccggtaccggcggaggcggatctggcggcggaggtagcggtggcggaggatctgaattcgacatccagatgacacagagccctagcagcctgtctgccagcgtgggagacagagtgaccatcacatgcaaggccagccagagcgtgtccaacgacgtgacctggtatcagcagaagcctggacaggcccctaagctgctgatctacagcgccagcaacagatacagcggagtgcccgccagattttccggctctggctacggcaccgagttcacctttaccatcagcagcgtgcagagcgaggacttcgccgtgtacttctgccagcaagactacagcagcttcggccagggcaccaagctggaaatcaagagactcgagatccagaaccctgatcctgccgtgtaccagctgcgggatagcaagagcagcgacaagagcgtgtgtctgttcaccgacttcgacagccagaccaacgtgtcccagagcaaggactccgacgtgtacatcaccgataagtgcgtgctggacatgcggagcatggacttcaagagcaactccgccgtggcctggtccaacaagtccgatttcgcctgcgccaacgccttcaacaacagcattatccccgaggacacattcttcccaagccccgagagcagctgcggctttaccagcgagagctaccagcagggcgtgctgagcgccaccatcctgtacgagatcctgctgggcaaggccaccctgtacgccgtgctggtgtctgccctggtgctgatggctatggtcaagcggaaggacagccggggacgcgccaagagaagcggatctggcgtgaagcagaccctgaatttcgacctgctgaagctggctggcgacgtggaatccaacccaggccctactagtatggactggatttggcgcatccttttccttgtcggcgctgctaccggcgcgcattccttcgaacaggtgcagctggtggaatctggacctggcgtggtgcagcctggcagaagcctgagaatcagctgtgccgtgtccggcttcagcgtgaccaactacggcgtgcactgggtgcgccagccacctggaaaaggactggaatggctgggcgtgatctgggctggcggcatcaccaactacaacagcgccttcatgtcccggctgaccatctccaaggacaacagcaagaacaccgtgtacctccagatgaacagcctgcgggccgaggacaccgccatgtactactgtgcttccagaggcggccactacggctacgccctggattattggggccagggaaccctcgtgaccgtgtcctctacgcgtgaggacctgaagaacgtgttcccacctgaggtggccgtgttcgagcctagcgaggccgagatcagccacacccagaaagccaccctcgtgtgcctggctaccggcttctaccccgaccatgtggaactgtcttggtgggtcaacggcaaagaggtgcacagcggcgtgtgtaccgacccccagccactgaaagaacagcccgccctgaacgacagccggtactgcctgagcagcagactgagagtgtccgccaccttctggcagaacccccggaaccacttcagatgccaggtgcagttctacggcctgagcgagaacgacgagtggacccaggacagagccaagcccgtgacccagatcgtgtctgccgaagcctggggcagagccgattgcgacgtgaagctggtggaaaagagcttcgagacagacaccaacctgaacttccagaacctgagcgtgatcggcttcagaatcctgctgctgaaagtggccggctttaacctgctgatgaccctgcggctgtggtccagc

SEQ ID NO: 35649 - DNA, 2274 bp, synthetic construct
  source 1..2274: mol_type = other DNA
atggccttaccagtgaccgccttgctcctgccgctggccttgctgctccacgccgccaggccggaagttcagctgcttgagtctggcggaggactggttcaacctggcggaagcctgagactgtcttgtgccgccagcggcttcatcttcagcagctacgccatgagctgggtccgacaggctcctggaaagggccaagaatgggtttccggcgttagcggcacaggcgtgaacacctactacgccgatagcgtgaagggcagattcaccatcagccgggacaacagcaagaacaccctgtacctccagatgaacagcctgagagccgaggacaccgccgtgtactattgtgcctctggcaaaggctgggacagcggctcttggtacgaggactatagaggccagggcaccctggtcacagtttcttcaggtaccggcggaggcggatctggcggcggaggtagcggtggcggaggatctgaattcgacatccagatgacacagagccctagcagcctgtctgccagcgtgggagacagagtgaccatcacatgcaaggccagccagagcgtgtccaacgacgtgacctggtatcagcagaagcctggacaggcccctaagctgctgatctacagcgccagcaacagatacagcggagtgcccgccagattttccggctctggctacggcaccgagttcacctttaccatcagcagcgtgcagagcgaggacttcgccgtgtacttctgccagcaagactacagcagcttcggccagggcaccaagctggaaatcaagagactcgaggacctgaagaacgtgttcccacctgaggtggccgtgttcgagcctagcgaggccgagatcagccacacccagaaagccaccctcgtgtgcctggctaccggcttctaccccgaccatgtggaactgtcttggtgggtcaacggcaaagaggtgcacagcggcgtgtgtaccgacccccagccactgaaagaacagcccgccctgaacgacagccggtactgcctgagcagcagactgagagtgtccgccaccttctggcagaacccccggaaccacttcagatgccaggtgcagttctacggcctgagcgagaacgacgagtggacccaggacagagccaagcccgtgacccagatcgtgtctgccgaagcctggggcagagccgattgcgacgtgaagctggtggaaaagagcttcgagacagacaccaacctgaacttccagaacctgagcgtgatcggcttcagaatcctgctgctgaaagtggccggctttaacctgctgatgaccctgcggctgtggtccagcagggccaagcgatctggatctggagcaacaaacttctcactactcaaacaagcaggtgacgtggaggagaatcccgggcctactagtatggactggatttggcgcatccttttccttgtcggcgctgctaccggcgcgcattccttcgaacaggtgcagctggtggaatctggacctggcgtggtgcagcctggcagaagcctgagaatcagctgtgccgtgtccggcttcagcgtgaccaactacggcgtgcactgggtgcgccagccacctggaaaaggactggaatggctgggcgtgatctgggctggcggcatcaccaactacaacagcgccttcatgtcccggctgaccatctccaaggacaacagcaagaacaccgtgtacctccagatgaacagcctgcgggccgaggacaccgccatgtactactgtgcttccagaggcggccactacggctacgccctggattattggggccagggaaccctcgtgaccgtgtcctctacgcgtatccagaaccctgatcctgccgtgtaccagctgcgggatagcaagagcagcgacaagagcgtgtgtctgttcaccgacttcgacagccagaccaacgtgtcccagagcaaggactccgacgtgtacatcaccgataagtgcgtgctggacatgcggagcatggacttcaagagcaactccgccgtggcctggtccaacaagtccgatttcgcctgcgccaacgccttcaacaacagcattatccccgaggacacattcttcccaagccccgagagcagctgcggctttaccagcgagagctaccagcagggcgtgctgagcgccaccatcctgtacgagatcctgctgggcaaggccaccctgtacgccgtgctggtgtctgccctggtgctgatggctatggtcaagcggaaggacagccgggga

SEQ ID NO: 35650 - DNA, 2286 bp, synthetic construct
  source 1..2286: mol_type = other DNA
atggccttaccagtgaccgccttgctcctgccgctggccttgctgctccacgccgccaggccggaagttcagctgcttgagtctggcggaggactggttcaacctggcggaagcctgagactgtcttgtgccgccagcggcttcatcttcagcagctacgccatgagctgggtccgacaggctcctggaaagggccaagaatgggtttccggcgttagcggcacaggcgtgaacacctactacgccgatagcgtgaagggcagattcaccatcagccgggacaacagcaagaacaccctgtacctccagatgaacagcctgagagccgaggacaccgccgtgtactattgtgcctctggcaaaggctgggacagcggctcttggtacgaggactatagaggccagggcaccctggtcacagtttcttcaggtaccggcggaggcggatctggcggcggaggtagcggtggcggaggatctgaattcgacatccagatgacacagagccctagcagcctgtctgccagcgtgggagacagagtgaccatcacatgcaaggccagccagagcgtgtccaacgacgtgacctggtatcagcagaagcctggacaggcccctaagctgctgatctacagcgccagcaacagatacagcggagtgcccgccagattttccggctctggctacggcaccgagttcacctttaccatcagcagcgtgcagagcgaggacttcgccgtgtacttctgccagcaagactacagcagcttcggccagggcaccaagctggaaatcaagagactcgagatccagaaccctgatcctgccgtgtaccagctgcgggatagcaagagcagcgacaagagcgtgtgtctgttcaccgacttcgacagccagaccaacgtgtcccagagcaaggactccgacgtgtacatcaccgataagtgcgtgctggacatgcggagcatggacttcaagagcaactccgccgtggcctggtccaacaagtccgatttcgcctgcgccaacgccttcaacaacagcattatccccgaggacacattcttcccaagccccgagagcagctgcggctttaccagcgagagctaccagcagggcgtgctgagcgccaccatcctgtacgagatcctgctgggcaaggccaccctgtacgccgtgctggtgtctgccctggtgctgatggctatggtcaagcggaaggacagccggggacgcgccaagagaagcggatctggcgtgaagcagaccctgaatttcgacctgctgaagctggctggcgacgtggaatccaacccaggccctactagtatggactggatttggcgcatccttttccttgtcggcgctgctaccggcgcgcattccttcgaacaggtgcagctggtggaatctggacctggcgtggtgcagcctggcagaagcctgagaatcagctgtgccgtgtccggcttcagcgtgaccaactacggcgtgcactgggtgcgccagccacctggaaaaggactggaatggctgggcgtgatctgggctggcggcatcaccaactacaacagcgccttcatgtcccggctgaccatctccaaggacaacagcaagaacaccgtgtacctccagatgaacagcctgcgggccgaggacaccgccatgtactactgtgcttccagaggcggccactacggctacgccctggattattggggccagggaaccctcgtgaccgtgtcctctacgcgtgaggacctgaagaacgtgttcccacctgaggtggccgtgttcgagcctagcgaggccgagatcagccacacccagaaagccaccctcgtgtgcctggctaccggcttctaccccgaccatgtggaactgtcttggtgggtcaacggcaaagaggtgcacagcggcgtgtgtaccgacccccagccactgaaagaacagcccgccctgaacgacagccggtactgcctgagcagcagactgagagtgtccgccaccttctggcagaacccccggaaccacttcagatgccaggtgcagttctacggcctgagcgagaacgacgagtggacccaggacagagccaagcccgtgacccagatcgtgtctgccgaagcctggggcagagccgattgcgacgtgaagctggtggaaaagagcttcgagacagacaccaacctgaacttccagaacctgagcgtgatcggcttcagaatcctgctgctgaaagtggccggctttaacctgctgatgaccctgcggctgtggtccagc

SEQ ID NO: 35651 - DNA, 2178 bp, synthetic construct
  source 1..2178: mol_type = other DNA
atggccttaccagtgaccgccttgctcctgccgctggccttgctgctccacgccgccaggccgatgctgcccgctcctaagaatctggtggtgtccagaatcaccgaggacagcgccagactgtcttggacagctcctgatgccgccttcgacagcttccccatccggtacatcgagacactgatctggggcgaagccatctggctggatgtgcctggaagcgagagaagctacgacctgaccggactgaagcctggcacagagtatgccgtggtcatcaccggcgtgaaaggcggcagattctctagccctctggtggcctctttcaccaccggtaccggcggaggcggatctggcggcggaggtagcggtggcggaggatctgaattcgacatccagatgacacagagccctagcagcctgtctgccagcgtgggagacagagtgaccatcacatgcaaggccagccagagcgtgtccaacgacgtgacctggtatcagcagaagcctggacaggcccctaagctgctgatctacagcgccagcaacagatacagcggagtgcccgccagattttccggctctggctacggcaccgagttcacctttaccatcagcagcgtgcagagcgaggacttcgccgtgtacttctgccagcaagactacagcagcttcggccagggcaccaagctggaaatcaagagactcgaggacctgaagaacgtgttcccacctgaggtggccgtgttcgagcctagcgaggccgagatcagccacacccagaaagccaccctcgtgtgcctggctaccggcttctaccccgaccatgtggaactgtcttggtgggtcaacggcaaagaggtgcacagcggcgtgtgtaccgacccccagccactgaaagaacagcccgccctgaacgacagccggtactgcctgagcagcagactgagagtgtccgccaccttctggcagaacccccggaaccacttcagatgccaggtgcagttctacggcctgagcgagaacgacgagtggacccaggacagagccaagcccgtgacccagatcgtgtctgccgaagcctggggcagagccgattgcgacgtgaagctggtggaaaagagcttcgagacagacaccaacctgaacttccagaacctgagcgtgatcggcttcagaatcctgctgctgaaagtggccggctttaacctgctgatgaccctgcggctgtggtccagcagggccaagcgatctggatctggagcaacaaacttctcactactcaaacaagcaggtgacgtggaggagaatcccgggcctactagtatggactggatttggcgcatccttttccttgtcggcgctgctaccggcgcgcattccttcgaacaggtgcagctggtggaatctggacctggcgtggtgcagcctggcagaagcctgagaatcagctgtgccgtgtccggcttcagcgtgaccaactacggcgtgcactgggtgcgccagccacctggaaaaggactggaatggctgggcgtgatctgggctggcggcatcaccaactacaacagcgccttcatgtcccggctgaccatctccaaggacaacagcaagaacaccgtgtacctccagatgaacagcctgcgggccgaggacaccgccatgtactactgtgcttccagaggcggccactacggctacgccctggattattggggccagggaaccctcgtgaccgtgtcctctacgcgtatccagaaccctgatcctgccgtgtaccagctgcgggatagcaagagcagcgacaagagcgtgtgtctgttcaccgacttcgacagccagaccaacgtgtcccagagcaaggactccgacgtgtacatcaccgataagtgcgtgctggacatgcggagcatggacttcaagagcaactccgccgtggcctggtccaacaagtccgatttcgcctgcgccaacgccttcaacaacagcattatccccgaggacacattcttcccaagccccgagagcagctgcggctttaccagcgagagctaccagcagggcgtgctgagcgccaccatcctgtacgagatcctgctgggcaaggccaccctgtacgccgtgctggtgtctgccctggtgctgatggctatggtcaagcggaaggacagccgggga

SEQ ID NO: 35652 - DNA, 2190 bp, synthetic construct
  source 1..2190: mol_type = other DNA
atggccttaccagtgaccgccttgctcctgccgctggccttgctgctccacgccgccaggccgatgctgcccgctcctaagaatctggtggtgtccagaatcaccgaggacagcgccagactgtcttggacagctcctgatgccgccttcgacagcttccccatccggtacatcgagacactgatctggggcgaagccatctggctggatgtgcctggaagcgagagaagctacgacctgaccggactgaagcctggcacagagtatgccgtggtcatcaccggcgtgaaaggcggcagattctctagccctctggtggcctctttcaccaccggtaccggcggaggcggatctggcggcggaggtagcggtggcggaggatctgaattcgacatccagatgacacagagccctagcagcctgtctgccagcgtgggagacagagtgaccatcacatgcaaggccagccagagcgtgtccaacgacgtgacctggtatcagcagaagcctggacaggcccctaagctgctgatctacagcgccagcaacagatacagcggagtgcccgccagattttccggctctggctacggcaccgagttcacctttaccatcagcagcgtgcagagcgaggacttcgccgtgtacttctgccagcaagactacagcagcttcggccagggcaccaagctggaaatcaagagactcgagatccagaaccctgatcctgccgtgtaccagctgcgggatagcaagagcagcgacaagagcgtgtgtctgttcaccgacttcgacagccagaccaacgtgtcccagagcaaggactccgacgtgtacatcaccgataagtgcgtgctggacatgcggagcatggacttcaagagcaactccgccgtggcctggtccaacaagtccgatttcgcctgcgccaacgccttcaacaacagcattatccccgaggacacattcttcccaagccccgagagcagctgcggctttaccagcgagagctaccagcagggcgtgctgagcgccaccatcctgtacgagatcctgctgggcaaggccaccctgtacgccgtgctggtgtctgccctggtgctgatggctatggtcaagcggaaggacagccggggacgcgccaagagaagcggatctggcgtgaagcagaccctgaatttcgacctgctgaagctggctggcgacgtggaatccaacccaggccctactagtatggactggatttggcgcatccttttccttgtcggcgctgctaccggcgcgcattccttcgaacaggtgcagctggtggaatctggacctggcgtggtgcagcctggcagaagcctgagaatcagctgtgccgtgtccggcttcagcgtgaccaactacggcgtgcactgggtgcgccagccacctggaaaaggactggaatggctgggcgtgatctgggctggcggcatcaccaactacaacagcgccttcatgtcccggctgaccatctccaaggacaacagcaagaacaccgtgtacctccagatgaacagcctgcgggccgaggacaccgccatgtactactgtgcttccagaggcggccactacggctacgccctggattattggggccagggaaccctcgtgaccgtgtcctctacgcgtgaggacctgaagaacgtgttcccacctgaggtggccgtgttcgagcctagcgaggccgagatcagccacacccagaaagccaccctcgtgtgcctggctaccggcttctaccccgaccatgtggaactgtcttggtgggtcaacggcaaagaggtgcacagcggcgtgtgtaccgacccccagccactgaaagaacagcccgccctgaacgacagccggtactgcctgagcagcagactgagagtgtccgccaccttctggcagaacccccggaaccacttcagatgccaggtgcagttctacggcctgagcgagaacgacgagtggacccaggacagagccaagcccgtgacccagatcgtgtctgccgaagcctggggcagagccgattgcgacgtgaagctggtggaaaagagcttcgagacagacaccaacctgaacttccagaacctgagcgtgatcggcttcagaatcctgctgctgaaagtggccggctttaacctgctgatgaccctgcggctgtggtccagc

SEQ ID NO: 35653 - DNA, 2265 bp, synthetic construct
  source 1..2265: mol_type = other DNA
atggccttaccagtgaccgccttgctcctgccgctggccttgctgctccacgccgccaggccggaggtgcagctggttgaatctggcggaggactggttcagcctggcggatctctgagactgtcttgtgccgccagcggcttcaacatcaaggatacctgtatcggctgggttcgcagagcccctggcaaagaggaagaactggtcgccaaaatctgcaagtacagcggccacaccagatacgccgacagcgtgaagggcagattcaccatcagcgccgacaccagcaagaacaccgcctacctccagatgaacagcctgagagccgaggacaccgccgtgtactattgtgccgctgtgtccgtcagagatgggcactacaattactggggccagggcaccaccgtgaccgtttcttcaggtaccggcggaggcggatctggcggcggaggtagcggtggcggaggatctgaattcgacatccagatgacacagagccctagcagcctgtctgccagcgtgggagacagagtgaccatcacatgcaaggccagccagagcgtgtccaacgacgtgacctggtatcagcagaagcctggacaggcccctaagctgctgatctacagcgccagcaacagatacagcggagtgcccgccagattttccggctctggctacggcaccgagttcacctttaccatcagcagcgtgcagagcgaggacttcgccgtgtacttctgccagcaagactacagcagcttcggccagggcaccaagctggaaatcaagagactcgaggacctgaagaacgtgttcccacctgaggtggccgtgttcgagcctagcgaggccgagatcagccacacccagaaagccaccctcgtgtgcctggctaccggcttctaccccgaccatgtggaactgtcttggtgggtcaacggcaaagaggtgcacagcggcgtgtgtaccgacccccagccactgaaagaacagcccgccctgaacgacagccggtactgcctgagcagcagactgagagtgtccgccaccttctggcagaacccccggaaccacttcagatgccaggtgcagttctacggcctgagcgagaacgacgagtggacccaggacagagccaagcccgtgacccagatcgtgtctgccgaagcctggggcagagccgattgcgacgtgaagctggtggaaaagagcttcgagacagacaccaacctgaacttccagaacctgagcgtgatcggcttcagaatcctgctgctgaaagtggccggctttaacctgctgatgaccctgcggctgtggtccagcagggccaagcgatctggatctggagcaacaaacttctcactactcaaacaagcaggtgacgtggaggagaatcccgggcctactagtatggactggatttggcgcatccttttccttgtcggcgctgctaccggcgcgcattccttcgaacaggtgcagctggtggaatctggacctggcgtggtgcagcctggcagaagcctgagaatcagctgtgccgtgtccggcttcagcgtgaccaactacggcgtgcactgggtgcgccagccacctggaaaaggactggaatggctgggcgtgatctgggctggcggcatcaccaactacaacagcgccttcatgtcccggctgaccatctccaaggacaacagcaagaacaccgtgtacctccagatgaacagcctgcgggccgaggacaccgccatgtactactgtgcttccagaggcggccactacggctacgccctggattattggggccagggaaccctcgtgaccgtgtcctctacgcgtatccagaaccctgatcctgccgtgtaccagctgcgggatagcaagagcagcgacaagagcgtgtgtctgttcaccgacttcgacagccagaccaacgtgtcccagagcaaggactccgacgtgtacatcaccgataagtgcgtgctggacatgcggagcatggacttcaagagcaactccgccgtggcctggtccaacaagtccgatttcgcctgcgccaacgccttcaacaacagcattatccccgaggacacattcttcccaagccccgagagcagctgcggctttaccagcgagagctaccagcagggcgtgctgagcgccaccatcctgtacgagatcctgctgggcaaggccaccctgtacgccgtgctggtgtctgccctggtgctgatggctatggtcaagcggaaggacagccgggga

SEQ ID NO: 35654 - DNA, 2277 bp, synthetic construct
  source 1..2277: mol_type = other DNA
atggccttaccagtgaccgccttgctcctgccgctggccttgctgctccacgccgccaggccggaggtgcagctggttgaatctggcggaggactggttcagcctggcggatctctgagactgtcttgtgccgccagcggcttcaacatcaaggatacctgtatcggctgggttcgcagagcccctggcaaagaggaagaactggtcgccaaaatctgcaagtacagcggccacaccagatacgccgacagcgtgaagggcagattcaccatcagcgccgacaccagcaagaacaccgcctacctccagatgaacagcctgagagccgaggacaccgccgtgtactattgtgccgctgtgtccgtcagagatgggcactacaattactggggccagggcaccaccgtgaccgtttcttcaggtaccggcggaggcggatctggcggcggaggtagcggtggcggaggatctgaattcgacatccagatgacacagagccctagcagcctgtctgccagcgtgggagacagagtgaccatcacatgcaaggccagccagagcgtgtccaacgacgtgacctggtatcagcagaagcctggacaggcccctaagctgctgatctacagcgccagcaacagatacagcggagtgcccgccagattttccggctctggctacggcaccgagttcacctttaccatcagcagcgtgcagagcgaggacttcgccgtgtacttctgccagcaagactacagcagcttcggccagggcaccaagctggaaatcaagagactcgagatccagaaccctgatcctgccgtgtaccagctgcgggatagcaagagcagcgacaagagcgtgtgtctgttcaccgacttcgacagccagaccaacgtgtcccagagcaaggactccgacgtgtacatcaccgataagtgcgtgctggacatgcggagcatggacttcaagagcaactccgccgtggcctggtccaacaagtccgatttcgcctgcgccaacgccttcaacaacagcattatccccgaggacacattcttcccaagccccgagagcagctgcggctttaccagcgagagctaccagcagggcgtgctgagcgccaccatcctgtacgagatcctgctgggcaaggccaccctgtacgccgtgctggtgtctgccctggtgctgatggctatggtcaagcggaaggacagccggggacgcgccaagagaagcggatctggcgtgaagcagaccctgaatttcgacctgctgaagctggctggcgacgtggaatccaacccaggccctactagtatggactggatttggcgcatccttttccttgtcggcgctgctaccggcgcgcattccttcgaacaggtgcagctggtggaatctggacctggcgtggtgcagcctggcagaagcctgagaatcagctgtgccgtgtccggcttcagcgtgaccaactacggcgtgcactgggtgcgccagccacctggaaaaggactggaatggctgggcgtgatctgggctggcggcatcaccaactacaacagcgccttcatgtcccggctgaccatctccaaggacaacagcaagaacaccgtgtacctccagatgaacagcctgcgggccgaggacaccgccatgtactactgtgcttccagaggcggccactacggctacgccctggattattggggccagggaaccctcgtgaccgtgtcctctacgcgtgaggacctgaagaacgtgttcccacctgaggtggccgtgttcgagcctagcgaggccgagatcagccacacccagaaagccaccctcgtgtgcctggctaccggcttctaccccgaccatgtggaactgtcttggtgggtcaacggcaaagaggtgcacagcggcgtgtgtaccgacccccagccactgaaagaacagcccgccctgaacgacagccggtactgcctgagcagcagactgagagtgtccgccaccttctggcagaacccccggaaccacttcagatgccaggtgcagttctacggcctgagcgagaacgacgagtggacccaggacagagccaagcccgtgacccagatcgtgtctgccgaagcctggggcagagccgattgcgacgtgaagctggtggaaaagagcttcgagacagacaccaacctgaacttccagaacctgagcgtgatcggcttcagaatcctgctgctgaaagtggccggctttaacctgctgatgaccctgcggctgtggtccagc

SEQ ID NO: 35655 - DNA, 3381 bp, synthetic construct
  source 1..3381: mol_type = other DNA
atggccttaccagtgaccgccttgctcctgccgctggccttgctgctccacgccgccaggccggaagtgcagctggttgaatctggcggaggactggttcaggctggcggatctctgagactgtcttgtgccgccagcggcagaacctttagcatgggctggtttagacaggcccctggcaaagagagagagttcgtcgccgccatcacatactctggcggcagcccttactacgccgactctgtgaagggcagattcaccatcagccgggacaacgccaagaacaccgtgtacctccagatgaacagcctgaagcctgaggacaccgccgtgtactactgcgccgccaatccaacatacggcagcgactggaacgccgagaattggggccagggaacccaagtgacagtgtctagcggtaccggcggaggcggatctggcggcggaggtagcggtggcggaggatctgaattcgacatccagatgacacagagccctagcagcctgtctgccagcgtgggagacagagtgaccatcacatgcaaggccagccagagcgtgtccaacgacgtgacctggtatcagcagaagcctggacaggcccctaagctgctgatctacagcgccagcaacagatacagcggagtgcccgccagattttccggctctggctacggcaccgagttcacctttaccatcagcagcgtgcagagcgaggacttcgccgtgtacttctgccagcaagactacagcagcttcggccagggcaccaagctggaaatcaagagactcgaggacctgaagaacgtgttcccacctgaggtggccgtgttcgagcctagcgaggccgagatcagccacacccagaaagccaccctcgtgtgcctggctaccggcttctaccccgaccatgtggaactgtcttggtgggtcaacggcaaagaggtgcacagcggcgtgtgtaccgacccccagccactgaaagaacagcccgccctgaacgacagccggtactgcctgagcagcagactgagagtgtccgccaccttctggcagaacccccggaaccacttcagatgccaggtgcagttctacggcctgagcgagaacgacgagtggacccaggacagagccaagcccgtgacccagatcgtgtctgccgaagcctggggcagagccgattgcgacgtgaagctggtggaaaagagcttcgagacagacaccaacctgaacttccagaacctgagcgtgatcggcttcagaatcctgctgctgaaagtggccggctttaacctgctgatgaccctgcggctgtggtccagcagggccaagcgatctggatctggagcaacaaacttctcactactcaaacaagcaggtgacgtggaggagaatcccgggcctactagtgccaccatggactggatttggcgcatccttttccttgtcggcgctgctaccggcgcccattccgggcccgaagtgcaactggttgaatccggtggcggcctggtgcaagcaggcggatctctcagacttagctgtgccgcctccggcagaaccttcacaatgggatggtttaggcaggctccagggaaagagagagagttcgtcgccgccatctctctgtctcccacactggcctactacgccgactctgtgaaaggccggttcaccatctccagagataatgccaagaacaccgtggtgctgcaaatgaactctctgaaacccgaggatacagccctgtactattgtgccgctgaccggaagtccgtgatgagcatcagacccgattactggggacagggcacacaagtcacagtgtcctctggatccggcggcggaggatctggcggaggcggatctgggggcggaggctctttcgaacaggtgcagctggtggaatctggacctggcgtggtgcagcctggcagaagcctgagaatcagctgtgccgtgtccggcttcagcgtgaccaactacggcgtgcactgggtgcgccagccacctggaaaaggactggaatggctgggcgtgatctgggctggcggcatcaccaactacaacagcgccttcatgtcccggctgaccatctccaaggacaacagcaagaacaccgtgtacctccagatgaacagcctgcgggccgaggacaccgccatgtactactgtgcttccagaggcggccactacggctacgccctggattattggggccagggaaccctcgtgaccgtgtcctctacgcgtatccagaaccctgatcctgccgtgtaccagctgcgggatagcaagagcagcgacaagagcgtgtgtctgttcaccgacttcgacagccagaccaacgtgtcccagagcaaggactccgacgtgtacatcaccgataagtgcgtgctggacatgcggagcatggacttcaagagcaactccgccgtggcctggtccaacaagtccgatttcgcctgcgccaacgccttcaacaacagcattatccccgaggacacattcttcccaagccccgagagcagctgcggctttaccagcgagagctaccagcagggcgtgctgagcgccaccatcctgtacgagatcctgctgggcaaggccaccctgtacgccgtgctggtgtctgccctggtgctgatggctatggtcaagcggaaggacagccggggacgcgccaagagaagcggatctggcgtgaagcagaccctgaatttcgacctgctgaagctggctggcgacgtggaatccaacccaggcccttctagaggccatatgaccgagtacaagcccacggtgcgcctcgccacccgcgacgacgtccccagggccgtacgcaccctcgccgccgcgttcgccgactaccccgccacgcgccacaccgtcgatccggaccgccacatcgagcgggtcaccgagctgcaagaactcttcctcacgcgcgtcgggctcgacatcggcaaggtgtgggtcgcggacgacggcgccgcggtggcggtctggaccacgccggagagcgtcgaagcgggggcggtgttcgccgagatcggcccgcgcatggccgagttgagcggttcccggctggccgcgcagcaacagatggaaggcctcctggcgccgcaccggcccaaggagcccgcgtggttcctggccaccgtcggcgtctcgcccgaccaccagggcaagggtctgggcagcgccgtcgtgctccccggagtggaggcggccgagcgcgccggggtgcccgccttcctggagacctccgcgccccgcaacctccccttctacgagcggctcggcttcaccgtcaccgccgacgtcgaggtgcccgaaggaccgcgcacctggtgcatgacccgcaagcccggtgcctga

SEQ ID NO: 35656 - DNA, 2295 bp, synthetic construct
  source 1..2295: mol_type = other DNA
atggccttaccagtgaccgccttgctcctgccgctggccttgctgctccacgccgccaggccggaagtgcagctggttgaatctggcggaggactggttcagcctggcggatctctgagactgtcttgtgccgcctctggcttcgccagcgactactatatcatcggctggttcagacaggcccctggcaaagagagagagggcgtcagctgtatcagcagcagatacgccaacaccaactacgccgacagcgtgaagggcagattcaccatcagccgggacaacgccaagaacaccgtgtacctccagatgaacagcctgaagcctgaggacaccgccgtgtactactgtgccgccgacaccagaagatacacctgtcctgacattgccaccatgcaccggaacttcgattcttggggccagggcacactggtcaccgtttcttctggtaccggcggaggcggatctggcggcggaggtagcggtggcggaggatctgaattcgacatccagatgacacagagccctagcagcctgtctgccagcgtgggagacagagtgaccatcacatgcaaggccagccagagcgtgtccaacgacgtgacctggtatcagcagaagcctggacaggcccctaagctgctgatctacagcgccagcaacagatacagcggagtgcccgccagattttccggctctggctacggcaccgagttcacctttaccatcagcagcgtgcagagcgaggacttcgccgtgtacttctgccagcaagactacagcagcttcggccagggcaccaagctggaaatcaagagactcgaggacctgaagaacgtgttcccacctgaggtggccgtgttcgagcctagcgaggccgagatcagccacacccagaaagccaccctcgtgtgcctggctaccggcttctaccccgaccatgtggaactgtcttggtgggtcaacggcaaagaggtgcacagcggcgtgtgtaccgacccccagccactgaaagaacagcccgccctgaacgacagccggtactgcctgagcagcagactgagagtgtccgccaccttctggcagaacccccggaaccacttcagatgccaggtgcagttctacggcctgagcgagaacgacgagtggacccaggacagagccaagcccgtgacccagatcgtgtctgccgaagcctggggcagagccgattgcgacgtgaagctggtggaaaagagcttcgagacagacaccaacctgaacttccagaacctgagcgtgatcggcttcagaatcctgctgctgaaagtggccggctttaacctgctgatgaccctgcggctgtggtccagcagggccaagcgatctggatctggagcaacaaacttctcactactcaaacaagcaggtgacgtggaggagaatcccgggcctactagtatggactggatttggcgcatccttttccttgtcggcgctgctaccggcgcgcattccttcgaacaggtgcagctggtggaatctggacctggcgtggtgcagcctggcagaagcctgagaatcagctgtgccgtgtccggcttcagcgtgaccaactacggcgtgcactgggtgcgccagccacctggaaaaggactggaatggctgggcgtgatctgggctggcggcatcaccaactacaacagcgccttcatgtcccggctgaccatctccaaggacaacagcaagaacaccgtgtacctccagatgaacagcctgcgggccgaggacaccgccatgtactactgtgcttccagaggcggccactacggctacgccctggattattggggccagggaaccctcgtgaccgtgtcctctacgcgtatccagaaccctgatcctgccgtgtaccagctgcgggatagcaagagcagcgacaagagcgtgtgtctgttcaccgacttcgacagccagaccaacgtgtcccagagcaaggactccgacgtgtacatcaccgataagtgcgtgctggacatgcggagcatggacttcaagagcaactccgccgtggcctggtccaacaagtccgatttcgcctgcgccaacgccttcaacaacagcattatccccgaggacacattcttcccaagccccgagagcagctgcggctttaccagcgagagctaccagcagggcgtgctgagcgccaccatcctgtacgagatcctgctgggcaaggccaccctgtacgccgtgctggtgtctgccctggtgctgatggctatggtcaagcggaaggacagccggggataa

SEQ ID NO: 35657 - DNA, 2295 bp, synthetic construct
  source 1..2295: mol_type = other DNA
atggccttaccagtgaccgccttgctcctgccgctggccttgctgctccacgccgccaggccggaagtgcagctggttgaatctggcggaggactggttcagcctggcggatctctgagactgagctgtgaagccagcggcttcgccagcgacgattacatcatcggctggttcagacaggcccctggcaaagagagagagggcgtcagctgcatcagctctaagtacgccaacaccgtgtacaccgacagcgtgaagggcagattcagactgagcagaggcaccgccaagaataccgtgtacctccagatgagcgccctgaagcctgaggataccgccgtgtactactgcgctatggacagccgcagagtgacatgccctgagatcagcaccatgcaccggaacttcgattcttggggccagggcacactggtcacagtgtcatctggtaccggcggaggcggatctggcggcggaggtagcggtggcggaggatctgaattcgacatccagatgacacagagccctagcagcctgtctgccagcgtgggagacagagtgaccatcacatgcaaggccagccagagcgtgtccaacgacgtgacctggtatcagcagaagcctggacaggcccctaagctgctgatctacagcgccagcaacagatacagcggagtgcccgccagattttccggctctggctacggcaccgagttcacctttaccatcagcagcgtgcagagcgaggacttcgccgtgtacttctgccagcaagactacagcagcttcggccagggcaccaagctggaaatcaagagactcgaggacctgaagaacgtgttcccacctgaggtggccgtgttcgagcctagcgaggccgagatcagccacacccagaaagccaccctcgtgtgcctggctaccggcttctaccccgaccatgtggaactgtcttggtgggtcaacggcaaagaggtgcacagcggcgtgtgtaccgacccccagccactgaaagaacagcccgccctgaacgacagccggtactgcctgagcagcagactgagagtgtccgccaccttctggcagaacccccggaaccacttcagatgccaggtgcagttctacggcctgagcgagaacgacgagtggacccaggacagagccaagcccgtgacccagatcgtgtctgccgaagcctggggcagagccgattgcgacgtgaagctggtggaaaagagcttcgagacagacaccaacctgaacttccagaacctgagcgtgatcggcttcagaatcctgctgctgaaagtggccggctttaacctgctgatgaccctgcggctgtggtccagcagggccaagcgatctggatctggagcaacaaacttctcactactcaaacaagcaggtgacgtggaggagaatcccgggcctactagtatggactggatttggcgcatccttttccttgtcggcgctgctaccggcgcgcattccttcgaacaggtgcagctggtggaatctggacctggcgtggtgcagcctggcagaagcctgagaatcagctgtgccgtgtccggcttcagcgtgaccaactacggcgtgcactgggtgcgccagccacctggaaaaggactggaatggctgggcgtgatctgggctggcggcatcaccaactacaacagcgccttcatgtcccggctgaccatctccaaggacaacagcaagaacaccgtgtacctccagatgaacagcctgcgggccgaggacaccgccatgtactactgtgcttccagaggcggccactacggctacgccctggattattggggccagggaaccctcgtgaccgtgtcctctacgcgtatccagaaccctgatcctgccgtgtaccagctgcgggatagcaagagcagcgacaagagcgtgtgtctgttcaccgacttcgacagccagaccaacgtgtcccagagcaaggactccgacgtgtacatcaccgataagtgcgtgctggacatgcggagcatggacttcaagagcaactccgccgtggcctggtccaacaagtccgatttcgcctgcgccaacgccttcaacaacagcattatccccgaggacacattcttcccaagccccgagagcagctgcggctttaccagcgagagctaccagcagggcgtgctgagcgccaccatcctgtacgagatcctgctgggcaaggccaccctgtacgccgtgctggtgtctgccctggtgctgatggctatggtcaagcggaaggacagccggggataa

SEQ ID NO: 35658 - DNA, 2292 bp, synthetic construct
  source 1..2292: mol_type = other DNA
atggccttaccagtgaccgccttgctcctgccgctggccttgctgctccacgccgccaggccggaagtgcagctggttgaatctggcggaggactggttcagcctggcggatctctgagactgtcttgtgccgcctctggcttcgccagcgactactatatcatcggctggttcagacaggcccctggcaaagagagagagggcgtcagctgtatcagcagcagatacgccaacaccaactacgccgacagcgtgaagggcagattcaccatcagccgggacaacgccaagaacaccgtgtacctccagatgaacagcctgaagcctgaggacaccgccgtgtactactgtgccgccgacaccagaagatacacctgtcctgacattgccaccatgcaccggaacttcgattcttggggccagggcacactggtcaccgtttcttctggtaccggcggaggcggatctggcggcggaggtagcggtggcggaggatctgaattcgacatccagatgacacagagccctagcagcctgtctgccagcgtgggagacagagtgaccatcacatgcaaggccagccagagcgtgtccaacgacgtgacctggtatcagcagaagcctggacaggcccctaagctgctgatctacagcgccagcaacagatacagcggagtgcccgccagattttccggctctggctacggcaccgagttcacctttaccatcagcagcgtgcagagcgaggacttcgccgtgtacttctgccagcaagactacagcagcttcggccagggcaccaagctggaaatcaagagactcgagatccagaaccctgatcctgccgtgtaccagctgcgggatagcaagagcagcgacaagagcgtgtgtctgttcaccgacttcgacagccagaccaacgtgtcccagagcaaggactccgacgtgtacatcaccgataagtgcgtgctggacatgcggagcatggacttcaagagcaactccgccgtggcctggtccaacaagtccgatttcgcctgcgccaacgccttcaacaacagcattatccccgaggacacattcttcccaagccccgagagcagctgcggctttaccagcgagagctaccagcagggcgtgctgagcgccaccatcctgtacgagatcctgctgggcaaggccaccctgtacgccgtgctggtgtctgccctggtgctgatggctatggtcaagcggaaggacagccggggaagggccaagcgatctggatctggagcaacaaacttctcactactcaaacaagcaggtgacgtggaggagaatcccgggcctactagtatggactggatttggcgcatccttttccttgtcggcgctgctaccggcgcgcattccttcgaacaggtgcagctggtggaatctggacctggcgtggtgcagcctggcagaagcctgagaatcagctgtgccgtgtccggcttcagcgtgaccaactacggcgtgcactgggtgcgccagccacctggaaaaggactggaatggctgggcgtgatctgggctggcggcatcaccaactacaacagcgccttcatgtcccggctgaccatctccaaggacaacagcaagaacaccgtgtacctccagatgaacagcctgcgggccgaggacaccgccatgtactactgtgcttccagaggcggccactacggctacgccctggattattggggccagggaaccctcgtgaccgtgtcctctacgcgtgacctgaagaacgtgttcccacctgaggtggccgtgttcgagcctagcgaggccgagatcagccacacccagaaagccaccctcgtgtgcctggctaccggcttctaccccgaccatgtggaactgtcttggtgggtcaacggcaaagaggtgcacagcggcgtgtgtaccgacccccagccactgaaagaacagcccgccctgaacgacagccggtactgcctgagcagcagactgagagtgtccgccaccttctggcagaacccccggaaccacttcagatgccaggtgcagttctacggcctgagcgagaacgacgagtggacccaggacagagccaagcccgtgacccagatcgtgtctgccgaagcctggggcagagccgattgcgacgtgaagctggtggaaaagagcttcgagacagacaccaacctgaacttccagaacctgagcgtgatcggcttcagaatcctgctgctgaaagtggccggctttaacctgctgatgaccctgcggctgtggtccagc

SEQ ID NO: 35659 - DNA, 2292 bp, synthetic construct
  source 1..2292: mol_type = other DNA
atggccttaccagtgaccgccttgctcctgccgctggccttgctgctccacgccgccaggccggaagtgcagctggttgaatctggcggaggactggttcagcctggcggatctctgagactgagctgtgaagccagcggcttcgccagcgacgattacatcatcggctggttcagacaggcccctggcaaagagagagagggcgtcagctgcatcagctctaagtacgccaacaccgtgtacaccgacagcgtgaagggcagattcagactgagcagaggcaccgccaagaataccgtgtacctccagatgagcgccctgaagcctgaggataccgccgtgtactactgcgctatggacagccgcagagtgacatgccctgagatcagcaccatgcaccggaacttcgattcttggggccagggcacactggtcacagtgtcatctggtaccggcggaggcggatctggcggcggaggtagcggtggcggaggatctgaattcgacatccagatgacacagagccctagcagcctgtctgccagcgtgggagacagagtgaccatcacatgcaaggccagccagagcgtgtccaacgacgtgacctggtatcagcagaagcctggacaggcccctaagctgctgatctacagcgccagcaacagatacagcggagtgcccgccagattttccggctctggctacggcaccgagttcacctttaccatcagcagcgtgcagagcgaggacttcgccgtgtacttctgccagcaagactacagcagcttcggccagggcaccaagctggaaatcaagagactcgagatccagaaccctgatcctgccgtgtaccagctgcgggatagcaagagcagcgacaagagcgtgtgtctgttcaccgacttcgacagccagaccaacgtgtcccagagcaaggactccgacgtgtacatcaccgataagtgcgtgctggacatgcggagcatggacttcaagagcaactccgccgtggcctggtccaacaagtccgatttcgcctgcgccaacgccttcaacaacagcattatccccgaggacacattcttcccaagccccgagagcagctgcggctttaccagcgagagctaccagcagggcgtgctgagcgccaccatcctgtacgagatcctgctgggcaaggccaccctgtacgccgtgctggtgtctgccctggtgctgatggctatggtcaagcggaaggacagccggggaagggccaagcgatctggatctggagcaacaaacttctcactactcaaacaagcaggtgacgtggaggagaatcccgggcctactagtatggactggatttggcgcatccttttccttgtcggcgctgctaccggcgcgcattccttcgaacaggtgcagctggtggaatctggacctggcgtggtgcagcctggcagaagcctgagaatcagctgtgccgtgtccggcttcagcgtgaccaactacggcgtgcactgggtgcgccagccacctggaaaaggactggaatggctgggcgtgatctgggctggcggcatcaccaactacaacagcgccttcatgtcccggctgaccatctccaaggacaacagcaagaacaccgtgtacctccagatgaacagcctgcgggccgaggacaccgccatgtactactgtgcttccagaggcggccactacggctacgccctggattattggggccagggaaccctcgtgaccgtgtcctctacgcgtgacctgaagaacgtgttcccacctgaggtggccgtgttcgagcctagcgaggccgagatcagccacacccagaaagccaccctcgtgtgcctggctaccggcttctaccccgaccatgtggaactgtcttggtgggtcaacggcaaagaggtgcacagcggcgtgtgtaccgacccccagccactgaaagaacagcccgccctgaacgacagccggtactgcctgagcagcagactgagagtgtccgccaccttctggcagaacccccggaaccacttcagatgccaggtgcagttctacggcctgagcgagaacgacgagtggacccaggacagagccaagcccgtgacccagatcgtgtctgccgaagcctggggcagagccgattgcgacgtgaagctggtggaaaagagcttcgagacagacaccaacctgaacttccagaacctgagcgtgatcggcttcagaatcctgctgctgaaagtggccggctttaacctgctgatgaccctgcggctgtggtccagc

SEQ ID NO: 35660 - DNA, 2265 bp, synthetic construct
  source 1..2265: mol_type = other DNA
atggccttaccagtgaccgccttgctcctgccgctggccttgctgctccacgccgccaggccgcaagtcaaactggaagaaagcggtggcggcctggtgcaacctggcgaatctctgagactgagctgtagcgccagcggctccatcttcaaggtgttcagagtgttcgccatgagctggtacaggcaaggccctggcaagcagagagagctggtcgcctctatcagcagcggcgagacaaccacatacgccgaatctgtgaaaggccggttcaccatcagccgggataatgccaagaataccgcctatctccagatggactccctgaagcctgaagatacagctgtgtactactgcaacgccgaccataccttcaccggcgatttttggggccagggaacccaagtgaccgtgtctagtggtaccggcggaggcggatctggcggcggaggtagcggtggcggaggatctgaattcgacatccagatgacacagagccctagcagcctgtctgccagcgtgggagacagagtgaccatcacatgcaaggccagccagagcgtgtccaacgacgtgacctggtatcagcagaagcctggacaggcccctaagctgctgatctacagcgccagcaacagatacagcggagtgcccgccagattttccggctctggctacggcaccgagttcacctttaccatcagcagcgtgcagagcgaggacttcgccgtgtacttctgccagcaagactacagcagcttcggccagggcaccaagctggaaatcaagagactcgagatccagaaccctgatcctgccgtgtaccagctgcgggatagcaagagcagcgacaagagcgtgtgtctgttcaccgacttcgacagccagaccaacgtgtcccagagcaaggactccgacgtgtacatcaccgataagtgcgtgctggacatgcggagcatggacttcaagagcaactccgccgtggcctggtccaacaagtccgatttcgcctgcgccaacgccttcaacaacagcattatccccgaggacacattcttcccaagccccgagagcagctgcggctttaccagcgagagctaccagcagggcgtgctgagcgccaccatcctgtacgagatcctgctgggcaaggccaccctgtacgccgtgctggtgtctgccctggtgctgatggctatggtcaagcggaaggacagccggggaagggccaagcgatctggatctggagcaacaaacttctcactactcaaacaagcaggtgacgtggaggagaatcccgggcctactagtatggactggatttggcgcatccttttccttgtcggcgctgctaccggcgcgcattccttcgaacaggtgcagctggtggaatctggacctggcgtggtgcagcctggcagaagcctgagaatcagctgtgccgtgtccggcttcagcgtgaccaactacggcgtgcactgggtgcgccagccacctggaaaaggactggaatggctgggcgtgatctgggctggcggcatcaccaactacaacagcgccttcatgtcccggctgaccatctccaaggacaacagcaagaacaccgtgtacctccagatgaacagcctgcgggccgaggacaccgccatgtactactgtgcttccagaggcggccactacggctacgccctggattattggggccagggaaccctcgtgaccgtgtcctctacgcgtgacctgaagaacgtgttcccacctgaggtggccgtgttcgagcctagcgaggccgagatcagccacacccagaaagccaccctcgtgtgcctggctaccggcttctaccccgaccatgtggaactgtcttggtgggtcaacggcaaagaggtgcacagcggcgtgtgtaccgacccccagccactgaaagaacagcccgccctgaacgacagccggtactgcctgagcagcagactgagagtgtccgccaccttctggcagaacccccggaaccacttcagatgccaggtgcagttctacggcctgagcgagaacgacgagtggacccaggacagagccaagcccgtgacccagatcgtgtctgccgaagcctggggcagagccgattgcgacgtgaagctggtggaaaagagcttcgagacagacaccaacctgaacttccagaacctgagcgtgatcggcttcagaatcctgctgctgaaagtggccggctttaacctgctgatgaccctgcggctgtggtccagc

SEQ ID NO: 35661 - DNA, 2271 bp, synthetic construct
  source 1..2271: mol_type = other DNA
atggccttaccagtgaccgccttgctcctgccgctggccttgctgctccacgccgccaggccggacatccagatgacacagagccctagcagcctgtctgccagcgtgggagacagagtgaccatcacatgcaaggccagccagagcgtgtccaacgacgtgacctggtatcagcagaagcctggacaggcccctaagctgctgatctacagcgccagcaacagatacagcggagtgcccgccagattttccggctctggctacggcaccgagttcacctttaccatcagcagcgtgcagagcgaggacttcgccgtgtacttctgccagcaagactacagcagcttcggccagggcaccaagctggaaatcaagagactcgaggacctgaagaacgtgttcccacctgaggtggccgtgttcgagcctagcgaggccgagatcagccacacccagaaagccaccctcgtgtgcctggctaccggcttctaccccgaccatgtggaactgtcttggtgggtcaacggcaaagaggtgcacagcggcgtgtgtaccgacccccagccactgaaagaacagcccgccctgaacgacagccggtactgcctgagcagcagactgagagtgtccgccaccttctggcagaacccccggaaccacttcagatgccaggtgcagttctacggcctgagcgagaacgacgagtggacccaggacagagccaagcccgtgacccagatcgtgtctgccgaagcctggggcagagccgattgcgacgtgaagctggtggaaaagagcttcgagacagacaccaacctgaacttccagaacctgagcgtgatcggcttcagaatcctgctgctgaaagtggccggctttaacctgctgatgaccctgcggctgtggtccagcagggccaagcgatctggatctggagcaacaaacttctcactactcaaacaagcaggtgacgtggaggagaatcccgggcctactagtgccaccatggactggatttggcgcatccttttccttgtcggcgctgctaccggcgcccattccgggcccgaagtgcagctggttgaatctggcggaggactggttcaggctggcggatctctgagactgtcttgtgccgccagcggcagaacctttagcatgggctggtttagacaggcccctggcaaagagagagagttcgtcgccgccatcacatactctggcggcagcccttactacgccgactctgtgaagggcagattcaccatcagccgggacaacgccaagaacaccgtgtacctccagatgaacagcctgaagcctgaggacaccgccgtgtactactgcgccgccaatccaacatacggcagcgactggaacgccgagaattggggccagggaacccaagtgacagtgtctagcggatccggcggcggaggatctggcggaggcggatctgggggcggaggctctttcgaacaggtgcagctggtggaatctggacctggcgtggtgcagcctggcagaagcctgagaatcagctgtgccgtgtccggcttcagcgtgaccaactacggcgtgcactgggtgcgccagccacctggaaaaggactggaatggctgggcgtgatctgggctggcggcatcaccaactacaacagcgccttcatgtcccggctgaccatctccaaggacaacagcaagaacaccgtgtacctccagatgaacagcctgcgggccgaggacaccgccatgtactactgtgcttccagaggcggccactacggctacgccctggattattggggccagggaaccctcgtgaccgtgtcctctacgcgtatccagaaccctgatcctgccgtgtaccagctgcgggatagcaagagcagcgacaagagcgtgtgtctgttcaccgacttcgacagccagaccaacgtgtcccagagcaaggactccgacgtgtacatcaccgataagtgcgtgctggacatgcggagcatggacttcaagagcaactccgccgtggcctggtccaacaagtccgatttcgcctgcgccaacgccttcaacaacagcattatccccgaggacacattcttcccaagccccgagagcagctgcggctttaccagcgagagctaccagcagggcgtgctgagcgccaccatcctgtacgagatcctgctgggcaaggccaccctgtacgccgtgctggtgtctgccctggtgctgatggctatggtcaagcggaaggacagccggggataa

SEQ ID NO: 35662 - DNA, 2274 bp, synthetic construct
  source 1..2274: mol_type = other DNA
atggccttaccagtgaccgccttgctcctgccgctggccttgctgctccacgccgccaggccggacatccagatgacacagagccctagcagcctgtctgccagcgtgggagacagagtgaccatcacatgcaaggccagccagagcgtgtccaacgacgtgacctggtatcagcagaagcctggacaggcccctaagctgctgatctacagcgccagcaacagatacagcggagtgcccgccagattttccggctctggctacggcaccgagttcacctttaccatcagcagcgtgcagagcgaggacttcgccgtgtacttctgccagcaagactacagcagcttcggccagggcaccaagctggaaatcaagagactcgaggacctgaagaacgtgttcccacctgaggtggccgtgttcgagcctagcgaggccgagatcagccacacccagaaagccaccctcgtgtgcctggctaccggcttctaccccgaccatgtggaactgtcttggtgggtcaacggcaaagaggtgcacagcggcgtgtgtaccgacccccagccactgaaagaacagcccgccctgaacgacagccggtactgcctgagcagcagactgagagtgtccgccaccttctggcagaacccccggaaccacttcagatgccaggtgcagttctacggcctgagcgagaacgacgagtggacccaggacagagccaagcccgtgacccagatcgtgtctgccgaagcctggggcagagccgattgcgacgtgaagctggtggaaaagagcttcgagacagacaccaacctgaacttccagaacctgagcgtgatcggcttcagaatcctgctgctgaaagtggccggctttaacctgctgatgaccctgcggctgtggtccagcagggccaagcgatctggatctggagcaacaaacttctcactactcaaacaagcaggtgacgtggaggagaatcccgggcctactagtgccaccatggactggatttggcgcatccttttccttgtcggcgctgctaccggcgcccattccgggcccgaagtgcaactggtggaatctgggggcggactggtgcagccaggcggaagtctgaggctgtcttgtgccgcctccggcagcatcttcggcttcaacgacatggcctggtatcggcaggctcccggaaaacagcgcgagctggtggctctgattagcagagtgggcgtgaccagcagcgccgactctgtgaagggcagattcacaatctccagagtgaacgccaaggatacagtgtacctccagatgaactctctgaaacctgaggatacagcagtgtactattgctacatggaccagcggctggacggcagcacactggcctactggggacagggaactcaagtgacagtgtctagcggatccggcggcggaggatctggcggaggcggatctgggggcggaggctctttcgaacaggtgcagctggtggaatctggacctggcgtggtgcagcctggcagaagcctgagaatcagctgtgccgtgtccggcttcagcgtgaccaactacggcgtgcactgggtgcgccagccacctggaaaaggactggaatggctgggcgtgatctgggctggcggcatcaccaactacaacagcgccttcatgtcccggctgaccatctccaaggacaacagcaagaacaccgtgtacctccagatgaacagcctgcgggccgaggacaccgccatgtactactgtgcttccagaggcggccactacggctacgccctggattattggggccagggaaccctcgtgaccgtgtcctctacgcgtatccagaaccctgatcctgccgtgtaccagctgcgggatagcaagagcagcgacaagagcgtgtgtctgttcaccgacttcgacagccagaccaacgtgtcccagagcaaggactccgacgtgtacatcaccgataagtgcgtgctggacatgcggagcatggacttcaagagcaactccgccgtggcctggtccaacaagtccgatttcgcctgcgccaacgccttcaacaacagcattatccccgaggacacattcttcccaagccccgagagcagctgcggctttaccagcgagagctaccagcagggcgtgctgagcgccaccatcctgtacgagatcctgctgggcaaggccaccctgtacgccgtgctggtgtctgccctggtgctgatggctatggtcaagcggaaggacagccggggataa

SEQ ID NO: 35663 - DNA, 2262 bp, synthetic construct
  source 1..2262: mol_type = other DNA
atggccttaccagtgaccgccttgctcctgccgctggccttgctgctccacgccgccaggccggacatccagatgacacagagccctagcagcctgtctgccagcgtgggagacagagtgaccatcacatgcaaggccagccagagcgtgtccaacgacgtgacctggtatcagcagaagcctggacaggcccctaagctgctgatctacagcgccagcaacagatacagcggagtgcccgccagattttccggctctggctacggcaccgagttcacctttaccatcagcagcgtgcagagcgaggacttcgccgtgtacttctgccagcaagactacagcagcttcggccagggcaccaagctggaaatcaagagactcgaggacctgaagaacgtgttcccacctgaggtggccgtgttcgagcctagcgaggccgagatcagccacacccagaaagccaccctcgtgtgcctggctaccggcttctaccccgaccatgtggaactgtcttggtgggtcaacggcaaagaggtgcacagcggcgtgtgtaccgacccccagccactgaaagaacagcccgccctgaacgacagccggtactgcctgagcagcagactgagagtgtccgccaccttctggcagaacccccggaaccacttcagatgccaggtgcagttctacggcctgagcgagaacgacgagtggacccaggacagagccaagcccgtgacccagatcgtgtctgccgaagcctggggcagagccgattgcgacgtgaagctggtggaaaagagcttcgagacagacaccaacctgaacttccagaacctgagcgtgatcggcttcagaatcctgctgctgaaagtggccggctttaacctgctgatgaccctgcggctgtggtccagcagggccaagcgatctggatctggagcaacaaacttctcactactcaaacaagcaggtgacgtggaggagaatcccgggcctactagtgccaccatggactggatttggcgcatccttttccttgtcggcgctgctaccggcgcccattccgggcccgaggtgcagctggttgaatctggcggaggactggttcaggctggcggatctctgagactgtcttgtgccgccagcggctctgtgttcagcggcaatgtgatgggctggtacagacaggcccctggcaaagaaagagagtgggttgccgccattgccagcggcggcagcatctactacagagactctgtgaagggcagattcaccatcagccgggacaacgccaagaacaccgtgtacctccagatgaacagcctgaagcctgaggacaccgccgtgtactactgcaactctcaccctcctacactgccctattggggcctgggaacccaagtgacagtgtcctctggatccggcggcggaggatctggcggaggcggatctgggggcggaggctctttcgaacaggtgcagctggtggaatctggacctggcgtggtgcagcctggcagaagcctgagaatcagctgtgccgtgtccggcttcagcgtgaccaactacggcgtgcactgggtgcgccagccacctggaaaaggactggaatggctgggcgtgatctgggctggcggcatcaccaactacaacagcgccttcatgtcccggctgaccatctccaaggacaacagcaagaacaccgtgtacctccagatgaacagcctgcgggccgaggacaccgccatgtactactgtgcttccagaggcggccactacggctacgccctggattattggggccagggaaccctcgtgaccgtgtcctctacgcgtatccagaaccctgatcctgccgtgtaccagctgcgggatagcaagagcagcgacaagagcgtgtgtctgttcaccgacttcgacagccagaccaacgtgtcccagagcaaggactccgacgtgtacatcaccgataagtgcgtgctggacatgcggagcatggacttcaagagcaactccgccgtggcctggtccaacaagtccgatttcgcctgcgccaacgccttcaacaacagcattatccccgaggacacattcttcccaagccccgagagcagctgcggctttaccagcgagagctaccagcagggcgtgctgagcgccaccatcctgtacgagatcctgctgggcaaggccaccctgtacgccgtgctggtgtctgccctggtgctgatggctatggtcaagcggaaggacagccggggataa

SEQ ID NO: 35664 - DNA, 2256 bp, synthetic construct
  source 1..2256: mol_type = other DNA
atggccttaccagtgaccgccttgctcctgccgctggccttgctgctccacgccgccaggccggacatccagatgacacagagccctagcagcctgtctgccagcgtgggagacagagtgaccatcacatgcaaggccagccagagcgtgtccaacgacgtgacctggtatcagcagaagcctggacaggcccctaagctgctgatctacagcgccagcaacagatacagcggagtgcccgccagattttccggctctggctacggcaccgagttcacctttaccatcagcagcgtgcagagcgaggacttcgccgtgtacttctgccagcaagactacagcagcttcggccagggcaccaagctggaaatcaagagactcgaggacctgaagaacgtgttcccacctgaggtggccgtgttcgagcctagcgaggccgagatcagccacacccagaaagccaccctcgtgtgcctggctaccggcttctaccccgaccatgtggaactgtcttggtgggtcaacggcaaagaggtgcacagcggcgtgtgtaccgacccccagccactgaaagaacagcccgccctgaacgacagccggtactgcctgagcagcagactgagagtgtccgccaccttctggcagaacccccggaaccacttcagatgccaggtgcagttctacggcctgagcgagaacgacgagtggacccaggacagagccaagcccgtgacccagatcgtgtctgccgaagcctggggcagagccgattgcgacgtgaagctggtggaaaagagcttcgagacagacaccaacctgaacttccagaacctgagcgtgatcggcttcagaatcctgctgctgaaagtggccggctttaacctgctgatgaccctgcggctgtggtccagcagggccaagcgatctggatctggagcaacaaacttctcactactcaaacaagcaggtgacgtggaggagaatcccgggcctactagtgccaccatggactggatttggcgcatccttttccttgtcggcgctgctaccggcgcccattccgggcccgaagttcagctgctggaatctggcggaggactcgttcaacctggcggctctctgagactgagctgtgccgcttctggcttcagcttctctagctacgccctgagctgggttcgacaagctcccggaaagggccttgaatgggtgtccagcatcggcgagaatgacggcaccacagactatgccgatgccgtgaaaggccggtttaccatcagcagagacaattccaagaacacgctctatctgcaaatgaactccctgcgcgtggaagatacagccgtgtattattgcgtgaaggacggcatccactggggacagggaaccctggttacagtgtctagcggatccggcggcggaggatctggcggaggcggatctgggggcggaggctctttcgaacaggtgcagctggtggaatctggacctggcgtggtgcagcctggcagaagcctgagaatcagctgtgccgtgtccggcttcagcgtgaccaactacggcgtgcactgggtgcgccagccacctggaaaaggactggaatggctgggcgtgatctgggctggcggcatcaccaactacaacagcgccttcatgtcccggctgaccatctccaaggacaacagcaagaacaccgtgtacctccagatgaacagcctgcgggccgaggacaccgccatgtactactgtgcttccagaggcggccactacggctacgccctggattattggggccagggaaccctcgtgaccgtgtcctctacgcgtatccagaaccctgatcctgccgtgtaccagctgcgggatagcaagagcagcgacaagagcgtgtgtctgttcaccgacttcgacagccagaccaacgtgtcccagagcaaggactccgacgtgtacatcaccgataagtgcgtgctggacatgcggagcatggacttcaagagcaactccgccgtggcctggtccaacaagtccgatttcgcctgcgccaacgccttcaacaacagcattatccccgaggacacattcttcccaagccccgagagcagctgcggctttaccagcgagagctaccagcagggcgtgctgagcgccaccatcctgtacgagatcctgctgggcaaggccaccctgtacgccgtgctggtgtctgccctggtgctgatggctatggtcaagcggaaggacagccggggataa

SEQ ID NO: 35665 - DNA, 3363 bp, synthetic construct
  source 1..3363: mol_type = other DNA
atgggacccagactgctgttttgggctctgctgtgtctgctcggcacaggacctgttgaagctggcgtgacacagagccccacacacctgattaagaccagaggccagcaggccacactgagatgcagccctatcagcggccacaccagcgtgtactggtatcagcaggctctcggactgggcctccagttcctgctttggtacgacgagggcgaagagagaaaccggggcaacttccctcctcggttttccggcagacagttccccaactacagcagcgagctgaacgtgaacgccctggaactggaagatagcgccctgtacctgtgtgcctcttctcttggtggacctcgcggactggctggactgagaggggatgagcagtttttcggccctggcaccagactgaccgtgctggaaggtaccggcggaggcggatctggcggcggagaattcgacatccagatgacacagagccctagcagcctgtctgccagcgtgggagacagagtgaccatcacatgcaaggccagccagagcgtgtccaacgacgtgacctggtatcagcagaagcctggacaggcccctaagctgctgatctacagcgccagcaacagatacagcggagtgcccgccagattttccggctctggctacggcaccgagttcacctttaccatcagcagcgtgcagagcgaggacttcgccgtgtacttctgccagcaagactacagcagcttcggccagggcaccaagctggaaatcaagagactcgaggacctgaagaacgtgttcccacctgaggtggccgtgttcgagcctagcgaggccgagatcagccacacccagaaagccaccctcgtgtgcctggctaccggcttctaccccgaccatgtggaactgtcttggtgggtcaacggcaaagaggtgcacagcggcgtgtgtaccgacccccagccactgaaagaacagcccgccctgaacgacagccggtactgcctgagcagcagactgagagtgtccgccaccttctggcagaacccccggaaccacttcagatgccaggtgcagttctacggcctgagcgagaacgacgagtggacccaggacagagccaagcccgtgacccagatcgtgtctgccgaagcctggggcagagccgattgcgacgtgaagctggtggaaaagagcttcgagacagacaccaacctgaacttccagaacctgagcgtgatcggcttcagaatcctgctgctgaaagtggccggctttaacctgctgatgaccctgcggctgtggtccagcagggccaagcgatctggatctggagcaacaaacttctcactactcaaacaagcaggtgacgtggaggagaatcccgggcctactagtgccaccatggactggatttggcgcatccttttccttgtcggcgctgctaccggcgcccattccgggcccgaagtgcagctggttgaatctggcggaggactggttcaggctggcggatctctgagactgtcttgtgccgccagcggcagaacctttagcatgggctggtttagacaggcccctggcaaagagagagagttcgtcgccgccatcacatactctggcggcagcccttactacgccgactctgtgaagggcagattcaccatcagccgggacaacgccaagaacaccgtgtacctccagatgaacagcctgaagcctgaggacaccgccgtgtactactgcgccgccaatccaacatacggcagcgactggaacgccgagaattggggccagggaacccaagtgacagtgtctagcggatccggcggcggaggatctggcggaggcggatctgggggcggaggctctttcgaacaggtgcagctggtggaatctggacctggcgtggtgcagcctggcagaagcctgagaatcagctgtgccgtgtccggcttcagcgtgaccaactacggcgtgcactgggtgcgccagccacctggaaaaggactggaatggctgggcgtgatctgggctggcggcatcaccaactacaacagcgccttcatgtcccggctgaccatctccaaggacaacagcaagaacaccgtgtacctccagatgaacagcctgcgggccgaggacaccgccatgtactactgtgcttccagaggcggccactacggctacgccctggattattggggccagggaaccctcgtgaccgtgtcctctacgcgtatccagaaccctgatcctgccgtgtaccagctgcgggatagcaagagcagcgacaagagcgtgtgtctgttcaccgacttcgacagccagaccaacgtgtcccagagcaaggactccgacgtgtacatcaccgataagtgcgtgctggacatgcggagcatggacttcaagagcaactccgccgtggcctggtccaacaagtccgatttcgcctgcgccaacgccttcaacaacagcattatccccgaggacacattcttcccaagccccgagagcagctgcggctttaccagcgagagctaccagcagggcgtgctgagcgccaccatcctgtacgagatcctgctgggcaaggccaccctgtacgccgtgctggtgtctgccctggtgctgatggctatggtcaagcggaaggacagccggggacgcgccaagagaagcggatctggcgtgaagcagaccctgaatttcgacctgctgaagctggctggcgacgtggaatccaacccaggcccttctagaggccatatgaccgagtacaagcccacggtgcgcctcgccacccgcgacgacgtccccagggccgtacgcaccctcgccgccgcgttcgccgactaccccgccacgcgccacaccgtcgatccggaccgccacatcgagcgggtcaccgagctgcaagaactcttcctcacgcgcgtcgggctcgacatcggcaaggtgtgggtcgcggacgacggcgccgcggtggcggtctggaccacgccggagagcgtcgaagcgggggcggtgttcgccgagatcggcccgcgcatggccgagttgagcggttcccggctggccgcgcagcaacagatggaaggcctcctggcgccgcaccggcccaaggagcccgcgtggttcctggccaccgtcggcgtctcgcccgaccaccagggcaagggtctgggcagcgccgtcgtgctccccggagtggaggcggccgagcgcgccggggtgcccgccttcctggagacctccgcgccccgcaacctccccttctacgagcggctcggcttcaccgtcaccgccgacgtcgaggtgcccgaaggaccgcgcacctggtgcatgacccgcaagcccggtgcctga

SEQ ID NO: 35666 - DNA, 3360 bp, synthetic construct
  source 1..3360: mol_type = other DNA
atgggacccagactgctgttttgggctctgctgtgtctgctcggcacaggacctgttgaagctggcgtgacacagagccccacacacctgattaagaccagaggccagcaggccacactgagatgcagccctatcagcggccacaccagcgtgtactggtatcagcaggctctcggactgggcctccagttcctgctttggtacgacgagggcgaagagagaaaccggggcaacttccctcctcggttttccggcagacagttccccaactacagcagcgagctgaacgtgaacgccctggaactggaagatagcgccctgtacctgtgtgccagctctctcggcggagatgaactgggagccgatggcaacgagcagttctttggccctggcaccagactgaccgtgctggaaggtaccggcggaggcggatctggcggcggaagcgaattcgacatccagatgacacagagccctagcagcctgtctgccagcgtgggagacagagtgaccatcacatgcaaggccagccagagcgtgtccaacgacgtgacctggtatcagcagaagcctggacaggcccctaagctgctgatctacagcgccagcaacagatacagcggagtgcccgccagattttccggctctggctacggcaccgagttcacctttaccatcagcagcgtgcagagcgaggacttcgccgtgtacttctgccagcaagactacagcagcttcggccagggcaccaagctggaaatcaagagactcgaggacctgaagaacgtgttcccacctgaggtggccgtgttcgagcctagcgaggccgagatcagccacacccagaaagccaccctcgtgtgcctggctaccggcttctaccccgaccatgtggaactgtcttggtgggtcaacggcaaagaggtgcacagcggcgtgtgtaccgacccccagccactgaaagaacagcccgccctgaacgacagccggtactgcctgagcagcagactgagagtgtccgccaccttctggcagaacccccggaaccacttcagatgccaggtgcagttctacggcctgagcgagaacgacgagtggacccaggacagagccaagcccgtgacccagatcgtgtctgccgaagcctggggcagagccgattgcgacgtgaagctggtggaaaagagcttcgagacagacaccaacctgaacttccagaacctgagcgtgatcggcttcagaatcctgctgctgaaagtggccggctttaacctgctgatgaccctgcggctgtggtccagcagggccaagcgatctggatctggagcaacaaacttctcactactcaaacaagcaggtgacgtggaggagaatcccgggcctactagtgccaccatggactggatttggcgcatccttttccttgtcggcgctgctaccggcgcccattccgggcccgaagtgcagctggttgaatctggcggaggactggttcaggctggcggatctctgagactgtcttgtgccgccagcggcagaacctttagcatgggctggtttagacaggcccctggcaaagagagagagttcgtcgccgccatcacatactctggcggcagcccttactacgccgactctgtgaagggcagattcaccatcagccgggacaacgccaagaacaccgtgtacctccagatgaacagcctgaagcctgaggacaccgccgtgtactactgcgccgccaatccaacatacggcagcgactggaacgccgagaattggggccagggaacccaagtgacagtgtctagcggatccggcggcggaggatctggcggaggcggatctgggggcggaggctctttcgaacaggtgcagctggtggaatctggacctggcgtggtgcagcctggcagaagcctgagaatcagctgtgccgtgtccggcttcagcgtgaccaactacggcgtgcactgggtgcgccagccacctggaaaaggactggaatggctgggcgtgatctgggctggcggcatcaccaactacaacagcgccttcatgtcccggctgaccatctccaaggacaacagcaagaacaccgtgtacctccagatgaacagcctgcgggccgaggacaccgccatgtactactgtgcttccagaggcggccactacggctacgccctggattattggggccagggaaccctcgtgaccgtgtcctctacgcgtatccagaaccctgatcctgccgtgtaccagctgcgggatagcaagagcagcgacaagagcgtgtgtctgttcaccgacttcgacagccagaccaacgtgtcccagagcaaggactccgacgtgtacatcaccgataagtgcgtgctggacatgcggagcatggacttcaagagcaactccgccgtggcctggtccaacaagtccgatttcgcctgcgccaacgccttcaacaacagcattatccccgaggacacattcttcccaagccccgagagcagctgcggctttaccagcgagagctaccagcagggcgtgctgagcgccaccatcctgtacgagatcctgctgggcaaggccaccctgtacgccgtgctggtgtctgccctggtgctgatggctatggtcaagcggaaggacagccggggacgcgccaagagaagcggatctggcgtgaagcagaccctgaatttcgacctgctgaagctggctggcgacgtggaatccaacccaggcccttctagaggccatatgaccgagtacaagcccacggtgcgcctcgccacccgcgacgacgtccccagggccgtacgcaccctcgccgccgcgttcgccgactaccccgccacgcgccacaccgtcgatccggaccgccacatcgagcgggtcaccgagctgcaagaactcttcctcacgcgcgtcgggctcgacatcggcaaggtgtgggtcgcggacgacggcgccgcggtggcggtctggaccacgccggagagcgtcgaagcgggggcggtgttcgccgagatcggcccgcgcatggccgagttgagcggttcccggctggccgcgcagcaacagatggaaggcctcctggcgccgcaccggcccaaggagcccgcgtggttcctggccaccgtcggcgtctcgcccgaccaccagggcaagggtctgggcagcgccgtcgtgctccccggagtggaggcggccgagcgcgccggggtgcccgccttcctggagacctccgcgccccgcaacctccccttctacgagcggctcggcttcaccgtcaccgccgacgtcgaggtgcccgaaggaccgcgcacctggtgcatgacccgcaagcccggtgcctga

SEQ ID NO: 35667 - DNA, 2835 bp, synthetic construct
  source 1..2835: mol_type = other DNA
atggccttaccagtgaccgccttgctcctgccgctggccttgctgctccacgccgccaggccggacatccagatgacacagagccctagcagcctgtctgccagcgtgggagacagagtgaccatcacatgcaaggccagccagagcgtgtccaacgacgtgacctggtatcagcagaagcctggacaggcccctaagctgctgatctacagcgccagcaacagatacagcggagtgcccgccagattttccggctctggctacggcaccgagttcacctttaccatcagcagcgtgcagagcgaggacttcgccgtgtacttctgccagcaagactacagcagcttcggccagggcaccaagctggaaatcaagagactcgaggacctgaagaacgtgttcccacctgaggtggccgtgttcgagcctagcgaggccgagatcagccacacccagaaagccaccctcgtgtgcctggctaccggcttctaccccgaccatgtggaactgtcttggtgggtcaacggcaaagaggtgcacagcggcgtgtgtaccgacccccagccactgaaagaacagcccgccctgaacgacagccggtactgcctgagcagcagactgagagtgtccgccaccttctggcagaacccccggaaccacttcagatgccaggtgcagttctacggcctgagcgagaacgacgagtggacccaggacagagccaagcccgtgacccagatcgtgtctgccgaagcctggggcagagccgattgcgacgtgaagctggtggaaaagagcttcgagacagacaccaacctgaacttccagaacctgagcgtgatcggcttcagaatcctgctgctgaaagtggccggctttaacctgctgatgaccctgcggctgtggtccagcagggccaagcgatctggatctggagcaacaaacttctcactactcaaacaagcaggtgacgtggaggagaatcccgggcctactagtgccaccatggactggatttggcgcatccttttccttgtcggcgctgctaccggcgcccattccgggcccatgggaagctggcttgagttctaccacagactcaacgccattgacagcaggctgtgggcacttggcggaagcgaagctgaactcgccgcttttgaaaaagaaattgccgctttcgagtccgagcttcaggcttacaaaggcaaagggaatcctgaggtcgagagcctgagagatcacgctgcccacattagagagtggttgcaggcataccggcacaatggatccggcggcggaggatctggcggaggcggatctgggggcggaggctctttcgaacaggtgcagctggtggaatctggacctggcgtggtgcagcctggcagaagcctgagaatcagctgtgccgtgtccggcttcagcgtgaccaactacggcgtgcactgggtgcgccagccacctggaaaaggactggaatggctgggcgtgatctgggctggcggcatcaccaactacaacagcgccttcatgtcccggctgaccatctccaaggacaacagcaagaacaccgtgtacctccagatgaacagcctgcgggccgaggacaccgccatgtactactgtgcttccagaggcggccactacggctacgccctggattattggggccagggaaccctcgtgaccgtgtcctctacgcgtatccagaaccctgatcctgccgtgtaccagctgcgggatagcaagagcagcgacaagagcgtgtgtctgttcaccgacttcgacagccagaccaacgtgtcccagagcaaggactccgacgtgtacatcaccgataagtgcgtgctggacatgcggagcatggacttcaagagcaactccgccgtggcctggtccaacaagtccgatttcgcctgcgccaacgccttcaacaacagcattatccccgaggacacattcttcccaagccccgagagcagctgcggctttaccagcgagagctaccagcagggcgtgctgagcgccaccatcctgtacgagatcctgctgggcaaggccaccctgtacgccgtgctggtgtctgccctggtgctgatggctatggtcaagcggaaggacagccggggacgcgccaagagaagcggatctggcgtgaagcagaccctgaatttcgacctgctgaagctggctggcgacgtggaatccaacccaggcccttctagaggccatatgaccgagtacaagcccacggtgcgcctcgccacccgcgacgacgtccccagggccgtacgcaccctcgccgccgcgttcgccgactaccccgccacgcgccacaccgtcgatccggaccgccacatcgagcgggtcaccgagctgcaagaactcttcctcacgcgcgtcgggctcgacatcggcaaggtgtgggtcgcggacgacggcgccgcggtggcggtctggaccacgccggagagcgtcgaagcgggggcggtgttcgccgagatcggcccgcgcatggccgagttgagcggttcccggctggccgcgcagcaacagatggaaggcctcctggcgccgcaccggcccaaggagcccgcgtggttcctggccaccgtcggcgtctcgcccgaccaccagggcaagggtctgggcagcgccgtcgtgctccccggagtggaggcggccgagcgcgccggggtgcccgccttcctggagacctccgcgccccgcaacctccccttctacgagcggctcggcttcaccgtcaccgccgacgtcgaggtgcccgaaggaccgcgcacctggtgcatgacccgcaagcccggtgcctga

SEQ ID NO: 35668 - DNA, 2835 bp, synthetic construct
  source 1..2835: mol_type = other DNA
atggccttaccagtgaccgccttgctcctgccgctggccttgctgctccacgccgccaggccggcatgcatgggcagttggttcgagttctacgaccggctgaatgccatcgacgccagactgtgggctctcggaggatctgaagctgagctggccgccttcgagaaagagatcgccgcctttgagagcgagctgcaagcctacaaaggcaagggcaaccccgaggtggaaaacctgagagtgcacgccgctgccatcagagaatggctccaggcttacagacacaacggtaccggcggaggcggatctggcggcggaggtagcggtggcggaggatctgaattcgacatccagatgacacagagccctagcagcctgtctgccagcgtgggagacagagtgaccatcacatgcaaggccagccagagcgtgtccaacgacgtgacctggtatcagcagaagcctggacaggcccctaagctgctgatctacagcgccagcaacagatacagcggagtgcccgccagattttccggctctggctacggcaccgagttcacctttaccatcagcagcgtgcagagcgaggacttcgccgtgtacttctgccagcaagactacagcagcttcggccagggcaccaagctggaaatcaagagactcgaggacctgaagaacgtgttcccacctgaggtggccgtgttcgagcctagcgaggccgagatcagccacacccagaaagccaccctcgtgtgcctggctaccggcttctaccccgaccatgtggaactgtcttggtgggtcaacggcaaagaggtgcacagcggcgtgtgtaccgacccccagccactgaaagaacagcccgccctgaacgacagccggtactgcctgagcagcagactgagagtgtccgccaccttctggcagaacccccggaaccacttcagatgccaggtgcagttctacggcctgagcgagaacgacgagtggacccaggacagagccaagcccgtgacccagatcgtgtctgccgaagcctggggcagagccgattgcgacgtgaagctggtggaaaagagcttcgagacagacaccaacctgaacttccagaacctgagcgtgatcggcttcagaatcctgctgctgaaagtggccggctttaacctgctgatgaccctgcggctgtggtccagcagggccaagcgatctggatctggagcaacaaacttctcactactcaaacaagcaggtgacgtggaggagaatcccgggcctactagtatggactggatttggcgcatccttttccttgtcggcgctgctaccggcgcgcattccttcgaacaggtgcagctggtggaatctggacctggcgtggtgcagcctggcagaagcctgagaatcagctgtgccgtgtccggcttcagcgtgaccaactacggcgtgcactgggtgcgccagccacctggaaaaggactggaatggctgggcgtgatctgggctggcggcatcaccaactacaacagcgccttcatgtcccggctgaccatctccaaggacaacagcaagaacaccgtgtacctccagatgaacagcctgcgggccgaggacaccgccatgtactactgtgcttccagaggcggccactacggctacgccctggattattggggccagggaaccctcgtgaccgtgtcctctacgcgtatccagaaccctgatcctgccgtgtaccagctgcgggatagcaagagcagcgacaagagcgtgtgtctgttcaccgacttcgacagccagaccaacgtgtcccagagcaaggactccgacgtgtacatcaccgataagtgcgtgctggacatgcggagcatggacttcaagagcaactccgccgtggcctggtccaacaagtccgatttcgcctgcgccaacgccttcaacaacagcattatccccgaggacacattcttcccaagccccgagagcagctgcggctttaccagcgagagctaccagcagggcgtgctgagcgccaccatcctgtacgagatcctgctgggcaaggccaccctgtacgccgtgctggtgtctgccctggtgctgatggctatggtcaagcggaaggacagccggggacgcgccaagagaagcggatctggcgtgaagcagaccctgaatttcgacctgctgaagctggctggcgacgtggaatccaacccaggcccttctagaggccatatgaccgagtacaagcccacggtgcgcctcgccacccgcgacgacgtccccagggccgtacgcaccctcgccgccgcgttcgccgactaccccgccacgcgccacaccgtcgatccggaccgccacatcgagcgggtcaccgagctgcaagaactcttcctcacgcgcgtcgggctcgacatcggcaaggtgtgggtcgcggacgacggcgccgcggtggcggtctggaccacgccggagagcgtcgaagcgggggcggtgttcgccgagatcggcccgcgcatggccgagttgagcggttcccggctggccgcgcagcaacagatggaaggcctcctggcgccgcaccggcccaaggagcccgcgtggttcctggccaccgtcggcgtctcgcccgaccaccagggcaagggtctgggcagcgccgtcgtgctccccggagtggaggcggccgagcgcgccggggtgcccgccttcctggagacctccgcgccccgcaacctccccttctacgagcggctcggcttcaccgtcaccgccgacgtcgaggtgcccgaaggaccgcgcacctggtgcatgacccgcaagcccggtgcctga

SEQ ID NO: 35669 - DNA, 3186 bp, synthetic construct
  source 1..3186: mol_type = other DNA
atggccttaccagtgaccgccttgctcctgccgctggccttgctgctccacgccgccaggccggcatgcatggaccccgacctggaaatcagagccgccttcctgcggcagagaaacacagccctgagaacagaggtggccgagctggaacaagaggtgcagcggctggaaaacgaggtgtcccagtacgagacaagatacggccctctcggaggcggaaaaggtaccggcggaggcggatctggcggcggaggtagcggtggcggaggatctgaattcgacatccagatgacacagagccctagcagcctgtctgccagcgtgggagacagagtgaccatcacatgcaaggccagccagagcgtgtccaacgacgtgacctggtatcagcagaagcctggacaggcccctaagctgctgatctacagcgccagcaacagatacagcggagtgcccgccagattttccggctctggctacggcaccgagttcacctttaccatcagcagcgtgcagagcgaggacttcgccgtgtacttctgccagcaagactacagcagcttcggccagggcaccaagctggaaatcaagagactcgaggacctgaagaacgtgttcccacctgaggtggccgtgttcgagcctagcgaggccgagatcagccacacccagaaagccaccctcgtgtgcctggctaccggcttctaccccgaccatgtggaactgtcttggtgggtcaacggcaaagaggtgcacagcggcgtgtgtaccgacccccagccactgaaagaacagcccgccctgaacgacagccggtactgcctgagcagcagactgagagtgtccgccaccttctggcagaacccccggaaccacttcagatgccaggtgcagttctacggcctgagcgagaacgacgagtggacccaggacagagccaagcccgtgacccagatcgtgtctgccgaagcctggggcagagccgattgcgacgtgaagctggtggaaaagagcttcgagacagacaccaacctgaacttccagaacctgagcgtgatcggcttcagaatcctgctgctgaaagtggccggctttaacctgctgatgaccctgcggctgtggtccagcagggccaagcgatctggatctggagcaacaaacttctcactactcaaacaagcaggtgacgtggaggagaatcccgggcctactagtgccaccatggactggatttggcgcatccttttccttgtcggcgctgctaccggcgcccattccgggcccgaagtgcagctggttgaatctggcggaggactggttcaggctggcggatctctgagactgtcttgtgccgccagcggcagaacctttagcatgggctggtttagacaggcccctggcaaagagagagagttcgtcgccgccatcacatactctggcggcagcccttactacgccgactctgtgaagggcagattcaccatcagccgggacaacgccaagaacaccgtgtacctccagatgaacagcctgaagcctgaggacaccgccgtgtactactgcgccgccaatccaacatacggcagcgactggaacgccgagaattggggccagggaacccaagtgacagtgtctagcggatccggcggcggaggatctggcggaggcggatctgggggcggaggctctttcgaacaggtgcagctggtggaatctggacctggcgtggtgcagcctggcagaagcctgagaatcagctgtgccgtgtccggcttcagcgtgaccaactacggcgtgcactgggtgcgccagccacctggaaaaggactggaatggctgggcgtgatctgggctggcggcatcaccaactacaacagcgccttcatgtcccggctgaccatctccaaggacaacagcaagaacaccgtgtacctccagatgaacagcctgcgggccgaggacaccgccatgtactactgtgcttccagaggcggccactacggctacgccctggattattggggccagggaaccctcgtgaccgtgtcctctacgcgtatccagaaccctgatcctgccgtgtaccagctgcgggatagcaagagcagcgacaagagcgtgtgtctgttcaccgacttcgacagccagaccaacgtgtcccagagcaaggactccgacgtgtacatcaccgataagtgcgtgctggacatgcggagcatggacttcaagagcaactccgccgtggcctggtccaacaagtccgatttcgcctgcgccaacgccttcaacaacagcattatccccgaggacacattcttcccaagccccgagagcagctgcggctttaccagcgagagctaccagcagggcgtgctgagcgccaccatcctgtacgagatcctgctgggcaaggccaccctgtacgccgtgctggtgtctgccctggtgctgatggctatggtcaagcggaaggacagccggggacgcgccaagagaagcggatctggcgtgaagcagaccctgaatttcgacctgctgaagctggctggcgacgtggaatccaacccaggcccttctagaggccatatgaccgagtacaagcccacggtgcgcctcgccacccgcgacgacgtccccagggccgtacgcaccctcgccgccgcgttcgccgactaccccgccacgcgccacaccgtcgatccggaccgccacatcgagcgggtcaccgagctgcaagaactcttcctcacgcgcgtcgggctcgacatcggcaaggtgtgggtcgcggacgacggcgccgcggtggcggtctggaccacgccggagagcgtcgaagcgggggcggtgttcgccgagatcggcccgcgcatggccgagttgagcggttcccggctggccgcgcagcaacagatggaaggcctcctggcgccgcaccggcccaaggagcccgcgtggttcctggccaccgtcggcgtctcgcccgaccaccagggcaagggtctgggcagcgccgtcgtgctccccggagtggaggcggccgagcgcgccggggtgcccgccttcctggagacctccgcgccccgcaacctccccttctacgagcggctcggcttcaccgtcaccgccgacgtcgaggtgcccgaaggaccgcgcacctggtgcatgacccgcaagcccggtgcctga

SEQ ID NO: 35670 - DNA, 2835 bp, synthetic construct
  source 1..2835: mol_type = other DNA
atggccttaccagtgaccgccttgctcctgccgctggccttgctgctccacgccgccaggccggacatccagatgacacagagccctagcagcctgtctgccagcgtgggagacagagtgaccatcacatgcaaggccagccagagcgtgtccaacgacgtgacctggtatcagcagaagcctggacaggcccctaagctgctgatctacagcgccagcaacagatacagcggagtgcccgccagattttccggctctggctacggcaccgagttcacctttaccatcagcagcgtgcagagcgaggacttcgccgtgtacttctgccagcaagactacagcagcttcggccagggcaccaagctggaaatcaagagactcgaggacctgaagaacgtgttcccacctgaggtggccgtgttcgagcctagcgaggccgagatcagccacacccagaaagccaccctcgtgtgcctggctaccggcttctaccccgaccatgtggaactgtcttggtgggtcaacggcaaagaggtgcacagcggcgtgtgtaccgacccccagccactgaaagaacagcccgccctgaacgacagccggtactgcctgagcagcagactgagagtgtccgccaccttctggcagaacccccggaaccacttcagatgccaggtgcagttctacggcctgagcgagaacgacgagtggacccaggacagagccaagcccgtgacccagatcgtgtctgccgaagcctggggcagagccgattgcgacgtgaagctggtggaaaagagcttcgagacagacaccaacctgaacttccagaacctgagcgtgatcggcttcagaatcctgctgctgaaagtggccggctttaacctgctgatgaccctgcggctgtggtccagcagggccaagcgatctggatctggagcaacaaacttctcactactcaaacaagcaggtgacgtggaggagaatcccgggcctactagtgccaccatggactggatttggcgcatccttttccttgtcggcgctgctaccggcgcccattccgggcccatgggatcttggagcgagttttacgatcggctgcacgccattcaccaccggctgtatgctctcggaggaagcgaagctgagctggccgcttttgaaaaagaaattgccgctttcgagtccgagcttcaggcttacaaaggcaaagggaatcctgaggtcgaggccctgagagataccgccgccttcatcagaacccggttgcaggcataccggcacaacggatccggcggcggaggatctggcggaggcggatctgggggcggaggctctttcgaacaggtgcagctggtggaatctggacctggcgtggtgcagcctggcagaagcctgagaatcagctgtgccgtgtccggcttcagcgtgaccaactacggcgtgcactgggtgcgccagccacctggaaaaggactggaatggctgggcgtgatctgggctggcggcatcaccaactacaacagcgccttcatgtcccggctgaccatctccaaggacaacagcaagaacaccgtgtacctccagatgaacagcctgcgggccgaggacaccgccatgtactactgtgcttccagaggcggccactacggctacgccctggattattggggccagggaaccctcgtgaccgtgtcctctacgcgtatccagaaccctgatcctgccgtgtaccagctgcgggatagcaagagcagcgacaagagcgtgtgtctgttcaccgacttcgacagccagaccaacgtgtcccagagcaaggactccgacgtgtacatcaccgataagtgcgtgctggacatgcggagcatggacttcaagagcaactccgccgtggcctggtccaacaagtccgatttcgcctgcgccaacgccttcaacaacagcattatccccgaggacacattcttcccaagccccgagagcagctgcggctttaccagcgagagctaccagcagggcgtgctgagcgccaccatcctgtacgagatcctgctgggcaaggccaccctgtacgccgtgctggtgtctgccctggtgctgatggctatggtcaagcggaaggacagccggggacgcgccaagagaagcggatctggcgtgaagcagaccctgaatttcgacctgctgaagctggctggcgacgtggaatccaacccaggcccttctagaggccatatgaccgagtacaagcccacggtgcgcctcgccacccgcgacgacgtccccagggccgtacgcaccctcgccgccgcgttcgccgactaccccgccacgcgccacaccgtcgatccggaccgccacatcgagcgggtcaccgagctgcaagaactcttcctcacgcgcgtcgggctcgacatcggcaaggtgtgggtcgcggacgacggcgccgcggtggcggtctggaccacgccggagagcgtcgaagcgggggcggtgttcgccgagatcggcccgcgcatggccgagttgagcggttcccggctggccgcgcagcaacagatggaaggcctcctggcgccgcaccggcccaaggagcccgcgtggttcctggccaccgtcggcgtctcgcccgaccaccagggcaagggtctgggcagcgccgtcgtgctccccggagtggaggcggccgagcgcgccggggtgcccgccttcctggagacctccgcgccccgcaacctccccttctacgagcggctcggcttcaccgtcaccgccgacgtcgaggtgcccgaaggaccgcgcacctggtgcatgacccgcaagcccggtgcctga

SEQ ID NO: 35671 - DNA, 3465 bp, synthetic construct
  source 1..3465: mol_type = other DNA
atggccttaccagtgaccgccttgctcctgccgctggccttgctgctccacgccgccaggccggacatccagatgacacagagccctagcagcctgtctgccagcgtgggagacagagtgaccatcacatgcaaggccagccagagcgtgtccaacgacgtgacctggtatcagcagaagcctggacaggcccctaagctgctgatctacagcgccagcaacagatacagcggagtgcccgccagattttccggctctggctacggcaccgagttcacctttaccatcagcagcgtgcagagcgaggacttcgccgtgtacttctgccagcaagactacagcagcttcggccagggcaccaagctggaaatcaagagactcgaggacctgaagaacgtgttcccacctgaggtggccgtgttcgagcctagcgaggccgagatcagccacacccagaaagccaccctcgtgtgcctggctaccggcttctaccccgaccatgtggaactgtcttggtgggtcaacggcaaagaggtgcacagcggcgtgtgtaccgacccccagccactgaaagaacagcccgccctgaacgacagccggtactgcctgagcagcagactgagagtgtccgccaccttctggcagaacccccggaaccacttcagatgccaggtgcagttctacggcctgagcgagaacgacgagtggacccaggacagagccaagcccgtgacccagatcgtgtctgccgaagcctggggcagagccgattgcgacgtgaagctggtggaaaagagcttcgagacagacaccaacctgaacttccagaacctgagcgtgatcggcttcagaatcctgctgctgaaagtggccggctttaacctgctgatgaccctgcggctgtggtccagcagggccaagcgatctggatctggagcaacaaacttctcactactcaaacaagcaggtgacgtggaggagaatcccgggcctactagtaccatggactggatttggcgcatccttttccttgtcggcgctgctaccggcgcccattccctgttcaatcaagaggtgcagatccctctgaccgagagctactgtggcccctgtcctaagaactggatctgctacaagaacaactgctaccagttcttcgacgagagcaagaattggtacgagagccaggccagctgcatgagccagaatgccagcctgctgaaggtgtacagcaaagaggaccaggacctgctgaaactggtcaagagcgcccactggatgggccttgtgcacatccccaccaatggctcttggcagtgggaggacggcagcattctgagccctaacctgctgaccatcatcgagatgcagaagggcgactgcgccctgtacgccagcagctttaagggctacatcgagaattgcagcaccccgaacacctacatctgtatgcagagaaccgtttctggcggaggcggctctggaggaggcggaagtggcggcggaggcgacctctttaatcaagaagtccagattccactcaccgaatcctactgcggaccttgtccaaaaaattggatttgttataagaacaactgttatcaattctttgatgagtctaaaaattggtatgagtcccaggcttcctgcatgtctcagaacgcttctctgctgaaagtctactctaaagaagatcaggatctcctgaagctcgtcaagtctgcccattggatggggctcgtccacattcctaccaacggaagctggcaatgggaagatggctccatcctgtctccaaatctgctcacgattattgaaatgcagaaaggggattgtgctctctacgccagctccttcaagggatatattgagaactgtagcacgcccaatacttatatctgtatgcaacggaccgtgggatccggcggcggaggatctggcggaggcggatctgggggcggaggctctttcgaacaggtgcagctggtggaatctggacctggcgtggtgcagcctggcagaagcctgagaatcagctgtgccgtgtccggcttcagcgtgaccaactacggcgtgcactgggtgcgccagccacctggaaaaggactggaatggctgggcgtgatctgggctggcggcatcaccaactacaacagcgccttcatgtcccggctgaccatctccaaggacaacagcaagaacaccgtgtacctccagatgaacagcctgcgggccgaggacaccgccatgtactactgtgcttccagaggcggccactacggctacgccctggattattggggccagggaaccctcgtgaccgtgtcctctacgcgtatccagaaccctgatcctgccgtgtaccagctgcgggatagcaagagcagcgacaagagcgtgtgtctgttcaccgacttcgacagccagaccaacgtgtcccagagcaaggactccgacgtgtacatcaccgataagtgcgtgctggacatgcggagcatggacttcaagagcaactccgccgtggcctggtccaacaagtccgatttcgcctgcgccaacgccttcaacaacagcattatccccgaggacacattcttcccaagccccgagagcagctgcggctttaccagcgagagctaccagcagggcgtgctgagcgccaccatcctgtacgagatcctgctgggcaaggccaccctgtacgccgtgctggtgtctgccctggtgctgatggctatggtcaagcggaaggacagccggggacgcgccaagagaagcggatctggcgtgaagcagaccctgaatttcgacctgctgaagctggctggcgacgtggaatccaacccaggcccttctagaggccatatgaccgagtacaagcccacggtgcgcctcgccacccgcgacgacgtccccagggccgtacgcaccctcgccgccgcgttcgccgactaccccgccacgcgccacaccgtcgatccggaccgccacatcgagcgggtcaccgagctgcaagaactcttcctcacgcgcgtcgggctcgacatcggcaaggtgtgggtcgcggacgacggcgccgcggtggcggtctggaccacgccggagagcgtcgaagcgggggcggtgttcgccgagatcggcccgcgcatggccgagttgagcggttcccggctggccgcgcagcaacagatggaaggcctcctggcgccgcaccggcccaaggagcccgcgtggttcctggccaccgtcggcgtctcgcccgaccaccagggcaagggtctgggcagcgccgtcgtgctccccggagtggaggcggccgagcgcgccggggtgcccgccttcctggagacctccgcgccccgcaacctccccttctacgagcggctcggcttcaccgtcaccgccgacgtcgaggtgcccgaaggaccgcgcacctggtgcatgacccgcaagcccggtgcctga

SEQ ID NO: 35672 - DNA, 1851 bp, synthetic construct
  source 1..1851: mol_type = other DNA
atggccttaccagtgaccgccttgctcctgccgctggccttgctgctccacgccgccaggccggacatccagatgacacagagccctagcagcctgtctgccagcgtgggagacagagtgaccatcacatgcaaggccagccagagcgtgtccaacgacgtgacctggtatcagcagaagcctggacaggcccctaagctgctgatctacagcgccagcaacagatacagcggagtgcccgccagattttccggctctggctacggcaccgagttcacctttaccatcagcagcgtgcagagcgaggacttcgccgtgtacttctgccagcaagactacagcagcttcggccagggcaccaagctggaaatcaagagactcgaggacctgaagaacgtgttcccacctgaggtggccgtgttcgagcctagcgaggccgagatcagccacacccagaaagccaccctcgtgtgcctggctaccggcttctaccccgaccatgtggaactgtcttggtgggtcaacggcaaagaggtgcacagcggcgtgtgtaccgacccccagccactgaaagaacagcccgccctgaacgacagccggtactgcctgagcagcagactgagagtgtccgccaccttctggcagaacccccggaaccacttcagatgccaggtgcagttctacggcctgagcgagaacgacgagtggacccaggacagagccaagcccgtgacccagatcgtgtctgccgaagcctggggcagagccgattgcggctttaccagcgagagctaccagcagggcgtgctgagcgccaccaacctgagcgtgatcggcttcagaatcctgctgctgaaagtggccggctttaacctgctgatgaccctgcggctgtggtccagcagggccaagcgatctggatctggagcaacaaacttctcactactcaaacaagcaggtgacgtggaggagaatcccgggcctactagtatggactggatttggcgcatccttttccttgtcggcgctgctaccggcgcgcattccttcgaacaggtgcagctggtggaatctggacctggcgtggtgcagcctggcagaagcctgagaatcagctgtgccgtgtccggcttcagcgtgaccaactacggcgtgcactgggtgcgccagccacctggaaaaggactggaatggctgggcgtgatctgggctggcggcatcaccaactacaacagcgccttcatgtcccggctgaccatctccaaggacaacagcaagaacaccgtgtacctccagatgaacagcctgcgggccgaggacaccgccatgtactactgtgcttccagaggcggccactacggctacgccctggattattggggccagggaaccctcgtgaccgtgtcctctacgcgtatccagaaccctgatcctgccgtgtaccagctgcgggatagcaagagcagcgacaagagcgtgtgtctgttcaccgacttcgacagccagaccaacgtgtcccagagcaaggactccgacgtgtacatcaccgataagtgcgtgctggacatgcggagcatggacttcaagagcaactccgccgtggcctggtccaacaagtccgatttcgcctgcgccaacgccttcaacaacagcattatccccgaggacacattcttcccaagccccgagagcagctgcgacgtgaagctggtggaaaagagcttcgagacagacaccaacctgaacttccagatcctgtacgagatcctgctgggcaaggccaccctgtacgccgtgctggtgtctgccctggtgctgatggctatggtcaagcggaaggacagccgggga

SEQ ID NO: 35673 - DNA, 1863 bp, synthetic construct
  source 1..1863: mol_type = other DNA
atggccttaccagtgaccgccttgctcctgccgctggccttgctgctccacgccgccaggccggacatccagatgacacagagccctagcagcctgtctgccagcgtgggagacagagtgaccatcacatgcaaggccagccagagcgtgtccaacgacgtgacctggtatcagcagaagcctggacaggcccctaagctgctgatctacagcgccagcaacagatacagcggagtgcccgccagattttccggctctggctacggcaccgagttcacctttaccatcagcagcgtgcagagcgaggacttcgccgtgtacttctgccagcaagactacagcagcttcggccagggcaccaagctggaaatcaagagactcgagatccagaaccctgatcctgccgtgtaccagctgcgggatagcaagagcagcgacaagagcgtgtgtctgttcaccgacttcgacagccagaccaacgtgtcccagagcaaggactccgacgtgtacatcaccgataagtgcgtgctggacatgcggagcatggacttcaagagcaactccgccgtggcctggtccaacaagtccgatttcgcctgcgccaacgccttcaacaacagcattatccccgaggacacattcttcccaagccccgagagcagctgcgacgtgaagctggtggaaaagagcttcgagacagacaccaacctgaacttccagatcctgtacgagatcctgctgggcaaggccaccctgtacgccgtgctggtgtctgccctggtgctgatggctatggtcaagcggaaggacagccggggacgcgccaagagaagcggatctggcgtgaagcagaccctgaatttcgacctgctgaagctggctggcgacgtggaatccaacccaggccctactagtatggactggatttggcgcatccttttccttgtcggcgctgctaccggcgcgcattccttcgaacaggtgcagctggtggaatctggacctggcgtggtgcagcctggcagaagcctgagaatcagctgtgccgtgtccggcttcagcgtgaccaactacggcgtgcactgggtgcgccagccacctggaaaaggactggaatggctgggcgtgatctgggctggcggcatcaccaactacaacagcgccttcatgtcccggctgaccatctccaaggacaacagcaagaacaccgtgtacctccagatgaacagcctgcgggccgaggacaccgccatgtactactgtgcttccagaggcggccactacggctacgccctggattattggggccagggaaccctcgtgaccgtgtcctctacgcgtgaggacctgaagaacgtgttcccacctgaggtggccgtgttcgagcctagcgaggccgagatcagccacacccagaaagccaccctcgtgtgcctggctaccggcttctaccccgaccatgtggaactgtcttggtgggtcaacggcaaagaggtgcacagcggcgtgtgtaccgacccccagccactgaaagaacagcccgccctgaacgacagccggtactgcctgagcagcagactgagagtgtccgccaccttctggcagaacccccggaaccacttcagatgccaggtgcagttctacggcctgagcgagaacgacgagtggacccaggacagagccaagcccgtgacccagatcgtgtctgccgaagcctggggcagagccgattgcggctttaccagcgagagctaccagcagggcgtgctgagcgccaccaacctgagcgtgatcggcttcagaatcctgctgctgaaagtggccggctttaacctgctgatgaccctgcggctgtggtccagc

SEQ ID NO: 35674 - DNA, 2256 bp, synthetic construct
  source 1..2256: mol_type = other DNA
atggccttaccagtgaccgccttgctcctgccgctggccttgctgctccacgccgccaggccggaagtgcagctggttgaatctggcggaggactggttcagcctggcggatctctgagactgtcttgtgccgccagcggcttcagcttcagcgacttttggatgagctgggtccgacaggcccctggcaaaggacttgaatgggtcgccacaatcagccaggccggcagcgagaaggactacgtggactctgtgaagggcagattcaccatcagccgggacaacgccaagaagtccctgtacctccagatgaacagcctgagagccgaggacaccgccgtgtactattgtgcctctggcgtgtacagcttcgactacagaggccagggcaccctggtcacagtctcttctggtaccggcggaggcggatctggcggcggaggtagcggtggcggaggatctgaattcgacatccagatgacacagagccctagcagcctgtctgccagcgtgggagacagagtgaccatcacatgcaaggccagccagagcgtgtccaacgacgtgacctggtatcagcagaagcctggacaggcccctaagctgctgatctacagcgccagcaacagatacagcggagtgcccgccagattttccggctctggctacggcaccgagttcacctttaccatcagcagcgtgcagagcgaggacttcgccgtgtacttctgccagcaagactacagcagcttcggccagggcaccaagctggaaatcaagagactcgaggacctgaagaacgtgttcccacctgaggtggccgtgttcgagcctagcgaggccgagatcagccacacccagaaagccaccctcgtgtgcctggctaccggcttctaccccgaccatgtggaactgtcttggtgggtcaacggcaaagaggtgcacagcggcgtgtgtaccgacccccagccactgaaagaacagcccgccctgaacgacagccggtactgcctgagcagcagactgagagtgtccgccaccttctggcagaacccccggaaccacttcagatgccaggtgcagttctacggcctgagcgagaacgacgagtggacccaggacagagccaagcccgtgacccagatcgtgtctgccgaagcctggggcagagccgattgcggctttaccagcgagagctaccagcagggcgtgctgagcgccaccaacctgagcgtgatcggcttcagaatcctgctgctgaaagtggccggctttaacctgctgatgaccctgcggctgtggtccagcagggccaagcgatctggatctggagcaacaaacttctcactactcaaacaagcaggtgacgtggaggagaatcccgggcctactagtatggactggatttggcgcatccttttccttgtcggcgctgctaccggcgcgcattccttcgaacaggtgcagctggtggaatctggacctggcgtggtgcagcctggcagaagcctgagaatcagctgtgccgtgtccggcttcagcgtgaccaactacggcgtgcactgggtgcgccagccacctggaaaaggactggaatggctgggcgtgatctgggctggcggcatcaccaactacaacagcgccttcatgtcccggctgaccatctccaaggacaacagcaagaacaccgtgtacctccagatgaacagcctgcgggccgaggacaccgccatgtactactgtgcttccagaggcggccactacggctacgccctggattattggggccagggaaccctcgtgaccgtgtcctctacgcgtatccagaaccctgatcctgccgtgtaccagctgcgggatagcaagagcagcgacaagagcgtgtgtctgttcaccgacttcgacagccagaccaacgtgtcccagagcaaggactccgacgtgtacatcaccgataagtgcgtgctggacatgcggagcatggacttcaagagcaactccgccgtggcctggtccaacaagtccgatttcgcctgcgccaacgccttcaacaacagcattatccccgaggacacattcttcccaagccccgagagcagctgcgacgtgaagctggtggaaaagagcttcgagacagacaccaacctgaacttccagatcctgtacgagatcctgctgggcaaggccaccctgtacgccgtgctggtgtctgccctggtgctgatggctatggtcaagcggaaggacagccgggga

SEQ ID NO: 35675 - DNA, 2268 bp, synthetic construct
  source 1..2268: mol_type = other DNA
atggccttaccagtgaccgccttgctcctgccgctggccttgctgctccacgccgccaggccggaagtgcagctggttgaatctggcggaggactggttcagcctggcggatctctgagactgtcttgtgccgccagcggcttcagcttcagcgacttttggatgagctgggtccgacaggcccctggcaaaggacttgaatgggtcgccacaatcagccaggccggcagcgagaaggactacgtggactctgtgaagggcagattcaccatcagccgggacaacgccaagaagtccctgtacctccagatgaacagcctgagagccgaggacaccgccgtgtactattgtgcctctggcgtgtacagcttcgactacagaggccagggcaccctggtcacagtctcttctggtaccggcggaggcggatctggcggcggaggtagcggtggcggaggatctgaattcgacatccagatgacacagagccctagcagcctgtctgccagcgtgggagacagagtgaccatcacatgcaaggccagccagagcgtgtccaacgacgtgacctggtatcagcagaagcctggacaggcccctaagctgctgatctacagcgccagcaacagatacagcggagtgcccgccagattttccggctctggctacggcaccgagttcacctttaccatcagcagcgtgcagagcgaggacttcgccgtgtacttctgccagcaagactacagcagcttcggccagggcaccaagctggaaatcaagagactcgagatccagaaccctgatcctgccgtgtaccagctgcgggatagcaagagcagcgacaagagcgtgtgtctgttcaccgacttcgacagccagaccaacgtgtcccagagcaaggactccgacgtgtacatcaccgataagtgcgtgctggacatgcggagcatggacttcaagagcaactccgccgtggcctggtccaacaagtccgatttcgcctgcgccaacgccttcaacaacagcattatccccgaggacacattcttcccaagccccgagagcagctgcgacgtgaagctggtggaaaagagcttcgagacagacaccaacctgaacttccagatcctgtacgagatcctgctgggcaaggccaccctgtacgccgtgctggtgtctgccctggtgctgatggctatggtcaagcggaaggacagccggggacgcgccaagagaagcggatctggcgtgaagcagaccctgaatttcgacctgctgaagctggctggcgacgtggaatccaacccaggccctactagtatggactggatttggcgcatccttttccttgtcggcgctgctaccggcgcgcattccttcgaacaggtgcagctggtggaatctggacctggcgtggtgcagcctggcagaagcctgagaatcagctgtgccgtgtccggcttcagcgtgaccaactacggcgtgcactgggtgcgccagccacctggaaaaggactggaatggctgggcgtgatctgggctggcggcatcaccaactacaacagcgccttcatgtcccggctgaccatctccaaggacaacagcaagaacaccgtgtacctccagatgaacagcctgcgggccgaggacaccgccatgtactactgtgcttccagaggcggccactacggctacgccctggattattggggccagggaaccctcgtgaccgtgtcctctacgcgtgaggacctgaagaacgtgttcccacctgaggtggccgtgttcgagcctagcgaggccgagatcagccacacccagaaagccaccctcgtgtgcctggctaccggcttctaccccgaccatgtggaactgtcttggtgggtcaacggcaaagaggtgcacagcggcgtgtgtaccgacccccagccactgaaagaacagcccgccctgaacgacagccggtactgcctgagcagcagactgagagtgtccgccaccttctggcagaacccccggaaccacttcagatgccaggtgcagttctacggcctgagcgagaacgacgagtggacccaggacagagccaagcccgtgacccagatcgtgtctgccgaagcctggggcagagccgattgcggctttaccagcgagagctaccagcagggcgtgctgagcgccaccaacctgagcgtgatcggcttcagaatcctgctgctgaaagtggccggctttaacctgctgatgaccctgcggctgtggtccagc

SEQ ID NO: 35676 - DNA, 2667 bp, synthetic construct
  source 1..2667: mol_type = other DNA
atggccttaccagtgaccgccttgctcctgccgctggccttgctgctccacgccgccaggccggaagtgcagctggttgaatctggcggaggactggttcagcctggcggatctctgagactgtcttgtgccgccagcggcttcagcttcagcgacttttggatgagctgggtccgacaggcccctggcaaaggacttgaatgggtcgccacaatcagccaggccggcagcgagaaggactacgtggactctgtgaagggcagattcaccatcagccgggacaacgccaagaagtccctgtacctccagatgaacagcctgagagccgaggacaccgccgtgtactattgtgcctctggcgtgtacagcttcgactacagaggccagggcaccctggtcacagtctcttctggtaccggcggaggcggatctggcggcggaggtagcggtggcggaggatctgaattcgacatccagatgacacagagccctagcagcctgtctgccagcgtgggagacagagtgaccatcacatgcaaggccagccagagcgtgtccaacgacgtgacctggtatcagcagaagcctggacaggcccctaagctgctgatctacagcgccagcaacagatacagcggagtgcccgccagattttccggctctggctacggcaccgagttcacctttaccatcagcagcgtgcagagcgaggacttcgccgtgtacttctgccagcaagactacagcagcttcggccagggcaccaagctggaaatcaagagactcgaggacctgaagaacgtgttcccacctgaggtggccgtgttcgagcctagcgaggccgagatcagccacacccagaaagccaccctcgtgtgcctggctaccggcttctaccccgaccatgtggaactgtcttggtgggtcaacggcaaagaggtgcacagcggcgtgtgtaccgacccccagccactgaaagaacagcccgccctgaacgacagccggtactgcctgagcagcagactgagagtgtccgccaccttctggcagaacccccggaaccacttcagatgccaggtgcagttctacggcctgagcgagaacgacgagtggacccaggacagagccaagcccgtgacccagatcgtgtctgccgaagcctggggcagagccgattgcggctttaccagcgagagctaccagcagggcgtgctgagcgccaccaacctgagcgtgatcggcttcagaatcctgctgctgaaagtggccggctttaacctgctgatgaccctgcggctgtggtccagcagggccaagcgatctggatctggagcaacaaacttctcactactcaaacaagcaggtgacgtggaggagaatcccgggcctactagtatggactggatttggcgcatccttttccttgtcggcgctgctaccggcgcgcattccgggccccagctccagctgcaagagtctggacctggcctggtcaagcctagcgagacactgagcctgacctgtaccgtgtccggcgatagcatcagcagcggcgattactactggggctggatcagacagcctcctggcaaaggactggaatggatcggccacatctactacagcggcgtgacctactacaaccccagcctgaagtccagagtgaccatcagcgtggacaccagccggaaccagttctccctgaagctgtctagcgtgacagccgccgataccgccgtgtactactgcaccagagaggacagcagcaactggcggagtagaggccagggaacactggtcacagttagctctggatccggcggaggcggaagtggaggcggaggatctggcggcggaggctctttcgaacaggtgcagctggtggaatctggacctggcgtggtgcagcctggcagaagcctgagaatcagctgtgccgtgtccggcttcagcgtgaccaactacggcgtgcactgggtgcgccagccacctggaaaaggactggaatggctgggcgtgatctgggctggcggcatcaccaactacaacagcgccttcatgtcccggctgaccatctccaaggacaacagcaagaacaccgtgtacctccagatgaacagcctgcgggccgaggacaccgccatgtactactgtgcttccagaggcggccactacggctacgccctggattattggggccagggaaccctcgtgaccgtgtcctctacgcgtatccagaaccctgatcctgccgtgtaccagctgcgggatagcaagagcagcgacaagagcgtgtgtctgttcaccgacttcgacagccagaccaacgtgtcccagagcaaggactccgacgtgtacatcaccgataagtgcgtgctggacatgcggagcatggacttcaagagcaactccgccgtggcctggtccaacaagtccgatttcgcctgcgccaacgccttcaacaacagcattatccccgaggacacattcttcccaagccccgagagcagctgcgacgtgaagctggtggaaaagagcttcgagacagacaccaacctgaacttccagatcctgtacgagatcctgctgggcaaggccaccctgtacgccgtgctggtgtctgccctggtgctgatggctatggtcaagcggaaggacagccgggga

SEQ ID NO: 35677 - DNA, 2679 bp, synthetic construct
  source 1..2679: mol_type = other DNA
atggccttaccagtgaccgccttgctcctgccgctggccttgctgctccacgccgccaggccggaagtgcagctggttgaatctggcggaggactggttcagcctggcggatctctgagactgtcttgtgccgccagcggcttcagcttcagcgacttttggatgagctgggtccgacaggcccctggcaaaggacttgaatgggtcgccacaatcagccaggccggcagcgagaaggactacgtggactctgtgaagggcagattcaccatcagccgggacaacgccaagaagtccctgtacctccagatgaacagcctgagagccgaggacaccgccgtgtactattgtgcctctggcgtgtacagcttcgactacagaggccagggcaccctggtcacagtctcttctggtaccggcggaggcggatctggcggcggaggtagcggtggcggaggatctgaattcgacatccagatgacacagagccctagcagcctgtctgccagcgtgggagacagagtgaccatcacatgcaaggccagccagagcgtgtccaacgacgtgacctggtatcagcagaagcctggacaggcccctaagctgctgatctacagcgccagcaacagatacagcggagtgcccgccagattttccggctctggctacggcaccgagttcacctttaccatcagcagcgtgcagagcgaggacttcgccgtgtacttctgccagcaagactacagcagcttcggccagggcaccaagctggaaatcaagagactcgagatccagaaccctgatcctgccgtgtaccagctgcgggatagcaagagcagcgacaagagcgtgtgtctgttcaccgacttcgacagccagaccaacgtgtcccagagcaaggactccgacgtgtacatcaccgataagtgcgtgctggacatgcggagcatggacttcaagagcaactccgccgtggcctggtccaacaagtccgatttcgcctgcgccaacgccttcaacaacagcattatccccgaggacacattcttcccaagccccgagagcagctgcgacgtgaagctggtggaaaagagcttcgagacagacaccaacctgaacttccagatcctgtacgagatcctgctgggcaaggccaccctgtacgccgtgctggtgtctgccctggtgctgatggctatggtcaagcggaaggacagccggggacgcgccaagagaagcggatctggcgtgaagcagaccctgaatttcgacctgctgaagctggctggcgacgtggaatccaacccaggccctactagtatggactggatttggcgcatccttttccttgtcggcgctgctaccggcgcgcattccgggccccagctccagctgcaagagtctggacctggcctggtcaagcctagcgagacactgagcctgacctgtaccgtgtccggcgatagcatcagcagcggcgattactactggggctggatcagacagcctcctggcaaaggactggaatggatcggccacatctactacagcggcgtgacctactacaaccccagcctgaagtccagagtgaccatcagcgtggacaccagccggaaccagttctccctgaagctgtctagcgtgacagccgccgataccgccgtgtactactgcaccagagaggacagcagcaactggcggagtagaggccagggaacactggtcacagttagctctggatccggcggaggcggaagtggaggcggaggatctggcggcggaggctctttcgaacaggtgcagctggtggaatctggacctggcgtggtgcagcctggcagaagcctgagaatcagctgtgccgtgtccggcttcagcgtgaccaactacggcgtgcactgggtgcgccagccacctggaaaaggactggaatggctgggcgtgatctgggctggcggcatcaccaactacaacagcgccttcatgtcccggctgaccatctccaaggacaacagcaagaacaccgtgtacctccagatgaacagcctgcgggccgaggacaccgccatgtactactgtgcttccagaggcggccactacggctacgccctggattattggggccagggaaccctcgtgaccgtgtcctctacgcgtgaggacctgaagaacgtgttcccacctgaggtggccgtgttcgagcctagcgaggccgagatcagccacacccagaaagccaccctcgtgtgcctggctaccggcttctaccccgaccatgtggaactgtcttggtgggtcaacggcaaagaggtgcacagcggcgtgtgtaccgacccccagccactgaaagaacagcccgccctgaacgacagccggtactgcctgagcagcagactgagagtgtccgccaccttctggcagaacccccggaaccacttcagatgccaggtgcagttctacggcctgagcgagaacgacgagtggacccaggacagagccaagcccgtgacccagatcgtgtctgccgaagcctggggcagagccgattgcggctttaccagcgagagctaccagcagggcgtgctgagcgccaccaacctgagcgtgatcggcttcagaatcctgctgctgaaagtggccggctttaacctgctgatgaccctgcggctgtggtccagc

SEQ ID NO: 35678 - DNA, 2163 bp, synthetic construct
  source 1..2163: mol_type = other DNA
atggccttaccagtgaccgccttgctcctgccgctggccttgctgctccacgccgccaggccggacatccagatgacacagagccctagcagcctgtctgccagcgtgggagacagagtgaccatcacatgcaaggccagccagagcgtgtccaacgacgtgacctggtatcagcagaagcctggacaggcccctaagctgctgatctacagcgccagcaacagatacagcggagtgcccgccagattttccggctctggctacggcaccgagttcacctttaccatcagcagcgtgcagagcgaggacttcgccgtgtacttctgccagcaagactacagcagcttcggccagggcaccaagctggaaatcaagagactcgaggacctgaagaacgtgttcccacctgaggtggccgtgttcgagcctagcgaggccgagatcagccacacccagaaagccaccctcgtgtgcctggctaccggcttctaccccgaccatgtggaactgtcttggtgggtcaacggcaaagaggtgcacagcggcgtgtgtaccgacccccagccactgaaagaacagcccgccctgaacgacagccggtactgcctgagcagcagactgagagtgtccgccaccttctggcagaacccccggaaccacttcagatgccaggtgcagttctacggcctgagcgagaacgacgagtggacccaggacagagccaagcccgtgacccagatcgtgtctgccgaagcctggggcagagccgatgatgtgattaagatccactggcaggaaaagaagtccaacaccatcctgggcagccaggaaggcaacaccatgaagaccaacgacacctacatgaagttcagctggctgaccgtgcccgagaagtccctggacaaagaacacagatgcatcgtgcggcacgaaaacaacaagaacggcgtggaccaggaaatcatcttcccacccatcaagaccgatgtgattacaatggaccccaaggacaactgctccaaggacgccaacgataccctgctgctccagctgaccaacaccagcgcctactacatgtacttgttgctgctgctgaagtccgtggtgtacttcgccatcatcacatgctgcctgctgatggctatggtcaagcggaaggacagccggggaagggccaagcgatctggatctggagcaacaaacttctcactactcaaacaagcaggtgacgtggaggagaatcccgggcctactagtatggactggatttggcgcatccttttccttgtcggcgctgctaccggcgcgcattccttcgaacaggtgcagctggtggaatctggacctggcgtggtgcagcctggcagaagcctgagaatcagctgtgccgtgtccggcttcagcgtgaccaactacggcgtgcactgggtgcgccagccacctggaaaaggactggaatggctgggcgtgatctgggctggcggcatcaccaactacaacagcgccttcatgtcccggctgaccatctccaaggacaacagcaagaacaccgtgtacctccagatgaacagcctgcgggccgaggacaccgccatgtactactgtgcttccagaggcggccactacggctacgccctggattattggggccagggaaccctcgtgaccgtgtcctctacgcgtatccagaaccctgatcctgccgtgtaccagctgcgggatagcaagagcagcgacaagagcgtgtgtctgttcaccgacttcgacagccagaccaacgtgtcccagagcaaggactccgacgtgtacatcaccgataagtgcgtgctggacatgcggagcatggacttcaagagcaactccgccgtggcctggtccaacaagtccgatttcgcctgcgccaacgccttcaacaacagcattatccccgaggacacattcttcccaagccccgagagcagcgactccaccgaccacgtgaagcccaaagagacagagaacaccaagcagcccagcaagagctgccacaagcccaaggccatcgtgcacaccgagaaagtgaacatgatgagcctgaccgtgctgggcctgcggatgctgttcgccaaaaccgtggccgtgaacttcctgctgaccgccaagctgttcttcctcctcaccgcc

SEQ ID NO: 35679 - DNA, 2175 bp, synthetic construct
  source 1..2175: mol_type = other DNA
atggccttaccagtgaccgccttgctcctgccgctggccttgctgctccacgccgccaggccggacatccagatgacacagagccctagcagcctgtctgccagcgtgggagacagagtgaccatcacatgcaaggccagccagagcgtgtccaacgacgtgacctggtatcagcagaagcctggacaggcccctaagctgctgatctacagcgccagcaacagatacagcggagtgcccgccagattttccggctctggctacggcaccgagttcacctttaccatcagcagcgtgcagagcgaggacttcgccgtgtacttctgccagcaagactacagcagcttcggccagggcaccaagctggaaatcaagagactcgagatccagaaccctgatcctgccgtgtaccagctgcgggatagcaagagcagcgacaagagcgtgtgtctgttcaccgacttcgacagccagaccaacgtgtcccagagcaaggactccgacgtgtacatcaccgataagtgcgtgctggacatgcggagcatggacttcaagagcaactccgccgtggcctggtccaacaagtccgatttcgcctgcgccaacgccttcaacaacagcattatccccgaggacacattcttcccaagccccgagagcagcgactccaccgaccacgtgaagcccaaagagacagagaacaccaagcagcccagcaagagctgccacaagcccaaggccatcgtgcacaccgagaaagtgaacatgatgagcctgaccgtgctgggcctgcggatgctgttcgccaaaaccgtggccgtgaacttcctgctgaccgccaagctgttcttcctcctcaccgcccgcgccaagagaagcggatctggcgtgaagcagaccctgaatttcgacctgctgaagctggctggcgacgtggaatccaacccaggccctactagtatggactggatttggcgcatccttttccttgtcggcgctgctaccggcgcgcattccttcgaacaggtgcagctggtggaatctggacctggcgtggtgcagcctggcagaagcctgagaatcagctgtgccgtgtccggcttcagcgtgaccaactacggcgtgcactgggtgcgccagccacctggaaaaggactggaatggctgggcgtgatctgggctggcggcatcaccaactacaacagcgccttcatgtcccggctgaccatctccaaggacaacagcaagaacaccgtgtacctccagatgaacagcctgcgggccgaggacaccgccatgtactactgtgcttccagaggcggccactacggctacgccctggattattggggccagggaaccctcgtgaccgtgtcctctacgcgtgaggacctgaagaacgtgttcccacctgaggtggccgtgttcgagcctagcgaggccgagatcagccacacccagaaagccaccctcgtgtgcctggctaccggcttctaccccgaccatgtggaactgtcttggtgggtcaacggcaaagaggtgcacagcggcgtgtgtaccgacccccagccactgaaagaacagcccgccctgaacgacagccggtactgcctgagcagcagactgagagtgtccgccaccttctggcagaacccccggaaccacttcagatgccaggtgcagttctacggcctgagcgagaacgacgagtggacccaggacagagccaagcccgtgacccagatcgtgtctgccgaagcctggggcagagccgatgatgtgattaagatccactggcaggaaaagaagtccaacaccatcctgggcagccaggaaggcaacaccatgaagaccaacgacacctacatgaagttcagctggctgaccgtgcccgagaagtccctggacaaagaacacagatgcatcgtgcggcacgaaaacaacaagaacggcgtggaccaggaaatcatcttcccacccatcaagaccgatgtgattacaatggaccccaaggacaactgctccaaggacgccaacgataccctgctgctccagctgaccaacaccagcgcctactacatgtacttgttgctgctgctgaagtccgtggtgtacttcgccatcatcacatgctgcctgctgatggctatggtcaagcggaaggacagccgggga

SEQ ID NO: 35680 - DNA, 2568 bp, synthetic construct
  source 1..2568: mol_type = other DNA
atggccttaccagtgaccgccttgctcctgccgctggccttgctgctccacgccgccaggccggaagtgcagctggttgaatctggcggaggactggttcagcctggcggatctctgagactgtcttgtgccgccagcggcttcagcttcagcgacttttggatgagctgggtccgacaggcccctggcaaaggacttgaatgggtcgccacaatcagccaggccggcagcgagaaggactacgtggactctgtgaagggcagattcaccatcagccgggacaacgccaagaagtccctgtacctccagatgaacagcctgagagccgaggacaccgccgtgtactattgtgcctctggcgtgtacagcttcgactacagaggccagggcaccctggtcacagtctcttctggtaccggcggaggcggatctggcggcggaggtagcggtggcggaggatctgaattcgacatccagatgacacagagccctagcagcctgtctgccagcgtgggagacagagtgaccatcacatgcaaggccagccagagcgtgtccaacgacgtgacctggtatcagcagaagcctggacaggcccctaagctgctgatctacagcgccagcaacagatacagcggagtgcccgccagattttccggctctggctacggcaccgagttcacctttaccatcagcagcgtgcagagcgaggacttcgccgtgtacttctgccagcaagactacagcagcttcggccagggcaccaagctggaaatcaagagactcgaggacctgaagaacgtgttcccacctgaggtggccgtgttcgagcctagcgaggccgagatcagccacacccagaaagccaccctcgtgtgcctggctaccggcttctaccccgaccatgtggaactgtcttggtgggtcaacggcaaagaggtgcacagcggcgtgtgtaccgacccccagccactgaaagaacagcccgccctgaacgacagccggtactgcctgagcagcagactgagagtgtccgccaccttctggcagaacccccggaaccacttcagatgccaggtgcagttctacggcctgagcgagaacgacgagtggacccaggacagagccaagcccgtgacccagatcgtgtctgccgaagcctggggcagagccgatgatgtgattaagatccactggcaggaaaagaagtccaacaccatcctgggcagccaggaaggcaacaccatgaagaccaacgacacctacatgaagttcagctggctgaccgtgcccgagaagtccctggacaaagaacacagatgcatcgtgcggcacgaaaacaacaagaacggcgtggaccaggaaatcatcttcccacccatcaagaccgatgtgattacaatggaccccaaggacaactgctccaaggacgccaacgataccctgctgctccagctgaccaacaccagcgcctactacatgtacttgttgctgctgctgaagtccgtggtgtacttcgccatcatcacatgctgcctgctgatggctatggtcaagcggaaggacagccggggaagggccaagcgatctggatctggagcaacaaacttctcactactcaaacaagcaggtgacgtggaggagaatcccgggcctactagtatggactggatttggcgcatccttttccttgtcggcgctgctaccggcgcgcattccttcgaacaggtgcagctggtggaatctggacctggcgtggtgcagcctggcagaagcctgagaatcagctgtgccgtgtccggcttcagcgtgaccaactacggcgtgcactgggtgcgccagccacctggaaaaggactggaatggctgggcgtgatctgggctggcggcatcaccaactacaacagcgccttcatgtcccggctgaccatctccaaggacaacagcaagaacaccgtgtacctccagatgaacagcctgcgggccgaggacaccgccatgtactactgtgcttccagaggcggccactacggctacgccctggattattggggccagggaaccctcgtgaccgtgtcctctacgcgtatccagaaccctgatcctgccgtgtaccagctgcgggatagcaagagcagcgacaagagcgtgtgtctgttcaccgacttcgacagccagaccaacgtgtcccagagcaaggactccgacgtgtacatcaccgataagtgcgtgctggacatgcggagcatggacttcaagagcaactccgccgtggcctggtccaacaagtccgatttcgcctgcgccaacgccttcaacaacagcattatccccgaggacacattcttcccaagccccgagagcagcgactccaccgaccacgtgaagcccaaagagacagagaacaccaagcagcccagcaagagctgccacaagcccaaggccatcgtgcacaccgagaaagtgaacatgatgagcctgaccgtgctgggcctgcggatgctgttcgccaaaaccgtggccgtgaacttcctgctgaccgccaagctgttcttcctcctcaccgcc

SEQ ID NO: 35681 - DNA, 2580 bp, synthetic construct
  source 1..2580: mol_type = other DNA
atggccttaccagtgaccgccttgctcctgccgctggccttgctgctccacgccgccaggccggaagtgcagctggttgaatctggcggaggactggttcagcctggcggatctctgagactgtcttgtgccgccagcggcttcagcttcagcgacttttggatgagctgggtccgacaggcccctggcaaaggacttgaatgggtcgccacaatcagccaggccggcagcgagaaggactacgtggactctgtgaagggcagattcaccatcagccgggacaacgccaagaagtccctgtacctccagatgaacagcctgagagccgaggacaccgccgtgtactattgtgcctctggcgtgtacagcttcgactacagaggccagggcaccctggtcacagtctcttctggtaccggcggaggcggatctggcggcggaggtagcggtggcggaggatctgaattcgacatccagatgacacagagccctagcagcctgtctgccagcgtgggagacagagtgaccatcacatgcaaggccagccagagcgtgtccaacgacgtgacctggtatcagcagaagcctggacaggcccctaagctgctgatctacagcgccagcaacagatacagcggagtgcccgccagattttccggctctggctacggcaccgagttcacctttaccatcagcagcgtgcagagcgaggacttcgccgtgtacttctgccagcaagactacagcagcttcggccagggcaccaagctggaaatcaagagactcgagatccagaaccctgatcctgccgtgtaccagctgcgggatagcaagagcagcgacaagagcgtgtgtctgttcaccgacttcgacagccagaccaacgtgtcccagagcaaggactccgacgtgtacatcaccgataagtgcgtgctggacatgcggagcatggacttcaagagcaactccgccgtggcctggtccaacaagtccgatttcgcctgcgccaacgccttcaacaacagcattatccccgaggacacattcttcccaagccccgagagcagcgactccaccgaccacgtgaagcccaaagagacagagaacaccaagcagcccagcaagagctgccacaagcccaaggccatcgtgcacaccgagaaagtgaacatgatgagcctgaccgtgctgggcctgcggatgctgttcgccaaaaccgtggccgtgaacttcctgctgaccgccaagctgttcttcctcctcaccgcccgcgccaagagaagcggatctggcgtgaagcagaccctgaatttcgacctgctgaagctggctggcgacgtggaatccaacccaggccctactagtatggactggatttggcgcatccttttccttgtcggcgctgctaccggcgcgcattccttcgaacaggtgcagctggtggaatctggacctggcgtggtgcagcctggcagaagcctgagaatcagctgtgccgtgtccggcttcagcgtgaccaactacggcgtgcactgggtgcgccagccacctggaaaaggactggaatggctgggcgtgatctgggctggcggcatcaccaactacaacagcgccttcatgtcccggctgaccatctccaaggacaacagcaagaacaccgtgtacctccagatgaacagcctgcgggccgaggacaccgccatgtactactgtgcttccagaggcggccactacggctacgccctggattattggggccagggaaccctcgtgaccgtgtcctctacgcgtgaggacctgaagaacgtgttcccacctgaggtggccgtgttcgagcctagcgaggccgagatcagccacacccagaaagccaccctcgtgtgcctggctaccggcttctaccccgaccatgtggaactgtcttggtgggtcaacggcaaagaggtgcacagcggcgtgtgtaccgacccccagccactgaaagaacagcccgccctgaacgacagccggtactgcctgagcagcagactgagagtgtccgccaccttctggcagaacccccggaaccacttcagatgccaggtgcagttctacggcctgagcgagaacgacgagtggacccaggacagagccaagcccgtgacccagatcgtgtctgccgaagcctggggcagagccgatgatgtgattaagatccactggcaggaaaagaagtccaacaccatcctgggcagccaggaaggcaacaccatgaagaccaacgacacctacatgaagttcagctggctgaccgtgcccgagaagtccctggacaaagaacacagatgcatcgtgcggcacgaaaacaacaagaacggcgtggaccaggaaatcatcttcccacccatcaagaccgatgtgattacaatggaccccaaggacaactgctccaaggacgccaacgataccctgctgctccagctgaccaacaccagcgcctactacatgtacttgttgctgctgctgaagtccgtggtgtacttcgccatcatcacatgctgcctgctgatggctatggtcaagcggaaggacagccgggga

SEQ ID NO: 35682 - DNA, 2979 bp, synthetic construct
  source 1..2979: mol_type = other DNA
atggccttaccagtgaccgccttgctcctgccgctggccttgctgctccacgccgccaggccggaagtgcagctggttgaatctggcggaggactggttcagcctggcggatctctgagactgtcttgtgccgccagcggcttcagcttcagcgacttttggatgagctgggtccgacaggcccctggcaaaggacttgaatgggtcgccacaatcagccaggccggcagcgagaaggactacgtggactctgtgaagggcagattcaccatcagccgggacaacgccaagaagtccctgtacctccagatgaacagcctgagagccgaggacaccgccgtgtactattgtgcctctggcgtgtacagcttcgactacagaggccagggcaccctggtcacagtctcttctggtaccggcggaggcggatctggcggcggaggtagcggtggcggaggatctgaattcgacatccagatgacacagagccctagcagcctgtctgccagcgtgggagacagagtgaccatcacatgcaaggccagccagagcgtgtccaacgacgtgacctggtatcagcagaagcctggacaggcccctaagctgctgatctacagcgccagcaacagatacagcggagtgcccgccagattttccggctctggctacggcaccgagttcacctttaccatcagcagcgtgcagagcgaggacttcgccgtgtacttctgccagcaagactacagcagcttcggccagggcaccaagctggaaatcaagagactcgaggacctgaagaacgtgttcccacctgaggtggccgtgttcgagcctagcgaggccgagatcagccacacccagaaagccaccctcgtgtgcctggctaccggcttctaccccgaccatgtggaactgtcttggtgggtcaacggcaaagaggtgcacagcggcgtgtgtaccgacccccagccactgaaagaacagcccgccctgaacgacagccggtactgcctgagcagcagactgagagtgtccgccaccttctggcagaacccccggaaccacttcagatgccaggtgcagttctacggcctgagcgagaacgacgagtggacccaggacagagccaagcccgtgacccagatcgtgtctgccgaagcctggggcagagccgatgatgtgattaagatccactggcaggaaaagaagtccaacaccatcctgggcagccaggaaggcaacaccatgaagaccaacgacacctacatgaagttcagctggctgaccgtgcccgagaagtccctggacaaagaacacagatgcatcgtgcggcacgaaaacaacaagaacggcgtggaccaggaaatcatcttcccacccatcaagaccgatgtgattacaatggaccccaaggacaactgctccaaggacgccaacgataccctgctgctccagctgaccaacaccagcgcctactacatgtacttgttgctgctgctgaagtccgtggtgtacttcgccatcatcacatgctgcctgctgatggctatggtcaagcggaaggacagccggggaagggccaagcgatctggatctggagcaacaaacttctcactactcaaacaagcaggtgacgtggaggagaatcccgggcctactagtatggactggatttggcgcatccttttccttgtcggcgctgctaccggcgcgcattccgggccccagctccagctgcaagagtctggacctggcctggtcaagcctagcgagacactgagcctgacctgtaccgtgtccggcgatagcatcagcagcggcgattactactggggctggatcagacagcctcctggcaaaggactggaatggatcggccacatctactacagcggcgtgacctactacaaccccagcctgaagtccagagtgaccatcagcgtggacaccagccggaaccagttctccctgaagctgtctagcgtgacagccgccgataccgccgtgtactactgcaccagagaggacagcagcaactggcggagtagaggccagggaacactggtcacagttagctctggatccggcggaggcggaagtggaggcggaggatctggcggcggaggctctttcgaacaggtgcagctggtggaatctggacctggcgtggtgcagcctggcagaagcctgagaatcagctgtgccgtgtccggcttcagcgtgaccaactacggcgtgcactgggtgcgccagccacctggaaaaggactggaatggctgggcgtgatctgggctggcggcatcaccaactacaacagcgccttcatgtcccggctgaccatctccaaggacaacagcaagaacaccgtgtacctccagatgaacagcctgcgggccgaggacaccgccatgtactactgtgcttccagaggcggccactacggctacgccctggattattggggccagggaaccctcgtgaccgtgtcctctacgcgtatccagaaccctgatcctgccgtgtaccagctgcgggatagcaagagcagcgacaagagcgtgtgtctgttcaccgacttcgacagccagaccaacgtgtcccagagcaaggactccgacgtgtacatcaccgataagtgcgtgctggacatgcggagcatggacttcaagagcaactccgccgtggcctggtccaacaagtccgatttcgcctgcgccaacgccttcaacaacagcattatccccgaggacacattcttcccaagccccgagagcagcgactccaccgaccacgtgaagcccaaagagacagagaacaccaagcagcccagcaagagctgccacaagcccaaggccatcgtgcacaccgagaaagtgaacatgatgagcctgaccgtgctgggcctgcggatgctgttcgccaaaaccgtggccgtgaacttcctgctgaccgccaagctgttcttcctcctcaccgcc

SEQ ID NO: 35683 - DNA, 2991 bp, synthetic construct
  source 1..2991: mol_type = other DNA
atggccttaccagtgaccgccttgctcctgccgctggccttgctgctccacgccgccaggccggaagtgcagctggttgaatctggcggaggactggttcagcctggcggatctctgagactgtcttgtgccgccagcggcttcagcttcagcgacttttggatgagctgggtccgacaggcccctggcaaaggacttgaatgggtcgccacaatcagccaggccggcagcgagaaggactacgtggactctgtgaagggcagattcaccatcagccgggacaacgccaagaagtccctgtacctccagatgaacagcctgagagccgaggacaccgccgtgtactattgtgcctctggcgtgtacagcttcgactacagaggccagggcaccctggtcacagtctcttctggtaccggcggaggcggatctggcggcggaggtagcggtggcggaggatctgaattcgacatccagatgacacagagccctagcagcctgtctgccagcgtgggagacagagtgaccatcacatgcaaggccagccagagcgtgtccaacgacgtgacctggtatcagcagaagcctggacaggcccctaagctgctgatctacagcgccagcaacagatacagcggagtgcccgccagattttccggctctggctacggcaccgagttcacctttaccatcagcagcgtgcagagcgaggacttcgccgtgtacttctgccagcaagactacagcagcttcggccagggcaccaagctggaaatcaagagactcgagatccagaaccctgatcctgccgtgtaccagctgcgggatagcaagagcagcgacaagagcgtgtgtctgttcaccgacttcgacagccagaccaacgtgtcccagagcaaggactccgacgtgtacatcaccgataagtgcgtgctggacatgcggagcatggacttcaagagcaactccgccgtggcctggtccaacaagtccgatttcgcctgcgccaacgccttcaacaacagcattatccccgaggacacattcttcccaagccccgagagcagcgactccaccgaccacgtgaagcccaaagagacagagaacaccaagcagcccagcaagagctgccacaagcccaaggccatcgtgcacaccgagaaagtgaacatgatgagcctgaccgtgctgggcctgcggatgctgttcgccaaaaccgtggccgtgaacttcctgctgaccgccaagctgttcttcctcctcaccgcccgcgccaagagaagcggatctggcgtgaagcagaccctgaatttcgacctgctgaagctggctggcgacgtggaatccaacccaggccctactagtatggactggatttggcgcatccttttccttgtcggcgctgctaccggcgcgcattccgggccccagctccagctgcaagagtctggacctggcctggtcaagcctagcgagacactgagcctgacctgtaccgtgtccggcgatagcatcagcagcggcgattactactggggctggatcagacagcctcctggcaaaggactggaatggatcggccacatctactacagcggcgtgacctactacaaccccagcctgaagtccagagtgaccatcagcgtggacaccagccggaaccagttctccctgaagctgtctagcgtgacagccgccgataccgccgtgtactactgcaccagagaggacagcagcaactggcggagtagaggccagggaacactggtcacagttagctctggatccggcggaggcggaagtggaggcggaggatctggcggcggaggctctttcgaacaggtgcagctggtggaatctggacctggcgtggtgcagcctggcagaagcctgagaatcagctgtgccgtgtccggcttcagcgtgaccaactacggcgtgcactgggtgcgccagccacctggaaaaggactggaatggctgggcgtgatctgggctggcggcatcaccaactacaacagcgccttcatgtcccggctgaccatctccaaggacaacagcaagaacaccgtgtacctccagatgaacagcctgcgggccgaggacaccgccatgtactactgtgcttccagaggcggccactacggctacgccctggattattggggccagggaaccctcgtgaccgtgtcctctacgcgtgaggacctgaagaacgtgttcccacctgaggtggccgtgttcgagcctagcgaggccgagatcagccacacccagaaagccaccctcgtgtgcctggctaccggcttctaccccgaccatgtggaactgtcttggtgggtcaacggcaaagaggtgcacagcggcgtgtgtaccgacccccagccactgaaagaacagcccgccctgaacgacagccggtactgcctgagcagcagactgagagtgtccgccaccttctggcagaacccccggaaccacttcagatgccaggtgcagttctacggcctgagcgagaacgacgagtggacccaggacagagccaagcccgtgacccagatcgtgtctgccgaagcctggggcagagccgatgatgtgattaagatccactggcaggaaaagaagtccaacaccatcctgggcagccaggaaggcaacaccatgaagaccaacgacacctacatgaagttcagctggctgaccgtgcccgagaagtccctggacaaagaacacagatgcatcgtgcggcacgaaaacaacaagaacggcgtggaccaggaaatcatcttcccacccatcaagaccgatgtgattacaatggaccccaaggacaactgctccaaggacgccaacgataccctgctgctccagctgaccaacaccagcgcctactacatgtacttgttgctgctgctgaagtccgtggtgtacttcgccatcatcacatgctgcctgctgatggctatggtcaagcggaaggacagccgggga

SEQ ID NO: 35684 - DNA, 2157 bp, synthetic construct
  source 1..2157: mol_type = other DNA
atggccttaccagtgaccgccttgctcctgccgctggccttgctgctccacgccgccaggccggacatccagatgacacagagccctagcagcctgtctgccagcgtgggagacagagtgaccatcacatgcaaggccagccagagcgtgtccaacgacgtgacctggtatcagcagaagcctggacaggcccctaagctgctgatctacagcgccagcaacagatacagcggagtgcccgccagattttccggctctggctacggcaccgagttcacctttaccatcagcagcgtgcagagcgaggacttcgccgtgtacttctgccagcaagactacagcagcttcggccagggcaccaagctggaaatcaagagactcgaggacctgaagaacgtgttcccacctgaggtggccgtgttcgagcctagcgaggccgagatcagccacacccagaaagccaccctcgtgtgcctggctaccggcttctaccccgaccatgtggaactgtcttggtgggtcaacggcaaagaggtgcacagcggcgtgtgtaccgacccccagccactgaaagaacagcccgccctgaacgacagccggtactgcctgagcagcagactgagagtgtccgccaccttctggcagaacccccggaaccacttcagatgccaggtgcagttctacggcctgagcgagaacgacgagtggacccaggacagagccaagcccgtgacccagatcgtgtctgccgaagcctggggcagagccgatgatgtgattaagatccactggcaggaaaagaagtccaacaccatcctgggcagccaggaaggcaacaccatgaagaccaacgacacctacatgaagttcagctggctgaccgtgcccgagaagtccctggacaaagaacacagatgcatcgtgcggcacgaaaacaacaagaacggcgtggaccaggaaatcatcttcccacccatcaagaccgatgtgattacaatggaccccaaggacaactgctccaaggacgccaacgataccctgctgctccagctgaccaacaccagcgcctactacatgtacttgttgctgctgctgaagtccgtggtgtacttcgccatcatcacatgctgcctgctgcggagaaccgccttctgctgcaacggcgagaagtctagggccaagcgatctggatctggagcaacaaacttctcactactcaaacaagcaggtgacgtggaggagaatcccgggcctactagtatggactggatttggcgcatccttttccttgtcggcgctgctaccggcgcgcattccttcgaacaggtgcagctggtggaatctggacctggcgtggtgcagcctggcagaagcctgagaatcagctgtgccgtgtccggcttcagcgtgaccaactacggcgtgcactgggtgcgccagccacctggaaaaggactggaatggctgggcgtgatctgggctggcggcatcaccaactacaacagcgccttcatgtcccggctgaccatctccaaggacaacagcaagaacaccgtgtacctccagatgaacagcctgcgggccgaggacaccgccatgtactactgtgcttccagaggcggccactacggctacgccctggattattggggccagggaaccctcgtgaccgtgtcctctacgcgtatccagaaccctgatcctgccgtgtaccagctgcgggatagcaagagcagcgacaagagcgtgtgtctgttcaccgacttcgacagccagaccaacgtgtcccagagcaaggactccgacgtgtacatcaccgataagtgcgtgctggacatgcggagcatggacttcaagagcaactccgccgtggcctggtccaacaagtccgatttcgcctgcgccaacgccttcaacaacagcattatccccgaggacacattcttcccaagccccgagagcagcgactccaccgaccacgtgaagcccaaagagacagagaacaccaagcagcccagcaagagctgccacaagcccaaggccatcgtgcacaccgagaaagtgaacatgatgagcctgaccgtgctgggcctgcggatgctgttcgccaaaaccgtggccgtgaacttcctgctgaccgccaagctgttcttcctc

SEQ ID NO: 35685 - DNA, 2169 bp, synthetic construct
  source 1..2169: mol_type = other DNA
atggccttaccagtgaccgccttgctcctgccgctggccttgctgctccacgccgccaggccggacatccagatgacacagagccctagcagcctgtctgccagcgtgggagacagagtgaccatcacatgcaaggccagccagagcgtgtccaacgacgtgacctggtatcagcagaagcctggacaggcccctaagctgctgatctacagcgccagcaacagatacagcggagtgcccgccagattttccggctctggctacggcaccgagttcacctttaccatcagcagcgtgcagagcgaggacttcgccgtgtacttctgccagcaagactacagcagcttcggccagggcaccaagctggaaatcaagagactcgagatccagaaccctgatcctgccgtgtaccagctgcgggatagcaagagcagcgacaagagcgtgtgtctgttcaccgacttcgacagccagaccaacgtgtcccagagcaaggactccgacgtgtacatcaccgataagtgcgtgctggacatgcggagcatggacttcaagagcaactccgccgtggcctggtccaacaagtccgatttcgcctgcgccaacgccttcaacaacagcattatccccgaggacacattcttcccaagccccgagagcagcgactccaccgaccacgtgaagcccaaagagacagagaacaccaagcagcccagcaagagctgccacaagcccaaggccatcgtgcacaccgagaaagtgaacatgatgagcctgaccgtgctgggcctgcggatgctgttcgccaaaaccgtggccgtgaacttcctgctgaccgccaagctgttcttcctccgcgccaagagaagcggatctggcgtgaagcagaccctgaatttcgacctgctgaagctggctggcgacgtggaatccaacccaggccctactagtatggactggatttggcgcatccttttccttgtcggcgctgctaccggcgcgcattccttcgaacaggtgcagctggtggaatctggacctggcgtggtgcagcctggcagaagcctgagaatcagctgtgccgtgtccggcttcagcgtgaccaactacggcgtgcactgggtgcgccagccacctggaaaaggactggaatggctgggcgtgatctgggctggcggcatcaccaactacaacagcgccttcatgtcccggctgaccatctccaaggacaacagcaagaacaccgtgtacctccagatgaacagcctgcgggccgaggacaccgccatgtactactgtgcttccagaggcggccactacggctacgccctggattattggggccagggaaccctcgtgaccgtgtcctctacgcgtgaggacctgaagaacgtgttcccacctgaggtggccgtgttcgagcctagcgaggccgagatcagccacacccagaaagccaccctcgtgtgcctggctaccggcttctaccccgaccatgtggaactgtcttggtgggtcaacggcaaagaggtgcacagcggcgtgtgtaccgacccccagccactgaaagaacagcccgccctgaacgacagccggtactgcctgagcagcagactgagagtgtccgccaccttctggcagaacccccggaaccacttcagatgccaggtgcagttctacggcctgagcgagaacgacgagtggacccaggacagagccaagcccgtgacccagatcgtgtctgccgaagcctggggcagagccgatgatgtgattaagatccactggcaggaaaagaagtccaacaccatcctgggcagccaggaaggcaacaccatgaagaccaacgacacctacatgaagttcagctggctgaccgtgcccgagaagtccctggacaaagaacacagatgcatcgtgcggcacgaaaacaacaagaacggcgtggaccaggaaatcatcttcccacccatcaagaccgatgtgattacaatggaccccaaggacaactgctccaaggacgccaacgataccctgctgctccagctgaccaacaccagcgcctactacatgtacttgttgctgctgctgaagtccgtggtgtacttcgccatcatcacatgctgcctgctgcggagaaccgccttctgctgcaacggcgagaagtct

SEQ ID NO: 35686 - DNA, 2562 bp, synthetic construct
  source 1..2562: mol_type = other DNA
atggccttaccagtgaccgccttgctcctgccgctggccttgctgctccacgccgccaggccggaagtgcagctggttgaatctggcggaggactggttcagcctggcggatctctgagactgtcttgtgccgccagcggcttcagcttcagcgacttttggatgagctgggtccgacaggcccctggcaaaggacttgaatgggtcgccacaatcagccaggccggcagcgagaaggactacgtggactctgtgaagggcagattcaccatcagccgggacaacgccaagaagtccctgtacctccagatgaacagcctgagagccgaggacaccgccgtgtactattgtgcctctggcgtgtacagcttcgactacagaggccagggcaccctggtcacagtctcttctggtaccggcggaggcggatctggcggcggaggtagcggtggcggaggatctgaattcgacatccagatgacacagagccctagcagcctgtctgccagcgtgggagacagagtgaccatcacatgcaaggccagccagagcgtgtccaacgacgtgacctggtatcagcagaagcctggacaggcccctaagctgctgatctacagcgccagcaacagatacagcggagtgcccgccagattttccggctctggctacggcaccgagttcacctttaccatcagcagcgtgcagagcgaggacttcgccgtgtacttctgccagcaagactacagcagcttcggccagggcaccaagctggaaatcaagagactcgaggacctgaagaacgtgttcccacctgaggtggccgtgttcgagcctagcgaggccgagatcagccacacccagaaagccaccctcgtgtgcctggctaccggcttctaccccgaccatgtggaactgtcttggtgggtcaacggcaaagaggtgcacagcggcgtgtgtaccgacccccagccactgaaagaacagcccgccctgaacgacagccggtactgcctgagcagcagactgagagtgtccgccaccttctggcagaacccccggaaccacttcagatgccaggtgcagttctacggcctgagcgagaacgacgagtggacccaggacagagccaagcccgtgacccagatcgtgtctgccgaagcctggggcagagccgatgatgtgattaagatccactggcaggaaaagaagtccaacaccatcctgggcagccaggaaggcaacaccatgaagaccaacgacacctacatgaagttcagctggctgaccgtgcccgagaagtccctggacaaagaacacagatgcatcgtgcggcacgaaaacaacaagaacggcgtggaccaggaaatcatcttcccacccatcaagaccgatgtgattacaatggaccccaaggacaactgctccaaggacgccaacgataccctgctgctccagctgaccaacaccagcgcctactacatgtacttgttgctgctgctgaagtccgtggtgtacttcgccatcatcacatgctgcctgctgcggagaaccgccttctgctgcaacggcgagaagtctagggccaagcgatctggatctggagcaacaaacttctcactactcaaacaagcaggtgacgtggaggagaatcccgggcctactagtatggactggatttggcgcatccttttccttgtcggcgctgctaccggcgcgcattccttcgaacaggtgcagctggtggaatctggacctggcgtggtgcagcctggcagaagcctgagaatcagctgtgccgtgtccggcttcagcgtgaccaactacggcgtgcactgggtgcgccagccacctggaaaaggactggaatggctgggcgtgatctgggctggcggcatcaccaactacaacagcgccttcatgtcccggctgaccatctccaaggacaacagcaagaacaccgtgtacctccagatgaacagcctgcgggccgaggacaccgccatgtactactgtgcttccagaggcggccactacggctacgccctggattattggggccagggaaccctcgtgaccgtgtcctctacgcgtatccagaaccctgatcctgccgtgtaccagctgcgggatagcaagagcagcgacaagagcgtgtgtctgttcaccgacttcgacagccagaccaacgtgtcccagagcaaggactccgacgtgtacatcaccgataagtgcgtgctggacatgcggagcatggacttcaagagcaactccgccgtggcctggtccaacaagtccgatttcgcctgcgccaacgccttcaacaacagcattatccccgaggacacattcttcccaagccccgagagcagcgactccaccgaccacgtgaagcccaaagagacagagaacaccaagcagcccagcaagagctgccacaagcccaaggccatcgtgcacaccgagaaagtgaacatgatgagcctgaccgtgctgggcctgcggatgctgttcgccaaaaccgtggccgtgaacttcctgctgaccgccaagctgttcttcctc

SEQ ID NO: 35687 - DNA, 2973 bp, synthetic construct
  source 1..2973: mol_type = other DNA
atggccttaccagtgaccgccttgctcctgccgctggccttgctgctccacgccgccaggccggaagtgcagctggttgaatctggcggaggactggttcagcctggcggatctctgagactgtcttgtgccgccagcggcttcagcttcagcgacttttggatgagctgggtccgacaggcccctggcaaaggacttgaatgggtcgccacaatcagccaggccggcagcgagaaggactacgtggactctgtgaagggcagattcaccatcagccgggacaacgccaagaagtccctgtacctccagatgaacagcctgagagccgaggacaccgccgtgtactattgtgcctctggcgtgtacagcttcgactacagaggccagggcaccctggtcacagtctcttctggtaccggcggaggcggatctggcggcggaggtagcggtggcggaggatctgaattcgacatccagatgacacagagccctagcagcctgtctgccagcgtgggagacagagtgaccatcacatgcaaggccagccagagcgtgtccaacgacgtgacctggtatcagcagaagcctggacaggcccctaagctgctgatctacagcgccagcaacagatacagcggagtgcccgccagattttccggctctggctacggcaccgagttcacctttaccatcagcagcgtgcagagcgaggacttcgccgtgtacttctgccagcaagactacagcagcttcggccagggcaccaagctggaaatcaagagactcgaggacctgaagaacgtgttcccacctgaggtggccgtgttcgagcctagcgaggccgagatcagccacacccagaaagccaccctcgtgtgcctggctaccggcttctaccccgaccatgtggaactgtcttggtgggtcaacggcaaagaggtgcacagcggcgtgtgtaccgacccccagccactgaaagaacagcccgccctgaacgacagccggtactgcctgagcagcagactgagagtgtccgccaccttctggcagaacccccggaaccacttcagatgccaggtgcagttctacggcctgagcgagaacgacgagtggacccaggacagagccaagcccgtgacccagatcgtgtctgccgaagcctggggcagagccgatgatgtgattaagatccactggcaggaaaagaagtccaacaccatcctgggcagccaggaaggcaacaccatgaagaccaacgacacctacatgaagttcagctggctgaccgtgcccgagaagtccctggacaaagaacacagatgcatcgtgcggcacgaaaacaacaagaacggcgtggaccaggaaatcatcttcccacccatcaagaccgatgtgattacaatggaccccaaggacaactgctccaaggacgccaacgataccctgctgctccagctgaccaacaccagcgcctactacatgtacttgttgctgctgctgaagtccgtggtgtacttcgccatcatcacatgctgcctgctgcggagaaccgccttctgctgcaacggcgagaagtctagggccaagcgatctggatctggagcaacaaacttctcactactcaaacaagcaggtgacgtggaggagaatcccgggcctactagtatggactggatttggcgcatccttttccttgtcggcgctgctaccggcgcgcattccgggccccagctccagctgcaagagtctggacctggcctggtcaagcctagcgagacactgagcctgacctgtaccgtgtccggcgatagcatcagcagcggcgattactactggggctggatcagacagcctcctggcaaaggactggaatggatcggccacatctactacagcggcgtgacctactacaaccccagcctgaagtccagagtgaccatcagcgtggacaccagccggaaccagttctccctgaagctgtctagcgtgacagccgccgataccgccgtgtactactgcaccagagaggacagcagcaactggcggagtagaggccagggaacactggtcacagttagctctggatccggcggaggcggaagtggaggcggaggatctggcggcggaggctctttcgaacaggtgcagctggtggaatctggacctggcgtggtgcagcctggcagaagcctgagaatcagctgtgccgtgtccggcttcagcgtgaccaactacggcgtgcactgggtgcgccagccacctggaaaaggactggaatggctgggcgtgatctgggctggcggcatcaccaactacaacagcgccttcatgtcccggctgaccatctccaaggacaacagcaagaacaccgtgtacctccagatgaacagcctgcgggccgaggacaccgccatgtactactgtgcttccagaggcggccactacggctacgccctggattattggggccagggaaccctcgtgaccgtgtcctctacgcgtatccagaaccctgatcctgccgtgtaccagctgcgggatagcaagagcagcgacaagagcgtgtgtctgttcaccgacttcgacagccagaccaacgtgtcccagagcaaggactccgacgtgtacatcaccgataagtgcgtgctggacatgcggagcatggacttcaagagcaactccgccgtggcctggtccaacaagtccgatttcgcctgcgccaacgccttcaacaacagcattatccccgaggacacattcttcccaagccccgagagcagcgactccaccgaccacgtgaagcccaaagagacagagaacaccaagcagcccagcaagagctgccacaagcccaaggccatcgtgcacaccgagaaagtgaacatgatgagcctgaccgtgctgggcctgcggatgctgttcgccaaaaccgtggccgtgaacttcctgctgaccgccaagctgttcttcctc

SEQ ID NO: 35688 - DNA, 1851 bp, synthetic construct
  source 1..1851: mol_type = other DNA
atggccttaccagtgaccgccttgctcctgccgctggccttgctgctccacgccgccaggccggacatccagatgacacagagccctagcagcctgtctgccagcgtgggagacagagtgaccatcacatgcaaggccagccagagcgtgtccaacgacgtgacctggtatcagcagaagcctggacaggcccctaagctgctgatctacagcgccagcaacagatacagcggagtgcccgccagattttccggctctggctacggcaccgagttcacctttaccatcagcagcgtgcagagcgaggacttcgccgtgtacttctgccagcaagactacagcagcttcggccagggcaccaagctggaaatcaagagactcgaggacctgaagaacgtgttcccacctgaggtggccgtgttcgagcctagcgaggccgagatcagccacacccagaaagccaccctcgtgtgcctggctaccggcttctaccccgaccatgtggaactgtcttggtgggtcaacggcaaagaggtgcacagcggcgtgtctaccgacccccagccactgaaagaacagcccgccctgaacgacagccggtactgcctgagcagcagactgagagtgtccgccaccttctggcagaacccccggaaccacttcagatgccaggtgcagttctacggcctgagcgagaacgacgagtggacccaggacagagccaagcccgtgacccagatcgtgtctgccgaagcctggggcagagccgattgcgacgtgaagctggtggaaaagagcttcgagacagacaccaacctgaacttccagaacctgagcgtgatcggcttcagaatcctgctgctgaaagtggccggctttaacctgctgatgaccctgcggctgtggtccagcagggccaagcgatctggatctggagcaacaaacttctcactactcaaacaagcaggtgacgtggaggagaatcccgggcctactagtatggactggatttggcgcatccttttccttgtcggcgctgctaccggcgcgcattccttcgaacaggtgcagctggtggaatctggacctggcgtggtgcagcctggcagaagcctgagaatcagctgtgccgtgtccggcttcagcgtgaccaactacggcgtgcactgggtgcgccagccacctggaaaaggactggaatggctgggcgtgatctgggctggcggcatcaccaactacaacagcgccttcatgtcccggctgaccatctccaaggacaacagcaagaacaccgtgtacctccagatgaacagcctgcgggccgaggacaccgccatgtactactgtgcttccagaggcggccactacggctacgccctggattattggggccagggaaccctcgtgaccgtgtcctctacgcgtatccagaaccctgatcctgccgtgtaccagctgcgggatagcaagagcagcgacaagagcgtgtgtctgttcaccgacttcgacagccagaccaacgtgtcccagagcaaggactccgacgtgtacatcaccgataagaccgtgctggacatgcggagcatggacttcaagagcaactccgccgtggcctggtccaacaagtccgatttcgcctgcgccaacgccttcaacaacagcattatccccgaggacacattcttcccaagccccgagagcagctgcggctttaccagcgagagctaccagcagggcgtgctgagcgccaccatcctgtacgagatcctgctgggcaaggccaccctgtacgccgtgctggtgtctgccctggtgctgatggctatggtcaagcggaaggacagccgggga

SEQ ID NO: 35689 - DNA, 1851 bp, synthetic construct
  source 1..1851: mol_type = other DNA
atggccttaccagtgaccgccttgctcctgccgctggccttgctgctccacgccgccaggccggacatccagatgacacagagccctagcagcctgtctgccagcgtgggagacagagtgaccatcacatgcaaggccagccagagcgtgtccaacgacgtgacctggtatcagcagaagcctggacaggcccctaagctgctgatctacagcgccagcaacagatacagcggagtgcccgccagattttccggctctggctacggcaccgagttcacctttaccatcagcagcgtgcagagcgaggacttcgccgtgtacttctgccagcaagactacagcagcttcggccagggcaccaagctggaaatcaagagactcgaggacctgaagaacgtgttcccacctgaggtggccgtgttcgagcctagcgaggccgagatcagccacacccagaaagccaccctcgtgtgcctggctaccggcttctaccccgaccatgtggaactgtcttggtgggtcaacggcaaagaggtgcacagcggcgtgtctaccgacccccagccactgaaagaacagcccgccctgaacgacagccggtactgcctgagcagcagactgagagtgtccgccaccttctggcagaacccccggaaccacttcagatgccaggtgcagttctacggcctgagcgagaacgacgagtggacccaggacagagccaagcccgtgacccagatcgtgtctgccgaagcctggggcagagccgattgcggctttaccagcgagagctaccagcagggcgtgctgagcgccaccaacctgagcgtgatcggcttcagaatcctgctgctgaaagtggccggctttaacctgctgatgaccctgcggctgtggtccagcagggccaagcgatctggatctggagcaacaaacttctcactactcaaacaagcaggtgacgtggaggagaatcccgggcctactagtatggactggatttggcgcatccttttccttgtcggcgctgctaccggcgcgcattccttcgaacaggtgcagctggtggaatctggacctggcgtggtgcagcctggcagaagcctgagaatcagctgtgccgtgtccggcttcagcgtgaccaactacggcgtgcactgggtgcgccagccacctggaaaaggactggaatggctgggcgtgatctgggctggcggcatcaccaactacaacagcgccttcatgtcccggctgaccatctccaaggacaacagcaagaacaccgtgtacctccagatgaacagcctgcgggccgaggacaccgccatgtactactgtgcttccagaggcggccactacggctacgccctggattattggggccagggaaccctcgtgaccgtgtcctctacgcgtatccagaaccctgatcctgccgtgtaccagctgcgggatagcaagagcagcgacaagagcgtgtgtctgttcaccgacttcgacagccagaccaacgtgtcccagagcaaggactccgacgtgtacatcaccgataagaccgtgctggacatgcggagcatggacttcaagagcaactccgccgtggcctggtccaacaagtccgatttcgcctgcgccaacgccttcaacaacagcattatccccgaggacacattcttcccaagccccgagagcagctgcgacgtgaagctggtggaaaagagcttcgagacagacaccaacctgaacttccagatcctgtacgagatcctgctgggcaaggccaccctgtacgccgtgctggtgtctgccctggtgctgatggctatggtcaagcggaaggacagccgggga

SEQ ID NO: 35690 - DNA, 2163 bp, synthetic construct
  source 1..2163: mol_type = other DNA
atggccttaccagtgaccgccttgctcctgccgctggccttgctgctccacgccgccaggccggacatccagatgacacagagccctagcagcctgtctgccagcgtgggagacagagtgaccatcacatgcaaggccagccagagcgtgtccaacgacgtgacctggtatcagcagaagcctggacaggcccctaagctgctgatctacagcgccagcaacagatacagcggagtgcccgccagattttccggctctggctacggcaccgagttcacctttaccatcagcagcgtgcagagcgaggacttcgccgtgtacttctgccagcaagactacagcagcttcggccagggcaccaagctggaaatcaagagactcgaggacctgaagaacgtgttcccacctgaggtggccgtgttcgagcctagcgaggccgagatcagccacacccagaaagccaccctcgtgtgcctggctaccggcttctaccccgaccatgtggaactgtcttggtgggtcaacggcaaagaggtgcacagcggcgtgtctaccgacccccagccactgaaagaacagcccgccctgaacgacagccggtactgcctgagcagcagactgagagtgtccgccaccttctggcagaacccccggaaccacttcagatgccaggtgcagttctacggcctgagcgagaacgacgagtggacccaggacagagccaagcccgtgacccagatcgtgtctgccgaagcctggggcagagccgatgatgtgattaagatccactggcaggaaaagaagtccaacaccatcctgggcagccaggaaggcaacaccatgaagaccaacgacacctacatgaagttcagctggctgaccgtgcccgagaagtccctggacaaagaacacagatgcatcgtgcggcacgaaaacaacaagaacggcgtggaccaggaaatcatcttcccacccatcaagaccgatgtgattacaatggaccccaaggacaactgctccaaggacgccaacgataccctgctgctccagctgaccaacaccagcgcctactacatgtacttgttgctgctgctgaagtccgtggtgtacttcgccatcatcacatgctgcctgctgatggctatggtcaagcggaaggacagccggggaagggccaagcgatctggatctggagcaacaaacttctcactactcaaacaagcaggtgacgtggaggagaatcccgggcctactagtatggactggatttggcgcatccttttccttgtcggcgctgctaccggcgcgcattccttcgaacaggtgcagctggtggaatctggacctggcgtggtgcagcctggcagaagcctgagaatcagctgtgccgtgtccggcttcagcgtgaccaactacggcgtgcactgggtgcgccagccacctggaaaaggactggaatggctgggcgtgatctgggctggcggcatcaccaactacaacagcgccttcatgtcccggctgaccatctccaaggacaacagcaagaacaccgtgtacctccagatgaacagcctgcgggccgaggacaccgccatgtactactgtgcttccagaggcggccactacggctacgccctggattattggggccagggaaccctcgtgaccgtgtcctctacgcgtatccagaaccctgatcctgccgtgtaccagctgcgggatagcaagagcagcgacaagagcgtgtgtctgttcaccgacttcgacagccagaccaacgtgtcccagagcaaggactccgacgtgtacatcaccgataagaccgtgctggacatgcggagcatggacttcaagagcaactccgccgtggcctggtccaacaagtccgatttcgcctgcgccaacgccttcaacaacagcattatccccgaggacacattcttcccaagccccgagagcagcgactccaccgaccacgtgaagcccaaagagacagagaacaccaagcagcccagcaagagctgccacaagcccaaggccatcgtgcacaccgagaaagtgaacatgatgagcctgaccgtgctgggcctgcggatgctgttcgccaaaaccgtggccgtgaacttcctgctgaccgccaagctgttcttcctcctcaccgcc

SEQ ID NO: 35691 - DNA, 2157 bp, synthetic construct
  source 1..2157: mol_type = other DNA
atggccttaccagtgaccgccttgctcctgccgctggccttgctgctccacgccgccaggccggacatccagatgacacagagccctagcagcctgtctgccagcgtgggagacagagtgaccatcacatgcaaggccagccagagcgtgtccaacgacgtgacctggtatcagcagaagcctggacaggcccctaagctgctgatctacagcgccagcaacagatacagcggagtgcccgccagattttccggctctggctacggcaccgagttcacctttaccatcagcagcgtgcagagcgaggacttcgccgtgtacttctgccagcaagactacagcagcttcggccagggcaccaagctggaaatcaagagactcgaggacctgaagaacgtgttcccacctgaggtggccgtgttcgagcctagcgaggccgagatcagccacacccagaaagccaccctcgtgtgcctggctaccggcttctaccccgaccatgtggaactgtcttggtgggtcaacggcaaagaggtgcacagcggcgtgtctaccgacccccagccactgaaagaacagcccgccctgaacgacagccggtactgcctgagcagcagactgagagtgtccgccaccttctggcagaacccccggaaccacttcagatgccaggtgcagttctacggcctgagcgagaacgacgagtggacccaggacagagccaagcccgtgacccagatcgtgtctgccgaagcctggggcagagccgatgatgtgattaagatccactggcaggaaaagaagtccaacaccatcctgggcagccaggaaggcaacaccatgaagaccaacgacacctacatgaagttcagctggctgaccgtgcccgagaagtccctggacaaagaacacagatgcatcgtgcggcacgaaaacaacaagaacggcgtggaccaggaaatcatcttcccacccatcaagaccgatgtgattacaatggaccccaaggacaactgctccaaggacgccaacgataccctgctgctccagctgaccaacaccagcgcctactacatgtacttgttgctgctgctgaagtccgtggtgtacttcgccatcatcacatgctgcctgctgcggagaaccgccttctgctgcaacggcgagaagtctagggccaagcgatctggatctggagcaacaaacttctcactactcaaacaagcaggtgacgtggaggagaatcccgggcctactagtatggactggatttggcgcatccttttccttgtcggcgctgctaccggcgcgcattccttcgaacaggtgcagctggtggaatctggacctggcgtggtgcagcctggcagaagcctgagaatcagctgtgccgtgtccggcttcagcgtgaccaactacggcgtgcactgggtgcgccagccacctggaaaaggactggaatggctgggcgtgatctgggctggcggcatcaccaactacaacagcgccttcatgtcccggctgaccatctccaaggacaacagcaagaacaccgtgtacctccagatgaacagcctgcgggccgaggacaccgccatgtactactgtgcttccagaggcggccactacggctacgccctggattattggggccagggaaccctcgtgaccgtgtcctctacgcgtatccagaaccctgatcctgccgtgtaccagctgcgggatagcaagagcagcgacaagagcgtgtgtctgttcaccgacttcgacagccagaccaacgtgtcccagagcaaggactccgacgtgtacatcaccgataagaccgtgctggacatgcggagcatggacttcaagagcaactccgccgtggcctggtccaacaagtccgatttcgcctgcgccaacgccttcaacaacagcattatccccgaggacacattcttcccaagccccgagagcagcgactccaccgaccacgtgaagcccaaagagacagagaacaccaagcagcccagcaagagctgccacaagcccaaggccatcgtgcacaccgagaaagtgaacatgatgagcctgaccgtgctgggcctgcggatgctgttcgccaaaaccgtggccgtgaacttcctgctgaccgccaagctgttcttcctc

SEQ ID NO: 35692 - DNA, 2589 bp, synthetic construct
  source 1..2589: mol_type = other DNA
atggccttaccagtgaccgccttgctcctgccgctggccttgctgctccacgccgccaggccgctcgaggaggacctgaagaacgtgttcccacctgaggtggccgtgttcgagcctagcgaggccgagatcagccacacccagaaagccaccctcgtgtgcctggctaccggcttctaccccgaccatgtggaactgtcttggtgggtcaacggcaaagaggtgcacagcggcgtgtgtaccgacccccagccactgaaagaacagcccgccctgaacgacagccggtactgcctgagcagcagactgagagtgtccgccaccttctggcagaacccccggaaccacttcagatgccaggtgcagttctacggcctgagcgagaacgacgagtggacccaggacagagccaagcccgtgacccagatcgtgtctgccgaagcctggggcagagccgattgcggctttaccagcgagagctaccagcagggcgtgctgagcgccaccaacctgagcgtgatcggcttcagaatcctgctgctgaaagtggccggctttaacctgctgatgaccctgcggctgtggtccagcagggccaagcgatctggatctggagcaacaaacttctcactactcaaacaagcaggtgacgtggaggagaatcccgggcctactagcatggccttaccagtgaccgccttgctcctgccgctggccttgctgctccacgccgccaggccggacatccagatgacacagagccctagcagcctgtctgccagcgtgggagacagagtgaccatcacatgcaaggccagccagagcgtgtccaacgacgtgacctggtatcagcagaagcctggacaggcccctaagctgctgatctacagcgccagcaacagatacagcggagtgcccgccagattttccggctctggctacggcaccgagttcacctttaccatcagcagcgtgcagagcgaggacttcgccgtgtacttctgccagcaagactacagcagcttcggccagggcaccaagctggaaatcaagagaggcggaggcggaagtggaggcggaggatctggcggcggaggctctcaggtgcagctggtggaatctggacctggcgtggtgcagcctggcagaagcctgagaatcagctgtgccgtgtccggcttcagcgtgaccaactacggcgtgcactgggtgcgccagccacctggaaaaggactggaatggctgggcgtgatctgggctggcggcatcaccaactacaacagcgccttcatgtcccggctgaccatctccaaggacaacagcaagaacaccgtgtacctccagatgaacagcctgcgggccgaggacaccgccatgtactactgtgcttccagaggcggccactacggctacgccctggattattggggccagggaaccctcgtgaccgtgtcctctacgcgtatccagaaccctgatcctgccgtgtaccagctgcgggatagcaagagcagcgacaagagcgtgtgtctgttcaccgacttcgacagccagaccaacgtgtcccagagcaaggactccgacgtgtacatcaccgataagtgcgtgctggacatgcggagcatggacttcaagagcaactccgccgtggcctggtccaacaagtccgatttcgcctgcgccaacgccttcaacaacagcattatccccgaggacacattcttcccaagccccgagagcagctgcgacgtgaagctggtggaaaagagcttcgagacagacaccaacctgaacttccagatcctgtacgaggtgatcggcttcagaatcctgctgctgaaagtggccggctttaacctgctgatgaccctgcggctgtggtccagccgcgccaagagaagcggatctggcgtgaagcagaccctgaatttcgacctgctgaagctggctggcgacgtggaatccaacccaggcccttctagaggccatatgaccgagtacaagcccacggtgcgcctcgccacccgcgacgacgtccccagggccgtacgcaccctcgccgccgcgttcgccgactaccccgccacgcgccacaccgtcgatccggaccgccacatcgagcgggtcaccgagctgcaagaactcttcctcacgcgcgtcgggctcgacatcggcaaggtgtgggtcgcggacgacggcgccgcggtggcggtctggaccacgccggagagcgtcgaagcgggggcggtgttcgccgagatcggcccgcgcatggccgagttgagcggttcccggctggccgcgcagcaacagatggaaggcctcctggcgccgcaccggcccaaggagcccgcgtggttcctggccaccgtcggcgtctcgcccgaccaccagggcaagggtctgggcagcgccgtcgtgctccccggagtggaggcggccgagcgcgccggggtgcccgccttcctggagacctccgcgccccgcaacctccccttctacgagcggctcggcttcaccgtcaccgccgacgtcgaggtgcccgaaggaccgcgcacctggtgcatgacccgcaagcccggtgcctga

SEQ ID NO: 35693 - DNA, 2589 bp, synthetic construct
  source 1..2589: mol_type = other DNA
atggccttaccagtgaccgccttgctcctgccgctggccttgctgctccacgccgccaggccgctcgagatccagaaccctgatcctgccgtgtaccagctgcgggatagcaagagcagcgacaagagcgtgtgtctgttcaccgacttcgacagccagaccaacgtgtcccagagcaaggactccgacgtgtacatcaccgataagtgcgtgctggacatgcggagcatggacttcaagagcaactccgccgtggcctggtccaacaagtccgatttcgcctgcgccaacgccttcaacaacagcattatccccgaggacacattcttcccaagccccgagagcagctgcgacgtgaagctggtggaaaagagcttcgagacagacaccaacctgaacttccagatcctgtacgaggtgatcggcttcagaatcctgctgctgaaagtggccggctttaacctgctgatgaccctgcggctgtggtccagcagggccaagcgatctggatctggagcaacaaacttctcactactcaaacaagcaggtgacgtggaggagaatcccgggcctactagcatggccttaccagtgaccgccttgctcctgccgctggccttgctgctccacgccgccaggccggacatccagatgacacagagccctagcagcctgtctgccagcgtgggagacagagtgaccatcacatgcaaggccagccagagcgtgtccaacgacgtgacctggtatcagcagaagcctggacaggcccctaagctgctgatctacagcgccagcaacagatacagcggagtgcccgccagattttccggctctggctacggcaccgagttcacctttaccatcagcagcgtgcagagcgaggacttcgccgtgtacttctgccagcaagactacagcagcttcggccagggcaccaagctggaaatcaagagaggcggaggcggaagtggaggcggaggatctggcggcggaggctctcaggtgcagctggtggaatctggacctggcgtggtgcagcctggcagaagcctgagaatcagctgtgccgtgtccggcttcagcgtgaccaactacggcgtgcactgggtgcgccagccacctggaaaaggactggaatggctgggcgtgatctgggctggcggcatcaccaactacaacagcgccttcatgtcccggctgaccatctccaaggacaacagcaagaacaccgtgtacctccagatgaacagcctgcgggccgaggacaccgccatgtactactgtgcttccagaggcggccactacggctacgccctggattattggggccagggaaccctcgtgaccgtgtcctctacgcgtgaggacctgaagaacgtgttcccacctgaggtggccgtgttcgagcctagcgaggccgagatcagccacacccagaaagccaccctcgtgtgcctggctaccggcttctaccccgaccatgtggaactgtcttggtgggtcaacggcaaagaggtgcacagcggcgtgtgtaccgacccccagccactgaaagaacagcccgccctgaacgacagccggtactgcctgagcagcagactgagagtgtccgccaccttctggcagaacccccggaaccacttcagatgccaggtgcagttctacggcctgagcgagaacgacgagtggacccaggacagagccaagcccgtgacccagatcgtgtctgccgaagcctggggcagagccgattgcggctttaccagcgagagctaccagcagggcgtgctgagcgccaccaacctgagcgtgatcggcttcagaatcctgctgctgaaagtggccggctttaacctgctgatgaccctgcggctgtggtccagccgcgccaagagaagcggatctggcgtgaagcagaccctgaatttcgacctgctgaagctggctggcgacgtggaatccaacccaggcccttctagaggccatatgaccgagtacaagcccacggtgcgcctcgccacccgcgacgacgtccccagggccgtacgcaccctcgccgccgcgttcgccgactaccccgccacgcgccacaccgtcgatccggaccgccacatcgagcgggtcaccgagctgcaagaactcttcctcacgcgcgtcgggctcgacatcggcaaggtgtgggtcgcggacgacggcgccgcggtggcggtctggaccacgccggagagcgtcgaagcgggggcggtgttcgccgagatcggcccgcgcatggccgagttgagcggttcccggctggccgcgcagcaacagatggaaggcctcctggcgccgcaccggcccaaggagcccgcgtggttcctggccaccgtcggcgtctcgcccgaccaccagggcaagggtctgggcagcgccgtcgtgctccccggagtggaggcggccgagcgcgccggggtgcccgccttcctggagacctccgcgccccgcaacctccccttctacgagcggctcggcttcaccgtcaccgccgacgtcgaggtgcccgaaggaccgcgcacctggtgcatgacccgcaagcccggtgcctga

SEQ ID NO: 35694 - DNA, 2589 bp, synthetic construct; identical to SEQ ID NO: 35692
  source 1..2589: mol_type = other DNA

SEQ ID NO: 35695 - DNA, 2913 bp, synthetic construct
  source 1..2913: mol_type = other DNA
atggccttaccagtgaccgccttgctcctgccgctggccttgctgctccacgccgccaggccgctcgaggaggacctgaagaacgtgttcccacctgaggtggccgtgttcgagcctagcgaggccgagatcagccacacccagaaagccaccctcgtgtgcctggctaccggcttctaccccgaccatgtggaactgtcttggtgggtcaacggcaaagaggtgcacagcggcgtgtctaccgacccccagccactgaaagaacagcccgccctgaacgacagccggtactgcctgagcagcagactgagagtgtccgccaccttctggcagaacccccggaaccacttcagatgccaggtgcagttctacggcctgagcgagaacgacgagtggacccaggacagagccaagcccgtgacccagatcgtgtctgccgaagcctggggcagagccgatgatgtgattaagatccactggcaggaaaagaagtccaacaccatcctgggcagccaggaaggcaacaccatgaagaccaacgacacctacatgaagttcagctggctgaccgtgcccgagaagtccctggacaaagaacacagatgcatcgtgcggcacgaaaacaacaagaacggcgtggaccaggaaatcatcttcccacccatcaagaccgatgtgattacaatggaccccaaggacaactgctccaaggacgccaacgataccctgctgctccagctgaccaacaccagcgcctactacatgtacttgttgctgctgctgaagtccgtggtgtacttcgccatcatcacatgctgcctgctgatggctatggtcaagcggaaggacagccggggaagggccaagcgatctggatctggagcaacaaacttctcactactcaaacaagcaggtgacgtggaggagaatcccgggcctactagcatggccttaccagtgaccgccttgctcctgccgctggccttgctgctccacgccgccaggccggacatccagatgacacagagccctagcagcctgtctgccagcgtgggagacagagtgaccatcacatgcaaggccagccagagcgtgtccaacgacgtgacctggtatcagcagaagcctggacaggcccctaagctgctgatctacagcgccagcaacagatacagcggagtgcccgccagattttccggctctggctacggcaccgagttcacctttaccatcagcagcgtgcagagcgaggacttcgccgtgtacttctgccagcaagactacagcagcttcggccagggcaccaagctggaaatcaagagaggcggaggcggaagtggaggcggaggatctggcggcggaggctctcaggtgcagctggtggaatctggacctggcgtggtgcagcctggcagaagcctgagaatcagctgtgccgtgtccggcttcagcgtgaccaactacggcgtgcactgggtgcgccagccacctggaaaaggactggaatggctgggcgtgatctgggctggcggcatcaccaactacaacagcgccttcatgtcccggctgaccatctccaaggacaacagcaagaacaccgtgtacctccagatgaacagcctgcgggccgaggacaccgccatgtactactgtgcttccagaggcggccactacggctacgccctggattattggggccagggaaccctcgtgaccgtgtcctctacgcgtatccagaaccctgatcctgccgtgtaccagctgcgggatagcaagagcagcgacaagagcgtgtgtctgttcaccgacttcgacagccagaccaacgtgtcccagagcaaggactccgacgtgtacatcaccgataagaccgtgctggacatgcggagcatggacttcaagagcaactccgccgtggcctggtccaacaagtccgatttcgcctgcgccaacgccttcaacaacagcattatccccgaggacacattcttcccaagccccgagagcagcgactccaccgaccacgtgaagcccaaagagacagagaacaccaagcagcccagcaagagctgccacaagcccaaggccatcgtgcacaccgagaaagtgaacatgatgagcctgaccgtgctgggcctgcggatgctgttcgccaaaaccgtggccgtgaacttcctgctgaccgccaagctgttcttcctcctcaccgcccgcgccaagagaagcggatctggcgtgaagcagaccctgaatttcgacctgctgaagctggctggcgacgtggaatccaacccaggcccttctagaggccatatgaccgagtacaagcccacggtgcgcctcgccacccgcgacgacgtccccagggccgtacgcaccctcgccgccgcgttcgccgactaccccgccacgcgccacaccgtcgatccggaccgccacatcgagcgggtcaccgagctgcaagaactcttcctcacgcgcgtcgggctcgacatcggcaaggtgtgggtcgcggacgacggcgccgcggtggcggtctggaccacgccggagagcgtcgaagcgggggcggtgttcgccgagatcggcccgcgcatggccgagttgagcggttcccggctggccgcgcagcaacagatggaaggcctcctggcgccgcaccggcccaaggagcccgcgtggttcctggccaccgtcggcgtctcgcccgaccaccagggcaagggtctgggcagcgccgtcgtgctccccggagtggaggcggccgagcgcgccggggtgcccgccttcctggagacctccgcgccccgcaacctccccttctacgagcggctcggcttcaccgtcaccgccgacgtcgaggtgcccgaaggaccgcgcacctggtgcatgacccgcaagcccggtgcctga

SEQ ID NO: 35696 - DNA, 2913 bp, synthetic construct
  source 1..2913: mol_type = other DNA
atggccttaccagtgaccgccttgctcctgccgctggccttgctgctccacgccgccaggccgctcgagatccagaaccctgatcctgccgtgtaccagctgcgggatagcaagagcagcgacaagagcgtgtgtctgttcaccgacttcgacagccagaccaacgtgtcccagagcaaggactccgacgtgtacatcaccgataagaccgtgctggacatgcggagcatggacttcaagagcaactccgccgtggcctggtccaacaagtccgatttcgcctgcgccaacgccttcaacaacagcattatccccgaggacacattcttcccaagccccgagagcagcgactccaccgaccacgtgaagcccaaagagacagagaacaccaagcagcccagcaagagctgccacaagcccaaggccatcgtgcacaccgagaaagtgaacatgatgagcctgaccgtgctgggcctgcggatgctgttcgccaaaaccgtggccgtgaacttcctgctgaccgccaagctgttcttcctcctcaccgccagggccaagcgatctggatctggagcaacaaacttctcactactcaaacaagcaggtgacgtggaggagaatcccgggcctactagcatggccttaccagtgaccgccttgctcctgccgctggccttgctgctccacgccgccaggccggacatccagatgacacagagccctagcagcctgtctgccagcgtgggagacagagtgaccatcacatgcaaggccagccagagcgtgtccaacgacgtgacctggtatcagcagaagcctggacaggcccctaagctgctgatctacagcgccagcaacagatacagcggagtgcccgccagattttccggctctggctacggcaccgagttcacctttaccatcagcagcgtgcagagcgaggacttcgccgtgtacttctgccagcaagactacagcagcttcggccagggcaccaagctggaaatcaagagaggcggaggcggaagtggaggcggaggatctggcggcggaggctctcaggtgcagctggtggaatctggacctggcgtggtgcagcctggcagaagcctgagaatcagctgtgccgtgtccggcttcagcgtgaccaactacggcgtgcactgggtgcgccagccacctggaaaaggactggaatggctgggcgtgatctgggctggcggcatcaccaactacaacagcgccttcatgtcccggctgaccatctccaaggacaacagcaagaacaccgtgtacctccagatgaacagcctgcgggccgaggacaccgccatgtactactgtgcttccagaggcggccactacggctacgccctggattattggggccagggaaccctcgtgaccgtgtcctctacgcgtgaggacctgaagaacgtgttcccacctgaggtggccgtgttcgagcctagcgaggccgagatcagccacacccagaaagccaccctcgtgtgcctggctaccggcttctaccccgaccatgtggaactgtcttggtgggtcaacggcaaagaggtgcacagcggcgtgtctaccgacccccagccactgaaagaacagcccgccctgaacgacagccggtactgcctgagcagcagactgagagtgtccgccaccttctggcagaacccccggaaccacttcagatgccaggtgcagttctacggcctgagcgagaacgacgagtggacccaggacagagccaagcccgtgacccagatcgtgtctgccgaagcctggggcagagccgatgatgtgattaagatccactggcaggaaaagaagtccaacaccatcctgggcagccaggaaggcaacaccatgaagaccaacgacacctacatgaagttcagctggctgaccgtgcccgagaagtccctggacaaagaacacagatgcatcgtgcggcacgaaaacaacaagaacggcgtggaccaggaaatcatcttcccacccatcaagaccgatgtgattacaatggaccccaaggacaactgctccaaggacgccaacgataccctgctgctccagctgaccaacaccagcgcctactacatgtacttgttgctgctgctgaagtccgtggtgtacttcgccatcatcacatgctgcctgctgatggctatggtcaagcggaaggacagccggggacgcgccaagagaagcggatctggcgtgaagcagaccctgaatttcgacctgctgaagctggctggcgacgtggaatccaacccaggcccttctagaggccatatgaccgagtacaagcccacggtgcgcctcgccacccgcgacgacgtccccagggccgtacgcaccctcgccgccgcgttcgccgactaccccgccacgcgccacaccgtcgatccggaccgccacatcgagcgggtcaccgagctgcaagaactcttcctcacgcgcgtcgggctcgacatcggcaaggtgtgggtcgcggacgacggcgccgcggtggcggtctggaccacgccggagagcgtcgaagcgggggcggtgttcgccgagatcggcccgcgcatggccgagttgagcggttcccggctggccgcgcagcaacagatggaaggcctcctggcgccgcaccggcccaaggagcccgcgtggttcctggccaccgtcggcgtctcgcccgaccaccagggcaagggtctgggcagcgccgtcgtgctccccggagtggaggcggccgagcgcgccggggtgcccgccttcctggagacctccgcgccccgcaacctccccttctacgagcggctcggcttcaccgtcaccgccgacgtcgaggtgcccgaaggaccgcgcacctggtgcatgacccgcaagcccggtgcctga

SEQ ID NO: 35697 - DNA, 2907 bp, synthetic construct
  source 1..2907: mol_type = other DNA
atggccttaccagtgaccgccttgctcctgccgctggccttgctgctccacgccgccaggccgctcgaggaggacctgaagaacgtgttcccacctgaggtggccgtgttcgagcctagcgaggccgagatcagccacacccagaaagccaccctcgtgtgcctggctaccggcttctaccccgaccatgtggaactgtcttggtgggtcaacggcaaagaggtgcacagcggcgtgtgtaccgacccccagccactgaaagaacagcccgccctgaacgacagccggtactgcctgagcagcagactgagagtgtccgccaccttctggcagaacccccggaaccacttcagatgccaggtgcagttctacggcctgagcgagaacgacgagtggacccaggacagagccaagcccgtgacccagatcgtgtctgccgaagcctggggcagagccgatgatgtgattaagatccactggcaggaaaagaagtccaacaccatcctgggcagccaggaaggcaacaccatgaagaccaacgacacctacatgaagttcagctggctgaccgtgcccgagaagtccctggacaaagaacacagatgcatcgtgcggcacgaaaacaacaagaacggcgtggaccaggaaatcatcttcccacccatcaagaccgatgtgattacaatggaccccaaggacaactgctccaaggacgccaacgataccctgctgctccagctgaccaacaccagcgcctactacatgtacttgttgctgctgctgaagtccgtggtgtacttcgccatcatcacatgctgcctgctgcggagaaccgccttctgctgcaacggcgagaagtctagggccaagcgatctggatctggagcaacaaacttctcactactcaaacaagcaggtgacgtggaggagaatcccgggcctactagcatggccttaccagtgaccgccttgctcctgccgctggccttgctgctccacgccgccaggccggacatccagatgacacagagccctagcagcctgtctgccagcgtgggagacagagtgaccatcacatgcaaggccagccagagcgtgtccaacgacgtgacctggtatcagcagaagcctggacaggcccctaagctgctgatctacagcgccagcaacagatacagcggagtgcccgccagattttccggctctggctacggcaccgagttcacctttaccatcagcagcgtgcagagcgaggacttcgccgtgtacttctgccagcaagactacagcagcttcggccagggcaccaagctggaaatcaagagaggcggaggcggaagtggaggcggaggatctggcggcggaggctctcaggtgcagctggtggaatctggacctggcgtggtgcagcctggcagaagcctgagaatcagctgtgccgtgtccggcttcagcgtgaccaactacggcgtgcactgggtgcgccagccacctggaaaaggactggaatggctgggcgtgatctgggctggcggcatcaccaactacaacagcgccttcatgtcccggctgaccatctccaaggacaacagcaagaacaccgtgtacctccagatgaacagcctgcgggccgaggacaccgccatgtactactgtgcttccagaggcggccactacggctacgccctggattattggggccagggaaccctcgtgaccgtgtcctctacgcgtatccagaaccctgatcctgccgtgtaccagctgcgggatagcaagagcagcgacaagagcgtgtgtctgttcaccgacttcgacagccagaccaacgtgtcccagagcaaggactccgacgtgtacatcaccgataagtgcgtgctggacatgcggagcatggacttcaagagcaactccgccgtggcctggtccaacaagtccgatttcgcctgcgccaacgccttcaacaacagcattatccccgaggacacattcttcccaagccccgagagcagcgactccaccgaccacgtgaagcccaaagagacagagaacaccaagcagcccagcaagagctgccacaagcccaaggccatcgtgcacaccgagaaagtgaacatgatgagcctgaccgtgctgggcctgcggatgctgttcgccaaaaccgtggccgtgaacttcctgctgaccgccaagctgttcttcctccgcgccaagagaagcggatctggcgtgaagcagaccctgaatttcgacctgctgaagctggctggcgacgtggaatccaacccaggcccttctagaggccatatgaccgagtacaagcccacggtgcgcctcgccacccgcgacgacgtccccagggccgtacgcaccctcgccgccgcgttcgccgactaccccgccacgcgccacaccgtcgatccggaccgccacatcgagcgggtcaccgagctgcaagaactcttcctcacgcgcgtcgggctcgacatcggcaaggtgtgggtcgcggacgacggcgccgcggtggcggtctggaccacgccggagagcgtcgaagcgggggcggtgttcgccgagatcggcccgcgcatggccgagttgagcggttcccggctggccgcgcagcaacagatggaaggcctcctggcgccgcaccggcccaaggagcccgcgtggttcctggccaccgtcggcgtctcgcccgaccaccagggcaagggtctgggcagcgccgtcgtgctccccggagtggaggcggccgagcgcgccggggtgcccgccttcctggagacctccgcgccccgcaacctccccttctacgagcggctcggcttcaccgtcaccgccgacgtcgaggtgcccgaaggaccgcgcacctggtgcatgacccgcaagcccggtgcctga

SEQ ID NO: 35698 - DNA, 2907 bp, synthetic construct
  source 1..2907: mol_type = other DNA
atggccttaccagtgaccgccttgctcctgccgctggccttgctgctccacgccgccaggccgctcgagatccagaaccctgatcctgccgtgtaccagctgcgggatagcaagagcagcgacaagagcgtgtgtctgttcaccgacttcgacagccagaccaacgtgtcccagagcaaggactccgacgtgtacatcaccgataagtgcgtgctggacatgcggagcatggacttcaagagcaactccgccgtggcctggtccaacaagtccgatttcgcctgcgccaacgccttcaacaacagcattatccccgaggacacattcttcccaagccccgagagcagcgactccaccgaccacgtgaagcccaaagagacagagaacaccaagcagcccagcaagagctgccacaagcccaaggccatcgtgcacaccgagaaagtgaacatgatgagcctgaccgtgctgggcctgcggatgctgttcgccaaaaccgtggccgtgaacttcctgctgaccgccaagctgttcttcctcagggccaagcgatctggatctggagcaacaaacttctcactactcaaacaagcaggtgacgtggaggagaatcccgggcctactagcatggccttaccagtgaccgccttgctcctgccgctggccttgctgctccacgccgccaggccggacatccagatgacacagagccctagcagcctgtctgccagcgtgggagacagagtgaccatcacatgcaaggccagccagagcgtgtccaacgacgtgacctggtatcagcagaagcctggacaggcccctaagctgctgatctacagcgccagcaacagatacagcggagtgcccgccagattttccggctctggctacggcaccgagttcacctttaccatcagcagcgtgcagagcgaggacttcgccgtgtacttctgccagcaagactacagcagcttcggccagggcaccaagctggaaatcaagagaggcggaggcggaagtggaggcggaggatctggcggcggaggctctcaggtgcagctggtggaatctggacctggcgtggtgcagcctggcagaagcctgagaatcagctgtgccgtgtccggcttcagcgtgaccaactacggcgtgcactgggtgcgccagccacctggaaaaggactggaatggctgggcgtgatctgggctggcggcatcaccaactacaacagcgccttcatgtcccggctgaccatctccaaggacaacagcaagaacaccgtgtacctccagatgaacagcctgcgggccgaggacaccgccatgtactactgtgcttccagaggcggccactacggctacgccctggattattggggccagggaaccctcgtgaccgtgtcctctacgcgtgaggacctgaagaacgtgttcccacctgaggtggccgtgttcgagcctagcgaggccgagatcagccacacccagaaagccaccctcgtgtgcctggctaccggcttctaccccgaccatgtggaactgtcttggtgggtcaacggcaaagaggtgcacagcggcgtgtgtaccgacccccagccactgaaagaacagcccgccctgaacgacagccggtactgcctgagcagcagactgagagtgtccgccaccttctggcagaacccccggaaccacttcagatgccaggtgcagttctacggcctgagcgagaacgacgagtggacccaggacagagccaagcccgtgacccagatcgtgtctgccgaagcctggggcagagccgatgatgtgattaagatccactggcaggaaaagaagtccaacaccatcctgggcagccaggaaggcaacaccatgaagaccaacgacacctacatgaagttcagctggctgaccgtgcccgagaagtccctggacaaagaacacagatgcatcgtgcggcacgaaaacaacaagaacggcgtggaccaggaaatcatcttcccacccatcaagaccgatgtgattacaatggaccccaaggacaactgctccaaggacgccaacgataccctgctgctccagctgaccaacaccagcgcctactacatgtacttgttgctgctgctgaagtccgtggtgtacttcgccatcatcacatgctgcctgctgcggagaaccgccttctgctgcaacggcgagaagtctcgcgccaagagaagcggatctggcgtgaagcagaccctgaatttcgacctgctgaagctggctggcgacgtggaatccaacccaggcccttctagaggccatatgaccgagtacaagcccacggtgcgcctcgccacccgcgacgacgtccccagggccgtacgcaccctcgccgccgcgttcgccgactaccccgccacgcgccacaccgtcgatccggaccgccacatcgagcgggtcaccgagctgcaagaactcttcctcacgcgcgtcgggctcgacatcggcaaggtgtgggtcgcggacgacggcgccgcggtggcggtctggaccacgccggagagcgtcgaagcgggggcggtgttcgccgagatcggcccgcgcatggccgagttgagcggttcccggctggccgcgcagcaacagatggaaggcctcctggcgccgcaccggcccaaggagcccgcgtggttcctggccaccgtcggcgtctcgcccgaccaccagggcaagggtctgggcagcgccgtcgtgctccccggagtggaggcggccgagcgcgccggggtgcccgccttcctggagacctccgcgccccgcaacctccccttctacgagcggctcggcttcaccgtcaccgccgacgtcgaggtgcccgaaggaccgcgcacctggtgcatgacccgcaagcccggtgcctga

SEQ ID NO: 35699 - DNA, 2907 bp, synthetic construct
  source 1..2907: mol_type = other DNA
atggccttaccagtgaccgccttgctcctgccgctggccttgctgctccacgccgccaggccgctcgaggaggacctgaagaacgtgttcccacctgaggtggccgtgttcgagcctagcgaggccgagatcagccacacccagaaagccaccctcgtgtgcctggctaccggcttctaccccgaccatgtggaactgtcttggtgggtcaacggcaaagaggtgcacagcggcgtgtctaccgacccccagccactgaaagaacagcccgccctgaacgacagccggtactgcctgagcagcagactgagagtgtccgccaccttctggcagaacccccggaaccacttcagatgccaggtgcagttctacggcctgagcgagaacgacgagtggacccaggacagagccaagcccgtgacccagatcgtgtctgccgaagcctggggcagagccgatgatgtgattaagatccactggcaggaaaagaagtccaacaccatcctgggcagccaggaaggcaacaccatgaagaccaacgacacctacatgaagttcagctggctgaccgtgcccgagaagtccctggacaaagaacacagatgcatcgtgcggcacgaaaacaacaagaacggcgtggaccaggaaatcatcttcccacccatcaagaccgatgtgattacaatggaccccaaggacaactgctccaaggacgccaacgataccctgctgctccagctgaccaacaccagcgcctactacatgtacttgttgctgctgctgaagtccgtggtgtacttcgccatcatcacatgctgcctgctgcggagaaccgccttctgctgcaacggcgagaagtctagggccaagcgatctggatctggagcaacaaacttctcactactcaaacaagcaggtgacgtggaggagaatcccgggcctactagcatggccttaccagtgaccgccttgctcctgccgctggccttgctgctccacgccgccaggccggacatccagatgacacagagccctagcagcctgtctgccagcgtgggagacagagtgaccatcacatgcaaggccagccagagcgtgtccaacgacgtgacctggtatcagcagaagcctggacaggcccctaagctgctgatctacagcgccagcaacagatacagcggagtgcccgccagattttccggctctggctacggcaccgagttcacctttaccatcagcagcgtgcagagcgaggacttcgccgtgtacttctgccagcaagactacagcagcttcggccagggcaccaagctggaaatcaagagaggcggaggcggaagtggaggcggaggatctggcggcggaggctctcaggtgcagctggtggaatctggacctggcgtggtgcagcctggcagaagcctgagaatcagctgtgccgtgtccggcttcagcgtgaccaactacggcgtgcactgggtgcgccagccacctggaaaaggactggaatggctgggcgtgatctgggctggcggcatcaccaactacaacagcgccttcatgtcccggctgaccatctccaaggacaacagcaagaacaccgtgtacctccagatgaacagcctgcgggccgaggacaccgccatgtactactgtgcttccagaggcggccactacggctacgccctggattattggggccagggaaccctcgtgaccgtgtcctctacgcgtatccagaaccctgatcctgccgtgtaccagctgcgggatagcaagagcagcgacaagagcgtgtgtctgttcaccgacttcgacagccagaccaacgtgtcccagagcaaggactccgacgtgtacatcaccgataagaccgtgctggacatgcggagcatggacttcaagagcaactccgccgtggcctggtccaacaagtccgatttcgcctgcgccaacgccttcaacaacagcattatccccgaggacacattcttcccaagccccgagagcagcgactccaccgaccacgtgaagcccaaagagacagagaacaccaagcagcccagcaagagctgccacaagcccaaggccatcgtgcacaccgagaaagtgaacatgatgagcctgaccgtgctgggcctgcggatgctgttcgccaaaaccgtggccgtgaacttcctgctgaccgccaagctgttcttcctccgcgccaagagaagcggatctggcgtgaagcagaccctgaatttcgacctgctgaagctggctggcgacgtggaatccaacccaggcccttctagaggccatatgaccgagtacaagcccacggtgcgcctcgccacccgcgacgacgtccccagggccgtacgcaccctcgccgccgcgttcgccgactaccccgccacgcgccacaccgtcgatccggaccgccacatcgagcgggtcaccgagctgcaagaactcttcctcacgcgcgtcgggctcgacatcggcaaggtgtgggtcgcggacgacggcgccgcggtggcggtctggaccacgccggagagcgtcgaagcgggggcggtgttcgccgagatcggcccgcgcatggccgagttgagcggttcccggctggccgcgcagcaacagatggaaggcctcctggcgccgcaccggcccaaggagcccgcgtggttcctggccaccgtcggcgtctcgcccgaccaccagggcaagggtctgggcagcgccgtcgtgctccccggagtggaggcggccgagcgcgccggggtgcccgccttcctggagacctccgcgccccgcaacctccccttctacgagcggctcggcttcaccgtcaccgccgacgtcgaggtgcccgaaggaccgcgcacctggtgcatgacccgcaagcccggtgcctga

SEQ ID NO: 35700 - DNA, 2907 bp, synthetic construct
  source 1..2907: mol_type = other DNA
atggccttaccagtgaccgccttgctcctgccgctggccttgctgctccacgccgccaggccgctcgagatccagaaccctgatcctgccgtgtaccagctgcgggatagcaagagcagcgacaagagcgtgtgtctgttcaccgacttcgacagccagaccaacgtgtcccagagcaaggactccgacgtgtacatcaccgataagaccgtgctggacatgcggagcatggacttcaagagcaactccgccgtggcctggtccaacaagtccgatttcgcctgcgccaacgccttcaacaacagcattatccccgaggacacattcttcccaagccccgagagcagcgactccaccgaccacgtgaagcccaaagagacagagaacaccaagcagcccagcaagagctgccacaagcccaaggccatcgtgcacaccgagaaagtgaacatgatgagcctgaccgtgctgggcctgcggatgctgttcgccaaaaccgtggccgtgaacttcctgctgaccgccaagctgttcttcctcagggccaagcgatctggatctggagcaacaaacttctcactactcaaacaagcaggtgacgtggaggagaatcccgggcctactagcatggccttaccagtgaccgccttgctcctgccgctggccttgctgctccacgccgccaggccggacatccagatgacacagagccctagcagcctgtctgccagcgtgggagacagagtgaccatcacatgcaaggccagccagagcgtgtccaacgacgtgacctggtatcagcagaagcctggacaggcccctaagctgctgatctacagcgccagcaacagatacagcggagtgcccgccagattttccggctctggctacggcaccgagttcacctttaccatcagcagcgtgcagagcgaggacttcgccgtgtacttctgccagcaagactacagcagcttcggccagggcaccaagctggaaatcaagagaggcggaggcggaagtggaggcggaggatctggcggcggaggctctcaggtgcagctggtggaatctggacctggcgtggtgcagcctggcagaagcctgagaatcagctgtgccgtgtccggcttcagcgtgaccaactacggcgtgcactgggtgcgccagccacctggaaaaggactggaatggctgggcgtgatctgggctggcggcatcaccaactacaacagcgccttcatgtcccggctgaccatctccaaggacaacagcaagaacaccgtgtacctccagatgaacagcctgcgggccgaggacaccgccatgtactactgtgcttccagaggcggccactacggctacgccctggattattggggccagggaaccctcgtgaccgtgtcctctacgcgtgaggacctgaagaacgtgttcccacctgaggtggccgtgttcgagcctagcgaggccgagatcagccacacccagaaagccaccctcgtgtgcctggctaccggcttctaccccgaccatgtggaactgtcttggtgggtcaacggcaaagaggtgcacagcggcgtgtctaccgacccccagccactgaaagaacagcccgccctgaacgacagccggtactgcctgagcagcagactgagagtgtccgccaccttctggcagaacccccggaaccacttcagatgccaggtgcagttctacggcctgagcgagaacgacgagtggacccaggacagagccaagcccgtgacccagatcgtgtctgccgaagcctggggcagagccgatgatgtgattaagatccactggcaggaaaagaagtccaacaccatcctgggcagccaggaaggcaacaccatgaagaccaacgacacctacatgaagttcagctggctgaccgtgcccgagaagtccctggacaaagaacacagatgcatcgtgcggcacgaaaacaacaagaacggcgtggaccaggaaatcatcttcccacccatcaagaccgatgtgattacaatggaccccaaggacaactgctccaaggacgccaacgataccctgctgctccagctgaccaacaccagcgcctactacatgtacttgttgctgctgctgaagtccgtggtgtacttcgccatcatcacatgctgcctgctgcggagaaccgccttctgctgcaacggcgagaagtctcgcgccaagagaagcggatctggcgtgaagcagaccctgaatttcgacctgctgaagctggctggcgacgtggaatccaacccaggcccttctagaggccatatgaccgagtacaagcccacggtgcgcctcgccacccgcgacgacgtccccagggccgtacgcaccctcgccgccgcgttcgccgactaccccgccacgcgccacaccgtcgatccggaccgccacatcgagcgggtcaccgagctgcaagaactcttcctcacgcgcgtcgggctcgacatcggcaaggtgtgggtcgcggacgacggcgccgcggtggcggtctggaccacgccggagagcgtcgaagcgggggcggtgttcgccgagatcggcccgcgcatggccgagttgagcggttcccggctggccgcgcagcaacagatggaaggcctcctggcgccgcaccggcccaaggagcccgcgtggttcctggccaccgtcggcgtctcgcccgaccaccagggcaagggtctgggcagcgccgtcgtgctccccggagtggaggcggccgagcgcgccggggtgcccgccttcctggagacctccgcgccccgcaacctccccttctacgagcggctcggcttcaccgtcaccgccgacgtcgaggtgcccgaaggaccgcgcacctggtgcatgacccgcaagcccggtgcctga

SEQ ID NO: 35701 - DNA, 2601 bp, synthetic construct
  source 1..2601: mol_type = other DNA
atggccttaccagtgaccgccttgctcctgccgctggccttgctgctccacgccgccaggccgctcgaggaggacctgaagaacgtgttcccacctgaggtggccgtgttcgagcctagcaaggccgagatcgcccacacccagaaagccaccctcgtgtgcctggctaccggcttctaccccgaccatgtggaactgtcttggtgggtcaacggcaaagaggtgcacagcggcgtgtgtaccgacccccagccactgaaagaacagcccgccctgaacgacagccggtactgcctgagcagcagactgagagtgtccgccaccttctggcagaacccccggaaccacttcagatgccaggtgcagttctacggcctgagcgagaacgacgagtggacccaggacagagccaagcccgtgacccagatcgtgtctgccgaagcctggggcagagccgattgcggcatcaccagcgccagctaccaccagggcgtgctgagcgccaccatcctgtacgagatcctgctgggcaaggccaccctgtacgccgtgctggtgtctgccctggtgctgatggctatggtcaagcggaaggacagccggggaagggccaagcgatctggatctggagcaacaaacttctcactactcaaacaagcaggtgacgtggaggagaatcccgggcctactagcatggccttaccagtgaccgccttgctcctgccgctggccttgctgctccacgccgccaggccggacatccagatgacacagagccctagcagcctgtctgccagcgtgggagacagagtgaccatcacatgcaaggccagccagagcgtgtccaacgacgtgacctggtatcagcagaagcctggacaggcccctaagctgctgatctacagcgccagcaacagatacagcggagtgcccgccagattttccggctctggctacggcaccgagttcacctttaccatcagcagcgtgcagagcgaggacttcgccgtgtacttctgccagcaagactacagcagcttcggccagggcaccaagctggaaatcaagagaggcggaggcggaagtggaggcggaggatctggcggcggaggctctcaggtgcagctggtggaatctggacctggcgtggtgcagcctggcagaagcctgagaatcagctgtgccgtgtccggcttcagcgtgaccaactacggcgtgcactgggtgcgccagccacctggaaaaggactggaatggctgggcgtgatctgggctggcggcatcaccaactacaacagcgccttcatgtcccggctgaccatctccaaggacaacagcaagaacaccgtgtacctccagatgaacagcctgcgggccgaggacaccgccatgtactactgtgcttccagaggcggccactacggctacgccctggattattggggccagggaaccctcgtgaccgtgtcctctacgcgtatccagaaccctgatcctgccgtgtaccagctgcgggatagcaagagcagcgacaagagcgtgtgtctgttcaccgacttcgacagccagaccaacgtgtcccagagcaaggactccgacgtgtacatcaccgataagtgcgtgctggacatgcggagcatggacttcaagagcaactccgccgtggcctggtccaacaagtccgatttcgcctgcgccaacgccttcaacaacagcattatccccgaggacacattcttcccaagcagcgacgtgccctgcgacgtgaagctggtggaaaagagcttcgagacagacaccaacctgaacttccagaacctgagcgtgatcggcttcagaatcctgctgctgaaagtggccggctttaacctgctgatgaccctgcggctgtggtccagccgcgccaagagaagcggatctggcgtgaagcagaccctgaatttcgacctgctgaagctggctggcgacgtggaatccaacccaggcccttctagaggccatatgaccgagtacaagcccacggtgcgcctcgccacccgcgacgacgtccccagggccgtacgcaccctcgccgccgcgttcgccgactaccccgccacgcgccacaccgtcgatccggaccgccacatcgagcgggtcaccgagctgcaagaactcttcctcacgcgcgtcgggctcgacatcggcaaggtgtgggtcgcggacgacggcgccgcggtggcggtctggaccacgccggagagcgtcgaagcgggggcggtgttcgccgagatcggcccgcgcatggccgagttgagcggttcccggctggccgcgcagcaacagatggaaggcctcctggcgccgcaccggcccaaggagcccgcgtggttcctggccaccgtcggcgtctcgcccgaccaccagggcaagggtctgggcagcgccgtcgtgctccccggagtggaggcggccgagcgcgccggggtgcccgccttcctggagacctccgcgccccgcaacctccccttctacgagcggctcggcttcaccgtcaccgccgacgtcgaggtgcccgaaggaccgcgcacctggtgcatgacccgcaagcccggtgcctga

SEQ ID NO: 35702 - DNA, 2601 bp, synthetic construct
  source 1..2601: mol_type = other DNA
atggccttaccagtgaccgccttgctcctgccgctggccttgctgctccacgccgccaggccgctcgagatccagaaccctgatcctgccgtgtaccagctgcgggatagcaagagcagcgacaagagcgtgtgtctgttcaccgacttcgacagccagaccaacgtgtcccagagcaaggactccgacgtgtacatcaccgataagtgcgtgctggacatgcggagcatggacttcaagagcaactccgccgtggcctggtccaacaagtccgatttcgcctgcgccaacgccttcaacaacagcattatccccgaggacacattcttcccaagcagcgacgtgccctgcgacgtgaagctggtggaaaagagcttcgagacagacaccaacctgaacttccagaacctgagcgtgatcggcttcagaatcctgctgctgaaagtggccggctttaacctgctgatgaccctgcggctgtggtccagcagggccaagcgatctggatctggagcaacaaacttctcactactcaaacaagcaggtgacgtggaggagaatcccgggcctactagcatggccttaccagtgaccgccttgctcctgccgctggccttgctgctccacgccgccaggccggacatccagatgacacagagccctagcagcctgtctgccagcgtgggagacagagtgaccatcacatgcaaggccagccagagcgtgtccaacgacgtgacctggtatcagcagaagcctggacaggcccctaagctgctgatctacagcgccagcaacagatacagcggagtgcccgccagattttccggctctggctacggcaccgagttcacctttaccatcagcagcgtgcagagcgaggacttcgccgtgtacttctgccagcaagactacagcagcttcggccagggcaccaagctggaaatcaagagaggcggaggcggaagtggaggcggaggatctggcggcggaggctctcaggtgcagctggtggaatctggacctggcgtggtgcagcctggcagaagcctgagaatcagctgtgccgtgtccggcttcagcgtgaccaactacggcgtgcactgggtgcgccagccacctggaaaaggactggaatggctgggcgtgatctgggctggcggcatcaccaactacaacagcgccttcatgtcccggctgaccatctccaaggacaacagcaagaacaccgtgtacctccagatgaacagcctgcgggccgaggacaccgccatgtactactgtgcttccagaggcggccactacggctacgccctggattattggggccagggaaccctcgtgaccgtgtcctctacgcgtgaggacctgaagaacgtgttcccacctgaggtggccgtgttcgagcctagcaaggccgagatcgcccacacccagaaagccaccctcgtgtgcctggctaccggcttctaccccgaccatgtggaactgtcttggtgggtcaacggcaaagaggtgcacagcggcgtgtgtaccgacccccagccactgaaagaacagcccgccctgaacgacagccggtactgcctgagcagcagactgagagtgtccgccaccttctggcagaacccccggaaccacttcagatgccaggtgcagttctacggcctgagcgagaacgacgagtggacccaggacagagccaagcccgtgacccagatcgtgtctgccgaagcctggggcagagccgattgcggcatcaccagcgccagctaccaccagggcgtgctgagcgccaccatcctgtacgagatcctgctgggcaaggccaccctgtacgccgtgctggtgtctgccctggtgctgatggctatggtcaagcggaaggacagccggggacgcgccaagagaagcggatctggcgtgaagcagaccctgaatttcgacctgctgaagctggctggcgacgtggaatccaacccaggcccttctagaggccatatgaccgagtacaagcccacggtgcgcctcgccacccgcgacgacgtccccagggccgtacgcaccctcgccgccgcgttcgccgactaccccgccacgcgccacaccgtcgatccggaccgccacatcgagcgggtcaccgagctgcaagaactcttcctcacgcgcgtcgggctcgacatcggcaaggtgtgggtcgcggacgacggcgccgcggtggcggtctggaccacgccggagagcgtcgaagcgggggcggtgttcgccgagatcggcccgcgcatggccgagttgagcggttcccggctggccgcgcagcaacagatggaaggcctcctggcgccgcaccggcccaaggagcccgcgtggttcctggccaccgtcggcgtctcgcccgaccaccagggcaagggtctgggcagcgccgtcgtgctccccggagtggaggcggccgagcgcgccggggtgcccgccttcctggagacctccgcgccccgcaacctccccttctacgagcggctcggcttcaccgtcaccgccgacgtcgaggtgcccgaaggaccgcgcacctggtgcatgacccgcaagcccggtgcctga

SEQ ID NO: 35703 - DNA, 2280 bp, synthetic construct
  source 1..2280: mol_type = other DNA
atggccttaccagtgaccgccttgctcctgccgctggccttgctgctccacgccgccaggccgctcgagcagagttttgggttgttggaccctaaattgtgctatctgttggacggaatcctgttcatttacggagtgatcctgaccgcattgttcctgcgggttaagttttccagatccgcagacgcacccgcttaccaacaagggcagaaccaactctacaatgaacttaatttggggcggagggaagagtacgacgttctggacaaaaggaggggacgagatcccgagatgggcggaaagcctcagcgaaggaagaatccgcaagaggggctttataacgaactccagaaagataaaatggcagaagcctatagtgagattgggatgaagggagaaaggaggaggggtaaaggtcacgatgggttgtaccaaggattgagcacagccactaaagatacctatgatgcgctccacatgcaggccctgccgccaagaagggccaagcgatctggatctggagcaacaaacttctcactactcaaacaagcaggtgacgtggaggagaatcccgggcctactagcatggccttaccagtgaccgccttgctcctgccgctggccttgctgctccacgccgccaggccggacatccagatgacacagagccctagcagcctgtctgccagcgtgggagacagagtgaccatcacatgcaaggccagccagagcgtgtccaacgacgtgacctggtatcagcagaagcctggacaggcccctaagctgctgatctacagcgccagcaacagatacagcggagtgcccgccagattttccggctctggctacggcaccgagttcacctttaccatcagcagcgtgcagagcgaggacttcgccgtgtacttctgccagcaagactacagcagcttcggccagggcaccaagctggaaatcaagagaggcggaggcggaagtggaggcggaggatctggcggcggaggctctcaggtgcagctggtggaatctggacctggcgtggtgcagcctggcagaagcctgagaatcagctgtgccgtgtccggcttcagcgtgaccaactacggcgtgcactgggtgcgccagccacctggaaaaggactggaatggctgggcgtgatctgggctggcggcatcaccaactacaacagcgccttcatgtcccggctgaccatctccaaggacaacagcaagaacaccgtgtacctccagatgaacagcctgcgggccgaggacaccgccatgtactactgtgcttccagaggcggccactacggctacgccctggattattggggccagggaaccctcgtgaccgtgtcctctacgcgtgagctgggagagcctcagctgtgctatatcctggacgccatcctgtttctgtacggcatcgtgctgaccctgctgtactgccggctgaagatccaagtgcggaaggccgccatcaccagctacgagaaatccgacggcgtgtacaccggcctgagcaccagaaatcaagagacatacgagacactgaagcacgaaaagcctccacaacgcgccaagagaagcggatctggcgtgaagcagaccctgaatttcgacctgctgaagctggctggcgacgtggaatccaacccaggcccttctagaggccatatgaccgagtacaagcccacggtgcgcctcgccacccgcgacgacgtccccagggccgtacgcaccctcgccgccgcgttcgccgactaccccgccacgcgccacaccgtcgatccggaccgccacatcgagcgggtcaccgagctgcaagaactcttcctcacgcgcgtcgggctcgacatcggcaaggtgtgggtcgcggacgacggcgccgcggtggcggtctggaccacgccggagagcgtcgaagcgggggcggtgttcgccgagatcggcccgcgcatggccgagttgagcggttcccggctggccgcgcagcaacagatggaaggcctcctggcgccgcaccggcccaaggagcccgcgtggttcctggccaccgtcggcgtctcgcccgaccaccagggcaagggtctgggcagcgccgtcgtgctccccggagtggaggcggccgagcgcgccggggtgcccgccttcctggagacctccgcgccccgcaacctccccttctacgagcggctcggcttcaccgtcaccgccgacgtcgaggtgcccgaaggaccgcgcacctggtgcatgacccgcaagcccggtgcctga

SEQ ID NO: 35704 - DNA, 2913 bp, synthetic construct; identical to SEQ ID NO: 35695
  source 1..2913: mol_type = other DNA

SEQ ID NO: 35705 - DNA, 2913 bp, synthetic construct; identical to SEQ ID NO: 35696
  source 1..2913: mol_type = other DNA

SEQ ID NO: 35706 - DNA, 2910 bp, synthetic construct
  source 1..2910: mol_type = other DNA
atggccttaccagtgaccgccttgctcctgccgctggccttgctgctccacgccgccaggccgctcgaggaggaggacctgaagaacgtgttcccacctgaggtggccgtgttcgagcctagcgaggccgagatcagccacacccagaaagccaccctcgtgtgcctggctaccggcttctaccccgaccatgtggaactgtcttggtgggtcaacggcaaagaggtgcacagcggcgtgtgtaccgacccccagccactgaaagaacagcccgccctgaacgacagccggtactgcctgagcagcagactgagagtgtccgccaccttctggcagaacccccggaaccacttcagatgccaggtgcagttctacggcctgagcgagaacgacgagtggacccaggacagagccaagcccgtgacccagatcgtgtctgccgaagcctggggcagagccgatgatgtgattaagatccactggcaggaaaagaagtccaacaccatcctgggcagccaggaaggcaacaccatgaagaccaacgacacctacatgaagttcagctggctgaccgtgcccgagaagtccctggacaaagaacacagatgcatcgtgcggcacgaaaacaacaagaacggcgtggaccaggaaatcatcttcccacccatcaagaccgatgtgattacaatggaccccaaggacaactgctccaaggacgccaacgataccctgctgctccagctgaccaacaccagcgcctactacatgtacttgttgctgctgctgaagtccgtggtgtacttcgccatcatcacatgctgcctgctgcggagaaccgccttctgctgcaacggcgagaagtctagggccaagcgatctggatctggagcaacaaacttctcactactcaaacaagcaggtgacgtggaggagaatcccgggcctactagcatggccttaccagtgaccgccttgctcctgccgctggccttgctgctccacgccgccaggccggacatccagatgacacagagccctagcagcctgtctgccagcgtgggagacagagtgaccatcacatgcaaggccagccagagcgtgtccaacgacgtgacctggtatcagcagaagcctggacaggcccctaagctgctgatctacagcgccagcaacagatacagcggagtgcccgccagattttccggctctggctacggcaccgagttcacctttaccatcagcagcgtgcagagcgaggacttcgccgtgtacttctgccagcaagactacagcagcttcggccagggcaccaagctggaaatcaagagaggcggaggcggaagtggaggcggaggatctggcggcggaggctctcaggtgcagctggtggaatctggacctggcgtggtgcagcctggcagaagcctgagaatcagctgtgccgtgtccggcttcagcgtgaccaactacggcgtgcactgggtgcgccagccacctggaaaaggactggaatggctgggcgtgatctgggctggcggcatcaccaactacaacagcgccttcatgtcccggctgaccatctccaaggacaacagcaagaacaccgtgtacctccagatgaacagcctgcgggccgaggacaccgccatgtactactgtgcttccagaggcggccactacggctacgccctggattattggggccagggaaccctcgtgaccgtgtcctctacgcgtatccagaaccctgatcctgccgtgtaccagctgcgggatagcaagagcagcgacaagagcgtgtgtctgttcaccgacttcgacagccagaccaacgtgtcccagagcaaggactccgacgtgtacatcaccgataagtgcgtgctggacatgcggagcatggacttcaagagcaactccgccgtggcctggtccaacaagtccgatttcgcctgcgccaacgccttcaacaacagcattatccccgaggacacattcttcccaagccccgagagcagcgactccaccgaccacgtgaagcccaaagagacagagaacaccaagcagcccagcaagagctgccacaagcccaaggccatcgtgcacaccgagaaagtgaacatgatgagcctgaccgtgctgggcctgcggatgctgttcgccaaaaccgtggccgtgaacttcctgctgaccgccaagctgttcttcctccgcgccaagagaagcggatctggcgtgaagcagaccctgaatttcgacctgctgaagctggctggcgacgtggaatccaacccaggcccttctagaggccatatgaccgagtacaagcccacggtgcgcctcgccacccgcgacgacgtccccagggccgtacgcaccctcgccgccgcgttcgccgactaccccgccacgcgccacaccgtcgatccggaccgccacatcgagcgggtcaccgagctgcaagaactcttcctcacgcgcgtcgggctcgacatcggcaaggtgtgggtcgcggacgacggcgccgcggtggcggtctggaccacgccggagagcgtcgaagcgggggcggtgttcgccgagatcggcccgcgcatggccgagttgagcggttcccggctggccgcgcagcaacagatggaaggcctcctggcgccgcaccggcccaaggagcccgcgtggttcctggccaccgtcggcgtctcgcccgaccaccagggcaagggtctgggcagcgccgtcgtgctccccggagtggaggcggccgagcgcgccggggtgcccgccttcctggagacctccgcgccccgcaacctccccttctacgagcggctcggcttcaccgtcaccgccgacgtcgaggtgcccgaaggaccgcgcacctggtgcatgacccgcaagcccggtgcctga

SEQ ID NO: 35707 - DNA, 2910 bp, synthetic construct
  source 1..2910: mol_type = other DNA
atggccttaccagtgaccgccttgctcctgccgctggccttgctgctccacgccgccaggccgctcgagatccagaaccctgatcctgccgtgtaccagctgcgggatagcaagagcagcgacaagagcgtgtgtctgttcaccgacttcgacagccagaccaacgtgtcccagagcaaggactccgacgtgtacatcaccgataagtgcgtgctggacatgcggagcatggacttcaagagcaactccgccgtggcctggtccaacaagtccgatttcgcctgcgccaacgccttcaacaacagcattatccccgaggacacattcttcccaagccccgagagcagcgactccaccgaccacgtgaagcccaaagagacagagaacaccaagcagcccagcaagagctgccacaagcccaaggccatcgtgcacaccgagaaagtgaacatgatgagcctgaccgtgctgggcctgcggatgctgttcgccaaaaccgtggccgtgaacttcctgctgaccgccaagctgttcttcctcagggccaagcgatctggatctggagcaacaaacttctcactactcaaacaagcaggtgacgtggaggagaatcccgggcctactagcatggccttaccagtgaccgccttgctcctgccgctggccttgctgctccacgccgccaggccggacatccagatgacacagagccctagcagcctgtctgccagcgtgggagacagagtgaccatcacatgcaaggccagccagagcgtgtccaacgacgtgacctggtatcagcagaagcctggacaggcccctaagctgctgatctacagcgccagcaacagatacagcggagtgcccgccagattttccggctctggctacggcaccgagttcacctttaccatcagcagcgtgcagagcgaggacttcgccgtgtacttctgccagcaagactacagcagcttcggccagggcaccaagctggaaatcaagagaggcggaggcggaagtggaggcggaggatctggcggcggaggctctcaggtgcagctggtggaatctggacctggcgtggtgcagcctggcagaagcctgagaatcagctgtgccgtgtccggcttcagcgtgaccaactacggcgtgcactgggtgcgccagccacctggaaaaggactggaatggctgggcgtgatctgggctggcggcatcaccaactacaacagcgccttcatgtcccggctgaccatctccaaggacaacagcaagaacaccgtgtacctccagatgaacagcctgcgggccgaggacaccgccatgtactactgtgcttccagaggcggccactacggctacgccctggattattggggccagggaaccctcgtgaccgtgtcctctacgcgtgaggaggacctgaagaacgtgttcccacctgaggtggccgtgttcgagcctagcgaggccgagatcagccacacccagaaagccaccctcgtgtgcctggctaccggcttctaccccgaccatgtggaactgtcttggtgggtcaacggcaaagaggtgcacagcggcgtgtgtaccgacccccagccactgaaagaacagcccgccctgaacgacagccggtactgcctgagcagcagactgagagtgtccgccaccttctggcagaacccccggaaccacttcagatgccaggtgcagttctacggcctgagcgagaacgacgagtggacccaggacagagccaagcccgtgacccagatcgtgtctgccgaagcctggggcagagccgatgatgtgattaagatccactggcaggaaaagaagtccaacaccatcctgggcagccaggaaggcaacaccatgaagaccaacgacacctacatgaagttcagctggctgaccgtgcccgagaagtccctggacaaagaacacagatgcatcgtgcggcacgaaaacaacaagaacggcgtggaccaggaaatcatcttcccacccatcaagaccgatgtgattacaatggaccccaaggacaactgctccaaggacgccaacgataccctgctgctccagctgaccaacaccagcgcctactacatgtacttgttgctgctgctgaagtccgtggtgtacttcgccatcatcacatgctgcctgctgcggagaaccgccttctgctgcaacggcgagaagtctcgcgccaagagaagcggatctggcgtgaagcagaccctgaatttcgacctgctgaagctggctggcgacgtggaatccaacccaggcccttctagaggccatatgaccgagtacaagcccacggtgcgcctcgccacccgcgacgacgtccccagggccgtacgcaccctcgccgccgcgttcgccgactaccccgccacgcgccacaccgtcgatccggaccgccacatcgagcgggtcaccgagctgcaagaactcttcctcacgcgcgtcgggctcgacatcggcaaggtgtgggtcgcggacgacggcgccgcggtggcggtctggaccacgccggagagcgtcgaagcgggggcggtgttcgccgagatcggcccgcgcatggccgagttgagcggttcccggctggccgcgcagcaacagatggaaggcctcctggcgccgcaccggcccaaggagcccgcgtggttcctggccaccgtcggcgtctcgcccgaccaccagggcaagggtctgggcagcgccgtcgtgctccccggagtggaggcggccgagcgcgccggggtgcccgccttcctggagacctccgcgccccgcaacctccccttctacgagcggctcggcttcaccgtcaccgccgacgtcgaggtgcccgaaggaccgcgcacctggtgcatgacccgcaagcccggtgcctga

SEQ ID NO: 35708 - DNA, 2601 bp, synthetic construct
  source 1..2601: mol_type = other DNA
atggccttaccagtgaccgccttgctcctgccgctggccttgctgctccacgccgccaggccgctcgaggaggacctgaagaacgtgttcccacctgaggtggccgtgttcgagcctagcgaggccgagatcagccacacccagaaagccaccctcgtgtgcctggctaccggcttctaccccgaccatgtggaactgtcttggtgggtcaacggcaaagaggtgcacagcggcgtgtctaccgacccccagccactgaaagaacagcccgccctgaacgacagccggtactgcctgagcagcagactgagagtgtccgccaccttctggcagaacccccggaaccacttcagatgccaggtgcagttctacggcctgagcgagaacgacgagtggacccaggacagagccaagcccgtgacccagatcgtgtctgccgaagcctggggcagagccgattgcggctttaccagcgagagctaccagcagggcgtgctgagcgccaccaacctgagcgtgatcggcttcagaatcctgctgctgaaagtggccggctttaacctgctgatgaccctgcggctgtggtccagcagggccaagcgatctggatctggagcaacaaacttctcactactcaaacaagcaggtgacgtggaggagaatcccgggcctactagcatggccttaccagtgaccgccttgctcctgccgctggccttgctgctccacgccgccaggccggacatccagatgacacagagccctagcagcctgtctgccagcgtgggagacagagtgaccatcacatgcaaggccagccagagcgtgtccaacgacgtgacctggtatcagcagaagcctggacaggcccctaagctgctgatctacagcgccagcaacagatacagcggagtgcccgccagattttccggctctggctacggcaccgagttcacctttaccatcagcagcgtgcagagcgaggacttcgccgtgtacttctgccagcaagactacagcagcttcggccagggcaccaagctggaaatcaagagaggcggaggcggaagtggaggcggaggatctggcggcggaggctctcaggtgcagctggtggaatctggacctggcgtggtgcagcctggcagaagcctgagaatcagctgtgccgtgtccggcttcagcgtgaccaactacggcgtgcactgggtgcgccagccacctggaaaaggactggaatggctgggcgtgatctgggctggcggcatcaccaactacaacagcgccttcatgtcccggctgaccatctccaaggacaacagcaagaacaccgtgtacctccagatgaacagcctgcgggccgaggacaccgccatgtactactgtgcttccagaggcggccactacggctacgccctggattattggggccagggaaccctcgtgaccgtgtcctctacgcgtatccagaaccctgatcctgccgtgtaccagctgcgggatagcaagagcagcgacaagagcgtgtgtctgttcaccgacttcgacagccagaccaacgtgtcccagagcaaggactccgacgtgtacatcaccgataagaccgtgctggacatgcggagcatggacttcaagagcaactccgccgtggcctggtccaacaagtccgatttcgcctgcgccaacgccttcaacaacagcattatccccgaggacacattcttcccaagccccgagagcagctgcgacgtgaagctggtggaaaagagcttcgagacagacaccaacctgaacttccagatcctgtacgagatcctgctgggcaaggccaccctgtacgccgtgctggtgtctgccctggtgctgatggctatggtcaagcggaaggacagccggggacgcgccaagagaagcggatctggcgtgaagcagaccctgaatttcgacctgctgaagctggctggcgacgtggaatccaacccaggcccttctagaggccatatgaccgagtacaagcccacggtgcgcctcgccacccgcgacgacgtccccagggccgtacgcaccctcgccgccgcgttcgccgactaccccgccacgcgccacaccgtcgatccggaccgccacatcgagcgggtcaccgagctgcaagaactcttcctcacgcgcgtcgggctcgacatcggcaaggtgtgggtcgcggacgacggcgccgcggtggcggtctggaccacgccggagagcgtcgaagcgggggcggtgttcgccgagatcggcccgcgcatggccgagttgagcggttcccggctggccgcgcagcaacagatggaaggcctcctggcgccgcaccggcccaaggagcccgcgtggttcctggccaccgtcggcgtctcgcccgaccaccagggcaagggtctgggcagcgccgtcgtgctccccggagtggaggcggccgagcgcgccggggtgcccgccttcctggagacctccgcgccccgcaacctccccttctacgagcggctcggcttcaccgtcaccgccgacgtcgaggtgcccgaaggaccgcgcacctggtgcatgacccgcaagcccggtgcctga

SEQ ID NO: 35709 - DNA, 2601 bp, synthetic construct
  source 1..2601: mol_type = other DNA
atggccttaccagtgaccgccttgctcctgccgctggccttgctgctccacgccgccaggccgctcgagatccagaaccctgatcctgccgtgtaccagctgcgggatagcaagagcagcgacaagagcgtgtgtctgttcaccgacttcgacagccagaccaacgtgtcccagagcaaggactccgacgtgtacatcaccgataagaccgtgctggacatgcggagcatggacttcaagagcaactccgccgtggcctggtccaacaagtccgatttcgcctgcgccaacgccttcaacaacagcattatccccgaggacacattcttcccaagccccgagagcagctgcgacgtgaagctggtggaaaagagcttcgagacagacaccaacctgaacttccagatcctgtacgagatcctgctgggcaaggccaccctgtacgccgtgctggtgtctgccctggtgctgatggctatggtcaagcggaaggacagccggggaagggccaagcgatctggatctggagcaacaaacttctcactactcaaacaagcaggtgacgtggaggagaatcccgggcctactagcatggccttaccagtgaccgccttgctcctgccgctggccttgctgctccacgccgccaggccggacatccagatgacacagagccctagcagcctgtctgccagcgtgggagacagagtgaccatcacatgcaaggccagccagagcgtgtccaacgacgtgacctggtatcagcagaagcctggacaggcccctaagctgctgatctacagcgccagcaacagatacagcggagtgcccgccagattttccggctctggctacggcaccgagttcacctttaccatcagcagcgtgcagagcgaggacttcgccgtgtacttctgccagcaagactacagcagcttcggccagggcaccaagctggaaatcaagagaggcggaggcggaagtggaggcggaggatctggcggcggaggctctcaggtgcagctggtggaatctggacctggcgtggtgcagcctggcagaagcctgagaatcagctgtgccgtgtccggcttcagcgtgaccaactacggcgtgcactgggtgcgccagccacctggaaaaggactggaatggctgggcgtgatctgggctggcggcatcaccaactacaacagcgccttcatgtcccggctgaccatctccaaggacaacagcaagaacaccgtgtacctccagatgaacagcctgcgggccgaggacaccgccatgtactactgtgcttccagaggcggccactacggctacgccctggattattggggccagggaaccctcgtgaccgtgtcctctacgcgtgaggacctgaagaacgtgttcccacctgaggtggccgtgttcgagcctagcgaggccgagatcagccacacccagaaagccaccctcgtgtgcctggctaccggcttctaccccgaccatgtggaactgtcttggtgggtcaacggcaaagaggtgcacagcggcgtgtctaccgacccccagccactgaaagaacagcccgccctgaacgacagccggtactgcctgagcagcagactgagagtgtccgccaccttctggcagaacccccggaaccacttcagatgccaggtgcagttctacggcctgagcgagaacgacgagtggacccaggacagagccaagcccgtgacccagatcgtgtctgccgaagcctggggcagagccgattgcggctttaccagcgagagctaccagcagggcgtgctgagcgccaccaacctgagcgtgatcggcttcagaatcctgctgctgaaagtggccggctttaacctgctgatgaccctgcggctgtggtccagccgcgccaagagaagcggatctggcgtgaagcagaccctgaatttcgacctgctgaagctggctggcgacgtggaatccaacccaggcccttctagaggccatatgaccgagtacaagcccacggtgcgcctcgccacccgcgacgacgtccccagggccgtacgcaccctcgccgccgcgttcgccgactaccccgccacgcgccacaccgtcgatccggaccgccacatcgagcgggtcaccgagctgcaagaactcttcctcacgcgcgtcgggctcgacatcggcaaggtgtgggtcgcggacgacggcgccgcggtggcggtctggaccacgccggagagcgtcgaagcgggggcggtgttcgccgagatcggcccgcgcatggccgagttgagcggttcccggctggccgcgcagcaacagatggaaggcctcctggcgccgcaccggcccaaggagcccgcgtggttcctggccaccgtcggcgtctcgcccgaccaccagggcaagggtctgggcagcgccgtcgtgctccccggagtggaggcggccgagcgcgccggggtgcccgccttcctggagacctccgcgccccgcaacctccccttctacgagcggctcggcttcaccgtcaccgccgacgtcgaggtgcccgaaggaccgcgcacctggtgcatgacccgcaagcccggtgcctga

SEQ ID NO: 35710 - DNA, 2601 bp, synthetic construct
  source 1..2601: mol_type = other DNA
atggccttaccagtgaccgccttgctcctgccgctggccttgctgctccacgccgccaggccgctcgaggaggacctgaagaacgtgttcccacctgaggtggccgtgttcgagcctagcgaggccgagatcagccacacccagaaagccaccctcgtgtgcctggctaccggcttctaccccgaccatgtggaactgtcttggtgggtcaacggcaaagaggtgcacagcggcgtgtgtaccgacccccagccactgaaagaacagcccgccctgaacgacagccggtactgcctgagcagcagactgagagtgtccgccaccttctggcagaacccccggaaccacttcagatgccaggtgcagttctacggcctgagcgagaacgacgagtggacccaggacagagccaagcccgtgacccagatcgtgtctgccgaagcctggggcagagccgattgcgacgtgaagctggtggaaaagagcttcgagacagacaccaacctgaacttccagaacctgagcgtgatcggcttcagaatcctgctgctgaaagtggccggctttaacctgctgatgaccctgcggctgtggtccagcagggccaagcgatctggatctggagcaacaaacttctcactactcaaacaagcaggtgacgtggaggagaatcccgggcctactagcatggccttaccagtgaccgccttgctcctgccgctggccttgctgctccacgccgccaggccggacatccagatgacacagagccctagcagcctgtctgccagcgtgggagacagagtgaccatcacatgcaaggccagccagagcgtgtccaacgacgtgacctggtatcagcagaagcctggacaggcccctaagctgctgatctacagcgccagcaacagatacagcggagtgcccgccagattttccggctctggctacggcaccgagttcacctttaccatcagcagcgtgcagagcgaggacttcgccgtgtacttctgccagcaagactacagcagcttcggccagggcaccaagctggaaatcaagagaggcggaggcggaagtggaggcggaggatctggcggcggaggctctcaggtgcagctggtggaatctggacctggcgtggtgcagcctggcagaagcctgagaatcagctgtgccgtgtccggcttcagcgtgaccaactacggcgtgcactgggtgcgccagccacctggaaaaggactggaatggctgggcgtgatctgggctggcggcatcaccaactacaacagcgccttcatgtcccggctgaccatctccaaggacaacagcaagaacaccgtgtacctccagatgaacagcctgcgggccgaggacaccgccatgtactactgtgcttccagaggcggccactacggctacgccctggattattggggccagggaaccctcgtgaccgtgtcctctacgcgtatccagaaccctgatcctgccgtgtaccagctgcgggatagcaagagcagcgacaagagcgtgtgtctgttcaccgacttcgacagccagaccaacgtgtcccagagcaaggactccgacgtgtacatcaccgataagtgcgtgctggacatgcggagcatggacttcaagagcaactccgccgtggcctggtccaacaagtccgatttcgcctgcgccaacgccttcaacaacagcattatccccgaggacacattcttcccaagccccgagagcagctgcggctttaccagcgagagctaccagcagggcgtgctgagcgccaccatcctgtacgagatcctgctgggcaaggccaccctgtacgccgtgctggtgtctgccctggtgctgatggctatggtcaagcggaaggacagccggggacgcgccaagagaagcggatctggcgtgaagcagaccctgaatttcgacctgctgaagctggctggcgacgtggaatccaacccaggcccttctagaggccatatgaccgagtacaagcccacggtgcgcctcgccacccgcgacgacgtccccagggccgtacgcaccctcgccgccgcgttcgccgactaccccgccacgcgccacaccgtcgatccggaccgccacatcgagcgggtcaccgagctgcaagaactcttcctcacgcgcgtcgggctcgacatcggcaaggtgtgggtcgcggacgacggcgccgcggtggcggtctggaccacgccggagagcgtcgaagcgggggcggtgttcgccgagatcggcccgcgcatggccgagttgagcggttcccggctggccgcgcagcaacagatggaaggcctcctggcgccgcaccggcccaaggagcccgcgtggttcctggccaccgtcggcgtctcgcccgaccaccagggcaagggtctgggcagcgccgtcgtgctccccggagtggaggcggccgagcgcgccggggtgcccgccttcctggagacctccgcgccccgcaacctccccttctacgagcggctcggcttcaccgtcaccgccgacgtcgaggtgcccgaaggaccgcgcacctggtgcatgacccgcaagcccggtgcctga

SEQ ID NO: 35711 - DNA, 2601 bp, synthetic construct
  source 1..2601: mol_type = other DNA
atggccttaccagtgaccgccttgctcctgccgctggccttgctgctccacgccgccaggccgctcgaggaggacctgaagaacgtgttcccacctgaggtggccgtgttcgagcctagcgaggccgagatcagccacacccagaaagccaccctcgtgtgcctggctaccggcttctaccccgaccatgtggaactgtcttggtgggtcaacggcaaagaggtgcacagcggcgtgtctaccgacccccagccactgaaagaacagcccgccctgaacgacagccggtactgcctgagcagcagactgagagtgtccgccaccttctggcagaacccccggaaccacttcagatgccaggtgcagttctacggcctgagcgagaacgacgagtggacccaggacagagccaagcccgtgacccagatcgtgtctgccgaagcctggggcagagccgattgcgacgtgaagctggtggaaaagagcttcgagacagacaccaacctgaacttccagaacctgagcgtgatcggcttcagaatcctgctgctgaaagtggccggctttaacctgctgatgaccctgcggctgtggtccagcagggccaagcgatctggatctggagcaacaaacttctcactactcaaacaagcaggtgacgtggaggagaatcccgggcctactagcatggccttaccagtgaccgccttgctcctgccgctggccttgctgctccacgccgccaggccggacatccagatgacacagagccctagcagcctgtctgccagcgtgggagacagagtgaccatcacatgcaaggccagccagagcgtgtccaacgacgtgacctggtatcagcagaagcctggacaggcccctaagctgctgatctacagcgccagcaacagatacagcggagtgcccgccagattttccggctctggctacggcaccgagttcacctttaccatcagcagcgtgcagagcgaggacttcgccgtgtacttctgccagcaagactacagcagcttcggccagggcaccaagctggaaatcaagagaggcggaggcggaagtggaggcggaggatctggcggcggaggctctcaggtgcagctggtggaatctggacctggcgtggtgcagcctggcagaagcctgagaatcagctgtgccgtgtccggcttcagcgtgaccaactacggcgtgcactgggtgcgccagccacctggaaaaggactggaatggctgggcgtgatctgggctggcggcatcaccaactacaacagcgccttcatgtcccggctgaccatctccaaggacaacagcaagaacaccgtgtacctccagatgaacagcctgcgggccgaggacaccgccatgtactactgtgcttccagaggcggccactacggctacgccctggattattggggccagggaaccctcgtgaccgtgtcctctacgcgtatccagaaccctgatcctgccgtgtaccagctgcgggatagcaagagcagcgacaagagcgtgtgtctgttcaccgacttcgacagccagaccaacgtgtcccagagcaaggactccgacgtgtacatcaccgataagaccgtgctggacatgcggagcatggacttcaagagcaactccgccgtggcctggtccaacaagtccgatttcgcctgcgccaacgccttcaacaacagcattatccccgaggacacattcttcccaagccccgagagcagctgcggctttaccagcgagagctaccagcagggcgtgctgagcgccaccatcctgtacgagatcctgctgggcaaggccaccctgtacgccgtgctggtgtctgccctggtgctgatggctatggtcaagcggaaggacagccggggacgcgccaagagaagcggatctggcgtgaagcagaccctgaatttcgacctgctgaagctggctggcgacgtggaatccaacccaggcccttctagaggccatatgaccgagtacaagcccacggtgcgcctcgccacccgcgacgacgtccccagggccgtacgcaccctcgccgccgcgttcgccgactaccccgccacgcgccacaccgtcgatccggaccgccacatcgagcgggtcaccgagctgcaagaactcttcctcacgcgcgtcgggctcgacatcggcaaggtgtgggtcgcggacgacggcgccgcggtggcggtctggaccacgccggagagcgtcgaagcgggggcggtgttcgccgagatcggcccgcgcatggccgagttgagcggttcccggctggccgcgcagcaacagatggaaggcctcctggcgccgcaccggcccaaggagcccgcgtggttcctggccaccgtcggcgtctcgcccgaccaccagggcaagggtctgggcagcgccgtcgtgctccccggagtggaggcggccgagcgcgccggggtgcccgccttcctggagacctccgcgccccgcaacctccccttctacgagcggctcggcttcaccgtcaccgccgacgtcgaggtgcccgaaggaccgcgcacctggtgcatgacccgcaagcccggtgcctga

SEQ ID NO: 35712 - DNA, 2910 bp, synthetic construct
  source 1..2910: mol_type = other DNA
atggccttaccagtgaccgccttgctcctgccgctggccttgctgctccacgccgccaggccgctcgaggaggaggacctgaagaacgtgttcccacctgaggtggccgtgttcgagcctagcgaggccgagatcagccacacccagaaagccaccctcgtgtgcctggctaccggcttctaccccgaccatgtggaactgtcttggtgggtcaacggcaaagaggtgcacagcggcgtgtctaccgacccccagccactgaaagaacagcccgccctgaacgacagccggtactgcctgagcagcagactgagagtgtccgccaccttctggcagaacccccggaaccacttcagatgccaggtgcagttctacggcctgagcgagaacgacgagtggacccaggacagagccaagcccgtgacccagatcgtgtctgccgaagcctggggcagagccgatgatgtgattaagatccactggcaggaaaagaagtccaacaccatcctgggcagccaggaaggcaacaccatgaagaccaacgacacctacatgaagttcagctggctgaccgtgcccgagaagtccctggacaaagaacacagatgcatcgtgcggcacgaaaacaacaagaacggcgtggaccaggaaatcatcttcccacccatcaagaccgatgtgattacaatggaccccaaggacaactgctccaaggacgccaacgataccctgctgctccagctgaccaacaccagcgcctactacatgtacttgttgctgctgctgaagtccgtggtgtacttcgccatcatcacatgctgcctgctgcggagaaccgccttctgctgcaacggcgagaagtctagggccaagcgatctggatctggagcaacaaacttctcactactcaaacaagcaggtgacgtggaggagaatcccgggcctactagcatggccttaccagtgaccgccttgctcctgccgctggccttgctgctccacgccgccaggccggacatccagatgacacagagccctagcagcctgtctgccagcgtgggagacagagtgaccatcacatgcaaggccagccagagcgtgtccaacgacgtgacctggtatcagcagaagcctggacaggcccctaagctgctgatctacagcgccagcaacagatacagcggagtgcccgccagattttccggctctggctacggcaccgagttcacctttaccatcagcagcgtgcagagcgaggacttcgccgtgtacttctgccagcaagactacagcagcttcggccagggcaccaagctggaaatcaagagaggcggaggcggaagtggaggcggaggatctggcggcggaggctctcaggtgcagctggtggaatctggacctggcgtggtgcagcctggcagaagcctgagaatcagctgtgccgtgtccggcttcagcgtgaccaactacggcgtgcactgggtgcgccagccacctggaaaaggactggaatggctgggcgtgatctgggctggcggcatcaccaactacaacagcgccttcatgtcccggctgaccatctccaaggacaacagcaagaacaccgtgtacctccagatgaacagcctgcgggccgaggacaccgccatgtactactgtgcttccagaggcggccactacggctacgccctggattattggggccagggaaccctcgtgaccgtgtcctctacgcgtatccagaaccctgatcctgccgtgtaccagctgcgggatagcaagagcagcgacaagagcgtgtgtctgttcaccgacttcgacagccagaccaacgtgtcccagagcaaggactccgacgtgtacatcaccgataagaccgtgctggacatgcggagcatggacttcaagagcaactccgccgtggcctggtccaacaagtccgatttcgcctgcgccaacgccttcaacaacagcattatccccgaggacacattcttcccaagccccgagagcagcgactccaccgaccacgtgaagcccaaagagacagagaacaccaagcagcccagcaagagctgccacaagcccaaggccatcgtgcacaccgagaaagtgaacatgatgagcctgaccgtgctgggcctgcggatgctgttcgccaaaaccgtggccgtgaacttcctgctgaccgccaagctgttcttcctccgcgccaagagaagcggatctggcgtgaagcagaccctgaatttcgacctgctgaagctggctggcgacgtggaatccaacccaggcccttctagaggccatatgaccgagtacaagcccacggtgcgcctcgccacccgcgacgacgtccccagggccgtacgcaccctcgccgccgcgttcgccgactaccccgccacgcgccacaccgtcgatccggaccgccacatcgagcgggtcaccgagctgcaagaactcttcctcacgcgcgtcgggctcgacatcggcaaggtgtgggtcgcggacgacggcgccgcggtggcggtctggaccacgccggagagcgtcgaagcgggggcggtgttcgccgagatcggcccgcgcatggccgagttgagcggttcccggctggccgcgcagcaacagatggaaggcctcctggcgccgcaccggcccaaggagcccgcgtggttcctggccaccgtcggcgtctcgcccgaccaccagggcaagggtctgggcagcgccgtcgtgctccccggagtggaggcggccgagcgcgccggggtgcccgccttcctggagacctccgcgccccgcaacctccccttctacgagcggctcggcttcaccgtcaccgccgacgtcgaggtgcccgaaggaccgcgcacctggtgcatgacccgcaagcccggtgcctga

SEQ ID NO: 35713 - DNA, 2601 bp, synthetic construct
  source 1..2601: mol_type = other DNA
atggccttaccagtgaccgccttgctcctgccgctggccttgctgctccacgccgccaggccgctcgaggaggacctgaagaacgtgttcccacctgaggtggccgtgttcgagcctagcgaggccgagatcagccacacccagaaagccaccctcgtgtgcctggctaccggcttctaccccgaccatgtggaactgtcttggtgggtcaacggcaaagaggtgcacagcggcgtgtgtaccgacccccagccactgaaagaacagcccgccctgaacgacagccggtactgcctgagcagcagactgagagtgtccgccaccttctggcagaacccccggaaccacttcagatgccaggtgcagttctacggcctgagcgagaacgacgagtggacccaggacagagccaagcccgtgacccagatcgtgtctgccgaagcctggggcagagccgattgcggctttaccagcgagagctaccagcagggcgtgctgagcgccaccaacctgagcgtgatcggcttcagaatcctgctgctgaaagtggccggctttaacctgctgatgaccctgcggctgtggtccagcagggccaagcgatctggatctggagcaacaaacttctcactactcaaacaagcaggtgacgtggaggagaatcccgggcctactagcatggccttaccagtgaccgccttgctcctgccgctggccttgctgctccacgccgccaggccggacatccagatgacacagagccctagcagcctgtctgccagcgtgggagacagagtgaccatcacatgcaaggccagccagagcgtgtccaacgacgtgacctggtatcagcagaagcctggacaggcccctaagctgctgatctacagcgccagcaacagatacagcggagtgcccgccagattttccggctctggctacggcaccgagttcacctttaccatcagcagcgtgcagagcgaggacttcgccgtgtacttctgccagcaagactacagcagcttcggccagggcaccaagctggaaatcaagagaggcggaggcggaagtggaggcggaggatctggcggcggaggctctcaggtgcagctggtggaatctggacctggcgtggtgcagcctggcagaagcctgagaatcagctgtgccgtgtccggcttcagcgtgaccaactacggcgtgcactgggtgcgccagccacctggaaaaggactggaatggctgggcgtgatctgggctggcggcatcaccaactacaacagcgccttcatgtcccggctgaccatctccaaggacaacagcaagaacaccgtgtacctccagatgaacagcctgcgggccgaggacaccgccatgtactactgtgcttccagaggcggccactacggctacgccctggattattggggccagggaaccctcgtgaccgtgtcctctacgcgtatccagaaccctgatcctgccgtgtaccagctgcgggatagcaagagcagcgacaagagcgtgtgtctgttcaccgacttcgacagccagaccaacgtgtcccagagcaaggactccgacgtgtacatcaccgataagtgcgtgctggacatgcggagcatggacttcaagagcaactccgccgtggcctggtccaacaagtccgatttcgcctgcgccaacgccttcaacaacagcattatccccgaggacacattcttcccaagccccgagagcagctgcgacgtgaagctggtggaaaagagcttcgagacagacaccaacctgaacttccagatcctgtacgagatcctgctgggcaaggccaccctgtacgccgtgctggtgtctgccctggtgctgatggctatggtcaagcggaaggacagccggggacgcgccaagagaagcggatctggcgtgaagcagaccctgaatttcgacctgctgaagctggctggcgacgtggaatccaacccaggcccttctagaggccatatgaccgagtacaagcccacggtgcgcctcgccacccgcgacgacgtccccagggccgtacgcaccctcgccgccgcgttcgccgactaccccgccacgcgccacaccgtcgatccggaccgccacatcgagcgggtcaccgagctgcaagaactcttcctcacgcgcgtcgggctcgacatcggcaaggtgtgggtcgcggacgacggcgccgcggtggcggtctggaccacgccggagagcgtcgaagcgggggcggtgttcgccgagatcggcccgcgcatggccgagttgagcggttcccggctggccgcgcagcaacagatggaaggcctcctggcgccgcaccggcccaaggagcccgcgtggttcctggccaccgtcggcgtctcgcccgaccaccagggcaagggtctgggcagcgccgtcgtgctccccggagtggaggcggccgagcgcgccggggtgcccgccttcctggagacctccgcgccccgcaacctccccttctacgagcggctcggcttcaccgtcaccgccgacgtcgaggtgcccgaaggaccgcgcacctggtgcatgacccgcaagcccggtgcctga

SEQ ID NO: 35714 - DNA, 2688 bp, synthetic construct
  source 1..2688: mol_type = other DNA
atggccttaccagtgaccgccttgctcctgccgctggccttgctgctccacgccgccaggccgctcgaggaggaggacctgaagaacgtgttcccacctgaggtggccgtgttcgagcctagcgaggccgagatcagccacacccagaaagccaccctcgtgtgcctggctaccggcttctaccccgaccatgtggaactgtcttggtgggtcaacggcaaagaggtgcacagcggcgtgtgtaccgacccccagccactgaaagaacagcccgccctgaacgacagccggtactgcctgagcagcagactgagagtgtccgccaccttctggcagaacccccggaaccacttcagatgccaggtgcagttctacggcctgagcgagaacgacgagtggacccaggacagagccaagcccgtgacccagatcgtgtctgccgaagcctggggcagagccgattgcggctttaccagcgagagctaccagcagggcgtgctgagcgccaccaacctgagcgtgatcggcttcagaatcctgctgctgaaagtggccggctttaacctgctgatgaccctgcggctgtggtccagcagggccaagcgatctggatctggagcaacaaacttctcactactcaaacaagcaggtgacgtggaggagaatcccgggcctactagcatggccttaccagtgaccgccttgctcctgccgctggccttgctgctccacgccgccaggccggacatccagatgacacagagccctagcagcctgtctgccagcgtgggagacagagtgaccatcacatgcaaggccagccagagcgtgtccaacgacgtgacctggtatcagcagaagcctggacaggcccctaagctgctgatctacagcgccagcaacagatacagcggagtgcccgccagattttccggctctggctacggcaccgagttcacctttaccatcagcagcgtgcagagcgaggacttcgccgtgtacttctgccagcaagactacagcagcttcggccagggcaccaagctggaaatcaagagaggcggaggcggaagtggaggcggaggatctggcggcggaggctctcaggtgcagctggtggaatctggacctggcgtggtgcagcctggcagaagcctgagaatcagctgtgccgtgtccggcttcagcgtgaccaactacggcgtgcactgggtgcgccagccacctggaaaaggactggaatggctgggcgtgatctgggctggcggcatcaccaactacaacagcgccttcatgtcccggctgaccatctccaaggacaacagcaagaacaccgtgtacctccagatgaacagcctgcgggccgaggacaccgccatgtactactgtgcttccagaggcggccactacggctacgccctggattattggggccagggaaccctcgtgaccgtgtcctctacgcgtggacagcctaaggccaatcctaccgtgacactgttccctccaagcagcgaagaactccaggccaacaaggccacacttgtgtgcctgatctccgacttctaccctggggctgtgacagtggcttggaaggccgatggatctcctgtgaaagccggcgtggaaaccaccaagccatccaagcagagcaacaacaaatacgccgccagctcctacctgagcctgacacctgagcagtggaagtcccacagatcctacagctgccaagtgacccacgaaggcagcaccgtggaaaagacagtggcccctacagagtgcagccccatcaagaccgatgtgattacaatggaccccaaggacaactgctccaaggacgccaacgataccctgctgctccagctgaccaacaccagcgcctactacatgtacttgttgctgctgctgaagtccgtggtgtacttcgccatcatcacatgctgcctgctgcggagaaccgccttctgctgcaacggcgagaagtctcgcgccaagagaagcggatctggcgtgaagcagaccctgaatttcgacctgctgaagctggctggcgacgtggaatccaacccaggcccttctagaggccatatgaccgagtacaagcccacggtgcgcctcgccacccgcgacgacgtccccagggccgtacgcaccctcgccgccgcgttcgccgactaccccgccacgcgccacaccgtcgatccggaccgccacatcgagcgggtcaccgagctgcaagaactcttcctcacgcgcgtcgggctcgacatcggcaaggtgtgggtcgcggacgacggcgccgcggtggcggtctggaccacgccggagagcgtcgaagcgggggcggtgttcgccgagatcggcccgcgcatggccgagttgagcggttcccggctggccgcgcagcaacagatggaaggcctcctggcgccgcaccggcccaaggagcccgcgtggttcctggccaccgtcggcgtctcgcccgaccaccagggcaagggtctgggcagcgccgtcgtgctccccggagtggaggcggccgagcgcgccggggtgcccgccttcctggagacctccgcgccccgcaacctccccttctacgagcggctcggcttcaccgtcaccgccgacgtcgaggtgcccgaaggaccgcgcacctggtgcatgacccgcaagcccggtgcctga

SEQ ID NO: 35715 - DNA, 2688 bp, synthetic construct
  source 1..2688: mol_type = other DNA
atggccttaccagtgaccgccttgctcctgccgctggccttgctgctccacgccgccaggccgctcgagggacagcctaaggccaatcctaccgtgacactgttccctccaagcagcgaagaactccaggccaacaaggccacacttgtgtgcctgatctccgacttctaccctggggctgtgacagtggcttggaaggccgatggatctcctgtgaaagccggcgtggaaaccaccaagccatccaagcagagcaacaacaaatacgccgccagctcctacctgagcctgacacctgagcagtggaagtcccacagatcctacagctgccaagtgacccacgaaggcagcaccgtggaaaagacagtggcccctacagagtgcagccccatcaagaccgatgtgattacaatggaccccaaggacaactgctccaaggacgccaacgataccctgctgctccagctgaccaacaccagcgcctactacatgtacttgttgctgctgctgaagtccgtggtgtacttcgccatcatcacatgctgcctgctgcggagaaccgccttctgctgcaacggcgagaagtctagggccaagcgatctggatctggagcaacaaacttctcactactcaaacaagcaggtgacgtggaggagaatcccgggcctactagcatggccttaccagtgaccgccttgctcctgccgctggccttgctgctccacgccgccaggccggacatccagatgacacagagccctagcagcctgtctgccagcgtgggagacagagtgaccatcacatgcaaggccagccagagcgtgtccaacgacgtgacctggtatcagcagaagcctggacaggcccctaagctgctgatctacagcgccagcaacagatacagcggagtgcccgccagattttccggctctggctacggcaccgagttcacctttaccatcagcagcgtgcagagcgaggacttcgccgtgtacttctgccagcaagactacagcagcttcggccagggcaccaagctggaaatcaagagaggcggaggcggaagtggaggcggaggatctggcggcggaggctctcaggtgcagctggtggaatctggacctggcgtggtgcagcctggcagaagcctgagaatcagctgtgccgtgtccggcttcagcgtgaccaactacggcgtgcactgggtgcgccagccacctggaaaaggactggaatggctgggcgtgatctgggctggcggcatcaccaactacaacagcgccttcatgtcccggctgaccatctccaaggacaacagcaagaacaccgtgtacctccagatgaacagcctgcgggccgaggacaccgccatgtactactgtgcttccagaggcggccactacggctacgccctggattattggggccagggaaccctcgtgaccgtgtcctctacgcgtgaggaggacctgaagaacgtgttcccacctgaggtggccgtgttcgagcctagcgaggccgagatcagccacacccagaaagccaccctcgtgtgcctggctaccggcttctaccccgaccatgtggaactgtcttggtgggtcaacggcaaagaggtgcacagcggcgtgtgtaccgacccccagccactgaaagaacagcccgccctgaacgacagccggtactgcctgagcagcagactgagagtgtccgccaccttctggcagaacccccggaaccacttcagatgccaggtgcagttctacggcctgagcgagaacgacgagtggacccaggacagagccaagcccgtgacccagatcgtgtctgccgaagcctggggcagagccgattgcggctttaccagcgagagctaccagcagggcgtgctgagcgccaccaacctgagcgtgatcggcttcagaatcctgctgctgaaagtggccggctttaacctgctgatgaccctgcggctgtggtccagccgcgccaagagaagcggatctggcgtgaagcagaccctgaatttcgacctgctgaagctggctggcgacgtggaatccaacccaggcccttctagaggccatatgaccgagtacaagcccacggtgcgcctcgccacccgcgacgacgtccccagggccgtacgcaccctcgccgccgcgttcgccgactaccccgccacgcgccacaccgtcgatccggaccgccacatcgagcgggtcaccgagctgcaagaactcttcctcacgcgcgtcgggctcgacatcggcaaggtgtgggtcgcggacgacggcgccgcggtggcggtctggaccacgccggagagcgtcgaagcgggggcggtgttcgccgagatcggcccgcgcatggccgagttgagcggttcccggctggccgcgcagcaacagatggaaggcctcctggcgccgcaccggcccaaggagcccgcgtggttcctggccaccgtcggcgtctcgcccgaccaccagggcaagggtctgggcagcgccgtcgtgctccccggagtggaggcggccgagcgcgccggggtgcccgccttcctggagacctccgcgccccgcaacctccccttctacgagcggctcggcttcaccgtcaccgccgacgtcgaggtgcccgaaggaccgcgcacctggtgcatgacccgcaagcccggtgcctga

SEQ ID NO: 35716 - DNA, 2679 bp, synthetic construct
  source 1..2679: mol_type = other DNA
atggccttaccagtgaccgccttgctcctgccgctggccttgctgctccacgccgccaggccgctcgaggaggcctctacaaagggaccctccgtgtttcctctggctcccagcagcaagtctacaagcggaggaacagccgctctgggctgcctggtcaaggattactttcccgagcctgtgaccgtgtcctggaatagcggagcactgacaagcggcgtgcacacctttccagccgtgctgcaaagcagcggcctgtactctctgagcagcgtggtcacagtgcctagctctagcctgggcacccagacctacatctgcaatgtgaaccacaagcctagcaacaccaaggtggacaagagagtggaacccaagagctgtcccatcaagaccgatgtgattacaatggaccccaaggacaactgctccaaggacgccaacgataccctgctgctccagctgaccaacaccagcgcctactacatgtacttgttgctgctgctgaagtccgtggtgtacttcgccatcatcacatgctgcctgctgcggagaaccgccttctgctgcaacggcgagaagtctagggccaagcgatctggatctggagcaacaaacttctcactactcaaacaagcaggtgacgtggaggagaatcccgggcctactagcatggccttaccagtgaccgccttgctcctgccgctggccttgctgctccacgccgccaggccggacatccagatgacacagagccctagcagcctgtctgccagcgtgggagacagagtgaccatcacatgcaaggccagccagagcgtgtccaacgacgtgacctggtatcagcagaagcctggacaggcccctaagctgctgatctacagcgccagcaacagatacagcggagtgcccgccagattttccggctctggctacggcaccgagttcacctttaccatcagcagcgtgcagagcgaggacttcgccgtgtacttctgccagcaagactacagcagcttcggccagggcaccaagctggaaatcaagagaggcggaggcggaagtggaggcggaggatctggcggcggaggctctcaggtgcagctggtggaatctggacctggcgtggtgcagcctggcagaagcctgagaatcagctgtgccgtgtccggcttcagcgtgaccaactacggcgtgcactgggtgcgccagccacctggaaaaggactggaatggctgggcgtgatctgggctggcggcatcaccaactacaacagcgccttcatgtcccggctgaccatctccaaggacaacagcaagaacaccgtgtacctccagatgaacagcctgcgggccgaggacaccgccatgtactactgtgcttccagaggcggccactacggctacgccctggattattggggccagggaaccctcgtgaccgtgtcctctacgcgtggacagcctaaggccaatcctaccgtgacactgttccctccaagcagcgaagaactccaggccaacaaggccacacttgtgtgcctgatctccgacttctaccctggggctgtgacagtggcttggaaggccgatggatctcctgtgaaagccggcgtggaaaccaccaagccatccaagcagagcaacaacaaatacgccgccagctcctacctgagcctgacacctgagcagtggaagtcccacagatcctacagctgccaagtgacccacgaaggcagcaccgtggaaaagacagtggcccctacagagtgcagcgaagtgaaaaccgactccaccgaccacgtgaagcccaaagagacagagaacaccaagcagcccagcaagagctgccacaagcccaaggccatcgtgcacaccgagaaagtgaacatgatgagcctgaccgtgctgggcctgcggatgctgttcgccaaaaccgtggccgtgaacttcctgctgaccgccaagctgttcttcctccgcgccaagagaagcggatctggcgtgaagcagaccctgaatttcgacctgctgaagctggctggcgacgtggaatccaacccaggcccttctagaggccatatgaccgagtacaagcccacggtgcgcctcgccacccgcgacgacgtccccagggccgtacgcaccctcgccgccgcgttcgccgactaccccgccacgcgccacaccgtcgatccggaccgccacatcgagcgggtcaccgagctgcaagaactcttcctcacgcgcgtcgggctcgacatcggcaaggtgtgggtcgcggacgacggcgccgcggtggcggtctggaccacgccggagagcgtcgaagcgggggcggtgttcgccgagatcggcccgcgcatggccgagttgagcggttcccggctggccgcgcagcaacagatggaaggcctcctggcgccgcaccggcccaaggagcccgcgtggttcctggccaccgtcggcgtctcgcccgaccaccagggcaagggtctgggcagcgccgtcgtgctccccggagtggaggcggccgagcgcgccggggtgcccgccttcctggagacctccgcgccccgcaacctccccttctacgagcggctcggcttcaccgtcaccgccgacgtcgaggtgcccgaaggaccgcgcacctggtgcatgacccgcaagcccggtgcctga

SEQ ID NO: 35717 - DNA, 2613 bp, synthetic construct
  source 1..2613: mol_type = other DNA
atggccttaccagtgaccgccttgctcctgccgctggccttgctgctccacgccgccaggccgctcgaggaggcctctacaaagggaccctccgtgtttcctctggctcccagcagcaagtctacaagcggaggaacagccgctctgggctgcctggtcaaggattactttcccgagcctgtgaccgtgtcctggaatagcggagcactgacaagcggcgtgcacacctttccagccgtgctgcaaagcagcggcctgtactctctgagcagcgtggtcacagtgcctagctctagcctgggcacccagacctacatctgcaatgtgaaccacaagcctagcaacaccaaggtggacaagagagtggaacccaagagctgtggcagagccgattgcggctttaccagcgagagctaccagcagggcgtgctgagcgccaccatcctgtacgagatcctgctgggcaaggccaccctgtacgccgtgctggtgtctgccctggtgctgatggctatggtcaagcggaaggacagccggggaagggccaagcgatctggatctggagcaacaaacttctcactactcaaacaagcaggtgacgtggaggagaatcccgggcctactagcatggccttaccagtgaccgccttgctcctgccgctggccttgctgctccacgccgccaggccggacatccagatgacacagagccctagcagcctgtctgccagcgtgggagacagagtgaccatcacatgcaaggccagccagagcgtgtccaacgacgtgacctggtatcagcagaagcctggacaggcccctaagctgctgatctacagcgccagcaacagatacagcggagtgcccgccagattttccggctctggctacggcaccgagttcacctttaccatcagcagcgtgcagagcgaggacttcgccgtgtacttctgccagcaagactacagcagcttcggccagggcaccaagctggaaatcaagagaggcggaggcggaagtggaggcggaggatctggcggcggaggctctcaggtgcagctggtggaatctggacctggcgtggtgcagcctggcagaagcctgagaatcagctgtgccgtgtccggcttcagcgtgaccaactacggcgtgcactgggtgcgccagccacctggaaaaggactggaatggctgggcgtgatctgggctggcggcatcaccaactacaacagcgccttcatgtcccggctgaccatctccaaggacaacagcaagaacaccgtgtacctccagatgaacagcctgcgggccgaggacaccgccatgtactactgtgcttccagaggcggccactacggctacgccctggattattggggccagggaaccctcgtgaccgtgtcctctacgcgtggacagcctaaggccaatcctaccgtgacactgttccctccaagcagcgaagaactccaggccaacaaggccacacttgtgtgcctgatctccgacttctaccctggggctgtgacagtggcttggaaggccgatggatctcctgtgaaagccggcgtggaaaccaccaagccatccaagcagagcaacaacaaatacgccgccagctcctacctgagcctgacacctgagcagtggaagtcccacagatcctacagctgccaagtgacccacgaaggcagcaccgtggaaaagacagtggcccctacagagtgcagcatccccgaggacacattcttcccaagccccgagagcagctgcgacgtgaagctggtggaaaagagcttcgagacagacaccaacctgaacttccagaacctgagcgtgatcggcttcagaatcctgctgctgaaagtggccggctttaacctgctgatgaccctgcggctgtggtccagccgcgccaagagaagcggatctggcgtgaagcagaccctgaatttcgacctgctgaagctggctggcgacgtggaatccaacccaggcccttctagaggccatatgaccgagtacaagcccacggtgcgcctcgccacccgcgacgacgtccccagggccgtacgcaccctcgccgccgcgttcgccgactaccccgccacgcgccacaccgtcgatccggaccgccacatcgagcgggtcaccgagctgcaagaactcttcctcacgcgcgtcgggctcgacatcggcaaggtgtgggtcgcggacgacggcgccgcggtggcggtctggaccacgccggagagcgtcgaagcgggggcggtgttcgccgagatcggcccgcgcatggccgagttgagcggttcccggctggccgcgcagcaacagatggaaggcctcctggcgccgcaccggcccaaggagcccgcgtggttcctggccaccgtcggcgtctcgcccgaccaccagggcaagggtctgggcagcgccgtcgtgctccccggagtggaggcggccgagcgcgccggggtgcccgccttcctggagacctccgcgccccgcaacctccccttctacgagcggctcggcttcaccgtcaccgccgacgtcgaggtgcccgaaggaccgcgcacctggtgcatgacccgcaagcccggtgcctga

SEQ ID NO: 35718 - DNA, 2613 bp, synthetic construct
  source 1..2613: mol_type = other DNA
atggccttaccagtgaccgccttgctcctgccgctggccttgctgctccacgccgccaggccgctcgaggaggcctctacaaagggaccctccgtgtttcctctggctcccagcagcaagtctacaagcggaggaacagccgctctgggctgcctggtcaaggattactttcccgagcctgtgaccgtgtcctggaatagcggagcactgacaagcggcgtgcacacctttccagccgtgctgcaaagcagcggcctgtactctctgagcagcgtggtcacagtgcctagctctagcctgggcacccagacctacatctgcaatgtgaaccacaagcctagcaacaccaaggtggacaagagagtggaacccaagagctgtatccccgaggacacattcttcccaagccccgagagcagctgcgacgtgaagctggtggaaaagagcttcgagacagacaccaacctgaacttccagaacctgagcgtgatcggcttcagaatcctgctgctgaaagtggccggctttaacctgctgatgaccctgcggctgtggtccagcagggccaagcgatctggatctggagcaacaaacttctcactactcaaacaagcaggtgacgtggaggagaatcccgggcctactagcatggccttaccagtgaccgccttgctcctgccgctggccttgctgctccacgccgccaggccggacatccagatgacacagagccctagcagcctgtctgccagcgtgggagacagagtgaccatcacatgcaaggccagccagagcgtgtccaacgacgtgacctggtatcagcagaagcctggacaggcccctaagctgctgatctacagcgccagcaacagatacagcggagtgcccgccagattttccggctctggctacggcaccgagttcacctttaccatcagcagcgtgcagagcgaggacttcgccgtgtacttctgccagcaagactacagcagcttcggccagggcaccaagctggaaatcaagagaggcggaggcggaagtggaggcggaggatctggcggcggaggctctcaggtgcagctggtggaatctggacctggcgtggtgcagcctggcagaagcctgagaatcagctgtgccgtgtccggcttcagcgtgaccaactacggcgtgcactgggtgcgccagccacctggaaaaggactggaatggctgggcgtgatctgggctggcggcatcaccaactacaacagcgccttcatgtcccggctgaccatctccaaggacaacagcaagaacaccgtgtacctccagatgaacagcctgcgggccgaggacaccgccatgtactactgtgcttccagaggcggccactacggctacgccctggattattggggccagggaaccctcgtgaccgtgtcctctacgcgtggacagcctaaggccaatcctaccgtgacactgttccctccaagcagcgaagaactccaggccaacaaggccacacttgtgtgcctgatctccgacttctaccctggggctgtgacagtggcttggaaggccgatggatctcctgtgaaagccggcgtggaaaccaccaagccatccaagcagagcaacaacaaatacgccgccagctcctacctgagcctgacacctgagcagtggaagtcccacagatcctacagctgccaagtgacccacgaaggcagcaccgtggaaaagacagtggcccctacagagtgcagcggcagagccgattgcggctttaccagcgagagctaccagcagggcgtgctgagcgccaccatcctgtacgagatcctgctgggcaaggccaccctgtacgccgtgctggtgtctgccctggtgctgatggctatggtcaagcggaaggacagccggggacgcgccaagagaagcggatctggcgtgaagcagaccctgaatttcgacctgctgaagctggctggcgacgtggaatccaacccaggcccttctagaggccatatgaccgagtacaagcccacggtgcgcctcgccacccgcgacgacgtccccagggccgtacgcaccctcgccgccgcgttcgccgactaccccgccacgcgccacaccgtcgatccggaccgccacatcgagcgggtcaccgagctgcaagaactcttcctcacgcgcgtcgggctcgacatcggcaaggtgtgggtcgcggacgacggcgccgcggtggcggtctggaccacgccggagagcgtcgaagcgggggcggtgttcgccgagatcggcccgcgcatggccgagttgagcggttcccggctggccgcgcagcaacagatggaaggcctcctggcgccgcaccggcccaaggagcccgcgtggttcctggccaccgtcggcgtctcgcccgaccaccagggcaagggtctgggcagcgccgtcgtgctccccggagtggaggcggccgagcgcgccggggtgcccgccttcctggagacctccgcgccccgcaacctccccttctacgagcggctcggcttcaccgtcaccgccgacgtcgaggtgcccgaaggaccgcgcacctggtgcatgacccgcaagcccggtgcctga

SEQ ID NO: 35719 - DNA, 1851 bp, synthetic construct
  source 1..1851: mol_type = other DNA
atggccttaccagtgaccgccttgctcctgccgctggccttgctgctccacgccgccaggccggacatccagatgacacagagccctagcagcctgtctgccagcgtgggagacagagtgaccatcacatgcaaggccagccagagcgtgtccaacgacgtgacctggtatcagcagaagcctggacaggcccctaagctgctgatctacagcgccagcaacagatacagcggagtgcccgccagattttccggctctggctacggcaccgagttcacctttaccatcagcagcgtgcagagcgaggacttcgccgtgtacttctgccagcaagactacagcagcttcggccagggcaccaagctggaaatcaagagactcgaggacctgaagaacgtgttcccacctgaggtggccgtgttcgagcctagcgaggccgagatcagccacacccagaaagccaccctcgtgtgcctggctaccggcttctaccccgaccatgtggaactgtcttggtgggtcaacggcaaagaggtgcacagcggcgtgtgtaccgacccccagccactgaaagaacagcccgccctgaacgacagccggtactgcctgagcagcagactgagagtgtccgccaccttctggcagaacccccggaaccacttcagatgccaggtgcagttctacggcctgagcgagaacgacgagtggacccaggacagagccaagcccgtgacccagatcgtgtctgccgaagcctggggcagagccgatagcggctttaccagcgagagctaccagcagggcgtgctgagcgccaccatcctgtacgagatcctgctgggcaaggccaccctgtacgccgtgctggtgtctgccctggtgctgatggctatggtcaagcggaaggacagccggggaagggccaagcgatctggatctggagcaacaaacttctcactactcaaacaagcaggtgacgtggaggagaatcccgggcctactagtatggactggatttggcgcatccttttccttgtcggcgctgctaccggcgcgcattccttcgaacaggtgcagctggtggaatctggacctggcgtggtgcagcctggcagaagcctgagaatcagctgtgccgtgtccggcttcagcgtgaccaactacggcgtgcactgggtgcgccagccacctggaaaaggactggaatggctgggcgtgatctgggctggcggcatcaccaactacaacagcgccttcatgtcccggctgaccatctccaaggacaacagcaagaacaccgtgtacctccagatgaacagcctgcgggccgaggacaccgccatgtactactgtgcttccagaggcggccactacggctacgccctggattattggggccagggaaccctcgtgaccgtgtcctctacgcgtatccagaaccctgatcctgccgtgtaccagctgcgggatagcaagagcagcgacaagagcgtgtgtctgttcaccgacttcgacagccagaccaacgtgtcccagagcaaggactccgacgtgtacatcaccgataagtgcgtgctggacatgcggagcatggacttcaagagcaactccgccgtggcctggtccaacaagtccgatttcgcctgcgccaacgccttcaacaacagcattatccccgaggacacattcttcccaagccccgagagcagcagcgacgtgaagctggtggaaaagagcttcgagacagacaccaacctgaacttccagaacctgagcgtgatcggcttcagaatcctgctgctgaaagtggccggctttaacctgctgatgaccctgcggctgtggtccagc

SEQ ID NO: 35720 - DNA, 2691 bp, synthetic construct
  source 1..2691: mol_type = other DNA
atggccttaccagtgaccgccttgctcctgccgctggccttgctgctccacgccgccaggccggaggttcagctgcttgagtctggcggaggactggttcaacctggcggaagcctgagactgtcttgtgccgcctctggcagaaccttcagcatgggctggtatagacaggcccctggcaagggcctcgaatttgtgtctgccatcacatacagcggcggcagcccttactacgccgattctgtgaagggcagattcaccatcagccgggacaacagcaagaacaccgtgtacctccagatgaacagcctgagagccgaggacaccgccgtgtactactgtgccgccaatccaacctacggcagcgactggaatgccgagaattggggccagggcacactggtcacagtgtctagtggtaccggcggaggcggatctggcggcggaggtagcggtggcggaggatctgaattcgacatccagatgacacagagccctagcagcctgtctgccagcgtgggagacagagtgaccatcacatgcaaggccagccagagcgtgtccaacgacgtgacctggtatcagcagaagcctggacaggcccctaagctgctgatctacagcgccagcaacagatacagcggagtgcccgccagattttccggctctggctacggcaccgagttcacctttaccatcagcagcgtgcagagcgaggacttcgccgtgtacttctgccagcaagactacagcagcttcggccagggcaccaagctggaaatcaagagactcgagatccagaaccctgatcctgccgtgtaccagctgcgggatagcaagagcagcgacaagagcgtgtgtctgttcaccgacttcgacagccagaccaacgtgtcccagagcaaggactccgacgtgtacatcaccgataagtgcgtgctggacatgcggagcatggacttcaagagcaactccgccgtggcctggtccaacaagtccgatttcgcctgcgccaacgccttcaacaacagcattatccccgaggacacattcttcccaagcagcgacgtgccctgcgacgtgaagctggtggaaaagagcttcgagacagacaccaacctgaacttccagaacctgagcgtgatcggcttcagaatcctgctgctgaaagtggccggctttaacctgctgatgaccctgcggctgtggtccagccgcgccaagagaagcggatctggcgtgaagcagaccctgaatttcgacctgctgaagctggctggcgacgtggaatccaacccaggccctactagtaccatggactggatttggcgcatccttttccttgtcggcgctgctaccggcacccattccgggcccgaagtgcaactggttgaatccggtggcggcctggtgcaacccggcggatctctcagacttagctgtgccgcctccggcagaaccttcacaatgggatggtacaggcaggctccagggaaagagagagagttcgtcgccgccatctctctgtctcccacactggcctactacgccgactctgtgaaaggccggttcaccatctccagagataatagcaagaacaccgtggtgctgcaaatgaactctctgagagccgaggatacagccctgtactattgtgccgctgaccggaagtccgtgatgagcatcagacccgattactggggacagggcacactggtcacagtgtctagtggatccggcggcggaggatctggcggaggcggatctgggggcggaggctctttcgaacaggtgcagctggtggaatctggacctggcgtggtgcagcctggcagaagcctgagaatcagctgtgccgtgtccggcttcagcgtgaccaactacggcgtgcactgggtgcgccagccacctggaaaaggactggaatggctgggcgtgatctgggctggcggcatcaccaactacaacagcgccttcatgtcccggctgaccatctccaaggacaacagcaagaacaccgtgtacctccagatgaacagcctgcgggccgaggacaccgccatgtactactgtgcttccagaggcggccactacggctacgccctggattattggggccagggaaccctcgtgaccgtgtcctctacgcgtgaggacctgaagaacgtgttcccacctgaggtggccgtgttcgagcctagcaaggccgagatcgcccacacccagaaagccaccctcgtgtgcctggctaccggcttctaccccgaccatgtggaactgtcttggtgggtcaacggcaaagaggtgcacagcggcgtgtgtaccgacccccagccactgaaagaacagcccgccctgaacgacagccggtactgcctgagcagcagactgagagtgtccgccaccttctggcagaacccccggaaccacttcagatgccaggtgcagttctacggcctgagcgagaacgacgagtggacccaggacagagccaagcccgtgacccagatcgtgtctgccgaagcctggggcagagccgattgcggcatcaccagcgccagctaccaccagggcgtgctgagcgccaccatcctgtacgagatcctgctgggcaaggccaccctgtacgccgtgctggtgtctgccctggtgctgatggctatggtcaagcggaaggacagccggggataa

SEQ ID NO: 35721 - DNA, 2691 bp, synthetic construct
  source 1..2691: mol_type = other DNA
atggccttaccagtgaccgccttgctcctgccgctggccttgctgctccacgccgccaggccggaagtgcagctggttgaatctggcggaggactggttcaggctggcggatctctgagactgtcttgtgccgccagcggcagaacctttagcatgggctggtttagacaggcccctggcaaagagagagagttcgtcgccgccatcacatactctggcggcagcccttactacgccgactctgtgaagggcagattcaccatcagccgggacaacgccaagaacaccgtgtacctccagatgaacagcctgaagcctgaggacaccgccgtgtactactgcgccgccaatccaacatacggcagcgactggaacgccgagaattggggccagggaacccaagtgacagtgtctagcggtaccggcggaggcggatctggcggcggaggtagcggtggcggaggatctgaattcgacatccagatgacacagagccctagcagcctgtctgccagcgtgggagacagagtgaccatcacatgcaaggccagccagagcgtgtccaacgacgtgacctggtatcagcagaagcctggacaggcccctaagctgctgatctacagcgccagcaacagatacagcggagtgcccgccagattttccggctctggctacggcaccgagttcacctttaccatcagcagcgtgcagagcgaggacttcgccgtgtacttctgccagcaagactacagcagcttcggccagggcaccaagctggaaatcaagagactcgagatccagaaccctgatcctgccgtgtaccagctgcgggatagcaagagcagcgacaagagcgtgtgtctgttcaccgacttcgacagccagaccaacgtgtcccagagcaaggactccgacgtgtacatcaccgataagtgcgtgctggacatgcggagcatggacttcaagagcaactccgccgtggcctggtccaacaagtccgatttcgcctgcgccaacgccttcaacaacagcattatccccgaggacacattcttcccaagcagcgacgtgccctgcgacgtgaagctggtggaaaagagcttcgagacagacaccaacctgaacttccagaacctgagcgtgatcggcttcagaatcctgctgctgaaagtggccggctttaacctgctgatgaccctgcggctgtggtccagccgcgccaagagaagcggatctggcgtgaagcagaccctgaatttcgacctgctgaagctggctggcgacgtggaatccaacccaggccctactagtaccatggactggatttggcgcatccttttccttgtcggcgctgctaccggcgcccattccgggcccgaagtgcaactggttgaatccggtggcggcctggtgcaacccggcggatctctcagacttagctgtgccgcctccggcagaaccttcacaatgggatggtacaggcaggctccagggaaagagagagagttcgtcgccgccatctctctgtctcccacactggcctactacgccgactctgtgaaaggccggttcaccatctccagagataatagcaagaacaccgtggtgctgcaaatgaactctctgagagccgaggatacagccctgtactattgtgccgctgaccggaagtccgtgatgagcatcagacccgattactggggacagggcacactggtcacagtgtctagtggatccggcggcggaggatctggcggaggcggatctgggggcggaggctctttcgaacaggtgcagctggtggaatctggacctggcgtggtgcagcctggcagaagcctgagaatcagctgtgccgtgtccggcttcagcgtgaccaactacggcgtgcactgggtgcgccagccacctggaaaaggactggaatggctgggcgtgatctgggctggcggcatcaccaactacaacagcgccttcatgtcccggctgaccatctccaaggacaacagcaagaacaccgtgtacctccagatgaacagcctgcgggccgaggacaccgccatgtactactgtgcttccagaggcggccactacggctacgccctggattattggggccagggaaccctcgtgaccgtgtcctctacgcgtgaggacctgaagaacgtgttcccacctgaggtggccgtgttcgagcctagcaaggccgagatcgcccacacccagaaagccaccctcgtgtgcctggctaccggcttctaccccgaccatgtggaactgtcttggtgggtcaacggcaaagaggtgcacagcggcgtgtgtaccgacccccagccactgaaagaacagcccgccctgaacgacagccggtactgcctgagcagcagactgagagtgtccgccaccttctggcagaacccccggaaccacttcagatgccaggtgcagttctacggcctgagcgagaacgacgagtggacccaggacagagccaagcccgtgacccagatcgtgtctgccgaagcctggggcagagccgattgcggcatcaccagcgccagctaccaccagggcgtgctgagcgccaccatcctgtacgagatcctgctgggcaaggccaccctgtacgccgtgctggtgtctgccctggtgctgatggctatggtcaagcggaaggacagccggggataa

SEQ ID NO: 35722 - DNA, 2682 bp, synthetic construct
  source 1..2682: mol_type = other DNA
atggccttaccagtgaccgccttgctcctgccgctggccttgctgctccacgccgccaggccggaagtgcagctggttgaatctggcggaggactggttcaggctggcggatctctgagactgtcttgtgccgccagcggcagaacctttagcatgggctggtttagacaggcccctggcaaagagagagagttcgtcgccgccatcacatactctggcggcagcccttactacgccgactctgtgaagggcagattcaccatcagccgggacaacgccaagaacaccgtgtacctccagatgaacagcctgaagcctgaggacaccgccgtgtactactgcgccgccaatccaacatacggcagcgactggaacgccgagaattggggccagggaacccaagtgacagtgtctagcggtaccggcggaggcggatctggcggcggaggtagcggtggcggaggatctgaattcgacatccagatgacacagagccctagcagcctgtctgccagcgtgggagacagagtgaccatcacatgcaaggccagccagagcgtgtccaacgacgtgacctggtatcagcagaagcctggacaggcccctaagctgctgatctacagcgccagcaacagatacagcggagtgcccgccagattttccggctctggctacggcaccgagttcacctttaccatcagcagcgtgcagagcgaggacttcgccgtgtacttctgccagcaagactacagcagcttcggccagggcaccaagctggaaatcaagagactcgaggacctgaagaacgtgttcccacctgaggtggccgtgttcgagcctagcgaggccgagatcagccacacccagaaagccaccctcgtgtgcctggctaccggcttctaccccgaccatgtggaactgtcttggtgggtcaacggcaaagaggtgcacagcggcgtgtgtaccgacccccagccactgaaagaacagcccgccctgaacgacagccggtactgcctgagcagcagactgagagtgtccgccaccttctggcagaacccccggaaccacttcagatgccaggtgcagttctacggcctgagcgagaacgacgagtggacccaggacagagccaagcccgtgacccagatcgtgtctgccgaagcctggggcagagccgattgcggctttaccagcgagagctaccagcagggcgtgctgagcgccaccatcctgtacgagatcctgctgggcaaggccaccctgtacgccgtgctggtgtctgccctggtgctgatggctatggtcaagcggaaggacagccggggaagggccaagcgatctggatctggagcaacaaacttctcactactcaaacaagcaggtgacgtggaggagaatcccgggcctactagtgccaccatggactggatttggcgcatccttttccttgtcggcgctgctaccggcgcccattccgggcccgaagtgcaactggttgaatccggtggcggcctggtgcaagcaggcggatctctcagacttagctgtgccgcctccggcagaaccttcacaatgggatggtttaggcaggctccagggaaagagagagagttcgtcgccgccatctctctgtctcccacactggcctactacgccgactctgtgaaaggccggttcaccatctccagagataatgccaagaacaccgtggtgctgcaaatgaactctctgaaacccgaggatacagccctgtactattgtgccgctgaccggaagtccgtgatgagcatcagacccgattactggggacagggcacacaagtcacagtgtcctctggatccggcggcggaggatctggcggaggcggatctgggggcggaggctctttcgaacaggtgcagctggtggaatctggacctggcgtggtgcagcctggcagaagcctgagaatcagctgtgccgtgtccggcttcagcgtgaccaactacggcgtgcactgggtgcgccagccacctggaaaaggactggaatggctgggcgtgatctgggctggcggcatcaccaactacaacagcgccttcatgtcccggctgaccatctccaaggacaacagcaagaacaccgtgtacctccagatgaacagcctgcgggccgaggacaccgccatgtactactgtgcttccagaggcggccactacggctacgccctggattattggggccagggaaccctcgtgaccgtgtcctctacgcgtatccagaaccctgatcctgccgtgtaccagctgcgggatagcaagagcagcgacaagagcgtgtgtctgttcaccgacttcgacagccagaccaacgtgtcccagagcaaggactccgacgtgtacatcaccgataagtgcgtgctggacatgcggagcatggacttcaagagcaactccgccgtggcctggtccaacaagtccgatttcgcctgcgccaacgccttcaacaacagcattatccccgaggacacattcttcccaagccccgagagcagctgcgacgtgaagctggtggaaaagagcttcgagacagacaccaacctgaacttccagaacctgagcgtgatcggcttcagaatcctgctgctgaaagtggccggctttaacctgctgatgaccctgcggctgtggtccagctaa

SEQ ID NO: 35723 - DNA, 2295 bp, synthetic construct
  source 1..2295: mol_type = other DNA
atggccttaccagtgaccgccttgctcctgccgctggccttgctgctccacgccgccaggccggaagtgcagctggttgaatctggcggaggactggttcagcctggcggatctctgagactgagctgtgaagccagcggcttcgccagcgacgattacatcatcggctggttcagacaggcccctggcaaagagagagagggcgtcagctgcatcagctctaagtacgccaacaccgtgtacaccgacagcgtgaagggcagattcagactgagcagaggcaccgccaagaataccgtgtacctccagatgagcgccctgaagcctgaggataccgccgtgtactactgcgctatggacagccgcagagtgacatgccctgagatcagcaccatgcaccggaacttcgattcttggggccagggcacactggtcacagtgtcatctggtaccggcggaggcggatctggcggcggaggtagcggtggcggaggatctgaattcgacatccagatgacacagagccctagcagcctgtctgccagcgtgggagacagagtgaccatcacatgcaaggccagccagagcgtgtccaacgacgtgacctggtatcagcagaagcctggacaggcccctaagctgctgatctacagcgccagcaacagatacagcggagtgcccgccagattttccggctctggctacggcaccgagttcacctttaccatcagcagcgtgcagagcgaggacttcgccgtgtacttctgccagcaagactacagcagcttcggccagggcaccaagctggaaatcaagagactcgaggacctgaagaacgtgttcccacctgaggtggccgtgttcgagcctagcaaggccgagatcgcccacacccagaaagccaccctcgtgtgcctggctaccggcttctaccccgaccatgtggaactgtcttggtgggtcaacggcaaagaggtgcacagcggcgtgtgtaccgacccccagccactgaaagaacagcccgccctgaacgacagccggtactgcctgagcagcagactgagagtgtccgccaccttctggcagaacccccggaaccacttcagatgccaggtgcagttctacggcctgagcgagaacgacgagtggacccaggacagagccaagcccgtgacccagatcgtgtctgccgaagcctggggcagagccgattgcggcatcaccagcgccagctaccaccagggcgtgctgagcgccaccatcctgtacgagatcctgctgggcaaggccaccctgtacgccgtgctggtgtctgccctggtgctgatggctatggtcaagcggaaggacagccggggaagggccaagcgatctggatctggagcaacaaacttctcactactcaaacaagcaggtgacgtggaggagaatcccgggcctactagtatggactggatttggcgcatccttttccttgtcggcgctgctaccggcgcgcattccttcgaacaggtgcagctggtggaatctggacctggcgtggtgcagcctggcagaagcctgagaatcagctgtgccgtgtccggcttcagcgtgaccaactacggcgtgcactgggtgcgccagccacctggaaaaggactggaatggctgggcgtgatctgggctggcggcatcaccaactacaacagcgccttcatgtcccggctgaccatctccaaggacaacagcaagaacaccgtgtacctccagatgaacagcctgcgggccgaggacaccgccatgtactactgtgcttccagaggcggccactacggctacgccctggattattggggccagggaaccctcgtgaccgtgtcctctacgcgtatccagaaccctgatcctgccgtgtaccagctgcgggatagcaagagcagcgacaagagcgtgtgtctgttcaccgacttcgacagccagaccaacgtgtcccagagcaaggactccgacgtgtacatcaccgataagtgcgtgctggacatgcggagcatggacttcaagagcaactccgccgtggcctggtccaacaagtccgatttcgcctgcgccaacgccttcaacaacagcattatccccgaggacacattcttcccaagcagcgacgtgccctgcgacgtgaagctggtggaaaagagcttcgagacagacaccaacctgaacttccagaacctgagcgtgatcggcttcagaatcctgctgctgaaagtggccggctttaacctgctgatgaccctgcggctgtggtccagctaa

SEQ ID NO: 35724 - DNA, 2268 bp, synthetic construct
  source 1..2268: mol_type = other DNA
atggccttaccagtgaccgccttgctcctgccgctggccttgctgctccacgccgccaggccggacatccagatgacacagagccctagcagcctgtctgccagcgtgggagacagagtgaccatcacatgcaaggccagccagagcgtgtccaacgacgtgacctggtatcagcagaagcctggacaggcccctaagctgctgatctacagcgccagcaacagatacagcggagtgcccgccagattttccggctctggctacggcaccgagttcacctttaccatcagcagcgtgcagagcgaggacttcgccgtgtacttctgccagcaagactacagcagcttcggccagggcaccaagctggaaatcaagagactcgaggacctgaagaacgtgttcccacctgaggtggccgtgttcgagcctagcgaggccgagatcagccacacccagaaagccaccctcgtgtgcctggctaccggcttctaccccgaccatgtggaactgtcttggtgggtcaacggcaaagaggtgcacagcggcgtgtgtaccgacccccagccactgaaagaacagcccgccctgaacgacagccggtactgcctgagcagcagactgagagtgtccgccaccttctggcagaacccccggaaccacttcagatgccaggtgcagttctacggcctgagcgagaacgacgagtggacccaggacagagccaagcccgtgacccagatcgtgtctgccgaagcctggggcagagccgattgcggctttaccagcgagagctaccagcagggcgtgctgagcgccaccatcctgtacgagatcctgctgggcaaggccaccctgtacgccgtgctggtgtctgccctggtgctgatggctatggtcaagcggaaggacagccggggaagggccaagcgatctggatctggagcaacaaacttctcactactcaaacaagcaggtgacgtggaggagaatcccgggcctactagtaccatggactggatttggcgcatccttttccttgtcggcgctgctaccggcgcccattccgggcccgaagtgcaactggttgaatccggtggcggcctggtgcaacccggcggatctctcagacttagctgtgccgcctccggcagaaccttcacaatgggatggtacaggcaggctccagggaaagagagagagttcgtcgccgccatctctctgtctcccacactggcctactacgccgactctgtgaaaggccggttcaccatctccagagataatagcaagaacaccgtggtgctgcaaatgaactctctgagagccgaggatacagccctgtactattgtgccgctgaccggaagtccgtgatgagcatcagacccgattactggggacagggcacactggtcacagtgtctagtggatccggcggcggaggatctggcggaggcggatctgggggcggaggctctttcgaacaggtgcagctggtggaatctggacctggcgtggtgcagcctggcagaagcctgagaatcagctgtgccgtgtccggcttcagcgtgaccaactacggcgtgcactgggtgcgccagccacctggaaaaggactggaatggctgggcgtgatctgggctggcggcatcaccaactacaacagcgccttcatgtcccggctgaccatctccaaggacaacagcaagaacaccgtgtacctccagatgaacagcctgcgggccgaggacaccgccatgtactactgtgcttccagaggcggccactacggctacgccctggattattggggccagggaaccctcgtgaccgtgtcctctacgcgtatccagaaccctgatcctgccgtgtaccagctgcgggatagcaagagcagcgacaagagcgtgtgtctgttcaccgacttcgacagccagaccaacgtgtcccagagcaaggactccgacgtgtacatcaccgataagtgcgtgctggacatgcggagcatggacttcaagagcaactccgccgtggcctggtccaacaagtccgatttcgcctgcgccaacgccttcaacaacagcattatccccgaggacacattcttcccaagccccgagagcagctgcgacgtgaagctggtggaaaagagcttcgagacagacaccaacctgaacttccagaacctgagcgtgatcggcttcagaatcctgctgctgaaagtggccggctttaacctgctgatgaccctgcggctgtggtccagctaa

SEQ ID NO: 35725 - DNA, 2286 bp, synthetic construct
  source 1..2286: mol_type = other DNA
atggccttaccagtgaccgccttgctcctgccgctggccttgctgctccacgccgccaggccggacatccagatgacacagagccctagcagcctgtctgccagcgtgggagacagagtgaccatcacatgcaaggccagccagagcgtgtccaacgacgtgacctggtatcagcagaagcctggacaggcccctaagctgctgatctacagcgccagcaacagatacagcggagtgcccgccagattttccggctctggctacggcaccgagttcacctttaccatcagcagcgtgcagagcgaggacttcgccgtgtacttctgccagcaagactacagcagcttcggccagggcaccaagctggaaatcaagagactcgaggacctgaagaacgtgttcccacctgaggtggccgtgttcgagcctagcgaggccgagatcagccacacccagaaagccaccctcgtgtgcctggctaccggcttctaccccgaccatgtggaactgtcttggtgggtcaacggcaaagaggtgcacagcggcgtgtgtaccgacccccagccactgaaagaacagcccgccctgaacgacagccggtactgcctgagcagcagactgagagtgtccgccaccttctggcagaacccccggaaccacttcagatgccaggtgcagttctacggcctgagcgagaacgacgagtggacccaggacagagccaagcccgtgacccagatcgtgtctgccgaagcctggggcagagccgattgcggctttaccagcgagagctaccagcagggcgtgctgagcgccaccatcctgtacgagatcctgctgggcaaggccaccctgtacgccgtgctggtgtctgccctggtgctgatggctatggtcaagcggaaggacagccggggaagggccaagcgatctggatctggagcaacaaacttctcactactcaaacaagcaggtgacgtggaggagaatcccgggcctactagtaccatggactggatttggcgcatccttttccttgtcggcgctgctaccggcgcccattccgggccccaggtgcagctggttgaatctggcggaggactggttcagcctggcggatctctgagactgtcttgtgccgccagcggcaacatcaacagcagaaactgcatgggctggttcagacaggcccctggcaagggaagagaaggcgtggcagctatcggccaagtgaccggcagaacctactacgtggacagcgtgaagggcagattcaccatcagcctggacaacagcaagaacaccctgtacctccagatgaacagcctgagagccgaggacaccgccgtgtactattgtgctgctgcccctggctgtctgctgtctgcacttagaagcgccgactacagaaactggggccagggcacactggtcaccgtttcttctggatccggcggcggaggatctggcggaggcggatctgggggcggaggctctttcgaacaggtgcagctggtggaatctggacctggcgtggtgcagcctggcagaagcctgagaatcagctgtgccgtgtccggcttcagcgtgaccaactacggcgtgcactgggtgcgccagccacctggaaaaggactggaatggctgggcgtgatctgggctggcggcatcaccaactacaacagcgccttcatgtcccggctgaccatctccaaggacaacagcaagaacaccgtgtacctccagatgaacagcctgcgggccgaggacaccgccatgtactactgtgcttccagaggcggccactacggctacgccctggattattggggccagggaaccctcgtgaccgtgtcctctacgcgtatccagaaccctgatcctgccgtgtaccagctgcgggatagcaagagcagcgacaagagcgtgtgtctgttcaccgacttcgacagccagaccaacgtgtcccagagcaaggactccgacgtgtacatcaccgataagtgcgtgctggacatgcggagcatggacttcaagagcaactccgccgtggcctggtccaacaagtccgatttcgcctgcgccaacgccttcaacaacagcattatccccgaggacacattcttcccaagccccgagagcagctgcgacgtgaagctggtggaaaagagcttcgagacagacaccaacctgaacttccagaacctgagcgtgatcggcttcagaatcctgctgctgaaagtggccggctttaacctgctgatgaccctgcggctgtggtccagc

SEQ ID NO: 35726 - DNA, 2289 bp, synthetic construct
  source 1..2289: mol_type = other DNA
atggccttaccagtgaccgccttgctcctgccgctggccttgctgctccacgccgccaggccggacatccagatgacacagagccctagcagcctgtctgccagcgtgggagacagagtgaccatcacatgcaaggccagccagagcgtgtccaacgacgtgacctggtatcagcagaagcctggacaggcccctaagctgctgatctacagcgccagcaacagatacagcggagtgcccgccagattttccggctctggctacggcaccgagttcacctttaccatcagcagcgtgcagagcgaggacttcgccgtgtacttctgccagcaagactacagcagcttcggccagggcaccaagctggaaatcaagagactcgaggacctgaagaacgtgttcccacctgaggtggccgtgttcgagcctagcgaggccgagatcagccacacccagaaagccaccctcgtgtgcctggctaccggcttctaccccgaccatgtggaactgtcttggtgggtcaacggcaaagaggtgcacagcggcgtgtgtaccgacccccagccactgaaagaacagcccgccctgaacgacagccggtactgcctgagcagcagactgagagtgtccgccaccttctggcagaacccccggaaccacttcagatgccaggtgcagttctacggcctgagcgagaacgacgagtggacccaggacagagccaagcccgtgacccagatcgtgtctgccgaagcctggggcagagccgattgcggctttaccagcgagagctaccagcagggcgtgctgagcgccaccatcctgtacgagatcctgctgggcaaggccaccctgtacgccgtgctggtgtctgccctggtgctgatggctatggtcaagcggaaggacagccggggaagggccaagcgatctggatctggagcaacaaacttctcactactcaaacaagcaggtgacgtggaggagaatcccgggcctactagtaccatggactggatttggcgcatccttttccttgtcggcgctgctaccggcgcccattccgggccccaggtgcagctggttgaatctggcggaggatctgttcaggctggcggctctctgagactgtcttgtggcgcttccggcaacatcagcagcagaaactgcatgggctggttcagacaggcccctggcaaagagagagaaggcgttgccgccatcggacaagtgaccggcagatcctactacgtggacagcgtgaagggcagattcaccatcagcctggacaacgccaagaacaccctgtacctccagatgaacacactgaagcccgaggacaccgccatgtactactgtgctgctgcccctggctgtctgctgtctgcacttagaagcgccgactacagaaactggggccagggaacccaagtgacagtgtctagtggatccggcggcggaggatctggcggaggcggatctgggggcggaggctctttcgaacaggtgcagctggtggaatctggacctggcgtggtgcagcctggcagaagcctgagaatcagctgtgccgtgtccggcttcagcgtgaccaactacggcgtgcactgggtgcgccagccacctggaaaaggactggaatggctgggcgtgatctgggctggcggcatcaccaactacaacagcgccttcatgtcccggctgaccatctccaaggacaacagcaagaacaccgtgtacctccagatgaacagcctgcgggccgaggacaccgccatgtactactgtgcttccagaggcggccactacggctacgccctggattattggggccagggaaccctcgtgaccgtgtcctctacgcgtatccagaaccctgatcctgccgtgtaccagctgcgggatagcaagagcagcgacaagagcgtgtgtctgttcaccgacttcgacagccagaccaacgtgtcccagagcaaggactccgacgtgtacatcaccgataagtgcgtgctggacatgcggagcatggacttcaagagcaactccgccgtggcctggtccaacaagtccgatttcgcctgcgccaacgccttcaacaacagcattatccccgaggacacattcttcccaagccccgagagcagctgcgacgtgaagctggtggaaaagagcttcgagacagacaccaacctgaacttccagaacctgagcgtgatcggcttcagaatcctgctgctgaaagtggccggctttaacctgctgatgaccctgcggctgtggtccagctaa

SEQ ID NO: 35727 - DNA, 2712 bp, synthetic construct
  source 1..2712: mol_type = other DNA
atggccttaccagtgaccgccttgctcctgccgctggccttgctgctccacgccgccaggccggaagtgcagctggttgaatctggcggaggactggttcaggctggcggatctctgagactgtcttgtgccgccagcggcagaacctttagcatgggctggtttagacaggcccctggcaaagagagagagttcgtcgccgccatcacatactctggcggcagcccttactacgccgactctgtgaagggcagattcaccatcagccgggacaacgccaagaacaccgtgtacctccagatgaacagcctgaagcctgaggacaccgccgtgtactactgcgccgccaatccaacatacggcagcgactggaacgccgagaattggggccagggaacccaagtgacagtgtctagcggtaccggcggaggcggatctggcggcggaggtagcggtggcggaggatctgaattcgacatccagatgacacagagccctagcagcctgtctgccagcgtgggagacagagtgaccatcacatgcaaggccagccagagcgtgtccaacgacgtgacctggtatcagcagaagcctggacaggcccctaagctgctgatctacagcgccagcaacagatacagcggagtgcccgccagattttccggctctggctacggcaccgagttcacctttaccatcagcagcgtgcagagcgaggacttcgccgtgtacttctgccagcaagactacagcagcttcggccagggcaccaagctggaaatcaagagactcgagatccagaaccctgatcctgccgtgtaccagctgcgggatagcaagagcagcgacaagagcgtgtgtctgttcaccgacttcgacagccagaccaacgtgtcccagagcaaggactccgacgtgtacatcaccgataagtgcgtgctggacatgcggagcatggacttcaagagcaactccgccgtggcctggtccaacaagtccgatttcgcctgcgccaacgccttcaacaacagcattatccccgaggacacattcttcccaagcagcgacgtgccctgcgacgtgaagctggtggaaaagagcttcgagacagacaccaacctgaacttccagaacctgagcgtgatcggcttcagaatcctgctgctgaaagtggccggctttaacctgctgatgaccctgcggctgtggtccagccgcgccaagagaagcggatctggcgtgaagcagaccctgaatttcgacctgctgaagctggctggcgacgtggaatccaacccaggccctactagtaccatggactggatttggcgcatccttttccttgtcggcgctgctaccggcgcccattccgggccccaggtgcagctggttgaatctggcggaggatctgttcaggctggcggctctctgagactgtcttgtggcgcttccggcaacatcagcagcagaaactgcatgggctggttcagacaggcccctggcaaagagagagaaggcgttgccgccatcggacaagtgaccggcagatcctactacgtggacagcgtgaagggcagattcaccatcagcctggacaacgccaagaacaccctgtacctccagatgaacacactgaagcccgaggacaccgccatgtactactgtgctgctgcccctggctgtctgctgtctgcacttagaagcgccgactacagaaactggggccagggaacccaagtgacagtgtctagtggatccggcggcggaggatctggcggaggcggatctgggggcggaggctctttcgaacaggtgcagctggtggaatctggacctggcgtggtgcagcctggcagaagcctgagaatcagctgtgccgtgtccggcttcagcgtgaccaactacggcgtgcactgggtgcgccagccacctggaaaaggactggaatggctgggcgtgatctgggctggcggcatcaccaactacaacagcgccttcatgtcccggctgaccatctccaaggacaacagcaagaacaccgtgtacctccagatgaacagcctgcgggccgaggacaccgccatgtactactgtgcttccagaggcggccactacggctacgccctggattattggggccagggaaccctcgtgaccgtgtcctctacgcgtgaggacctgaagaacgtgttcccacctgaggtggccgtgttcgagcctagcaaggccgagatcgcccacacccagaaagccaccctcgtgtgcctggctaccggcttctaccccgaccatgtggaactgtcttggtgggtcaacggcaaagaggtgcacagcggcgtgtgtaccgacccccagccactgaaagaacagcccgccctgaacgacagccggtactgcctgagcagcagactgagagtgtccgccaccttctggcagaacccccggaaccacttcagatgccaggtgcagttctacggcctgagcgagaacgacgagtggacccaggacagagccaagcccgtgacccagatcgtgtctgccgaagcctggggcagagccgattgcggcatcaccagcgccagctaccaccagggcgtgctgagcgccaccatcctgtacgagatcctgctgggcaaggccaccctgtacgccgtgctggtgtctgccctggtgctgatggctatggtcaagcggaaggacagccggggataa

SEQ ID NO: 35728 - DNA, 2703 bp, synthetic construct
  source 1..2703: mol_type = other DNA
atggccttaccagtgaccgccttgctcctgccgctggccttgctgctccacgccgccaggccgcaggtgcagctggttgaatctggcggaggatctgttcaggctggcggctctctgagactgtcttgtggcgcttccggcaacatcagcagcagaaactgcatgggctggttcagacaggcccctggcaaagagagagaaggcgttgccgccatcggacaagtgaccggcagatcctactacgtggacagcgtgaagggcagattcaccatcagcctggacaacgccaagaacaccctgtacctccagatgaacacactgaagcccgaggacaccgccatgtactactgtgctgctgcccctggctgtctgctgtctgcacttagaagcgccgactacagaaactggggccagggaacccaagtgacagtgtctagtggtaccggcggaggcggatctggcggcggaggtagcggtggcggaggatctgaattcgacatccagatgacacagagccctagcagcctgtctgccagcgtgggagacagagtgaccatcacatgcaaggccagccagagcgtgtccaacgacgtgacctggtatcagcagaagcctggacaggcccctaagctgctgatctacagcgccagcaacagatacagcggagtgcccgccagattttccggctctggctacggcaccgagttcacctttaccatcagcagcgtgcagagcgaggacttcgccgtgtacttctgccagcaagactacagcagcttcggccagggcaccaagctggaaatcaagagactcgaggacctgaagaacgtgttcccacctgaggtggccgtgttcgagcctagcgaggccgagatcagccacacccagaaagccaccctcgtgtgcctggctaccggcttctaccccgaccatgtggaactgtcttggtgggtcaacggcaaagaggtgcacagcggcgtgtgtaccgacccccagccactgaaagaacagcccgccctgaacgacagccggtactgcctgagcagcagactgagagtgtccgccaccttctggcagaacccccggaaccacttcagatgccaggtgcagttctacggcctgagcgagaacgacgagtggacccaggacagagccaagcccgtgacccagatcgtgtctgccgaagcctggggcagagccgattgcggctttaccagcgagagctaccagcagggcgtgctgagcgccaccatcctgtacgagatcctgctgggcaaggccaccctgtacgccgtgctggtgtctgccctggtgctgatggctatggtcaagcggaaggacagccggggaagggccaagcgatctggatctggagcaacaaacttctcactactcaaacaagcaggtgacgtggaggagaatcccgggcctactagtgccaccatggactggatttggcgcatccttttccttgtcggcgctgctaccggcgcccattccgggcccgaagtgcaactggttgaatccggtggcggcctggtgcaagcaggcggatctctcagacttagctgtgccgcctccggcagaaccttcacaatgggatggtttaggcaggctccagggaaagagagagagttcgtcgccgccatctctctgtctcccacactggcctactacgccgactctgtgaaaggccggttcaccatctccagagataatgccaagaacaccgtggtgctgcaaatgaactctctgaaacccgaggatacagccctgtactattgtgccgctgaccggaagtccgtgatgagcatcagacccgattactggggacagggcacacaagtcacagtgtcctctggatccggcggcggaggatctggcggaggcggatctgggggcggaggctctttcgaacaggtgcagctggtggaatctggacctggcgtggtgcagcctggcagaagcctgagaatcagctgtgccgtgtccggcttcagcgtgaccaactacggcgtgcactgggtgcgccagccacctggaaaaggactggaatggctgggcgtgatctgggctggcggcatcaccaactacaacagcgccttcatgtcccggctgaccatctccaaggacaacagcaagaacaccgtgtacctccagatgaacagcctgcgggccgaggacaccgccatgtactactgtgcttccagaggcggccactacggctacgccctggattattggggccagggaaccctcgtgaccgtgtcctctacgcgtatccagaaccctgatcctgccgtgtaccagctgcgggatagcaagagcagcgacaagagcgtgtgtctgttcaccgacttcgacagccagaccaacgtgtcccagagcaaggactccgacgtgtacatcaccgataagtgcgtgctggacatgcggagcatggacttcaagagcaactccgccgtggcctggtccaacaagtccgatttcgcctgcgccaacgccttcaacaacagcattatccccgaggacacattcttcccaagccccgagagcagctgcgacgtgaagctggtggaaaagagcttcgagacagacaccaacctgaacttccagaacctgagcgtgatcggcttcagaatcctgctgctgaaagtggccggctttaacctgctgatgaccctgcggctgtggtccagctaa

SEQ ID NO: 35729 - DNA, 2292 bp, synthetic construct
  source 1..2292: mol_type = other DNA
atggccttaccagtgaccgccttgctcctgccgctggccttgctgctccacgccgccaggccgcaggtgcagctggttgaatctggcggaggatctgttcaggctggcggctctctgagactgtcttgtggcgcttccggcaacatcagcagcagaaactgcatgggctggttcagacaggcccctggcaaagagagagaaggcgttgccgccatcggacaagtgaccggcagatcctactacgtggacagcgtgaagggcagattcaccatcagcctggacaacgccaagaacaccctgtacctccagatgaacacactgaagcccgaggacaccgccatgtactactgtgctgctgcccctggctgtctgctgtctgcacttagaagcgccgactacagaaactggggccagggaacccaagtgacagtgtctagtggtaccggcggaggcggatctggcggcggaggtagcggtggcggaggatctgaattcgacatccagatgacacagagccctagcagcctgtctgccagcgtgggagacagagtgaccatcacatgcaaggccagccagagcgtgtccaacgacgtgacctggtatcagcagaagcctggacaggcccctaagctgctgatctacagcgccagcaacagatacagcggagtgcccgccagattttccggctctggctacggcaccgagttcacctttaccatcagcagcgtgcagagcgaggacttcgccgtgtacttctgccagcaagactacagcagcttcggccagggcaccaagctggaaatcaagagactcgaggacctgaagaacgtgttcccacctgaggtggccgtgttcgagcctagcgaggccgagatcagccacacccagaaagccaccctcgtgtgcctggctaccggcttctaccccgaccatgtggaactgtcttggtgggtcaacggcaaagaggtgcacagcggcgtgtgtaccgacccccagccactgaaagaacagcccgccctgaacgacagccggtactgcctgagcagcagactgagagtgtccgccaccttctggcagaacccccggaaccacttcagatgccaggtgcagttctacggcctgagcgagaacgacgagtggacccaggacagagccaagcccgtgacccagatcgtgtctgccgaagcctggggcagagccgattgcggctttaccagcgagagctaccagcagggcgtgctgagcgccaccatcctgtacgagatcctgctgggcaaggccaccctgtacgccgtgctggtgtctgccctggtgctgatggctatggtcaagcggaaggacagccggggaagggccaagcgatctggatctggagcaacaaacttctcactactcaaacaagcaggtgacgtggaggagaatcccgggcctactagtgccaccatggactggatttggcgcatccttttccttgtcggcgctgctaccggcgcccattccttcgaacaggtgcagctggtggaatctggacctggcgtggtgcagcctggcagaagcctgagaatcagctgtgccgtgtccggcttcagcgtgaccaactacggcgtgcactgggtgcgccagccacctggaaaaggactggaatggctgggcgtgatctgggctggcggcatcaccaactacaacagcgccttcatgtcccggctgaccatctccaaggacaacagcaagaacaccgtgtacctccagatgaacagcctgcgggccgaggacaccgccatgtactactgtgcttccagaggcggccactacggctacgccctggattattggggccagggaaccctcgtgaccgtgtcctctacgcgtatccagaaccctgatcctgccgtgtaccagctgcgggatagcaagagcagcgacaagagcgtgtgtctgttcaccgacttcgacagccagaccaacgtgtcccagagcaaggactccgacgtgtacatcaccgataagtgcgtgctggacatgcggagcatggacttcaagagcaactccgccgtggcctggtccaacaagtccgatttcgcctgcgccaacgccttcaacaacagcattatccccgaggacacattcttcccaagccccgagagcagctgcgacgtgaagctggtggaaaagagcttcgagacagacaccaacctgaacttccagaacctgagcgtgatcggcttcagaatcctgctgctgaaagtggccggctttaacctgctgatgaccctgcggctgtggtccagctaa

SEQ ID NO: 35730 - DNA, 2292 bp, synthetic construct
  source 1..2292: mol_type = other DNA
atggccttaccagtgaccgccttgctcctgccgctggccttgctgctccacgccgccaggccgcaagttcagctggtggaaagcggtggtggcgttgtgcaacctggtggaagtctgaggctgagctgtgccgcttctggcctgagctttagcacctacactgtggcctggttcaggcaggctcccggaaagggtcttgaaggcgtggccgccattccttacaccagccagcacatggtgtacacagacagcgtcagaggccggttcaccatcagcagagacaactccaagaatacgctctatctccagatgaactctctgcgcgccgaagatacagccgtgtattactgcgccaccgacagacggcctggcacctctatgctggctatcaacggctacaacagatggggacagggaaccaccgtgaccgtgtcatctggtaccggcggaggcggatctggcggcggaggtagcggtggcggaggatctgaattcgacatccagatgacacagagccctagcagcctgtctgccagcgtgggagacagagtgaccatcacatgcaaggccagccagagcgtgtccaacgacgtgacctggtatcagcagaagcctggacaggcccctaagctgctgatctacagcgccagcaacagatacagcggagtgcccgccagattttccggctctggctacggcaccgagttcacctttaccatcagcagcgtgcagagcgaggacttcgccgtgtacttctgccagcaagactacagcagcttcggccagggcaccaagctggaaatcaagagactcgaggacctgaagaacgtgttcccacctgaggtggccgtgttcgagcctagcgaggccgagatcagccacacccagaaagccaccctcgtgtgcctggctaccggcttctaccccgaccatgtggaactgtcttggtgggtcaacggcaaagaggtgcacagcggcgtgtgtaccgacccccagccactgaaagaacagcccgccctgaacgacagccggtactgcctgagcagcagactgagagtgtccgccaccttctggcagaacccccggaaccacttcagatgccaggtgcagttctacggcctgagcgagaacgacgagtggacccaggacagagccaagcccgtgacccagatcgtgtctgccgaagcctggggcagagccgattgcggctttaccagcgagagctaccagcagggcgtgctgagcgccaccatcctgtacgagatcctgctgggcaaggccaccctgtacgccgtgctggtgtctgccctggtgctgatggctatggtcaagcggaaggacagccggggaagggccaagcgatctggatctggagcaacaaacttctcactactcaaacaagcaggtgacgtggaggagaatcccgggcctactagtgccaccatggactggatttggcgcatccttttccttgtcggcgctgctaccggcgcccattccttcgaacaggtgcagctggtggaatctggacctggcgtggtgcagcctggcagaagcctgagaatcagctgtgccgtgtccggcttcagcgtgaccaactacggcgtgcactgggtgcgccagccacctggaaaaggactggaatggctgggcgtgatctgggctggcggcatcaccaactacaacagcgccttcatgtcccggctgaccatctccaaggacaacagcaagaacaccgtgtacctccagatgaacagcctgcgggccgaggacaccgccatgtactactgtgcttccagaggcggccactacggctacgccctggattattggggccagggaaccctcgtgaccgtgtcctctacgcgtatccagaaccctgatcctgccgtgtaccagctgcgggatagcaagagcagcgacaagagcgtgtgtctgttcaccgacttcgacagccagaccaacgtgtcccagagcaaggactccgacgtgtacatcaccgataagtgcgtgctggacatgcggagcatggacttcaagagcaactccgccgtggcctggtccaacaagtccgatttcgcctgcgccaacgccttcaacaacagcattatccccgaggacacattcttcccaagccccgagagcagctgcgacgtgaagctggtggaaaagagcttcgagacagacaccaacctgaacttccagaacctgagcgtgatcggcttcagaatcctgctgctgaaagtggccggctttaacctgctgatgaccctgcggctgtggtccagctaa

SEQ ID NO: 35731 - DNA, 2289 bp, synthetic construct
  source 1..2289: mol_type = other DNA
atggccttaccagtgaccgccttgctcctgccgctggccttgctgctccacgccgccaggccggacatccagatgacacagagccctagcagcctgtctgccagcgtgggagacagagtgaccatcacatgcaaggccagccagagcgtgtccaacgacgtgacctggtatcagcagaagcctggacaggcccctaagctgctgatctacagcgccagcaacagatacagcggagtgcccgccagattttccggctctggctacggcaccgagttcacctttaccatcagcagcgtgcagagcgaggacttcgccgtgtacttctgccagcaagactacagcagcttcggccagggcaccaagctggaaatcaagagactcgaggacctgaagaacgtgttcccacctgaggtggccgtgttcgagcctagcgaggccgagatcagccacacccagaaagccaccctcgtgtgcctggctaccggcttctaccccgaccatgtggaactgtcttggtgggtcaacggcaaagaggtgcacagcggcgtgtgtaccgacccccagccactgaaagaacagcccgccctgaacgacagccggtactgcctgagcagcagactgagagtgtccgccaccttctggcagaacccccggaaccacttcagatgccaggtgcagttctacggcctgagcgagaacgacgagtggacccaggacagagccaagcccgtgacccagatcgtgtctgccgaagcctggggcagagccgattgcggctttaccagcgagagctaccagcagggcgtgctgagcgccaccatcctgtacgagatcctgctgggcaaggccaccctgtacgccgtgctggtgtctgccctggtgctgatggctatggtcaagcggaaggacagccggggaagggccaagcgatctggatctggagcaacaaacttctcactactcaaacaagcaggtgacgtggaggagaatcccgggcctactagtaccatggactggatttggcgcatccttttccttgtcggcgctgctaccggcgcccattccgggccccaagttcagctggtggaaagcggtggtggcgttgtgcaacctggtggaagtctgaggctgagctgtgccgcttctggcctgagctttagcacctacactgtggcctggttcaggcaggctcccggaaagggtcttgaaggcgtggccgccattccttacaccagccagcacatggtgtacacagacagcgtcagaggccggttcaccatcagcagagacaactccaagaatacgctctatctccagatgaactctctgcgcgccgaagatacagccgtgtattactgcgccaccgacagacggcctggcacctctatgctggctatcaacggctacaacagatggggacagggaaccaccgtgaccgtgtcatctggatccggcggcggaggatctggcggaggcggatctgggggcggaggctctttcgaacaggtgcagctggtggaatctggacctggcgtggtgcagcctggcagaagcctgagaatcagctgtgccgtgtccggcttcagcgtgaccaactacggcgtgcactgggtgcgccagccacctggaaaaggactggaatggctgggcgtgatctgggctggcggcatcaccaactacaacagcgccttcatgtcccggctgaccatctccaaggacaacagcaagaacaccgtgtacctccagatgaacagcctgcgggccgaggacaccgccatgtactactgtgcttccagaggcggccactacggctacgccctggattattggggccagggaaccctcgtgaccgtgtcctctacgcgtatccagaaccctgatcctgccgtgtaccagctgcgggatagcaagagcagcgacaagagcgtgtgtctgttcaccgacttcgacagccagaccaacgtgtcccagagcaaggactccgacgtgtacatcaccgataagtgcgtgctggacatgcggagcatggacttcaagagcaactccgccgtggcctggtccaacaagtccgatttcgcctgcgccaacgccttcaacaacagcattatccccgaggacacattcttcccaagccccgagagcagctgcgacgtgaagctggtggaaaagagcttcgagacagacaccaacctgaacttccagaacctgagcgtgatcggcttcagaatcctgctgctgaaagtggccggctttaacctgctgatgaccctgcggctgtggtccagctaa

SEQ ID NO: 35732 - DNA, 2295 bp, synthetic construct
  source 1..2295: mol_type = other DNA
atggccttaccagtgaccgccttgctcctgccgctggccttgctgctccacgccgccaggccggacatccagatgacacagagccctagcagcctgtctgccagcgtgggagacagagtgaccatcacatgcaaggccagccagagcgtgtccaacgacgtgacctggtatcagcagaagcctggacaggcccctaagctgctgatctacagcgccagcaacagatacagcggagtgcccgccagattttccggctctggctacggcaccgagttcacctttaccatcagcagcgtgcagagcgaggacttcgccgtgtacttctgccagcaagactacagcagcttcggccagggcaccaagctggaaatcaagagactcgaggacctgaagaacgtgttcccacctgaggtggccgtgttcgagcctagcgaggccgagatcagccacacccagaaagccaccctcgtgtgcctggctaccggcttctaccccgaccatgtggaactgtcttggtgggtcaacggcaaagaggtgcacagcggcgtgtgtaccgacccccagccactgaaagaacagcccgccctgaacgacagccggtactgcctgagcagcagactgagagtgtccgccaccttctggcagaacccccggaaccacttcagatgccaggtgcagttctacggcctgagcgagaacgacgagtggacccaggacagagccaagcccgtgacccagatcgtgtctgccgaagcctggggcagagccgattgcggctttaccagcgagagctaccagcagggcgtgctgagcgccaccatcctgtacgagatcctgctgggcaaggccaccctgtacgccgtgctggtgtctgccctggtgctgatggctatggtcaagcggaaggacagccggggaagggccaagcgatctggatctggagcaacaaacttctcactactcaaacaagcaggtgacgtggaggagaatcccgggcctactagtaccatggactggatttggcgcatccttttccttgtcggcgctgctaccggcgcccattccgggcccgaggtgcagctggttgaatctggcggaggatctgttcaggctggcggctctctgagactgtcttgtgccgccagcggctacacctacagcatcaactgcatgggctggttcagacaggcccctggcaaagagagagaaggcgttgccgccatctctaccggcggaggcagaaccgattaccgggattctgtgaagggcagattcaccatcagccaggacaacgccaagaacaccgtgtacctccagatgaacagcctgaagcctgaggacaccgccatgtactactgtgccggcaagaccacctatcctggctacggatgtggcctgggcagaagcgcctacaattattggggccagggcacccaagtgaccgtgtcatctggatccggcggcggaggatctggcggaggcggatctgggggcggaggctctttcgaacaggtgcagctggtggaatctggacctggcgtggtgcagcctggcagaagcctgagaatcagctgtgccgtgtccggcttcagcgtgaccaactacggcgtgcactgggtgcgccagccacctggaaaaggactggaatggctgggcgtgatctgggctggcggcatcaccaactacaacagcgccttcatgtcccggctgaccatctccaaggacaacagcaagaacaccgtgtacctccagatgaacagcctgcgggccgaggacaccgccatgtactactgtgcttccagaggcggccactacggctacgccctggattattggggccagggaaccctcgtgaccgtgtcctctacgcgtatccagaaccctgatcctgccgtgtaccagctgcgggatagcaagagcagcgacaagagcgtgtgtctgttcaccgacttcgacagccagaccaacgtgtcccagagcaaggactccgacgtgtacatcaccgataagtgcgtgctggacatgcggagcatggacttcaagagcaactccgccgtggcctggtccaacaagtccgatttcgcctgcgccaacgccttcaacaacagcattatccccgaggacacattcttcccaagccccgagagcagctgcgacgtgaagctggtggaaaagagcttcgagacagacaccaacctgaacttccagaacctgagcgtgatcggcttcagaatcctgctgctgaaagtggccggctttaacctgctgatgaccctgcggctgtggtccagctaa

SEQ ID NO: 35733 - DNA, 1851 bp, synthetic construct
  source 1..1851: mol_type = other DNA
atggccttaccagtgaccgccttgctcctgccgctggccttgctgctccacgccgccaggccggacatccagatgacacagagccctagcagcctgtctgccagcgtgggagacagagtgaccatcacatgcaaggccagccagagcgtgtccaacgacgtgacctggtatcagcagaagcctggacaggcccctaagctgctgatctacagcgccagcaacagatacagcggagtgcccgccagattttccggctctggctacggcaccgagttcacctttaccatcagcagcgtgcagagcgaggacttcgccgtgtacttctgccagcaagactacagcagcttcggccagggcaccaagctggaaatcaagagactcgaggacctgaagcacgtgttcccacctgaggtggccgtgttcgagcctagcgacgccgagatctggcacacccagaaagccaccctcgtgtgcctggctaccggcttctaccccgaccatgtggaactgtcttggtgggtcaacggcaaagaggtgcacagcggcgtgtctaccgacccccagccactgaaagaacagcccgccctgaacgacagccggtactgcctgagcagcagactgagagtgtccgccaccttctggcagaacccccggaaccacttcagatgccaggtgcagttctacggcctgagcgagaacgacgagtggacccaggacagagccaagcccgtgacccagatcgtgtctgccgaagcctggggcagagccgattgcggctttaccagcgagagctaccagcagggcgtgctgagcgccaccatcctgtacgagatcctgctgggcaaggccaccctgtacgccgtgctggtgtctgccctggtgctgatggctatggtcaagcggaaggacagccggggaagggccaagcgatctggatctggagcaacaaacttctcactactcaaacaagcaggtgacgtggaggagaatcccgggcctactagtatggactggatttggcgcatccttttccttgtcggcgctgctaccggcgcgcattccttcgaacaggtgcagctggtggaatctggacctggcgtggtgcagcctggcagaagcctgagaatcagctgtgccgtgtccggcttcagcgtgaccaactacggcgtgcactgggtgcgccagccacctggaaaaggactggaatggctgggcgtgatctgggctggcggcatcaccaactacaacagcgccttcatgtcccggctgaccatctccaaggacaacagcaagaacaccgtgtacctccagatgaacagcctgcgggccgaggacaccgccatgtactactgtgcttccagaggcggccactacggctacgccctggattattggggccagggaaccctcgtgaccgtgtcctctacgcgtatccagaaccctgatcctgccgtgtaccagctgcgggatagcaagagcagcgacaagagcgtgtgtctgttcaccgacttcgacagccagaccaacgtgtcccagagcaaggactccgacgtgtacatcaccgataagaccgtgctggacatgcggagcatggacttcaagagcaactccgccgtggcctggtccagcaagtccgatttcgcctgcgccaacgccttcaacaacagcattatccccgaggacacattcttcccaagccccgagatggcctgcgacgtgaagctggtggaaaagagcttcgagacagacaccaacctgaacttccagaacctgctcgtgatctggctgagaatcctgctgctgaaagtggccggctttaacctgctgatgaccctgcggctgtggtccagc

SEQ ID NO: 35734 - DNA, 1851 bp, synthetic construct
  source 1..1851: mol_type = other DNA
atggccttaccagtgaccgccttgctcctgccgctggccttgctgctccacgccgccaggccggacatccagatgacacagagccctagcagcctgtctgccagcgtgggagacagagtgaccatcacatgcaaggccagccagagcgtgtccaacgacgtgacctggtatcagcagaagcctggacaggcccctaagctgctgatctacagcgccagcaacagatacagcggagtgcccgccagattttccggctctggctacggcaccgagttcacctttaccatcagcagcgtgcagagcgaggacttcgccgtgtacttctgccagcaagactacagcagcttcggccagggcaccaagctggaaatcaagagactcgaggacctgaagcacgtgttcccacctgaggtggccgtgttcgagcctagcgacgccgagatctggcacacccagaaagccaccctcgtgtgcctggctaccggcttctaccccgaccatgtggaactgtcttggtgggtcaacggcaaagaggtgcacagcggcgtgtctaccgacccccagccactgaaagaacagcccgccctgaacgacagccggtactgcctgagcagcagactgagagtgtccgccaccttctggcagaacccccggaaccacttcagatgccaggtgcagttctacggcctgagcgagaacgacgagtggacccaggacagagccaagcccgtgacccagatcgtgtctgccgaagcctggggcagagccgattgcggctttaccagcgagagctaccagcagggcgtgctgagcgccaccatcctgtacgagatcctgctgggcaaggccaccctgtacgccgtgctggtgtctgccctggtgctgatggctatggtcaagcggaaggacagccggggaagggccaagcgatctggatctggagcaacaaacttctcactactcaaacaagcaggtgacgtggaggagaatcccgggcctactagtatggactggatttggcgcatccttttccttgtcggcgctgctaccggcgcgcattccttcgaacaggtgcagctggtggaatctggacctggcgtggtgcagcctggcagaagcctgagaatcagctgtgccgtgtccggcttcagcgtgaccaactacggcgtgcactgggtgcgccagccacctggaaaaggactggaatggctgggcgtgatctgggctggcggcatcaccaactacaacagcgccttcatgtcccggctgaccatctccaaggacaacagcaagaacaccgtgtacctccagatgaacagcctgcgggccgaggacaccgccatgtactactgtgcttccagaggcggccactacggctacgccctggattattggggccagggaaccctcgtgaccgtgtcctctacgcgtatccagaaccctgatcctgccgtgtaccagctgcgggatagcaagagcagcgacaagagcgtgtgtctgttcaccgacttcgacagccagaccaacgtgtcccagagcaaggactccgacgtgtacatcaccgataagaccgtgctggacatgcggagcatggacttcaagagcaactccgccgtggcctggtccaccaagtccgatttcgcctgcgccaacgccttcaacaacagcattatccccgaggacacattcttcccaagccccgaggtggtgtgcgacgtgaagctggtggaaaagagcttcgagacagacaccaacctgaacttccagaacctggtggtgatcggcgccagaatcctgctgctgaaagtggccggctttaacctgctgatgaccctgcggctgtggtccagc

SEQ ID NO: 35735 - DNA, 1851 bp, synthetic construct
  source 1..1851: mol_type = other DNA
atggccttaccagtgaccgccttgctcctgccgctggccttgctgctccacgccgccaggccggacatccagatgacacagagccctagcagcctgtctgccagcgtgggagacagagtgaccatcacatgcaaggccagccagagcgtgtccaacgacgtgacctggtatcagcagaagcctggacaggcccctaagctgctgatctacagcgccagcaacagatacagcggagtgcccgccagattttccggctctggctacggcaccgagttcacctttaccatcagcagcgtgcagagcgaggacttcgccgtgtacttctgccagcaagactacagcagcttcggccagggcaccaagctggaaatcaagagactcgaggacctgaagaacgtgttcccacctgaggtggccgtgttcgagcctagcaaggccgagatcagcagaacccagaaagccaccctcgtgtgcctggctaccggcttctaccctcctcatgtggaactgtcttggtgggtcaacggcaaagaggtgcacgacggcgtgtgtaccgacccccagccactgaaagaacagcccgccctgaacgacagccggtactgcctgagcagcagactgagagtgtccgccaccttctggcagaacccccggaaccacttcagatgccaggtgcagttctacggcctgagcgagaacgacgagtggacccaggacagagccaagcccgtgacccagatcgtgtctgccgaagcctggggcagagccgattgcggctttaccagcgagagctaccagcagggcgtgctgagcgccaccatcctgtacgagatcctgctgggcaaggccaccctgtacgccgtgctggtgtctgccctggtgctgatggctatggtcaagcggaaggacagccggggaagggccaagcgatctggatctggagcaacaaacttctcactactcaaacaagcaggtgacgtggaggagaatcccgggcctactagtatggactggatttggcgcatccttttccttgtcggcgctgctaccggcgcgcattccttcgaacaggtgcagctggtggaatctggacctggcgtggtgcagcctggcagaagcctgagaatcagctgtgccgtgtccggcttcagcgtgaccaactacggcgtgcactgggtgcgccagccacctggaaaaggactggaatggctgggcgtgatctgggctggcggcatcaccaactacaacagcgccttcatgtcccggctgaccatctccaaggacaacagcaagaacaccgtgtacctccagatgaacagcctgcgggccgaggacaccgccatgtactactgtgcttccagaggcggccactacggctacgccctggattattggggccagggaaccctcgtgaccgtgtcctctacgcgtatccagaaccctgatcctgccgtgtaccagctgcgggatagcaagagcagcgacaagttcgtgtgtctgttcaccgacttcgacagccagatcaacgtgtcccagagcaaggactccgacgtgtacatcaccgataagtgcgtgctggacatgcggagcatggacttcaagagcaactccgccgtggcctggtccaacaagtccgatttcacctgcgccaacgccttcaacaacagcattatccccgaggacacattcttcccaagccccgagagcagctgcgacgtgaagctggtggaaaagagcttcgagacagacaccaacctgaacttccagaacctgagcgtgatcggcttcagaatcctgctgctgaaagtggccggctttaacctgctgatgaccctgcggctgtggtccagc

SEQ ID NO: 35736 - DNA, 2277 bp, synthetic construct
  source 1..2277: mol_type = other DNA
atggccttaccagtgaccgccttgctcctgccgctggccttgctgctccacgccgccaggccggacatccagatgacacagagccctagcagcctgtctgccagcgtgggagacagagtgaccatcacatgcaaggccagccagagcgtgtccaacgacgtgacctggtatcagcagaagcctggacaggcccctaagctgctgatctacagcgccagcaacagatacagcggagtgcccgccagattttccggctctggctacggcaccgagttcacctttaccatcagcagcgtgcagagcgaggacttcgccgtgtacttctgccagcaagactacagcagcttcggccagggcaccaagctggaaatcaagagactcgaggacctgaagaacgtgttcccacctgaggtggccgtgttcgagcctagcgaggccgagatcagccacacccagaaagccaccctcgtgtgcctggctaccggcttctaccccgaccatgtggaactgtcttggtgggtcaacggcaaagaggtgcacagcggcgtgtgtaccgacccccagccactgaaagaacagcccgccctgaacgacagccggtactgcctgagcagcagactgagagtgtccgccaccttctggcagaacccccggaaccacttcagatgccaggtgcagttctacggcctgagcgagaacgacgagtggacccaggacagagccaagcccgtgacccagatcgtgtctgccgaagcctggggcagagccgattgcggctttaccagcgagagctaccagcagggcgtgctgagcgccaccatcctgtacgagatcctgctgggcaaggccaccctgtacgccgtgctggtgtctgccctggtgctgatggctatggtcaagcggaaggacagccggggaagggccaagcgatctggatctggagcaacaaacttctcactactcaaacaagcaggtgacgtggaggagaatcccgggcctactagtaccatggactggatttggcgcatccttttccttgtcggcgctgctaccggcgcccattccgggccccaggtgcagctccaagaaagcggacccggactggttaagccctctcagaccctgtctctgacctgcacagttagcggagccagcattaccacaggcgagtattattggaattggtttcggcagccaccaggcaaggggcttgagtggatgggtgctattgctgcctctggcagcaccacctactctcccagctttgagagcagaacctccatcagccgggacacctccaaaaaccagttctctctgaagctgtcctccgtgaccgctgctgacaccgccgtctattattgtggccggtctttcggcgtggcagctgtgaccacaggacagaacagaggccagggaacacttgtgaccgtgtcctctggatccggcggcggaggatctggcggaggcggatctgggggcggaggctctttcgaacaggtgcagctggtggaatctggacctggcgtggtgcagcctggcagaagcctgagaatcagctgtgccgtgtccggcttcagcgtgaccaactacggcgtgcactgggtgcgccagccacctggaaaaggactggaatggctgggcgtgatctgggctggcggcatcaccaactacaacagcgccttcatgtcccggctgaccatctccaaggacaacagcaagaacaccgtgtacctccagatgaacagcctgcgggccgaggacaccgccatgtactactgtgcttccagaggcggccactacggctacgccctggattattggggccagggaaccctcgtgaccgtgtcctctacgcgtatccagaaccctgatcctgccgtgtaccagctgcgggatagcaagagcagcgacaagagcgtgtgtctgttcaccgacttcgacagccagaccaacgtgtcccagagcaaggactccgacgtgtacatcaccgataagtgcgtgctggacatgcggagcatggacttcaagagcaactccgccgtggcctggtccaacaagtccgatttcgcctgcgccaacgccttcaacaacagcattatccccgaggacacattcttcccaagccccgagagcagctgcgacgtgaagctggtggaaaagagcttcgagacagacaccaacctgaacttccagaacctgagcgtgatcggcttcagaatcctgctgctgaaagtggccggctttaacctgctgatgaccctgcggctgtggtccagc

SEQ ID NO: 35737 - DNA, 2700 bp, synthetic construct
  source 1..2700: mol_type = other DNA
atggccttaccagtgaccgccttgctcctgccgctggccttgctgctccacgccgccaggccgcaggttcagctgcaagagtctggccctggcctggtcaagcctagccaaacactgagcctgacctgtaccgtgtctggcggctctatcaccaccggcgagttctactggaactggttcagacagcctcctggcaaaggactggaatggatgggagccattgccgccagcggcagcacaacatacagccctagcttcgagagccggaccagcatcagcagagacaccagcaagaatcagttcagcctgaagctgagcagcgtgacagccgccgatacagccgtgtattactgcggcagatcctttggagtggccgccgtgacaaccggccagaatagaggacagggcaccctggtcacagtgtctagcggtaccggcggaggcggatctggcggcggaggtagcggtggcggaggatctgaattcgacatccagatgacacagagccctagcagcctgtctgccagcgtgggagacagagtgaccatcacatgcaaggccagccagagcgtgtccaacgacgtgacctggtatcagcagaagcctggacaggcccctaagctgctgatctacagcgccagcaacagatacagcggagtgcccgccagattttccggctctggctacggcaccgagttcacctttaccatcagcagcgtgcagagcgaggacttcgccgtgtacttctgccagcaagactacagcagcttcggccagggcaccaagctggaaatcaagagactcgagatccagaaccctgatcctgccgtgtaccagctgcgggatagcaagagcagcgacaagagcgtgtgtctgttcaccgacttcgacagccagaccaacgtgtcccagagcaaggactccgacgtgtacatcaccgataagtgcgtgctggacatgcggagcatggacttcaagagcaactccgccgtggcctggtccaacaagtccgatttcgcctgcgccaacgccttcaacaacagcattatccccgaggacacattcttcccaagcagcgacgtgccctgcgacgtgaagctggtggaaaagagcttcgagacagacaccaacctgaacttccagaacctgagcgtgatcggcttcagaatcctgctgctgaaagtggccggctttaacctgctgatgaccctgcggctgtggtccagccgcgccaagagaagcggatctggcgtgaagcagaccctgaatttcgacctgctgaagctggctggcgacgtggaatccaacccaggccctactagtaccatggactggatttggcgcatccttttccttgtcggcgctgctaccggcgcccattccgggcccgaagtgcaactggttgaatccggtggcggcctggtgcaacccggcggatctctcagacttagctgtgccgcctccggcagaaccttcacaatgggatggtacaggcaggctccagggaaagagagagagttcgtcgccgccatctctctgtctcccacactggcctactacgccgactctgtgaaaggccggttcaccatctccagagataatagcaagaacaccgtggtgctgcaaatgaactctctgagagccgaggatacagccctgtactattgtgccgctgaccggaagtccgtgatgagcatcagacccgattactggggacagggcacactggtcacagtgtctagtggatccggcggcggaggatctggcggaggcggatctgggggcggaggctctttcgaacaggtgcagctggtggaatctggacctggcgtggtgcagcctggcagaagcctgagaatcagctgtgccgtgtccggcttcagcgtgaccaactacggcgtgcactgggtgcgccagccacctggaaaaggactggaatggctgggcgtgatctgggctggcggcatcaccaactacaacagcgccttcatgtcccggctgaccatctccaaggacaacagcaagaacaccgtgtacctccagatgaacagcctgcgggccgaggacaccgccatgtactactgtgcttccagaggcggccactacggctacgccctggattattggggccagggaaccctcgtgaccgtgtcctctacgcgtgaggacctgaagaacgtgttcccacctgaggtggccgtgttcgagcctagcaaggccgagatcgcccacacccagaaagccaccctcgtgtgcctggctaccggcttctaccccgaccatgtggaactgtcttggtgggtcaacggcaaagaggtgcacagcggcgtgtgtaccgacccccagccactgaaagaacagcccgccctgaacgacagccggtactgcctgagcagcagactgagagtgtccgccaccttctggcagaacccccggaaccacttcagatgccaggtgcagttctacggcctgagcgagaacgacgagtggacccaggacagagccaagcccgtgacccagatcgtgtctgccgaagcctggggcagagccgattgcggcatcaccagcgccagctaccaccagggcgtgctgagcgccaccatcctgtacgagatcctgctgggcaaggccaccctgtacgccgtgctggtgtctgccctggtgctgatggctatggtcaagcggaaggacagccgggga

SEQ ID NO: 35738 - DNA, 2289 bp, synthetic construct
  source 1..2289: mol_type = other DNA
atggccttaccagtgaccgccttgctcctgccgctggccttgctgctccacgccgccaggccgcaggttcagctgcaagagtctggccctggcctggtcaagcctagccaaacactgagcctgacctgtaccgtgtctggcggctctatcaccaccggcgagttctactggaactggttcagacagcctcctggcaaaggactggaatggatgggagccattgccgccagcggcagcacaacatacagccctagcttcgagagccggaccagcatcagcagagacaccagcaagaatcagttcagcctgaagctgagcagcgtgacagccgccgatacagccgtgtattactgcggcagatcctttggagtggccgccgtgacaaccggccagaatagaggacagggcaccctggtcacagtgtctagcggtaccggcggaggcggatctggcggcggaggtagcggtggcggaggatctgaattcgacatccagatgacacagagccctagcagcctgtctgccagcgtgggagacagagtgaccatcacatgcaaggccagccagagcgtgtccaacgacgtgacctggtatcagcagaagcctggacaggcccctaagctgctgatctacagcgccagcaacagatacagcggagtgcccgccagattttccggctctggctacggcaccgagttcacctttaccatcagcagcgtgcagagcgaggacttcgccgtgtacttctgccagcaagactacagcagcttcggccagggcaccaagctggaaatcaagagactcgagatccagaaccctgatcctgccgtgtaccagctgcgggatagcaagagcagcgacaagagcgtgtgtctgttcaccgacttcgacagccagaccaacgtgtcccagagcaaggactccgacgtgtacatcaccgataagtgcgtgctggacatgcggagcatggacttcaagagcaactccgccgtggcctggtccaacaagtccgatttcgcctgcgccaacgccttcaacaacagcattatccccgaggacacattcttcccaagcagcgacgtgccctgcgacgtgaagctggtggaaaagagcttcgagacagacaccaacctgaacttccagaacctgagcgtgatcggcttcagaatcctgctgctgaaagtggccggctttaacctgctgatgaccctgcggctgtggtccagccgcgccaagagaagcggatctggcgtgaagcagaccctgaatttcgacctgctgaagctggctggcgacgtggaatccaacccaggccctactagtaccatggactggatttggcgcatccttttccttgtcggcgctgctaccggcgcccattccttcgaacaggtgcagctggtggaatctggacctggcgtggtgcagcctggcagaagcctgagaatcagctgtgccgtgtccggcttcagcgtgaccaactacggcgtgcactgggtgcgccagccacctggaaaaggactggaatggctgggcgtgatctgggctggcggcatcaccaactacaacagcgccttcatgtcccggctgaccatctccaaggacaacagcaagaacaccgtgtacctccagatgaacagcctgcgggccgaggacaccgccatgtactactgtgcttccagaggcggccactacggctacgccctggattattggggccagggaaccctcgtgaccgtgtcctctacgcgtgaggacctgaagaacgtgttcccacctgaggtggccgtgttcgagcctagcaaggccgagatcgcccacacccagaaagccaccctcgtgtgcctggctaccggcttctaccccgaccatgtggaactgtcttggtgggtcaacggcaaagaggtgcacagcggcgtgtgtaccgacccccagccactgaaagaacagcccgccctgaacgacagccggtactgcctgagcagcagactgagagtgtccgccaccttctggcagaacccccggaaccacttcagatgccaggtgcagttctacggcctgagcgagaacgacgagtggacccaggacagagccaagcccgtgacccagatcgtgtctgccgaagcctggggcagagccgattgcggcatcaccagcgccagctaccaccagggcgtgctgagcgccaccatcctgtacgagatcctgctgggcaaggccaccctgtacgccgtgctggtgtctgccctggtgctgatggctatggtcaagcggaaggacagccgggga

SEQ ID NO: 35739 - DNA, 2688 bp, synthetic construct
  source 1..2688: mol_type = other DNA
atggccttaccagtgaccgccttgctcctgccgctggccttgctgctccacgccgccaggccggaagtgcagctggttgaatctggcggaggactggttcaggctggcggatctctgagactgtcttgtgccgccagcggcagaacctttagcatgggctggtttagacaggcccctggcaaagagagagagttcgtcgccgccatcacatactctggcggcagcccttactacgccgactctgtgaagggcagattcaccatcagccgggacaacgccaagaacaccgtgtacctccagatgaacagcctgaagcctgaggacaccgccgtgtactactgcgccgccaatccaacatacggcagcgactggaacgccgagaattggggccagggaacccaagtgacagtgtctagcggtaccggcggaggcggatctggcggcggaggtagcggtggcggaggatctgaattcgacatccagatgacacagagccctagcagcctgtctgccagcgtgggagacagagtgaccatcacatgcaaggccagccagagcgtgtccaacgacgtgacctggtatcagcagaagcctggacaggcccctaagctgctgatctacagcgccagcaacagatacagcggagtgcccgccagattttccggctctggctacggcaccgagttcacctttaccatcagcagcgtgcagagcgaggacttcgccgtgtacttctgccagcaagactacagcagcttcggccagggcaccaagctggaaatcaagagactcgaggacctgaagaacgtgttcccacctgaggtggccgtgttcgagcctagcgaggccgagatcagccacacccagaaagccaccctcgtgtgcctggctaccggcttctaccccgaccatgtggaactgtcttggtgggtcaacggcaaagaggtgcacagcggcgtgtgtaccgacccccagccactgaaagaacagcccgccctgaacgacagccggtactgcctgagcagcagactgagagtgtccgccaccttctggcagaacccccggaaccacttcagatgccaggtgcagttctacggcctgagcgagaacgacgagtggacccaggacagagccaagcccgtgacccagatcgtgtctgccgaagcctggggcagagccgattgcggctttaccagcgagagctaccagcagggcgtgctgagcgccaccatcctgtacgagatcctgctgggcaaggccaccctgtacgccgtgctggtgtctgccctggtgctgatggctatggtcaagcggaaggacagccggggaagggccaagcgatctggatctggagcaacaaacttctcactactcaaacaagcaggtgacgtggaggagaatcccgggcctactagtaccatggactggatttggcgcatccttttccttgtcggcgctgctaccggcgcccattccgggccccaggtgcagctccaagaaagcggacccggactggttaagccctctcagaccctgtctctgacctgcacagttagcggagccagcattaccacaggcgagtattattggaattggtttcggcagccaccaggcaaggggcttgagtggatgggtgctattgctgcctctggcagcaccacctactctcccagctttgagagcagaacctccatcagccgggacacctccaaaaaccagttctctctgaagctgtcctccgtgaccgctgctgacaccgccgtctattattgtggccggtctttcggcgtggcagctgtgaccacaggacagaacagaggccagggaacacttgtgaccgtgtcctctggatccggcggcggaggatctggcggaggcggatctgggggcggaggctctttcgaacaggtgcagctggtggaatctggacctggcgtggtgcagcctggcagaagcctgagaatcagctgtgccgtgtccggcttcagcgtgaccaactacggcgtgcactgggtgcgccagccacctggaaaaggactggaatggctgggcgtgatctgggctggcggcatcaccaactacaacagcgccttcatgtcccggctgaccatctccaaggacaacagcaagaacaccgtgtacctccagatgaacagcctgcgggccgaggacaccgccatgtactactgtgcttccagaggcggccactacggctacgccctggattattggggccagggaaccctcgtgaccgtgtcctctacgcgtatccagaaccctgatcctgccgtgtaccagctgcgggatagcaagagcagcgacaagagcgtgtgtctgttcaccgacttcgacagccagaccaacgtgtcccagagcaaggactccgacgtgtacatcaccgataagtgcgtgctggacatgcggagcatggacttcaagagcaactccgccgtggcctggtccaacaagtccgatttcgcctgcgccaacgccttcaacaacagcattatccccgaggacacattcttcccaagccccgagagcagctgcgacgtgaagctggtggaaaagagcttcgagacagacaccaacctgaacttccagaacctgagcgtgatcggcttcagaatcctgctgctgaaagtggccggctttaacctgctgatgaccctgcggctgtggtccagc

SEQ ID NO: 35740 - DNA, 2709 bp, synthetic construct
  source 1..2709: mol_type = other DNA
atggccttaccagtgaccgccttgctcctgccgctggccttgctgctccacgccgccaggccggaagtgcagctggttgaatctggcggaggactggttcaggctggcggatctctgagactgtcttgtgccgccagcggcagaacctttagcatgggctggtttagacaggcccctggcaaagagagagagttcgtcgccgccatcacatactctggcggcagcccttactacgccgactctgtgaagggcagattcaccatcagccgggacaacgccaagaacaccgtgtacctccagatgaacagcctgaagcctgaggacaccgccgtgtactactgcgccgccaatccaacatacggcagcgactggaacgccgagaattggggccagggaacccaagtgacagtgtctagcggtaccggcggaggcggatctggcggcggaggtagcggtggcggaggatctgaattcgacatccagatgacacagagccctagcagcctgtctgccagcgtgggagacagagtgaccatcacatgcaaggccagccagagcgtgtccaacgacgtgacctggtatcagcagaagcctggacaggcccctaagctgctgatctacagcgccagcaacagatacagcggagtgcccgccagattttccggctctggctacggcaccgagttcacctttaccatcagcagcgtgcagagcgaggacttcgccgtgtacttctgccagcaagactacagcagcttcggccagggcaccaagctggaaatcaagagactcgagatccagaaccctgatcctgccgtgtaccagctgcgggatagcaagagcagcgacaagagcgtgtgtctgttcaccgacttcgacagccagaccaacgtgtcccagagcaaggactccgacgtgtacatcaccgataagtgcgtgctggacatgcggagcatggacttcaagagcaactccgccgtggcctggtccaacaagtccgatttcgcctgcgccaacgccttcaacaacagcattatccccgaggacacattcttcccaagcagcgacgtgccctgcgacgtgaagctggtggaaaagagcttcgagacagacaccaacctgaacttccagaacctgagcgtgatcggcttcagaatcctgctgctgaaagtggccggctttaacctgctgatgaccctgcggctgtggtccagccgcgccaagagaagcggatctggcgtgaagcagaccctgaatttcgacctgctgaagctggctggcgacgtggaatccaacccaggccctactagtaccatggactggatttggcgcatccttttccttgtcggcgctgctaccggcgcccattccgggccccaggtgcagctggttgaatctggcggaggactggttcagcctggcggatctctgagactgtcttgtgccgccagcggcaacatcaacagcagaaactgcatgggctggttcagacaggcccctggcaagggaagagaaggcgtggcagctatcggccaagtgaccggcagaacctactacgtggacagcgtgaagggcagattcaccatcagcctggacaacagcaagaacaccctgtacctccagatgaacagcctgagagccgaggacaccgccgtgtactattgtgctgctgcccctggctgtctgctgtctgcacttagaagcgccgactacagaaactggggccagggcacactggtcaccgtttcttctggatccggcggcggaggatctggcggaggcggatctgggggcggaggctctttcgaacaggtgcagctggtggaatctggacctggcgtggtgcagcctggcagaagcctgagaatcagctgtgccgtgtccggcttcagcgtgaccaactacggcgtgcactgggtgcgccagccacctggaaaaggactggaatggctgggcgtgatctgggctggcggcatcaccaactacaacagcgccttcatgtcccggctgaccatctccaaggacaacagcaagaacaccgtgtacctccagatgaacagcctgcgggccgaggacaccgccatgtactactgtgcttccagaggcggccactacggctacgccctggattattggggccagggaaccctcgtgaccgtgtcctctacgcgtgaggacctgaagaacgtgttcccacctgaggtggccgtgttcgagcctagcaaggccgagatcgcccacacccagaaagccaccctcgtgtgcctggctaccggcttctaccccgaccatgtggaactgtcttggtgggtcaacggcaaagaggtgcacagcggcgtgtgtaccgacccccagccactgaaagaacagcccgccctgaacgacagccggtactgcctgagcagcagactgagagtgtccgccaccttctggcagaacccccggaaccacttcagatgccaggtgcagttctacggcctgagcgagaacgacgagtggacccaggacagagccaagcccgtgacccagatcgtgtctgccgaagcctggggcagagccgattgcggcatcaccagcgccagctaccaccagggcgtgctgagcgccaccatcctgtacgagatcctgctgggcaaggccaccctgtacgccgtgctggtgtctgccctggtgctgatggctatggtcaagcggaaggacagccgggga

SEQ ID NO: 35741 - DNA, 2697 bp, synthetic construct
  source 1..2697: mol_type = other DNA
atggccttaccagtgaccgccttgctcctgccgctggccttgctgctccacgccgccaggccggaagtgcagctggttgaatctggcggaggactggttcaggctggcggatctctgagactgtcttgtgccgccagcggcagaacctttagcatgggctggtttagacaggcccctggcaaagagagagagttcgtcgccgccatcacatactctggcggcagcccttactacgccgactctgtgaagggcagattcaccatcagccgggacaacgccaagaacaccgtgtacctccagatgaacagcctgaagcctgaggacaccgccgtgtactactgcgccgccaatccaacatacggcagcgactggaacgccgagaattggggccagggaacccaagtgacagtgtctagcggtaccggcggaggcggatctggcggcggaggtagcggtggcggaggatctgaattcgacatccagatgacacagagccctagcagcctgtctgccagcgtgggagacagagtgaccatcacatgcaaggccagccagagcgtgtccaacgacgtgacctggtatcagcagaagcctggacaggcccctaagctgctgatctacagcgccagcaacagatacagcggagtgcccgccagattttccggctctggctacggcaccgagttcacctttaccatcagcagcgtgcagagcgaggacttcgccgtgtacttctgccagcaagactacagcagcttcggccagggcaccaagctggaaatcaagagactcgaggacctgaagaacgtgttcccacctgaggtggccgtgttcgagcctagcgaggccgagatcagccacacccagaaagccaccctcgtgtgcctggctaccggcttctaccccgaccatgtggaactgtcttggtgggtcaacggcaaagaggtgcacagcggcgtgtgtaccgacccccagccactgaaagaacagcccgccctgaacgacagccggtactgcctgagcagcagactgagagtgtccgccaccttctggcagaacccccggaaccacttcagatgccaggtgcagttctacggcctgagcgagaacgacgagtggacccaggacagagccaagcccgtgacccagatcgtgtctgccgaagcctggggcagagccgattgcggctttaccagcgagagctaccagcagggcgtgctgagcgccaccatcctgtacgagatcctgctgggcaaggccaccctgtacgccgtgctggtgtctgccctggtgctgatggctatggtcaagcggaaggacagccggggaagggccaagcgatctggatctggagcaacaaacttctcactactcaaacaagcaggtgacgtggaggagaatcccgggcctactagtaccatggactggatttggcgcatccttttccttgtcggcgctgctaccggcgcccattccgggccccaggtgcagctggttgaatctggcggaggactggttcagcctggcggatctctgagactgtcttgtgccgccagcggcaacatcaacagcagaaactgcatgggctggttcagacaggcccctggcaagggaagagaaggcgtggcagctatcggccaagtgaccggcagaacctactacgtggacagcgtgaagggcagattcaccatcagcctggacaacagcaagaacaccctgtacctccagatgaacagcctgagagccgaggacaccgccgtgtactattgtgctgctgcccctggctgtctgctgtctgcacttagaagcgccgactacagaaactggggccagggcacactggtcaccgtttcttctggatccggcggcggaggatctggcggaggcggatctgggggcggaggctctttcgaacaggtgcagctggtggaatctggacctggcgtggtgcagcctggcagaagcctgagaatcagctgtgccgtgtccggcttcagcgtgaccaactacggcgtgcactgggtgcgccagccacctggaaaaggactggaatggctgggcgtgatctgggctggcggcatcaccaactacaacagcgccttcatgtcccggctgaccatctccaaggacaacagcaagaacaccgtgtacctccagatgaacagcctgcgggccgaggacaccgccatgtactactgtgcttccagaggcggccactacggctacgccctggattattggggccagggaaccctcgtgaccgtgtcctctacgcgtatccagaaccctgatcctgccgtgtaccagctgcgggatagcaagagcagcgacaagagcgtgtgtctgttcaccgacttcgacagccagaccaacgtgtcccagagcaaggactccgacgtgtacatcaccgataagtgcgtgctggacatgcggagcatggacttcaagagcaactccgccgtggcctggtccaacaagtccgatttcgcctgcgccaacgccttcaacaacagcattatccccgaggacacattcttcccaagccccgagagcagctgcgacgtgaagctggtggaaaagagcttcgagacagacaccaacctgaacttccagaacctgagcgtgatcggcttcagaatcctgctgctgaaagtggccggctttaacctgctgatgaccctgcggctgtggtccagc

SEQ ID NO: 35742 - DNA, 2697 bp, synthetic construct
  source 1..2697: mol_type = other DNA
atggccttaccagtgaccgccttgctcctgccgctggccttgctgctccacgccgccaggccggaagtgcaactggttgaatccggtggcggcctggtgcaagcaggcggatctctcagacttagctgtgccgcctccggcagaaccttcacaatgggatggtttaggcaggctccagggaaagagagagagttcgtcgccgccatctctctgtctcccacactggcctactacgccgactctgtgaaaggccggttcaccatctccagagataatgccaagaacaccgtggtgctgcaaatgaactctctgaaacccgaggatacagccctgtactattgtgccgctgaccggaagtccgtgatgagcatcagacccgattactggggacagggcacacaagtcacagtgtcctctggtaccggcggaggcggatctggcggcggaggtagcggtggcggaggatctgaattcgacatccagatgacacagagccctagcagcctgtctgccagcgtgggagacagagtgaccatcacatgcaaggccagccagagcgtgtccaacgacgtgacctggtatcagcagaagcctggacaggcccctaagctgctgatctacagcgccagcaacagatacagcggagtgcccgccagattttccggctctggctacggcaccgagttcacctttaccatcagcagcgtgcagagcgaggacttcgccgtgtacttctgccagcaagactacagcagcttcggccagggcaccaagctggaaatcaagagactcgaggacctgaagaacgtgttcccacctgaggtggccgtgttcgagcctagcgaggccgagatcagccacacccagaaagccaccctcgtgtgcctggctaccggcttctaccccgaccatgtggaactgtcttggtgggtcaacggcaaagaggtgcacagcggcgtgtgtaccgacccccagccactgaaagaacagcccgccctgaacgacagccggtactgcctgagcagcagactgagagtgtccgccaccttctggcagaacccccggaaccacttcagatgccaggtgcagttctacggcctgagcgagaacgacgagtggacccaggacagagccaagcccgtgacccagatcgtgtctgccgaagcctggggcagagccgattgcggctttaccagcgagagctaccagcagggcgtgctgagcgccaccatcctgtacgagatcctgctgggcaaggccaccctgtacgccgtgctggtgtctgccctggtgctgatggctatggtcaagcggaaggacagccggggaagggccaagcgatctggatctggagcaacaaacttctcactactcaaacaagcaggtgacgtggaggagaatcccgggcctactagtaccatggactggatttggcgcatccttttccttgtcggcgctgctaccggcgcccattccgggccccaggtgcagctggttgaatctggcggaggactggttcagcctggcggatctctgagactgtcttgtgccgccagcggcaacatcaacagcagaaactgcatgggctggttcagacaggcccctggcaagggaagagaaggcgtggcagctatcggccaagtgaccggcagaacctactacgtggacagcgtgaagggcagattcaccatcagcctggacaacagcaagaacaccctgtacctccagatgaacagcctgagagccgaggacaccgccgtgtactattgtgctgctgcccctggctgtctgctgtctgcacttagaagcgccgactacagaaactggggccagggcacactggtcaccgtttcttctggatccggcggcggaggatctggcggaggcggatctgggggcggaggctctttcgaacaggtgcagctggtggaatctggacctggcgtggtgcagcctggcagaagcctgagaatcagctgtgccgtgtccggcttcagcgtgaccaactacggcgtgcactgggtgcgccagccacctggaaaaggactggaatggctgggcgtgatctgggctggcggcatcaccaactacaacagcgccttcatgtcccggctgaccatctccaaggacaacagcaagaacaccgtgtacctccagatgaacagcctgcgggccgaggacaccgccatgtactactgtgcttccagaggcggccactacggctacgccctggattattggggccagggaaccctcgtgaccgtgtcctctacgcgtatccagaaccctgatcctgccgtgtaccagctgcgggatagcaagagcagcgacaagagcgtgtgtctgttcaccgacttcgacagccagaccaacgtgtcccagagcaaggactccgacgtgtacatcaccgataagtgcgtgctggacatgcggagcatggacttcaagagcaactccgccgtggcctggtccaacaagtccgatttcgcctgcgccaacgccttcaacaacagcattatccccgaggacacattcttcccaagccccgagagcagctgcgacgtgaagctggtggaaaagagcttcgagacagacaccaacctgaacttccagaacctgagcgtgatcggcttcagaatcctgctgctgaaagtggccggctttaacctgctgatgaccctgcggctgtggtccagc

SEQ ID NO: 35743 - DNA, 2709 bp, synthetic construct
  source 1..2709: mol_type = other DNA
atggccttaccagtgaccgccttgctcctgccgctggccttgctgctccacgccgccaggccgcaggttcagctgcaagagtctggccctggcctggtcaagcctagccaaacactgagcctgacctgtaccgtgtctggcggctctatcaccaccggcgagttctactggaactggttcagacagcctcctggcaaaggactggaatggatgggagccattgccgccagcggcagcacaacatacagccctagcttcgagagccggaccagcatcagcagagacaccagcaagaatcagttcagcctgaagctgagcagcgtgacagccgccgatacagccgtgtattactgcggcagatcctttggagtggccgccgtgacaaccggccagaatagaggacagggcaccctggtcacagtgtctagcggtaccggcggaggcggatctggcggcggaggtagcggtggcggaggatctgaattcgacatccagatgacacagagccctagcagcctgtctgccagcgtgggagacagagtgaccatcacatgcaaggccagccagagcgtgtccaacgacgtgacctggtatcagcagaagcctggacaggcccctaagctgctgatctacagcgccagcaacagatacagcggagtgcccgccagattttccggctctggctacggcaccgagttcacctttaccatcagcagcgtgcagagcgaggacttcgccgtgtacttctgccagcaagactacagcagcttcggccagggcaccaagctggaaatcaagagactcgaggacctgaagaacgtgttcccacctgaggtggccgtgttcgagcctagcgaggccgagatcagccacacccagaaagccaccctcgtgtgcctggctaccggcttctaccccgaccatgtggaactgtcttggtgggtcaacggcaaagaggtgcacagcggcgtgtgtaccgacccccagccactgaaagaacagcccgccctgaacgacagccggtactgcctgagcagcagactgagagtgtccgccaccttctggcagaacccccggaaccacttcagatgccaggtgcagttctacggcctgagcgagaacgacgagtggacccaggacagagccaagcccgtgacccagatcgtgtctgccgaagcctggggcagagccgattgcggctttaccagcgagagctaccagcagggcgtgctgagcgccaccatcctgtacgagatcctgctgggcaaggccaccctgtacgccgtgctggtgtctgccctggtgctgatggctatggtcaagcggaaggacagccggggaagggccaagcgatctggatctggagcaacaaacttctcactactcaaacaagcaggtgacgtggaggagaatcccgggcctactagtaccatggactggatttggcgcatccttttccttgtcggcgctgctaccggcgcccattccgggccccaggtgcagctggttgaatctggcggaggactggttcagcctggcggatctctgagactgtcttgtgccgccagcggcaacatcaacagcagaaactgcatgggctggttcagacaggcccctggcaagggaagagaaggcgtggcagctatcggccaagtgaccggcagaacctactacgtggacagcgtgaagggcagattcaccatcagcctggacaacagcaagaacaccctgtacctccagatgaacagcctgagagccgaggacaccgccgtgtactattgtgctgctgcccctggctgtctgctgtctgcacttagaagcgccgactacagaaactggggccagggcacactggtcaccgtttcttctggatccggcggcggaggatctggcggaggcggatctgggggcggaggctctttcgaacaggtgcagctggtggaatctggacctggcgtggtgcagcctggcagaagcctgagaatcagctgtgccgtgtccggcttcagcgtgaccaactacggcgtgcactgggtgcgccagccacctggaaaaggactggaatggctgggcgtgatctgggctggcggcatcaccaactacaacagcgccttcatgtcccggctgaccatctccaaggacaacagcaagaacaccgtgtacctccagatgaacagcctgcgggccgaggacaccgccatgtactactgtgcttccagaggcggccactacggctacgccctggattattggggccagggaaccctcgtgaccgtgtcctctacgcgtatccagaaccctgatcctgccgtgtaccagctgcgggatagcaagagcagcgacaagagcgtgtgtctgttcaccgacttcgacagccagaccaacgtgtcccagagcaaggactccgacgtgtacatcaccgataagtgcgtgctggacatgcggagcatggacttcaagagcaactccgccgtggcctggtccaacaagtccgatttcgcctgcgccaacgccttcaacaacagcattatccccgaggacacattcttcccaagccccgagagcagctgcgacgtgaagctggtggaaaagagcttcgagacagacaccaacctgaacttccagaacctgagcgtgatcggcttcagaatcctgctgctgaaagtggccggctttaacctgctgatgaccctgcggctgtggtccagc

SEQ ID NO: 35744 - DNA, 1458 bp, synthetic construct
  source 1..1458: mol_type = other DNA
atggccttaccagtgaccgccttgctcctgccgctggccttgctgctccacgccgccaggccggagaacgtgctgacacagagccctgccatcatgagtgcctctccaggcgagaaagtgaccatgacctgtagagccagcagcagcgtgtccagcagctacctgcactggtatcagcagaagtccggcgcaagccccaaagtgtggatctacagcaccagcaatctggcctctggcgtgccaggcagattttctggctctggcagcggcacaagctacagcctgacaatcagctccgtggaagccgaagatgccgccacctactactgccagcagtacagcggctaccccatcacatttggagccggcaccaaggtggaagtgaagagaggcggaggcggaagtggaggcggaggatctggcggcggaggctctcaggttcagctcaaagaatctggccccgtgctggtggccccaagccagacactgtctatcacctgtaccgtgtccggcttcagcctggcctcctacaacatccactgggtccgacagcctccaggcaaaggactggaatggctgggagtgatttgggctggcggcagcaccaactacaacagcgcactgatgagccggctgagcatcagcaaggacaacagcaagagccaggtgttcctccagatgaactccctccagaccgacgacaccgccatgtactactgcgccaagagaagcgacgactacagttggttcgcctactggggccagggcacactggttactgtgtctgcttctacgcgtaaaattgaagttatgtatcctcctccttacctagacaatgagaagagcaatggaaccattatccatgtgaaagggaaacacctttgtccaagtcccctatttcccggaccttctaagcccttttgggtgctggtggtggttgggggagtcctggcttgctatagcttgctagtaacagtggcctttattattttctgggtgaggagtaagaggagcaggctcctgcacagtgactacatgaacatgactccacgccgccccggacccacccgcaagcattaccagccctatgccccaccacgcgacttcgcagcctatcgctccagagtgaagttcagcaggagcgcagacgcccccgcgtaccagcagggccagaaccagctctataacgagctcaatctaggacgaagagaggagtacgatgttttggacaagagacgtggccgggaccctgagatggggggaaagccgagaaggaagaaccctcaggaaggcctgtacaatgaactgcagaaagataagatggcggaggcctacagtgagattgggatgaaaggcgagcgccggaggggcaaggggcacgatggcctttaccagggtctcagtacagccaccaaggacacctacgacgcccttcacatgcaggccctgccccctcgc

SEQ ID NO: 35745 - DNA, 1476 bp, synthetic construct
  source 1..1476: mol_type = other DNA
atggccttaccagtgaccgccttgctcctgccgctggccttgctgctccacgccgccaggccggagaacgtgctgacacagagccctgccatcatgagtgcctctccaggcgagaaagtgaccatgacctgtagagccagcagcagcgtgtccagcagctacctgcactggtatcagcagaagtccggcgcaagccccaaagtgtggatctacagcaccagcaatctggcctctggcgtgccaggcagattttctggctctggcagcggcacaagctacagcctgacaatcagctccgtggaagccgaagatgccgccacctactactgccagcagtacagcggctaccccatcacatttggagccggcaccaaggtggaagtgaagagaggcggaggcggaagtggaggcggaggatctggcggcggaggctctcaggttcagctcaaagaatctggccccgtgctggtggccccaagccagacactgtctatcacctgtaccgtgtccggcttcagcctggcctcctacaacatccactgggtccgacagcctccaggcaaaggactggaatggctgggagtgatttgggctggcggcagcaccaactacaacagcgcactgatgagccggctgagcatcagcaaggacaacagcaagagccaggtgttcctccagatgaactccctccagaccgacgacaccgccatgtactactgcgccaagagaagcgacgactacagttggttcgcctactggggccagggcacactggttactgtgtctgcttctacgcgtgcgaagcccaccacgacgccagcgccgcgaccaccaacaccggcgcccaccatcgcgtcgcagcccctgtccctgcgcccagaggcgtgccggccagcggcggggggcgcagtgcacacgagggggctggacttcgcctgtgacatctacatctgggcgcccttggccgggacttgtggggtccttctcctgtcactggttatcaccctttactgcaaacggggcagaaagaaactcctgtatatattcaaacaaccatttatgagaccagtacaaactactcaagaggaagatggctgtagctgccgatttccagaagaagaagaaggaggatgtgaactgagagtgaagttcagcaggagcgcagacgcccccgcgtaccagcagggccagaaccagctctataacgagctgaatctaggacgaagagaggagtacgatgttttggacaagagacgtggccgggaccctgagatggggggaaagccgagaaggaagaaccctcaggaaggcctgtacaatgaactgcagaaagataagatggcggaggcctacagtgagattgggatgaaaggcgagcgccggaggggcaaggggcacgatggcctttaccagggtctcagtacagccaccaaggacacctacgacgcccttcacatgcaggccctgccccctcgc

SEQ ID NO: 35746 - DNA, 1476 bp, synthetic construct
  source 1..1476: mol_type = other DNA
atggccttaccagtgaccgccttgctcctgccgctggccttgctgctccacgccgccaggccgcaggttcagctcaaagaatctggccccgtgctggtggccccaagccagacactgtctatcacctgtaccgtgtccggcttcagcctggcctcctacaacatccactgggtccgacagcctccaggcaaaggactggaatggctgggagtgatttgggctggcggcagcaccaactacaacagcgcactgatgagccggctgagcatcagcaaggacaacagcaagagccaggtgttcctccagatgaactccctccagaccgacgacaccgccatgtactactgcgccaagagaagcgacgactacagttggttcgcctactggggccagggcacactggttactgtgtctgcttctggcggaggcggaagtggaggcggaggatctggcggcggaggctctgagaacgtgctgacacagagccctgccatcatgagtgcctctccaggcgagaaagtgaccatgacctgtagagccagcagcagcgtgtccagcagctacctgcactggtatcagcagaagtccggcgcaagccccaaagtgtggatctacagcaccagcaatctggcctctggcgtgccaggcagattttctggctctggcagcggcacaagctacagcctgacaatcagctccgtggaagccgaagatgccgccacctactactgccagcagtacagcggctaccccatcacatttggagccggcaccaaggtggaagtgaagagaacgcgtgcgaagcccaccacgacgccagcgccgcgaccaccaacaccggcgcccaccatcgcgtcgcagcccctgtccctgcgcccagaggcgtgccggccagcggcggggggcgcagtgcacacgagggggctggacttcgcctgtgacatctacatctgggcgcccttggccgggacttgtggggtccttctcctgtcactggttatcaccctttactgcaaacggggcagaaagaaactcctgtatatattcaaacaaccatttatgagaccagtacaaactactcaagaggaagatggctgtagctgccgatttccagaagaagaagaaggaggatgtgaactgagagtgaagttcagcaggagcgcagacgcccccgcgtaccagcagggccagaaccagctctataacgagctgaatctaggacgaagagaggagtacgatgttttggacaagagacgtggccgggaccctgagatggggggaaagccgagaaggaagaaccctcaggaaggcctgtacaatgaactgcagaaagataagatggcggaggcctacagtgagattgggatgaaaggcgagcgccggaggggcaaggggcacgatggcctttaccagggtctcagtacagccaccaaggacacctacgacgcccttcacatgcaggccctgccccctcgc

SEQ ID NO: 35747 - DNA, 1875 bp, synthetic construct
  source 1..1875: mol_type = other DNA
atggccttaccagtgaccgccttgctcctgccgctggccttgctgctccacgccgccaggccggagaacgtgctgacacagagccctgccatcatgagtgcctctccaggcgagaaagtgaccatgacctgtagagccagcagcagcgtgtccagcagctacctgcactggtatcagcagaagtccggcgcaagccccaaagtgtggatctacagcaccagcaatctggcctctggcgtgccaggcagattttctggctctggcagcggcacaagctacagcctgacaatcagctccgtggaagccgaagatgccgccacctactactgccagcagtacagcggctaccccatcacatttggagccggcaccaaggtggaagtgaagagactcgagatccagaaccctgatcctgccgtgtaccagctgcgggatagcaagagcagcgacaagagcgtgtgtctgttcaccgacttcgacagccagaccaacgtgtcccagagcaaggactccgacgtgtacatcaccgataagtgcgtgctggacatgcggagcatggacttcaagagcaactccgccgtggcctggtccaacaagtccgatttcgcctgcgccaacgccttcaacaacagcattatccccgaggacacattcttcccaagcagcgacgtgccctgcgacgtgaagctggtggaaaagagcttcgagacagacaccaacctgaacttccagaacctgagcgtgatcggcttcagaatcctgctgctgaaagtggccggctttaacctgctgatgaccctgcggctgtggtccagccgcgccaagagaagcggatctggcgtgaagcagaccctgaatttcgacctgctgaagctggctggcgacgtggaatccaacccaggccctactagtatggactggatttggcgcatccttttccttgtcggcgctgctaccggcgcgcattccttcgaacaggttcagctcaaagaatctggccccgtgctggtggccccaagccagacactgtctatcacctgtaccgtgtccggcttcagcctggcctcctacaacatccactgggtccgacagcctccaggcaaaggactggaatggctgggagtgatttgggctggcggcagcaccaactacaacagcgcactgatgagccggctgagcatcagcaaggacaacagcaagagccaggtgttcctccagatgaactccctccagaccgacgacaccgccatgtactactgcgccaagagaagcgacgactacagttggttcgcctactggggccagggcacactggttactgtgtctgcttctacgcgtgaggacctgaagaacgtgttcccacctgaggtggccgtgttcgagcctagcaaggccgagatcgcccacacccagaaagccaccctcgtgtgcctggctaccggcttctaccccgaccatgtggaactgtcttggtgggtcaacggcaaagaggtgcacagcggcgtgtgtaccgacccccagccactgaaagaacagcccgccctgaacgacagccggtactgcctgagcagcagactgagagtgtccgccaccttctggcagaacccccggaaccacttcagatgccaggtgcagttctacggcctgagcgagaacgacgagtggacccaggacagagccaagcccgtgacccagatcgtgtctgccgaagcctggggcagagccgattgcggcatcaccagcgccagctaccaccagggcgtgctgagcgccaccatcctgtacgagatcctgctgggcaaggccaccctgtacgccgtgctggtgtctgccctggtgctgatggctatggtcaagcggaaggacagccgggga

SEQ ID NO: 35748 - DNA, 1863 bp, synthetic construct
  source 1..1863: mol_type = other DNA
atggccttaccagtgaccgccttgctcctgccgctggccttgctgctccacgccgccaggccggagaacgtgctgacacagagccctgccatcatgagtgcctctccaggcgagaaagtgaccatgacctgtagagccagcagcagcgtgtccagcagctacctgcactggtatcagcagaagtccggcgcaagccccaaagtgtggatctacagcaccagcaatctggcctctggcgtgccaggcagattttctggctctggcagcggcacaagctacagcctgacaatcagctccgtggaagccgaagatgccgccacctactactgccagcagtacagcggctaccccatcacatttggagccggcaccaaggtggaagtgaagagactcgaggacctgaagaacgtgttcccacctgaggtggccgtgttcgagcctagcaaggccgagatcgcccacacccagaaagccaccctcgtgtgcctggctaccggcttctaccccgaccatgtggaactgtcttggtgggtcaacggcaaagaggtgcacagcggcgtgtgtaccgacccccagccactgaaagaacagcccgccctgaacgacagccggtactgcctgagcagcagactgagagtgtccgccaccttctggcagaacccccggaaccacttcagatgccaggtgcagttctacggcctgagcgagaacgacgagtggacccaggacagagccaagcccgtgacccagatcgtgtctgccgaagcctggggcagagccgattgcggcatcaccagcgccagctaccaccagggcgtgctgagcgccaccatcctgtacgagatcctgctgggcaaggccaccctgtacgccgtgctggtgtctgccctggtgctgatggctatggtcaagcggaaggacagccggggaagggccaagcgatctggatctggagcaacaaacttctcactactcaaacaagcaggtgacgtggaggagaatcccgggcctactagtatggactggatttggcgcatccttttccttgtcggcgctgctaccggcgcgcattccttcgaacaggttcagctcaaagaatctggccccgtgctggtggccccaagccagacactgtctatcacctgtaccgtgtccggcttcagcctggcctcctacaacatccactgggtccgacagcctccaggcaaaggactggaatggctgggagtgatttgggctggcggcagcaccaactacaacagcgcactgatgagccggctgagcatcagcaaggacaacagcaagagccaggtgttcctccagatgaactccctccagaccgacgacaccgccatgtactactgcgccaagagaagcgacgactacagttggttcgcctactggggccagggcacactggttactgtgtctgcttctacgcgtatccagaaccctgatcctgccgtgtaccagctgcgggatagcaagagcagcgacaagagcgtgtgtctgttcaccgacttcgacagccagaccaacgtgtcccagagcaaggactccgacgtgtacatcaccgataagtgcgtgctggacatgcggagcatggacttcaagagcaactccgccgtggcctggtccaacaagtccgatttcgcctgcgccaacgccttcaacaacagcattatccccgaggacacattcttcccaagcagcgacgtgccctgcgacgtgaagctggtggaaaagagcttcgagacagacaccaacctgaacttccagaacctgagcgtgatcggcttcagaatcctgctgctgaaagtggccggctttaacctgctgatgaccctgcggctgtggtccagc

SEQ ID NO: 35749 - DNA, 1863 bp, synthetic construct
  source 1..1863: mol_type = other DNA
atggccttaccagtgaccgccttgctcctgccgctggccttgctgctccacgccgccaggccggagaacgtgctgacacagagccctgccatcatgagtgcctctccaggcgagaaagtgaccatgacctgtagagccagcagcagcgtgtccagcagctacctgcactggtatcagcagaagtccggcgcaagccccaaagtgtggatctacagcaccagcaatctggcctctggcgtgccaggcagattttctggctctggcagcggcacaagctacagcctgacaatcagctccgtggaagccgaagatgccgccacctactactgccagcagtacagcggctaccccatcacatttggagccggcaccaaggtggaagtgaagagactcgaggacctgaagaacgtgttcccacctgaggtggccgtgttcgagcctagcgaggccgagatcagccacacccagaaagccaccctcgtgtgcctggctaccggcttctaccccgaccatgtggaactgtcttggtgggtcaacggcaaagaggtgcacagcggcgtgtgtaccgacccccagccactgaaagaacagcccgccctgaacgacagccggtactgcctgagcagcagactgagagtgtccgccaccttctggcagaacccccggaaccacttcagatgccaggtgcagttctacggcctgagcgagaacgacgagtggacccaggacagagccaagcccgtgacccagatcgtgtctgccgaagcctggggcagagccgattgcggctttaccagcgagagctaccagcagggcgtgctgagcgccaccatcctgtacgagatcctgctgggcaaggccaccctgtacgccgtgctggtgtctgccctggtgctgatggctatggtcaagcggaaggacagccggggaagggccaagcgatctggatctggagcaacaaacttctcactactcaaacaagcaggtgacgtggaggagaatcccgggcctactagtatggactggatttggcgcatccttttccttgtcggcgctgctaccggcgcgcattccttcgaacaggttcagctcaaagaatctggccccgtgctggtggccccaagccagacactgtctatcacctgtaccgtgtccggcttcagcctggcctcctacaacatccactgggtccgacagcctccaggcaaaggactggaatggctgggagtgatttgggctggcggcagcaccaactacaacagcgcactgatgagccggctgagcatcagcaaggacaacagcaagagccaggtgttcctccagatgaactccctccagaccgacgacaccgccatgtactactgcgccaagagaagcgacgactacagttggttcgcctactggggccagggcacactggttactgtgtctgcttctacgcgtatccagaaccctgatcctgccgtgtaccagctgcgggatagcaagagcagcgacaagagcgtgtgtctgttcaccgacttcgacagccagaccaacgtgtcccagagcaaggactccgacgtgtacatcaccgataagtgcgtgctggacatgcggagcatggacttcaagagcaactccgccgtggcctggtccaacaagtccgatttcgcctgcgccaacgccttcaacaacagcattatccccgaggacacattcttcccaagccccgagagcagctgcgacgtgaagctggtggaaaagagcttcgagacagacaccaacctgaacttccagaacctgagcgtgatcggcttcagaatcctgctgctgaaagtggccggctttaacctgctgatgaccctgcggctgtggtccagc

SEQ ID NO: 35750 - DNA, 1875 bp, synthetic construct
  source 1..1875: mol_type = other DNA
atggccttaccagtgaccgccttgctcctgccgctggccttgctgctccacgccgccaggccggagaacgtgctgacacagagccctgccatcatgagtgcctctccaggcgagaaagtgaccatgacctgtagagccagcagcagcgtgtccagcagctacctgcactggtatcagcagaagtccggcgcaagccccaaagtgtggatctacagcaccagcaatctggcctctggcgtgccaggcagattttctggctctggcagcggcacaagctacagcctgacaatcagctccgtggaagccgaagatgccgccacctactactgccagcagtacagcggctaccccatcacatttggagccggcaccaaggtggaagtgaagagactcgagatccagaaccctgatcctgccgtgtaccagctgcgggatagcaagagcagcgacaagagcgtgtgtctgttcaccgacttcgacagccagaccaacgtgtcccagagcaaggactccgacgtgtacatcaccgataagtgcgtgctggacatgcggagcatggacttcaagagcaactccgccgtggcctggtccaacaagtccgatttcgcctgcgccaacgccttcaacaacagcattatccccgaggacacattcttcccaagccccgagagcagctgcgacgtgaagctggtggaaaagagcttcgagacagacaccaacctgaacttccagaacctgagcgtgatcggcttcagaatcctgctgctgaaagtggccggctttaacctgctgatgaccctgcggctgtggtccagccgcgccaagagaagcggatctggcgtgaagcagaccctgaatttcgacctgctgaagctggctggcgacgtggaatccaacccaggccctactagtatggactggatttggcgcatccttttccttgtcggcgctgctaccggcgcgcattccttcgaacaggttcagctcaaagaatctggccccgtgctggtggccccaagccagacactgtctatcacctgtaccgtgtccggcttcagcctggcctcctacaacatccactgggtccgacagcctccaggcaaaggactggaatggctgggagtgatttgggctggcggcagcaccaactacaacagcgcactgatgagccggctgagcatcagcaaggacaacagcaagagccaggtgttcctccagatgaactccctccagaccgacgacaccgccatgtactactgcgccaagagaagcgacgactacagttggttcgcctactggggccagggcacactggttactgtgtctgcttctacgcgtgaggacctgaagaacgtgttcccacctgaggtggccgtgttcgagcctagcgaggccgagatcagccacacccagaaagccaccctcgtgtgcctggctaccggcttctaccccgaccatgtggaactgtcttggtgggtcaacggcaaagaggtgcacagcggcgtgtgtaccgacccccagccactgaaagaacagcccgccctgaacgacagccggtactgcctgagcagcagactgagagtgtccgccaccttctggcagaacccccggaaccacttcagatgccaggtgcagttctacggcctgagcgagaacgacgagtggacccaggacagagccaagcccgtgacccagatcgtgtctgccgaagcctggggcagagccgattgcggctttaccagcgagagctaccagcagggcgtgctgagcgccaccatcctgtacgagatcctgctgggcaaggccaccctgtacgccgtgctggtgtctgccctggtgctgatggctatggtcaagcggaaggacagccgggga

SEQ ID NO: 35751 - DNA, 1911 bp, synthetic construct
  source 1..1911: mol_type = other DNA
atggccttaccagtgaccgccttgctcctgccgctggccttgctgctccacgccgccaggccgctcgaggaggacctgaagaacgtgttcccacctgaggtggccgtgttcgagcctagcaaggccgagatcgcccacacccagaaagccaccctcgtgtgcctggctaccggcttctaccccgaccatgtggaactgtcttggtgggtcaacggcaaagaggtgcacagcggcgtgtgtaccgacccccagccactgaaagaacagcccgccctgaacgacagccggtactgcctgagcagcagactgagagtgtccgccaccttctggcagaacccccggaaccacttcagatgccaggtgcagttctacggcctgagcgagaacgacgagtggacccaggacagagccaagcccgtgacccagatcgtgtctgccgaagcctggggcagagccgattgcggcatcaccagcgccagctaccaccagggcgtgctgagcgccaccatcctgtacgagatcctgctgggcaaggccaccctgtacgccgtgctggtgtctgccctggtgctgatggctatggtcaagcggaaggacagccggggaagggccaagcgatctggatctggagcaacaaacttctcactactcaaacaagcaggtgacgtggaggagaatcccgggcctactagcatggccttaccagtgaccgccttgctcctgccgctggccttgctgctccacgccgccaggccggagaacgtgctgacacagagccctgccatcatgagtgcctctccaggcgagaaagtgaccatgacctgtagagccagcagcagcgtgtccagcagctacctgcactggtatcagcagaagtccggcgcaagccccaaagtgtggatctacagcaccagcaatctggcctctggcgtgccaggcagattttctggctctggcagcggcacaagctacagcctgacaatcagctccgtggaagccgaagatgccgccacctactactgccagcagtacagcggctaccccatcacatttggagccggcaccaaggtggaagtgaagagaggcggaggcggaagtggaggcggaggatctggcggcggaggctctcaggttcagctcaaagaatctggccccgtgctggtggccccaagccagacactgtctatcacctgtaccgtgtccggcttcagcctggcctcctacaacatccactgggtccgacagcctccaggcaaaggactggaatggctgggagtgatttgggctggcggcagcaccaactacaacagcgcactgatgagccggctgagcatcagcaaggacaacagcaagagccaggtgttcctccagatgaactccctccagaccgacgacaccgccatgtactactgcgccaagagaagcgacgactacagttggttcgcctactggggccagggcacactggttactgtgtctgcttctacgcgtatccagaaccctgatcctgccgtgtaccagctgcgggatagcaagagcagcgacaagagcgtgtgtctgttcaccgacttcgacagccagaccaacgtgtcccagagcaaggactccgacgtgtacatcaccgataagtgcgtgctggacatgcggagcatggacttcaagagcaactccgccgtggcctggtccaacaagtccgatttcgcctgcgccaacgccttcaacaacagcattatccccgaggacacattcttcccaagcagcgacgtgccctgcgacgtgaagctggtggaaaagagcttcgagacagacaccaacctgaacttccagaacctgagcgtgatcggcttcagaatcctgctgctgaaagtggccggctttaacctgctgatgaccctgcggctgtggtccagc

SEQ ID NO: 35752 - DNA, 1932 bp, synthetic construct
  source 1..1932: mol_type = other DNA
atggccttaccagtgaccgccttgctcctgccgctggccttgctgctccacgccgccaggccgctcgagggctccggcgatcgccctgatcctgccgtgtaccagctgcgggatagcaagagcagcgacaagagcgtgtgtctgttcaccgacttcgacagccagaccaacgtgtcccagagcaaggactccgacgtgtacatcaccgataagtgcgtgctggacatgcggagcatggacttcaagagcaactccgccgtggcctggtccaacaagtccgatttcgcctgcgccaacgccttcaacaacagcattatccccgaggacacattcttcccaagccccgagagcagctgcgacgtgaagctggtggaaaagagcttcgagacagacaccaacctgaacttccagaacctgagcgtgatcggcttcagaatcctgctgctgaaagtggccggctttaacctgctgatgaccctgcggctgtggtccagctctagtcgcgccaagagaagcggatctggcgtgaagcagaccctgaatttcgacctgctgaagctggctggcgacgtggaatccaacccaggccccactagcatggccttaccagtgaccgccttgctcctgccgctggccttgctgctccacgccgccaggccggagaacgtgctgacacagagccctgccatcatgagtgcctctccaggcgagaaagtgaccatgacctgtagagccagcagcagcgtgtccagcagctacctgcactggtatcagcagaagtccggcgcaagccccaaagtgtggatctacagcaccagcaatctggcctctggcgtgccaggcagattttctggctctggcagcggcacaagctacagcctgacaatcagctccgtggaagccgaagatgccgccacctactactgccagcagtacagcggctaccccatcacatttggagccggcaccaaggtggaagtgaagagaggcggaggcggaagtggaggcggaggatctggcggcggaggctctcaggttcagctcaaagaatctggccccgtgctggtggccccaagccagacactgtctatcacctgtaccgtgtccggcttcagcctggcctcctacaacatccactgggtccgacagcctccaggcaaaggactggaatggctgggagtgatttgggctggcggcagcaccaactacaacagcgcactgatgagccggctgagcatcagcaaggacaacagcaagagccaggtgttcctccagatgaactccctccagaccgacgacaccgccatgtactactgcgccaagagaagcgacgactacagttggttcgcctactggggccagggcacactggttactgtgtctgcttctacgcgtgaggacctgaagaacgtgttcccacctgaggtggccgtgttcgagcctagcgaggccgagatcagccacacccagaaagccaccctcgtgtgcctggctaccggcttctaccccgaccatgtggaactgtcttggtgggtcaacggcaaagaggtgcacagcggcgtgtgtaccgacccccagccactgaaagaacagcccgccctgaacgacagccggtactgcctgagcagcagactgagagtgtccgccaccttctggcagaacccccggaaccacttcagatgccaggtgcagttctacggcctgagcgagaacgacgagtggacccaggacagagccaagcccgtgacccagatcgtgtctgccgaagcctggggcagagccgattgcggctttaccagcgagagctaccagcagggcgtgctgagcgccaccatcctgtacgagatcctgctgggcaaggccaccctgtacgccgtgctggtgtctgccctggtgctgatggctatggtcaagcggaaggacagccgggga

SEQ ID NO: 35753 - DNA, 1863 bp, synthetic construct
  source 1..1863: mol_type = other DNA
atggccttaccagtgaccgccttgctcctgccgctggccttgctgctccacgccgccaggccggagaacgtgctgacacagagccctgccatcatgagtgcctctccaggcgagaaagtgaccatgacctgtagagccagcagcagcgtgtccagcagctacctgcactggtatcagcagaagtccggcgcaagccccaaagtgtggatctacagcaccagcaatctggcctctggcgtgccaggcagattttctggctctggcagcggcacaagctacagcctgacaatcagctccgtggaagccgaagatgccgccacctactactgccagcagtacagcggctaccccatcacatttggagccggcaccaaggtggaagtgaagagactcgaggacctgaagaacgtgttcccacctgaggtggccgtgttcgagcctagcgaggccgagatcagccacacccagaaagccaccctcgtgtgcctggctaccggcttctaccccgaccatgtggaactgtcttggtgggtcaacggcaaagaggtgcacagcggcgtgtctaccgacccccagccactgaaagaacagcccgccctgaacgacagccggtactgcctgagcagcagactgagagtgtccgccaccttctggcagaacccccggaaccacttcagatgccaggtgcagttctacggcctgagcgagaacgacgagtggacccaggacagagccaagcccgtgacccagatcgtgtctgccgaagcctggggcagagccgattgcggctttaccagcgagagctaccagcagggcgtgctgagcgccaccatcctgtacgagatcctgctgggcaaggccaccctgtacgccgtgctggtgtctgccctggtgctgatggctatggtcaagcggaaggacagccggggaagggccaagcgatctggatctggagcaacaaacttctcactactcaaacaagcaggtgacgtggaggagaatcccgggcctactagtatggactggatttggcgcatccttttccttgtcggcgctgctaccggcgcgcattccttcgaacaggttcagctcaaagaatctggccccgtgctggtggccccaagccagacactgtctatcacctgtaccgtgtccggcttcagcctggcctcctacaacatccactgggtccgacagcctccaggcaaaggactggaatggctgggagtgatttgggctggcggcagcaccaactacaacagcgcactgatgagccggctgagcatcagcaaggacaacagcaagagccaggtgttcctccagatgaactccctccagaccgacgacaccgccatgtactactgcgccaagagaagcgacgactacagttggttcgcctactggggccagggcacactggttactgtgtctgcttctacgcgtatccagaaccctgatcctgccgtgtaccagctgcgggatagcaagagcagcgacaagagcgtgtgtctgttcaccgacttcgacagccagaccaacgtgtcccagagcaaggactccgacgtgtacatcaccgataagaccgtgctggacatgcggagcatggacttcaagagcaactccgccgtggcctggtccaacaagtccgatttcgcctgcgccaacgccttcaacaacagcattatccccgaggacacattcttcccaagccccgagagcagctgcgacgtgaagctggtggaaaagagcttcgagacagacaccaacctgaacttccagaacctgagcgtgatcggcttcagaatcctgctgctgaaagtggccggctttaacctgctgatgaccctgcggctgtggtccagc

SEQ ID NO: 35754 - DNA, 1887 bp, synthetic construct
  source 1..1887: mol_type = other DNA
atggccttaccagtgaccgccttgctcctgccgctggccttgctgctccacgccgccaggccggagaacgtgctgacacagagccctgccatcatgagtgcctctccaggcgagaaagtgaccatgacctgtagagccagcagcagcgtgtccagcagctacctgcactggtatcagcagaagtccggcgcaagccccaaagtgtggatctacagcaccagcaatctggcctctggcgtgccaggcagattttctggctctggcagcggcacaagctacagcctgacaatcagctccgtggaagccgaagatgccgccacctactactgccagcagtacagcggctaccccatcacatttggagccggcaccaaggtggaagtgaagagactcgaggacaagcagctggacgccgacgtgtcccccaagcctaccatcttcctgccctctatcgccgagacaaagctccagaaggccggcacctacctgtgcctgctggaaaagttcttcccagatgtgattaagatccactggcaggaaaagaagtccaacaccatcctgggcagccaggaaggcaacaccatgaagaccaacgacacctacatgaagttcagctggctgaccgtgcccgagaagtccctggacaaagaacacagatgcatcgtgcggcacgaaaacaacaagaacggcgtggaccaggaaatcatcttcccacccatcaagaccgatgtgattacaatggaccccaaggacaactgctccaaggacgccaacgataccctgctgctccagctgaccaacaccagcgcctactacatgtacttgttgctgctgctgaagtccgtggtgtacttcgccatcatcacatgctgcctgctgcggagaaccgccttctgctgcaacggcgagaagtctagggccaagcgatctggatctggagcaacaaacttctcactactcaaacaagcaggtgacgtggaggagaatcccgggcctactagtatggactggatttggcgcatccttttccttgtcggcgctgctaccggcgcgcattccttcgaacaggttcagctcaaagaatctggccccgtgctggtggccccaagccagacactgtctatcacctgtaccgtgtccggcttcagcctggcctcctacaacatccactgggtccgacagcctccaggcaaaggactggaatggctgggagtgatttgggctggcggcagcaccaactacaacagcgcactgatgagccggctgagcatcagcaaggacaacagcaagagccaggtgttcctccagatgaactccctccagaccgacgacaccgccatgtactactgcgccaagagaagcgacgactacagttggttcgcctactggggccagggcacactggttactgtgtctgcttctacgcgtagccagcctcacaccaagcccagcgtgttcgtgatgaagaacggcaccaacgtggcctgcctcgtgaaagagttctaccccaaggacatcaggatcaacctggtgtccagcaagaagatcaccgagttcgaccccgccatcgtgatctcccccagcggcaagtacaacgccgtgaagctggggaagtacgaggacagcaacagcgtgacctgctccgtgcagcacgacaacaagaccgtgcacagcaccgactttgaagtgaaaaccgactccaccgaccacgtgaagcccaaagagacagagaacaccaagcagcccagcaagagctgccacaagcccaaggccatcgtgcacaccgagaaagtgaacatgatgagcctgaccgtgctgggcctgcggatgctgttcgccaaaaccgtggccgtgaacttcctgctgaccgccaagctgttcttcctc

SEQ ID NO: 35755 - DNA, 1887 bp, synthetic construct
  source 1..1887: mol_type = other DNA
atggccttaccagtgaccgccttgctcctgccgctggccttgctgctccacgccgccaggccggagaacgtgctgacacagagccctgccatcatgagtgcctctccaggcgagaaagtgaccatgacctgtagagccagcagcagcgtgtccagcagctacctgcactggtatcagcagaagtccggcgcaagccccaaagtgtggatctacagcaccagcaatctggcctctggcgtgccaggcagattttctggctctggcagcggcacaagctacagcctgacaatcagctccgtggaagccgaagatgccgccacctactactgccagcagtacagcggctaccccatcacatttggagccggcaccaaggtggaagtgaagagactcgagagccagcctcacaccaagcccagcgtgttcgtgatgaagaacggcaccaacgtggcctgcctcgtgaaagagttctaccccaaggacatcaggatcaacctggtgtccagcaagaagatcaccgagttcgaccccgccatcgtgatctcccccagcggcaagtacaacgccgtgaagctggggaagtacgaggacagcaacagcgtgacctgctccgtgcagcacgacaacaagaccgtgcacagcaccgactttgaagtgaaaaccgactccaccgaccacgtgaagcccaaagagacagagaacaccaagcagcccagcaagagctgccacaagcccaaggccatcgtgcacaccgagaaagtgaacatgatgagcctgaccgtgctgggcctgcggatgctgttcgccaaaaccgtggccgtgaacttcctgctgaccgccaagctgttcttcctcagggccaagcgatctggatctggagcaacaaacttctcactactcaaacaagcaggtgacgtggaggagaatcccgggcctactagtatggactggatttggcgcatccttttccttgtcggcgctgctaccggcgcgcattccttcgaacaggttcagctcaaagaatctggccccgtgctggtggccccaagccagacactgtctatcacctgtaccgtgtccggcttcagcctggcctcctacaacatccactgggtccgacagcctccaggcaaaggactggaatggctgggagtgatttgggctggcggcagcaccaactacaacagcgcactgatgagccggctgagcatcagcaaggacaacagcaagagccaggtgttcctccagatgaactccctccagaccgacgacaccgccatgtactactgcgccaagagaagcgacgactacagttggttcgcctactggggccagggcacactggttactgtgtctgcttctacgcgtgacaagcagctggacgccgacgtgtcccccaagcctaccatcttcctgccctctatcgccgagacaaagctccagaaggccggcacctacctgtgcctgctggaaaagttcttcccagatgtgattaagatccactggcaggaaaagaagtccaacaccatcctgggcagccaggaaggcaacaccatgaagaccaacgacacctacatgaagttcagctggctgaccgtgcccgagaagtccctggacaaagaacacagatgcatcgtgcggcacgaaaacaacaagaacggcgtggaccaggaaatcatcttcccacccatcaagaccgatgtgattacaatggaccccaaggacaactgctccaaggacgccaacgataccctgctgctccagctgaccaacaccagcgcctactacatgtacttgttgctgctgctgaagtccgtggtgtacttcgccatcatcacatgctgcctgctgcggagaaccgccttctgctgcaacggcgagaagtct

SEQ ID NO: 35756 - DNA, 1932 bp, synthetic construct
  source 1..1932: mol_type = other DNA
atggccttaccagtgaccgccttgctcctgccgctggccttgctgctccacgccgccaggccgctcgaggacaagcagctggacgccgacgtgtcccccaagcctaccatcttcctgccctctatcgccgagacaaagctccagaaggccggcacctacctgtgcctgctggaaaagttcttcccagatgtgattaagatccactggcaggaaaagaagtccaacaccatcctgggcagccaggaaggcaacaccatgaagaccaacgacacctacatgaagttcagctggctgaccgtgcccgagaagtccctggacaaagaacacagatgcatcgtgcggcacgaaaacaacaagaacggcgtggaccaggaaatcatcttcccacccatcaagaccgatgtgattacaatggaccccaaggacaactgctccaaggacgccaacgataccctgctgctccagctgaccaacaccagcgcctactacatgtacttgttgctgctgctgaagtccgtggtgtacttcgccatcatcacatgctgcctgctgcggagaaccgccttctgctgcaacggcgagaagtctagggccaagcgatctggatctggagcaacaaacttctcactactcaaacaagcaggtgacgtggaggagaatcccgggcctactagcatggccttaccagtgaccgccttgctcctgccgctggccttgctgctccacgccgccaggccggagaacgtgctgacacagagccctgccatcatgagtgcctctccaggcgagaaagtgaccatgacctgtagagccagcagcagcgtgtccagcagctacctgcactggtatcagcagaagtccggcgcaagccccaaagtgtggatctacagcaccagcaatctggcctctggcgtgccaggcagattttctggctctggcagcggcacaagctacagcctgacaatcagctccgtggaagccgaagatgccgccacctactactgccagcagtacagcggctaccccatcacatttggagccggcaccaaggtggaagtgaagagaggcggaggcggaagtggaggcggaggatctggcggcggaggctctcaggttcagctcaaagaatctggccccgtgctggtggccccaagccagacactgtctatcacctgtaccgtgtccggcttcagcctggcctcctacaacatccactgggtccgacagcctccaggcaaaggactggaatggctgggagtgatttgggctggcggcagcaccaactacaacagcgcactgatgagccggctgagcatcagcaaggacaacagcaagagccaggtgttcctccagatgaactccctccagaccgacgacaccgccatgtactactgcgccaagagaagcgacgactacagttggttcgcctactggggccagggcacactggttactgtgtctgcttctacgcgtagccagcctcacaccaagcccagcgtgttcgtgatgaagaacggcaccaacgtggcctgcctcgtgaaagagttctaccccaaggacatcaggatcaacctggtgtccagcaagaagatcaccgagttcgaccccgccatcgtgatctcccccagcggcaagtacaacgccgtgaagctggggaagtacgaggacagcaacagcgtgacctgctccgtgcagcacgacaacaagaccgtgcacagcaccgactttgaagtgaaaaccgactccaccgaccacgtgaagcccaaagagacagagaacaccaagcagcccagcaagagctgccacaagcccaaggccatcgtgcacaccgagaaagtgaacatgatgagcctgaccgtgctgggcctgcggatgctgttcgccaaaaccgtggccgtgaacttcctgctgaccgccaagctgttcttcctc

SEQ ID NO: 35757 - DNA, 2394 bp, synthetic construct
  source 1..2394: mol_type = other DNA
atggccttaccagtgaccgccttgctcctgccgctggccttgctgctccacgccgccaggccggagaacgtgctgacacagagccctgccatcatgagtgcctctccaggcgagaaagtgaccatgacctgtagagccagcagcagcgtgtccagcagctacctgcactggtatcagcagaagtccggcgcaagccccaaagtgtggatctacagcaccagcaatctggcctctggcgtgccaggcagattttctggctctggcagcggcacaagctacagcctgacaatcagctccgtggaagccgaagatgccgccacctactactgccagcagtacagcggctaccccatcacatttggagccggcaccaaggtggaagtgaagagaggacagcctaaggccaatcctaccgtgacactgttccctccaagcagcgaagaactccaggccaacaaggccacacttgtgtgcctgatctccgacttctaccctggggctgtgacagtggcttggaaggccgatggatctcctgtgaaagccggcgtggaaaccaccaagccatccaagcagagcaacaacaaatacgccgccagctcctacctgagcctgacacctgagcagtggaagtcccacagatcctacagctgccaagtgacccacgaaggcagcaccgtggaaaagacagtggcccctacagagtgcagcggatcccagagcttcggcctgctggaccccaagctgtgctacctgctggatggcatcctgttcatctacggcgtgatcctgaccgccctgttcctgagagtgaagttcagcagaagcgccgacgcccctgcctaccagcagggacagaaccaactgtacaacgagctgaacctgggcagacgggaagagtacgacgtgctggacaagcggagaggcagggaccctgagatgggcggaaagccccagcggagaaagaacccccaggaaggactgtataacgaactccagaaagacaagatggccgaagcctacagcgagatcggcatgaagggcgagcggagaagaggcaagggccacgatggcctgtaccagggcctgagcaccgccaccaaggacacctatgacgccctgcacatgcaggccctgcctccaagaagggccaagcgatctggatctggagcaacaaacttctcactactcaaacaagcaggtgacgtggaggagaatcccgggcctactagtatggactggatttggcgcatccttttccttgtcggcgctgctaccggcgcgcattccttcgaacaggttcagctcaaagaatctggccccgtgctggtggccccaagccagacactgtctatcacctgtaccgtgtccggcttcagcctggcctcctacaacatccactgggtccgacagcctccaggcaaaggactggaatggctgggagtgatttgggctggcggcagcaccaactacaacagcgcactgatgagccggctgagcatcagcaaggacaacagcaagagccaggtgttcctccagatgaactccctccagaccgacgacaccgccatgtactactgcgccaagagaagcgacgactacagttggttcgcctactggggccagggcacactggttactgtgtctgcttctgcctctacaaagggaccctccgtgtttcctctggctcccagcagcaagtctacaagcggaggaacagccgctctgggctgcctggtcaaggattactttcccgagcctgtgaccgtgtcctggaatagcggagcactgacaagcggcgtgcacacctttccagccgtgctgcaaagcagcggcctgtactctctgagcagcgtggtcacagtgcctagctctagcctgggcacccagacctacatctgcaatgtgaaccacaagcctagcaacaccaaggtggacaagagagtggaacccaagagctgtggtacccagagttttgggttgttggaccctaaattgtgctatctgttggacggaatcctgttcatttacggagtgatcctgaccgcattgttcctgcgggttaagttttccagatccgcagacgcacccgcttaccaacaagggcagaaccaactctacaatgaacttaatttggggcggagggaagagtacgacgttctggacaaaaggaggggacgagatcccgagatgggcggaaagcctcagcgaaggaagaatccgcaagaggggctttataacgaactccagaaagataaaatggcagaagcctatagtgagattgggatgaagggagaaaggaggaggggtaaaggtcacgatgggttgtaccaaggattgagcacagccactaaagatacctatgatgcgctccacatgcaggccctgccgccaaga

SEQ ID NO: 35758 - DNA, 2451 bp, synthetic construct
  source 1..2451: mol_type = other DNA
atggccttaccagtgaccgccttgctcctgccgctggccttgctgctccacgccgccaggccggagaacgtgctgacacagagccctgccatcatgagtgcctctccaggcgagaaagtgaccatgacctgtagagccagcagcagcgtgtccagcagctacctgcactggtatcagcagaagtccggcgcaagccccaaagtgtggatctacagcaccagcaatctggcctctggcgtgccaggcagattttctggctctggcagcggcacaagctacagcctgacaatcagctccgtggaagccgaagatgccgccacctactactgccagcagtacagcggctaccccatcacatttggagccggcaccaaggtggaagtgaagagactcgaggacctgaagaacgtgttcccacctgaggtggccgtgttcgagcctagcgaggccgagatcagccacacccagaaagccaccctcgtgtgcctggctaccggcttctaccccgaccatgtggaactgtcttggtgggtcaacggcaaagaggtgcacagcggcgtgtctaccgacccccagccactgaaagaacagcccgccctgaacgacagccggtactgcctgagcagcagactgagagtgtccgccaccttctggcagaacccccggaaccacttcagatgccaggtgcagttctacggcctgagcgagaacgacgagtggacccaggacagagccaagcccgtgacccagatcgtgtctgccgaagcctggggcagagccgattgcggatcccagagcttcggcctgctggaccccaagctgtgctacctgctggatggcatcctgttcatctacggcgtgatcctgaccgccctgttcctgagagtgaagttcagcagaagcgccgacgcccctgcctaccagcagggacagaaccaactgtacaacgagctgaacctgggcagacgggaagagtacgacgtgctggacaagcggagaggcagggaccctgagatgggcggaaagccccagcggagaaagaacccccaggaaggactgtataacgaactccagaaagacaagatggccgaagcctacagcgagatcggcatgaagggcgagcggagaagaggcaagggccacgatggcctgtaccagggcctgagcaccgccaccaaggacacctatgacgccctgcacatgcaggccctgcctccaagaagggccaagcgatctggatctggagcaacaaacttctcactactcaaacaagcaggtgacgtggaggagaatcccgggcctactagtatggactggatttggcgcatccttttccttgtcggcgctgctaccggcgcgcattccttcgaacaggttcagctcaaagaatctggccccgtgctggtggccccaagccagacactgtctatcacctgtaccgtgtccggcttcagcctggcctcctacaacatccactgggtccgacagcctccaggcaaaggactggaatggctgggagtgatttgggctggcggcagcaccaactacaacagcgcactgatgagccggctgagcatcagcaaggacaacagcaagagccaggtgttcctccagatgaactccctccagaccgacgacaccgccatgtactactgcgccaagagaagcgacgactacagttggttcgcctactggggccagggcacactggttactgtgtctgcttctacgcgtatccagaaccctgatcctgccgtgtaccagctgcgggatagcaagagcagcgacaagagcgtgtgtctgttcaccgacttcgacagccagaccaacgtgtcccagagcaaggactccgacgtgtacatcaccgataagaccgtgctggacatgcggagcatggacttcaagagcaactccgccgtggcctggtccaacaagtccgatttcgcctgcgccaacgccttcaacaacagcattatccccgaggacacattcttcccaagccccgagagcagctgcggtacccagagttttgggttgttggaccctaaattgtgctatctgttggacggaatcctgttcatttacggagtgatcctgaccgcattgttcctgcgggttaagttttccagatccgcagacgcacccgcttaccaacaagggcagaaccaactctacaatgaacttaatttggggcggagggaagagtacgacgttctggacaaaaggaggggacgagatcccgagatgggcggaaagcctcagcgaaggaagaatccgcaagaggggctttataacgaactccagaaagataaaatggcagaagcctatagtgagattgggatgaagggagaaaggaggaggggtaaaggtcacgatgggttgtaccaaggattgagcacagccactaaagatacctatgatgcgctccacatgcaggccctgccgccaaga

SEQ ID NO: 35759 - DNA, 2577 bp, synthetic construct
  source 1..2577: mol_type = other DNA
atggccttaccagtgaccgccttgctcctgccgctggccttgctgctccacgccgccaggccggagaacgtgctgacacagagccctgccatcatgagtgcctctccaggcgagaaagtgaccatgacctgtagagccagcagcagcgtgtccagcagctacctgcactggtatcagcagaagtccggcgcaagccccaaagtgtggatctacagcaccagcaatctggcctctggcgtgccaggcagattttctggctctggcagcggcacaagctacagcctgacaatcagctccgtggaagccgaagatgccgccacctactactgccagcagtacagcggctaccccatcacatttggagccggcaccaaggtggaagtgaagagactcgaggaggacctgaagaacgtgttcccacctgaggtggccgtgttcgagcctagcgaggccgagatcagccacacccagaaagccaccctcgtgtgcctggctaccggcttctaccccgaccatgtggaactgtcttggtgggtcaacggcaaagaggtgcacagcggcgtgtctaccgacccccagccactgaaagaacagcccgccctgaacgacagccggtactgcctgagcagcagactgagagtgtccgccaccttctggcagaacccccggaaccacttcagatgccaggtgcagttctacggcctgagcgagaacgacgagtggacccaggacagagccaagcccgtgacccagatcgtgtctgccgaagcctggggcagagccgattgcggatcccagagcttcggcctgctggaccccaagctgtgctacctgctggatggcatcctgttcatctacggcgtgatcctgaccgccctgttcctgagagtgaagttcagcagaagcgccgacgcccctgcctaccagcagggacagaaccaactgtacaacgagctgaacctgggcagacgggaagagtacgacgtgctggacaagcggagaggcagggaccctgagatgggcggaaagccccagcggagaaagaacccccaggaaggactgtataacgaactccagaaagacaagatggccgaagcctacagcgagatcggcatgaagggcgagcggagaagaggcaagggccacgatggcctgtaccagggcctgagcaccgccaccaaggacacctatgacgccctgcacatgcaggccctgcctccaagaagggccaagcgatctggatctggagcaacaaacttctcactactcaaacaagcaggtgacgtggaggagaatcccgggcctactagtatggactggatttggcgcatccttttccttgtcggcgctgctaccggcgcgcattccttcgaacaggttcagctcaaagaatctggccccgtgctggtggccccaagccagacactgtctatcacctgtaccgtgtccggcttcagcctggcctcctacaacatccactgggtccgacagcctccaggcaaaggactggaatggctgggagtgatttgggctggcggcagcaccaactacaacagcgcactgatgagccggctgagcatcagcaaggacaacagcaagagccaggtgttcctccagatgaactccctccagaccgacgacaccgccatgtactactgcgccaagagaagcgacgactacagttggttcgcctactggggccagggcacactggttactgtgtctgcttctacgcgtatccagaaccctgatcctgccgtgtaccagctgcgggatagcaagagcagcgacaagagcgtgtgtctgttcaccgacttcgacagccagaccaacgtgtcccagagcaaggactccgacgtgtacatcaccgataagaccgtgctggacatgcggagcatggacttcaagagcaactccgccgtggcctggtccaacaagtccgatttcgcctgcgccaacgccttcaacaacagcattatccccgaggacacattcttcccaagccccgagagcagctgcggtacccagagttttgggttgttggaccctaaattgtgctatctgttggacggaatcctgttcatttacggagtgatcctgaccgcattgttcctgaggagcaagcggtcacggctgctccacagcgattacatgaatatgacaccacgaagaccgggtcctactcgcaaacactaccaaccctacgcacctccccgcgactttgcagcgtaccgatctcgggttaagttttccagatccgcagacgcacccgcttaccaacaagggcagaaccaactctacaatgaacttaatttggggcggagggaagagtacgacgttctggacaaaaggaggggacgagatcccgagatgggcggaaagcctcagcgaaggaagaatccgcaagaggggctttataacgaactccagaaagataaaatggcagaagcctatagtgagattgggatgaagggagaaaggaggaggggtaaaggtcacgatgggttgtaccaaggattgagcacagccactaaagatacctatgatgcgctccacatgcaggccctgccgccaaga

SEQ ID NO: 35760 - DNA, 2706 bp, synthetic construct
  source 1..2706: mol_type = other DNA
atggccttaccagtgaccgccttgctcctgccgctggccttgctgctccacgccgccaggccggagaacgtgctgacacagagccctgccatcatgagtgcctctccaggcgagaaagtgaccatgacctgtagagccagcagcagcgtgtccagcagctacctgcactggtatcagcagaagtccggcgcaagccccaaagtgtggatctacagcaccagcaatctggcctctggcgtgccaggcagattttctggctctggcagcggcacaagctacagcctgacaatcagctccgtggaagccgaagatgccgccacctactactgccagcagtacagcggctaccccatcacatttggagccggcaccaaggtggaagtgaagagactcgaggaggacctgaagaacgtgttcccacctgaggtggccgtgttcgagcctagcgaggccgagatcagccacacccagaaagccaccctcgtgtgcctggctaccggcttctaccccgaccatgtggaactgtcttggtgggtcaacggcaaagaggtgcacagcggcgtgtctaccgacccccagccactgaaagaacagcccgccctgaacgacagccggtactgcctgagcagcagactgagagtgtccgccaccttctggcagaacccccggaaccacttcagatgccaggtgcagttctacggcctgagcgagaacgacgagtggacccaggacagagccaagcccgtgacccagatcgtgtctgccgaagcctggggcagagccgattgcggatcccagagcttcggcctgctggaccccaagctgtgctacctgctggatggcatcctgttcatctacggcgtgatcctgaccgccctgttcctgaaacggggcagaaagaaactcctgtatatattcaaacaaccatttatgagaccagtacaaactactcaagaggaagatggctgtagctgccgatttccagaagaagaagaaggaggatgtgaactgagagtgaagttcagcagaagcgccgacgcccctgcctaccagcagggacagaaccaactgtacaacgagctgaacctgggcagacgggaagagtacgacgtgctggacaagcggagaggcagggaccctgagatgggcggaaagccccagcggagaaagaacccccaggaaggactgtataacgaactccagaaagacaagatggccgaagcctacagcgagatcggcatgaagggcgagcggagaagaggcaagggccacgatggcctgtaccagggcctgagcaccgccaccaaggacacctatgacgccctgcacatgcaggccctgcctccaagaagggccaagcgatctggatctggagcaacaaacttctcactactcaaacaagcaggtgacgtggaggagaatcccgggcctactagtatggactggatttggcgcatccttttccttgtcggcgctgctaccggcgcgcattccttcgaacaggttcagctcaaagaatctggccccgtgctggtggccccaagccagacactgtctatcacctgtaccgtgtccggcttcagcctggcctcctacaacatccactgggtccgacagcctccaggcaaaggactggaatggctgggagtgatttgggctggcggcagcaccaactacaacagcgcactgatgagccggctgagcatcagcaaggacaacagcaagagccaggtgttcctccagatgaactccctccagaccgacgacaccgccatgtactactgcgccaagagaagcgacgactacagttggttcgcctactggggccagggcacactggttactgtgtctgcttctacgcgtatccagaaccctgatcctgccgtgtaccagctgcgggatagcaagagcagcgacaagagcgtgtgtctgttcaccgacttcgacagccagaccaacgtgtcccagagcaaggactccgacgtgtacatcaccgataagaccgtgctggacatgcggagcatggacttcaagagcaactccgccgtggcctggtccaacaagtccgatttcgcctgcgccaacgccttcaacaacagcattatccccgaggacacattcttcccaagccccgagagcagctgcggtacccagagttttgggttgttggaccctaaattgtgctatctgttggacggaatcctgttcatttacggagtgatcctgaccgcattgttcctgaagagaggccggaagaagctgctgtacatcttcaagcagcctttcatgcggcccgtgcagaccacccaggaagaggacggctgctcctgccggttccccgaggaagaagaaggcggctgcgagctgcgggttaagttttccagatccgcagacgcacccgcttaccaacaagggcagaaccaactctacaatgaacttaatttggggcggagggaagagtacgacgttctggacaaaaggaggggacgagatcccgagatgggcggaaagcctcagcgaaggaagaatccgcaagaggggctttataacgaactccagaaagataaaatggcagaagcctatagtgagattgggatgaagggagaaaggaggaggggtaaaggtcacgatgggttgtaccaaggattgagcacagccactaaagatacctatgatgcgctccacatgcaggccctgccgccaaga

SEQ ID NO: 35761 - DNA, 1767 bp, synthetic construct
  source 1..1767: mol_type = other DNA
atggccttaccagtgaccgccttgctcctgccgctggccttgctgctccacgccgccaggccggagaacgtgctgacacagagccctgccatcatgagtgcctctccaggcgagaaagtgaccatgacctgtagagccagcagcagcgtgtccagcagctacctgcactggtatcagcagaagtccggcgcaagccccaaagtgtggatctacagcaccagcaatctggcctctggcgtgccaggcagattttctggctctggcagcggcacaagctacagcctgacaatcagctccgtggaagccgaagatgccgccacctactactgccagcagtacagcggctaccccatcacatttggagccggcaccaaggtggaagtgaagagactcgagcagagcttcggcctgctggaccccaagctgtgctacctgctggatggcatcctgttcatctacggcgtgatcctgaccgccctgttcctgagagtgaagttcagcagaagcgccgacgcccctgcctaccagcagggacagaaccaactgtacaacgagctgaacctgggcagacgggaagagtacgacgtgctggacaagcggagaggcagggaccctgagatgggcggaaagccccagcggagaaagaacccccaggaaggactgtataacgaactccagaaagacaagatggccgaagcctacagcgagatcggcatgaagggcgagcggagaagaggcaagggccacgatggcctgtaccagggcctgagcaccgccaccaaggacacctatgacgccctgcacatgcaggccctgcctccaagaagggccaagcgatctggatctggagcaacaaacttctcactactcaaacaagcaggtgacgtggaggagaatcccgggcctactagtatggactggatttggcgcatccttttccttgtcggcgctgctaccggcgcgcattccttcgaacaggttcagctcaaagaatctggccccgtgctggtggccccaagccagacactgtctatcacctgtaccgtgtccggcttcagcctggcctcctacaacatccactgggtccgacagcctccaggcaaaggactggaatggctgggagtgatttgggctggcggcagcaccaactacaacagcgcactgatgagccggctgagcatcagcaaggacaacagcaagagccaggtgttcctccagatgaactccctccagaccgacgacaccgccatgtactactgcgccaagagaagcgacgactacagttggttcgcctactggggccagggcacactggttactgtgtctgcttctacgcgtcagagttttgggttgttggaccctaaattgtgctatctgttggacggaatcctgttcatttacggagtgatcctgaccgcattgttcctgcgggttaagttttccagatccgcagacgcacccgcttaccaacaagggcagaaccaactctacaatgaacttaatttggggcggagggaagagtacgacgttctggacaaaaggaggggacgagatcccgagatgggcggaaagcctcagcgaaggaagaatccgcaagaggggctttataacgaactccagaaagataaaatggcagaagcctatagtgagattgggatgaagggagaaaggaggaggggtaaaggtcacgatgggttgtaccaaggattgagcacagccactaaagatacctatgatgcgctccacatgcaggccctgccgccaaga

SEQ ID NO: 35762 - DNA, 1941 bp, synthetic construct
  source 1..1941: mol_type = other DNA
atggccttaccagtgaccgccttgctcctgccgctggccttgctgctccacgccgccaggccggagaacgtgctgacacagagccctgccatcatgagtgcctctccaggcgagaaagtgaccatgacctgtagagccagcagcagcgtgtccagcagctacctgcactggtatcagcagaagtccggcgcaagccccaaagtgtggatctacagcaccagcaatctggcctctggcgtgccaggcagattttctggctctggcagcggcacaagctacagcctgacaatcagctccgtggaagccgaagatgccgccacctactactgccagcagtacagcggctaccccatcacatttggagccggcaccaaggtggaagtgaagagactcgagggacagcctaaggccaatcctaccgtgacactgttccctccaagcagcgaagaactccaggccaacaaggccacacttgtgtgcctgatctccgacttctaccctggggctgtgacagtggcttggaaggccgatggatctcctgtgaaagccggcgtggaaaccaccaagccatccaagcagagcaacaacaaatacgccgccagctcctacctgagcctgacacctgagcagtggaagtcccacagatcctacagctgccaagtgacccacgaaggcagcaccgtggaaaagacagtggcccctacagagtgcagccccatcaagaccgatgtgattacaatggaccccaaggacaactgctccaaggacgccaacgataccctgctgctccagctgaccaacaccagcgcctactacatgtacttgttgctgctgctgaagtccgtggtgtacttcgccatcatcacatgctgcctgctgcggagaaccgccttctgctgcaacggcgagaagtctagggccaagcgatctggatctggagcaacaaacttctcactactcaaacaagcaggtgacgtggaggagaatcccgggcctactagtatggactggatttggcgcatccttttccttgtcggcgctgctaccggcgcgcattccttcgaacaggttcagctcaaagaatctggccccgtgctggtggccccaagccagacactgtctatcacctgtaccgtgtccggcttcagcctggcctcctacaacatccactgggtccgacagcctccaggcaaaggactggaatggctgggagtgatttgggctggcggcagcaccaactacaacagcgcactgatgagccggctgagcatcagcaaggacaacagcaagagccaggtgttcctccagatgaactccctccagaccgacgacaccgccatgtactactgcgccaagagaagcgacgactacagttggttcgcctactggggccagggcacactggttactgtgtctgcttctacgcgtgcctctacaaagggaccctccgtgtttcctctggctcccagcagcaagtctacaagcggaggaacagccgctctgggctgcctggtcaaggattactttcccgagcctgtgaccgtgtcctggaatagcggagcactgacaagcggcgtgcacacctttccagccgtgctgcaaagcagcggcctgtactctctgagcagcgtggtcacagtgcctagctctagcctgggcacccagacctacatctgcaatgtgaaccacaagcctagcaacaccaaggtggacaagagagtggaacccaagagctgtgaagtgaaaaccgactccaccgaccacgtgaagcccaaagagacagagaacaccaagcagcccagcaagagctgccacaagcccaaggccatcgtgcacaccgagaaagtgaacatgatgagcctgaccgtgctgggcctgcggatgctgttcgccaaaaccgtggccgtgaacttcctgctgaccgccaagctgttcttcctc

SEQ ID NO: 35763 - DNA, 1875 bp, synthetic construct
  source 1..1875: mol_type = other DNA
atggccttaccagtgaccgccttgctcctgccgctggccttgctgctccacgccgccaggccggagaacgtgctgacacagagccctgccatcatgagtgcctctccaggcgagaaagtgaccatgacctgtagagccagcagcagcgtgtccagcagctacctgcactggtatcagcagaagtccggcgcaagccccaaagtgtggatctacagcaccagcaatctggcctctggcgtgccaggcagattttctggctctggcagcggcacaagctacagcctgacaatcagctccgtggaagccgaagatgccgccacctactactgccagcagtacagcggctaccccatcacatttggagccggcaccaaggtggaagtgaagagactcgagggacagcctaaggccaatcctaccgtgacactgttccctccaagcagcgaagaactccaggccaacaaggccacacttgtgtgcctgatctccgacttctaccctggggctgtgacagtggcttggaaggccgatggatctcctgtgaaagccggcgtggaaaccaccaagccatccaagcagagcaacaacaaatacgccgccagctcctacctgagcctgacacctgagcagtggaagtcccacagatcctacagctgccaagtgacccacgaaggcagcaccgtggaaaagacagtggcccctacagagtgcagcggcagagccgattgcggcatcaccagcgccagctaccaccagggcgtgctgagcgccaccatcctgtacgagatcctgctgggcaaggccaccctgtacgccgtgctggtgtctgccctggtgctgatggctatggtcaagcggaaggacagccggggaagggccaagcgatctggatctggagcaacaaacttctcactactcaaacaagcaggtgacgtggaggagaatcccgggcctactagtatggactggatttggcgcatccttttccttgtcggcgctgctaccggcgcgcattccttcgaacaggttcagctcaaagaatctggccccgtgctggtggccccaagccagacactgtctatcacctgtaccgtgtccggcttcagcctggcctcctacaacatccactgggtccgacagcctccaggcaaaggactggaatggctgggagtgatttgggctggcggcagcaccaactacaacagcgcactgatgagccggctgagcatcagcaaggacaacagcaagagccaggtgttcctccagatgaactccctccagaccgacgacaccgccatgtactactgcgccaagagaagcgacgactacagttggttcgcctactggggccagggcacactggttactgtgtctgcttctacgcgtgcctctacaaagggaccctccgtgtttcctctggctcccagcagcaagtctacaagcggaggaacagccgctctgggctgcctggtcaaggattactttcccgagcctgtgaccgtgtcctggaatagcggagcactgacaagcggcgtgcacacctttccagccgtgctgcaaagcagcggcctgtactctctgagcagcgtggtcacagtgcctagctctagcctgggcacccagacctacatctgcaatgtgaaccacaagcctagcaacaccaaggtggacaagagagtggaacccaagagctgtatccccgaggacacattcttcccaagcagcgacgtgccctgcgacgtgaagctggtggaaaagagcttcgagacagacaccaacctgaacttccagaacctgagcgtgatcggcttcagaatcctgctgctgaaagtggccggctttaacctgctgatgaccctgcggctgtggtccagc

SEQ ID NO: 35764 - DNA, 1875 bp, synthetic construct
  source 1..1875: mol_type = other DNA
atggccttaccagtgaccgccttgctcctgccgctggccttgctgctccacgccgccaggccggagaacgtgctgacacagagccctgccatcatgagtgcctctccaggcgagaaagtgaccatgacctgtagagccagcagcagcgtgtccagcagctacctgcactggtatcagcagaagtccggcgcaagccccaaagtgtggatctacagcaccagcaatctggcctctggcgtgccaggcagattttctggctctggcagcggcacaagctacagcctgacaatcagctccgtggaagccgaagatgccgccacctactactgccagcagtacagcggctaccccatcacatttggagccggcaccaaggtggaagtgaagagactcgagggacagcctaaggccaatcctaccgtgacactgttccctccaagcagcgaagaactccaggccaacaaggccacacttgtgtgcctgatctccgacttctaccctggggctgtgacagtggcttggaaggccgatggatctcctgtgaaagccggcgtggaaaccaccaagccatccaagcagagcaacaacaaatacgccgccagctcctacctgagcctgacacctgagcagtggaagtcccacagatcctacagctgccaagtgacccacgaaggcagcaccgtggaaaagacagtggcccctacagagtgcagcggcagagccgattgcggctttaccagcgagagctaccagcagggcgtgctgagcgccaccatcctgtacgagatcctgctgggcaaggccaccctgtacgccgtgctggtgtctgccctggtgctgatggctatggtcaagcggaaggacagccggggaagggccaagcgatctggatctggagcaacaaacttctcactactcaaacaagcaggtgacgtggaggagaatcccgggcctactagtatggactggatttggcgcatccttttccttgtcggcgctgctaccggcgcgcattccttcgaacaggttcagctcaaagaatctggccccgtgctggtggccccaagccagacactgtctatcacctgtaccgtgtccggcttcagcctggcctcctacaacatccactgggtccgacagcctccaggcaaaggactggaatggctgggagtgatttgggctggcggcagcaccaactacaacagcgcactgatgagccggctgagcatcagcaaggacaacagcaagagccaggtgttcctccagatgaactccctccagaccgacgacaccgccatgtactactgcgccaagagaagcgacgactacagttggttcgcctactggggccagggcacactggttactgtgtctgcttctacgcgtgcctctacaaagggaccctccgtgtttcctctggctcccagcagcaagtctacaagcggaggaacagccgctctgggctgcctggtcaaggattactttcccgagcctgtgaccgtgtcctggaatagcggagcactgacaagcggcgtgcacacctttccagccgtgctgcaaagcagcggcctgtactctctgagcagcgtggtcacagtgcctagctctagcctgggcacccagacctacatctgcaatgtgaaccacaagcctagcaacaccaaggtggacaagagagtggaacccaagagctgtatccccgaggacacattcttcccaagccccgagagcagctgcgacgtgaagctggtggaaaagagcttcgagacagacaccaacctgaacttccagaacctgagcgtgatcggcttcagaatcctgctgctgaaagtggccggctttaacctgctgatgaccctgcggctgtggtccagc

SEQ ID NO: 35765 - DNA, 1353 bp, synthetic construct
  source 1..1353: mol_type = other DNA
atggccttaccagtgaccgccttgctcctgccgctggccttgctgctccacgccgccaggccggagaacgtgctgacacagagccctgccatcatgagtgcctctccaggcgagaaagtgaccatgacctgtagagccagcagcagcgtgtccagcagctacctgcactggtatcagcagaagtccggcgcaagccccaaagtgtggatctacagcaccagcaatctggcctctggcgtgccaggcagattttctggctctggcagcggcacaagctacagcctgacaatcagctccgtggaagccgaagatgccgccacctactactgccagcagtacagcggctaccccatcacatttggagccggcaccaaggtggaagtgaagagaggcggaggcggaagtggaggcggaggatctggcggcggaggctctcaggttcagctcaaagaatctggccccgtgctggtggccccaagccagacactgtctatcacctgtaccgtgtccggcttcagcctggcctcctacaacatccactgggtccgacagcctccaggcaaaggactggaatggctgggagtgatttgggctggcggcagcaccaactacaacagcgcactgatgagccggctgagcatcagcaaggacaacagcaagagccaggtgttcctccagatgaactccctccagaccgacgacaccgccatgtactactgcgccaagagaagcgacgactacagttggttcgcctactggggccagggcacactggttactgtgtctgcttctacgcgtgacggtaacgaggagatgggaggaatcactcaaaccccttacaaagtctcaatttcaggaacaactgttatccttacatgtccccagtatcctggcagcgagatcctttggcagcataacgacaagaatatagggggagatgaagacgataagaatatcggatctgacgaggatcacttgagcctgaaagagttctccgagcttgaacaaagcggatattatgtgtgctatccgcgcgggtcaaagccggaagacgctaacttttacctttatctccgagccagagtgtgcgaaaattgcatggaaatggacgttatgtccgttgctacaatagttatcgtagatatatgcatcacgggtggactgcttctgctggtttattattggtccaagaatagaaaggccaaagctaaacccgtgaccagaggcgctggcgcaggcggaaggcaaaggggacaaaacaaagaacggccaccaccagtgccaaatccagattatgagcctattcggaaaggacagagggacctgtactctggcctgaatcagagaagaatc

SEQ ID NO: 35766 - DNA, 1248 bp, synthetic construct
  source 1..1248: mol_type = other DNA
atggccttaccagtgaccgccttgctcctgccgctggccttgctgctccacgccgccaggccggagaacgtgctgacacagagccctgccatcatgagtgcctctccaggcgagaaagtgaccatgacctgtagagccagcagcagcgtgtccagcagctacctgcactggtatcagcagaagtccggcgcaagccccaaagtgtggatctacagcaccagcaatctggcctctggcgtgccaggcagattttctggctctggcagcggcacaagctacagcctgacaatcagctccgtggaagccgaagatgccgccacctactactgccagcagtacagcggctaccccatcacatttggagccggcaccaaggtggaagtgaagagaggcggaggcggaagtggaggcggaggatctggcggcggaggctctcaggttcagctcaaagaatctggccccgtgctggtggccccaagccagacactgtctatcacctgtaccgtgtccggcttcagcctggcctcctacaacatccactgggtccgacagcctccaggcaaaggactggaatggctgggagtgatttgggctggcggcagcaccaactacaacagcgcactgatgagccggctgagcatcagcaaggacaacagcaagagccaggtgttcctccagatgaactccctccagaccgacgacaccgccatgtactactgcgccaagagaagcgacgactacagttggttcgcctactggggccagggcacactggttactgtgtctgcttctacgcgtttcaagatccccatcgaggaactggaagatcgggtgttcgtgaactgcaacacctctatcacctgggtggaaggcaccgtgggaacactgctgagcgacatcaccagactggacctcggcaagcggattctggaccctcggggcatctacagatgcaacggcaccgacatctacaaggacaaagaaagcaccgtgcaggtccactacagaatgtgccagtcctgcgtggaactggaccctgctacagtggccggcatcatcgtgaccgatgtgatcgctactctgctgctggctctgggagtgttctgcttcgccggacacgaaacaggcagactgtctggcgctgccgatacacaggccctgctgagaaacgaccaagtgtatcagcccctgcgcgacagagatgatgcccagtattctcacctcggcggcaactgggctagaaacaag

SEQ ID NO: 35767 - DNA, 1278 bp, synthetic construct
  source 1..1278: mol_type = other DNA
atggccttaccagtgaccgccttgctcctgccgctggccttgctgctccacgccgccaggccggagaacgtgctgacacagagccctgccatcatgagtgcctctccaggcgagaaagtgaccatgacctgtagagccagcagcagcgtgtccagcagctacctgcactggtatcagcagaagtccggcgcaagccccaaagtgtggatctacagcaccagcaatctggcctctggcgtgccaggcagattttctggctctggcagcggcacaagctacagcctgacaatcagctccgtggaagccgaagatgccgccacctactactgccagcagtacagcggctaccccatcacatttggagccggcaccaaggtggaagtgaagagaggcggaggcggaagtggaggcggaggatctggcggcggaggctctcaggttcagctcaaagaatctggccccgtgctggtggccccaagccagacactgtctatcacctgtaccgtgtccggcttcagcctggcctcctacaacatccactgggtccgacagcctccaggcaaaggactggaatggctgggagtgatttgggctggcggcagcaccaactacaacagcgcactgatgagccggctgagcatcagcaaggacaacagcaagagccaggtgttcctccagatgaactccctccagaccgacgacaccgccatgtactactgcgccaagagaagcgacgactacagttggttcgcctactggggccagggcacactggttactgtgtctgcttctacgcgtcagagcatcaagggcaaccacctggtcaaggtgtacgactaccaagaggacggcagcgtgctgctgacatgtgatgccgaggccaagaacatcacctggtttaaggacggcaagatgatcggcttcctgaccgaggacaagaagaagtggaacctgggcagcaacgctaaggaccccagaggcatgtatcagtgcaagggcagccagaacaagagcaagcccctccaggtgtactaccggatgtgccagaactgcatcgagctgaacgccgctaccatcagcggctttctgttcgccgagatcgtgtccatcttcgtgctggccgtgggcgtgtactttatcgctggacaggatggcgtgcggcagagcagagcttccgataagcaaaccctgctgcctaacgaccagctgtaccagcctctgaaggacagagaggacgaccagtacagccacctccagggcaatcagctgagaagaaac

SEQ ID NO: 35768 - DNA, 1227 bp, synthetic construct
  source 1..1227: mol_type = other DNA
atggccttaccagtgaccgccttgctcctgccgctggccttgctgctccacgccgccaggccggagaacgtgctgacacagagccctgccatcatgagtgcctctccaggcgagaaagtgaccatgacctgtagagccagcagcagcgtgtccagcagctacctgcactggtatcagcagaagtccggcgcaagccccaaagtgtggatctacagcaccagcaatctggcctctggcgtgccaggcagattttctggctctggcagcggcacaagctacagcctgacaatcagctccgtggaagccgaagatgccgccacctactactgccagcagtacagcggctaccccatcacatttggagccggcaccaaggtggaagtgaagagaggcggaggcggaagtggaggcggaggatctggcggcggaggctctcaggttcagctcaaagaatctggccccgtgctggtggccccaagccagacactgtctatcacctgtaccgtgtccggcttcagcctggcctcctacaacatccactgggtccgacagcctccaggcaaaggactggaatggctgggagtgatttgggctggcggcagcaccaactacaacagcgcactgatgagccggctgagcatcagcaaggacaacagcaagagccaggtgttcctccagatgaactccctccagaccgacgacaccgccatgtactactgcgccaagagaagcgacgactacagttggttcgcctactggggccagggcacactggttactgtgtctgcttctacgcgtcagagttttgggttgttggaccctaaattgtgctatctgttggacggaatcctgttcatttacggagtgatcctgaccgcattgttcctgcgggttaagttttccagatccgcagacgcacccgcttaccaacaagggcagaaccaactctacaatgaacttaatttggggcggagggaagagtacgacgttctggacaaaaggaggggacgagatcccgagatgggcggaaagcctcagcgaaggaagaatccgcaagaggggctttataacgaactccagaaagataaaatggcagaagcctatagtgagattgggatgaagggagaaaggaggaggggtaaaggtcacgatgggttgtaccaaggattgagcacagccactaaagatacctatgatgcgctccacatgcaggccctgccgccaaga

SEQ ID NO: 35769 - DNA, 1512 bp, synthetic construct
  source 1..1512: mol_type = other DNA
atggccttaccagtgaccgccttgctcctgccgctggccttgctgctccacgccgccaggccggagaacgtgctgacacagagccctgccatcatgagtgcctctccaggcgagaaagtgaccatgacctgtagagccagcagcagcgtgtccagcagctacctgcactggtatcagcagaagtccggcgcaagccccaaagtgtggatctacagcaccagcaatctggcctctggcgtgccaggcagattttctggctctggcagcggcacaagctacagcctgacaatcagctccgtggaagccgaagatgccgccacctactactgccagcagtacagcggctaccccatcacatttggagccggcaccaaggtggaagtgaagagaggcggaggcggaagtggaggcggaggatctggcggcggaggctctcaggttcagctcaaagaatctggccccgtgctggtggccccaagccagacactgtctatcacctgtaccgtgtccggcttcagcctggcctcctacaacatccactgggtccgacagcctccaggcaaaggactggaatggctgggagtgatttgggctggcggcagcaccaactacaacagcgcactgatgagccggctgagcatcagcaaggacaacagcaagagccaggtgttcctccagatgaactccctccagaccgacgacaccgccatgtactactgcgccaagagaagcgacgactacagttggttcgcctactggggccagggcacactggttactgtgtctgcttctacgcgtggaatgaggactgaggatcttcccaaagctgtcgtctttctcgaaccccaatggtatcgggtgctcgaaaaagactctgtgacactgaaatgccaaggggcctactctcccgaggacaactccacacagtggtttcataatgagtccctcatcagctctcaggccagctcttatttcattgatgccgctacagtggacgactccggcgagtatcggtgtcagaccaatctgtctacactgtctgaccccgtgcagcttgaggtccacattggatggttgctcttgcaagccccacgctgggttttcaaagaggaagatccaatccatctgcggtgccacagctggaaaaacaccgctctccacaaagtcacatacctgcaaaatggcaaaggacgcaaatacttccatcacaattccgatttttacattccgaaggctaccctgaaagacagcggcagctatttctgccggggactcgtcggctccaagaatgtgtcctccgaaaccgtgaatatcacgattacccaaggactggctgtgcctacaatctctagcttctttccgcctggataccaagtctccttctgtcttgtgatggtcctcctgtttgctgtggacacaggactgtacttttccgtgaaaacgaacatccgcagctccacacgcgattggaaagatcacaagtttaaatggcgcaaagatccccaggacaag

SEQ ID NO: 35770 - DNA, 1437 bp, synthetic construct
  source 1..1437: mol_type = other DNA
atggccttaccagtgaccgccttgctcctgccgctggccttgctgctccacgccgccaggccggagaacgtgctgacacagagccctgccatcatgagtgcctctccaggcgagaaagtgaccatgacctgtagagccagcagcagcgtgtccagcagctacctgcactggtatcagcagaagtccggcgcaagccccaaagtgtggatctacagcaccagcaatctggcctctggcgtgccaggcagattttctggctctggcagcggcacaagctacagcctgacaatcagctccgtggaagccgaagatgccgccacctactactgccagcagtacagcggctaccccatcacatttggagccggcaccaaggtggaagtgaagagaggcggaggcggaagtggaggcggaggatctggcggcggaggctctcaggttcagctcaaagaatctggccccgtgctggtggccccaagccagacactgtctatcacctgtaccgtgtccggcttcagcctggcctcctacaacatccactgggtccgacagcctccaggcaaaggactggaatggctgggagtgatttgggctggcggcagcaccaactacaacagcgcactgatgagccggctgagcatcagcaaggacaacagcaagagccaggtgttcctccagatgaactccctccagaccgacgacaccgccatgtactactgcgccaagagaagcgacgactacagttggttcgcctactggggccagggcacactggttactgtgtctgcttctacgcgtggaatgaggactgaggatcttcccaaagctgtcgtctttctcgaaccccaatggtatcgggtgctcgaaaaagactctgtgacactgaaatgccaaggggcctactctcccgaggacaactccacacagtggtttcataatgagtccctcatcagctctcaggccagctcttatttcattgatgccgctacagtggacgactccggcgagtatcggtgtcagaccaatctgtctacactgtctgaccccgtgcagcttgaggtccacattggatggttgctcttgcaagccccacgctgggttttcaaagaggaagatccaatccatctgcggtgccacagctggaaaaacaccgctctccacaaagtcacatacctgcaaaatggcaaaggacgcaaatacttccatcacaattccgatttttacattccgaaggctaccctgaaagacagcggcagctatttctgccggggactcgtcggctccaagaatgtgtcctccgaaaccgtgaatatcacgattacccaaggactggctgtgcctacaatctctagcttctttccgcctggataccaagtctccttctgtcttgtgatggtcctcctgtttgctgtggacacaggactgtacttttccgtg

SEQ ID NO: 35771 - DNA, 1440 bp, synthetic construct
  source 1..1440: mol_type = other DNA
atggccttaccagtgaccgccttgctcctgccgctggccttgctgctccacgccgccaggccggagaacgtgctgacacagagccctgccatcatgagtgcctctccaggcgagaaagtgaccatgacctgtagagccagcagcagcgtgtccagcagctacctgcactggtatcagcagaagtccggcgcaagccccaaagtgtggatctacagcaccagcaatctggcctctggcgtgccaggcagattttctggctctggcagcggcacaagctacagcctgacaatcagctccgtggaagccgaagatgccgccacctactactgccagcagtacagcggctaccccatcacatttggagccggcaccaaggtggaagtgaagagaggcggaggcggaagtggaggcggaggatctggcggcggaggctctcaggttcagctcaaagaatctggccccgtgctggtggccccaagccagacactgtctatcacctgtaccgtgtccggcttcagcctggcctcctacaacatccactgggtccgacagcctccaggcaaaggactggaatggctgggagtgatttgggctggcggcagcaccaactacaacagcgcactgatgagccggctgagcatcagcaaggacaacagcaagagccaggtgttcctccagatgaactccctccagaccgacgacaccgccatgtactactgcgccaagagaagcgacgactacagttggttcgcctactggggccagggcacactggttactgtgtctgcttctacgcgtggaatgaggactgaggatcttcccaaagctgtcgtctttctcgaaccccaatggtatcgggtgctcgaaaaagactctgtgacactgaaatgccaaggggcctactctcccgaggacaactccacacagtggtttcataatgagtccctcatcagctctcaggccagctcttatttcattgatgccgctacagtggacgactccggcgagtatcggtgtcagaccaatctgtctacactgtctgaccccgtgcagcttgaggtccacattggatggttgctcttgcaagccccacgctgggttttcaaagaggaagatccaatccatctgcggtgccacagctggaaaaacaccgctctccacaaagtcacatacctgcaaaatggcaaaggacgcaaatacttccatcacaattccgatttttacattccgaaggctaccctgaaagacagcggcagctatttctgccggggactcgtcggctccaagaatgtgtcctccgaaaccgtgaatatcacgattacccaaggactggctgtgcctacaatctctagcttctttccgcctggataccaagtctccttctgtcttgtgatggtcctcctgtttgctgtggacacaggactgtacttttccgtgaaa

SEQ ID NO: 35772 - DNA, 2172 bp, synthetic construct
  source 1..2172: mol_type = other DNA
atggccttaccagtgaccgccttgctcctgccgctggccttgctgctccacgccgccaggccggagaacgtgctgacacagagccctgccatcatgagtgcctctccaggcgagaaagtgaccatgacctgtagagccagcagcagcgtgtccagcagctacctgcactggtatcagcagaagtccggcgcaagccccaaagtgtggatctacagcaccagcaatctggcctctggcgtgccaggcagattttctggctctggcagcggcacaagctacagcctgacaatcagctccgtggaagccgaagatgccgccacctactactgccagcagtacagcggctaccccatcacatttggagccggcaccaaggtggaagtgaagagactcgagggacagcctaaggccaatcctaccgtgacactgttccctccaagcagcgaagaactccaggccaacaaggccacacttgtgtgcctgatctccgacttctaccctggggctgtgacagtggcttggaaggccgatggatctcctgtgaaagccggcgtggaaaccaccaagccatccaagcagagcaacaacaaatacgccgccagctcctacctgagcctgacacctgagcagtggaagtcccacagatcctacagctgccaagtgacccacgaaggcagcaccgtggaaaagacagtggcccctacagagtgcagcggatcccagagcttcggcctgctggaccccaagctgtgctacctgctggatggcatcctgttcatctacggcgtgatcctgaccgccctgttcctgagagtgaagttcagcagaagcgccgacgcccctgcctaccagcagggacagaaccaactgtacaacgagctgaacctgggcagacgggaagagtacgacgtgctggacaagcggagaggcagggaccctgagatgggcggaaagccccagcggagaaagaacccccaggaaggactgtataacgaactccagaaagacaagatggccgaagcctacagcgagatcggcatgaagggcgagcggagaagaggcaagggccacgatggcctgtaccagggcctgagcaccgccaccaaggacacctatgacgccctgcacatgcaggccctgcctccaagaagggccaagcgatctggatctggagcaacaaacttctcactactcaaacaagcaggtgacgtggaggagaatcccgggcctactagtatggactggatttggcgcatccttttccttgtcggcgctgctaccggcgcgcattccttcgaacaggttcagctcaaagaatctggccccgtgctggtggccccaagccagacactgtctatcacctgtaccgtgtccggcttcagcctggcctcctacaacatccactgggtccgacagcctccaggcaaaggactggaatggctgggagtgatttgggctggcggcagcaccaactacaacagcgcactgatgagccggctgagcatcagcaaggacaacagcaagagccaggtgttcctccagatgaactccctccagaccgacgacaccgccatgtactactgcgccaagagaagcgacgactacagttggttcgcctactggggccagggcacactggttactgtgtctgcttctacgcgtgcctctacaaagggaccctccgtgtttcctctggctcccagcagcaagtctacaagcggaggaacagccgctctgggctgcctggtcaaggattactttcccgagcctgtgaccgtgtcctggaatagcggagcactgacaagcggcgtgcacacctttccagccgtgctgcaaagcagcggcctgtactctctgagcagcgtggtcacagtgcctagctctagcctgggcacccagacctacatctgcaatgtgaaccacaagcctagcaacaccaaggtggacaagagagtggaacccaagagctgtggtaccatcactcaaggtttggcagtgtcaaccatctcatcattctttccacctggctaccaagtgtccttctgcctggtcatggtgctgctgttcgccgtggataccggcctgtacttcagcgtcaagaccaacatccggtccagcaccagagactggaaggaccacaagttcaagtggcggaaggaccctcaggacaag

SEQ ID NO: 35773 - DNA, 2217 bp, synthetic construct
  source 1..2217: mol_type = other DNA
atggccttaccagtgaccgccttgctcctgccgctggccttgctgctccacgccgccaggccggagaacgtgctgacacagagccctgccatcatgagtgcctctccaggcgagaaagtgaccatgacctgtagagccagcagcagcgtgtccagcagctacctgcactggtatcagcagaagtccggcgcaagccccaaagtgtggatctacagcaccagcaatctggcctctggcgtgccaggcagattttctggctctggcagcggcacaagctacagcctgacaatcagctccgtggaagccgaagatgccgccacctactactgccagcagtacagcggctaccccatcacatttggagccggcaccaaggtggaagtgaagagactcgaggacctgaagaacgtgttcccacctgaggtggccgtgttcgagcctagcgaggccgagatcagccacacccagaaagccaccctcgtgtgcctggctaccggcttctaccccgaccatgtggaactgtcttggtgggtcaacggcaaagaggtgcacagcggcgtgtctaccgacccccagccactgaaagaacagcccgccctgaacgacagccggtactgcctgagcagcagactgagagtgtccgccaccttctggcagaacccccggaaccacttcagatgccaggtgcagttctacggcctgagcgagaacgacgagtggacccaggacagagccaagcccgtgacccagatcgtgtctgccgaagcctggggcagagccgattgcggatcccagagcttcggcctgctggaccccaagctgtgctacctgctggatggcatcctgttcatctacggcgtgatcctgaccgccctgttcctgagagtgaagttcagcagaagcgccgacgcccctgcctaccagcagggacagaaccaactgtacaacgagctgaacctgggcagacgggaagagtacgacgtgctggacaagcggagaggcagggaccctgagatgggcggaaagccccagcggagaaagaacccccaggaaggactgtataacgaactccagaaagacaagatggccgaagcctacagcgagatcggcatgaagggcgagcggagaagaggcaagggccacgatggcctgtaccagggcctgagcaccgccaccaaggacacctatgacgccctgcacatgcaggccctgcctccaagaagggccaagcgatctggatctggagcaacaaacttctcactactcaaacaagcaggtgacgtggaggagaatcccgggcctactagtatggactggatttggcgcatccttttccttgtcggcgctgctaccggcgcgcattccttcgaacaggttcagctcaaagaatctggccccgtgctggtggccccaagccagacactgtctatcacctgtaccgtgtccggcttcagcctggcctcctacaacatccactgggtccgacagcctccaggcaaaggactggaatggctgggagtgatttgggctggcggcagcaccaactacaacagcgcactgatgagccggctgagcatcagcaaggacaacagcaagagccaggtgttcctccagatgaactccctccagaccgacgacaccgccatgtactactgcgccaagagaagcgacgactacagttggttcgcctactggggccagggcacactggttactgtgtctgcttctacgcgtatccagaaccctgatcctgccgtgtaccagctgcgggatagcaagagcagcgacaagagcgtgtgtctgttcaccgacttcgacagccagaccaacgtgtcccagagcaaggactccgacgtgtacatcaccgataagaccgtgctggacatgcggagcatggacttcaagagcaactccgccgtggcctggtccaacaagtccgatttcgcctgcgccaacgccttcaacaacagcattatccccgaggacacattcttcccaagccccgagagcagctgcggtaccatcactcaaggtttggcagtgtcaaccatctcatcattctttccacctggctaccaagtgtccttctgcctggtcatggtgctgctgttcgccgtggataccggcctgtacttcagcgtcaagaccaacatccggtccagcaccagagactggaaggaccacaagttcaagtggcggaaggaccctcaggacaag

SEQ ID NO: 35774 - DNA, 2142 bp, synthetic construct
  source 1..2142: mol_type = other DNA
atggccttaccagtgaccgccttgctcctgccgctggccttgctgctccacgccgccaggccggagaacgtgctgacacagagccctgccatcatgagtgcctctccaggcgagaaagtgaccatgacctgtagagccagcagcagcgtgtccagcagctacctgcactggtatcagcagaagtccggcgcaagccccaaagtgtggatctacagcaccagcaatctggcctctggcgtgccaggcagattttctggctctggcagcggcacaagctacagcctgacaatcagctccgtggaagccgaagatgccgccacctactactgccagcagtacagcggctaccccatcacatttggagccggcaccaaggtggaagtgaagagactcgaggacctgaagaacgtgttcccacctgaggtggccgtgttcgagcctagcgaggccgagatcagccacacccagaaagccaccctcgtgtgcctggctaccggcttctaccccgaccatgtggaactgtcttggtgggtcaacggcaaagaggtgcacagcggcgtgtctaccgacccccagccactgaaagaacagcccgccctgaacgacagccggtactgcctgagcagcagactgagagtgtccgccaccttctggcagaacccccggaaccacttcagatgccaggtgcagttctacggcctgagcgagaacgacgagtggacccaggacagagccaagcccgtgacccagatcgtgtctgccgaagcctggggcagagccgattgcggatcccagagcttcggcctgctggaccccaagctgtgctacctgctggatggcatcctgttcatctacggcgtgatcctgaccgccctgttcctgagagtgaagttcagcagaagcgccgacgcccctgcctaccagcagggacagaaccaactgtacaacgagctgaacctgggcagacgggaagagtacgacgtgctggacaagcggagaggcagggaccctgagatgggcggaaagccccagcggagaaagaacccccaggaaggactgtataacgaactccagaaagacaagatggccgaagcctacagcgagatcggcatgaagggcgagcggagaagaggcaagggccacgatggcctgtaccagggcctgagcaccgccaccaaggacacctatgacgccctgcacatgcaggccctgcctccaagaagggccaagcgatctggatctggagcaacaaacttctcactactcaaacaagcaggtgacgtggaggagaatcccgggcctactagtatggactggatttggcgcatccttttccttgtcggcgctgctaccggcgcgcattccttcgaacaggttcagctcaaagaatctggccccgtgctggtggccccaagccagacactgtctatcacctgtaccgtgtccggcttcagcctggcctcctacaacatccactgggtccgacagcctccaggcaaaggactggaatggctgggagtgatttgggctggcggcagcaccaactacaacagcgcactgatgagccggctgagcatcagcaaggacaacagcaagagccaggtgttcctccagatgaactccctccagaccgacgacaccgccatgtactactgcgccaagagaagcgacgactacagttggttcgcctactggggccagggcacactggttactgtgtctgcttctacgcgtatccagaaccctgatcctgccgtgtaccagctgcgggatagcaagagcagcgacaagagcgtgtgtctgttcaccgacttcgacagccagaccaacgtgtcccagagcaaggactccgacgtgtacatcaccgataagaccgtgctggacatgcggagcatggacttcaagagcaactccgccgtggcctggtccaacaagtccgatttcgcctgcgccaacgccttcaacaacagcattatccccgaggacacattcttcccaagccccgagagcagctgcggtaccatcactcaaggtttggcagtgtcaaccatctcatcattctttccacctggctaccaagtgtccttctgcctggtcatggtgctgctgttcgccgtggataccggcctgtacttcagcgtc

SEQ ID NO: 35775 - DNA, 2145 bp, synthetic construct
  source 1..2145: mol_type = other DNA
atggccttaccagtgaccgccttgctcctgccgctggccttgctgctccacgccgccaggccggagaacgtgctgacacagagccctgccatcatgagtgcctctccaggcgagaaagtgaccatgacctgtagagccagcagcagcgtgtccagcagctacctgcactggtatcagcagaagtccggcgcaagccccaaagtgtggatctacagcaccagcaatctggcctctggcgtgccaggcagattttctggctctggcagcggcacaagctacagcctgacaatcagctccgtggaagccgaagatgccgccacctactactgccagcagtacagcggctaccccatcacatttggagccggcaccaaggtggaagtgaagagactcgaggacctgaagaacgtgttcccacctgaggtggccgtgttcgagcctagcgaggccgagatcagccacacccagaaagccaccctcgtgtgcctggctaccggcttctaccccgaccatgtggaactgtcttggtgggtcaacggcaaagaggtgcacagcggcgtgtctaccgacccccagccactgaaagaacagcccgccctgaacgacagccggtactgcctgagcagcagactgagagtgtccgccaccttctggcagaacccccggaaccacttcagatgccaggtgcagttctacggcctgagcgagaacgacgagtggacccaggacagagccaagcccgtgacccagatcgtgtctgccgaagcctggggcagagccgattgcggatcccagagcttcggcctgctggaccccaagctgtgctacctgctggatggcatcctgttcatctacggcgtgatcctgaccgccctgttcctgagagtgaagttcagcagaagcgccgacgcccctgcctaccagcagggacagaaccaactgtacaacgagctgaacctgggcagacgggaagagtacgacgtgctggacaagcggagaggcagggaccctgagatgggcggaaagccccagcggagaaagaacccccaggaaggactgtataacgaactccagaaagacaagatggccgaagcctacagcgagatcggcatgaagggcgagcggagaagaggcaagggccacgatggcctgtaccagggcctgagcaccgccaccaaggacacctatgacgccctgcacatgcaggccctgcctccaagaagggccaagcgatctggatctggagcaacaaacttctcactactcaaacaagcaggtgacgtggaggagaatcccgggcctactagtatggactggatttggcgcatccttttccttgtcggcgctgctaccggcgcgcattccttcgaacaggttcagctcaaagaatctggccccgtgctggtggccccaagccagacactgtctatcacctgtaccgtgtccggcttcagcctggcctcctacaacatccactgggtccgacagcctccaggcaaaggactggaatggctgggagtgatttgggctggcggcagcaccaactacaacagcgcactgatgagccggctgagcatcagcaaggacaacagcaagagccaggtgttcctccagatgaactccctccagaccgacgacaccgccatgtactactgcgccaagagaagcgacgactacagttggttcgcctactggggccagggcacactggttactgtgtctgcttctacgcgtatccagaaccctgatcctgccgtgtaccagctgcgggatagcaagagcagcgacaagagcgtgtgtctgttcaccgacttcgacagccagaccaacgtgtcccagagcaaggactccgacgtgtacatcaccgataagaccgtgctggacatgcggagcatggacttcaagagcaactccgccgtggcctggtccaacaagtccgatttcgcctgcgccaacgccttcaacaacagcattatccccgaggacacattcttcccaagccccgagagcagctgcggtaccatcactcaaggtttggcagtgtcaaccatctcatcattctttccacctggctaccaagtgtccttctgcctggtcatggtgctgctgttcgccgtggataccggcctgtacttcagcgtcaag

SEQ ID NO: 35776 - DNA, 2148 bp, synthetic construct
  source 1..2148: mol_type = other DNA
atggccttaccagtgaccgccttgctcctgccgctggccttgctgctccacgccgccaggccggagaacgtgctgacacagagccctgccatcatgagtgcctctccaggcgagaaagtgaccatgacctgtagagccagcagcagcgtgtccagcagctacctgcactggtatcagcagaagtccggcgcaagccccaaagtgtggatctacagcaccagcaatctggcctctggcgtgccaggcagattttctggctctggcagcggcacaagctacagcctgacaatcagctccgtggaagccgaagatgccgccacctactactgccagcagtacagcggctaccccatcacatttggagccggcaccaaggtggaagtgaagagactcgaggacctgaagaacgtgttcccacctgaggtggccgtgttcgagcctagcgaggccgagatcagccacacccagaaagccaccctcgtgtgcctggctaccggcttctaccccgaccatgtggaactgtcttggtgggtcaacggcaaagaggtgcacagcggcgtgtctaccgacccccagccactgaaagaacagcccgccctgaacgacagccggtactgcctgagcagcagactgagagtgtccgccaccttctggcagaacccccggaaccacttcagatgccaggtgcagttctacggcctgagcgagaacgacgagtggacccaggacagagccaagcccgtgacccagatcgtgtctgccgaagcctggggcagagccgattgcggatcccagagcttcggcctgctggaccccaagctgtgctacctgctggatggcatcctgttcatctacggcgtgatcctgaccgccctgttcctgagagtgaagttcagcagaagcgccgacgcccctgcctaccagcagggacagaaccaactgtacaacgagctgaacctgggcagacgggaagagtacgacgtgctggacaagcggagaggcagggaccctgagatgggcggaaagccccagcggagaaagaacccccaggaaggactgtataacgaactccagaaagacaagatggccgaagcctacagcgagatcggcatgaagggcgagcggagaagaggcaagggccacgatggcctgtaccagggcctgagcaccgccaccaaggacacctatgacgccctgcacatgcaggccctgcctccaagaagggccaagcgatctggatctggagcaacaaacttctcactactcaaacaagcaggtgacgtggaggagaatcccgggcctactagtatggactggatttggcgcatccttttccttgtcggcgctgctaccggcgcgcattccttcgaacaggttcagctcaaagaatctggccccgtgctggtggccccaagccagacactgtctatcacctgtaccgtgtccggcttcagcctggcctcctacaacatccactgggtccgacagcctccaggcaaaggactggaatggctgggagtgatttgggctggcggcagcaccaactacaacagcgcactgatgagccggctgagcatcagcaaggacaacagcaagagccaggtgttcctccagatgaactccctccagaccgacgacaccgccatgtactactgcgccaagagaagcgacgactacagttggttcgcctactggggccagggcacactggttactgtgtctgcttctacgcgtatccagaaccctgatcctgccgtgtaccagctgcgggatagcaagagcagcgacaagagcgtgtgtctgttcaccgacttcgacagccagaccaacgtgtcccagagcaaggactccgacgtgtacatcaccgataagaccgtgctggacatgcggagcatggacttcaagagcaactccgccgtggcctggtccaacaagtccgatttcgcctgcgccaacgccttcaacaacagcattatccccgaggacacattcttcccaagccccgagagcagctgcggtaccatcactcaaggtttggcagtgtcaaccatctcatcattctttccacctggctaccaagtgtccttctgcctggtcatggtgctgctgttcgccgtggataccggcctgtacttcagcgtcaagacc

SEQ ID NO: 35777 - DNA, 1959 bp, synthetic construct
  source 1..1959: mol_type = other DNA
atggccttaccagtgaccgccttgctcctgccgctggccttgctgctccacgccgccaggccggagaacgtgctgacacagagccctgccatcatgagtgcctctccaggcgagaaagtgaccatgacctgtagagccagcagcagcgtgtccagcagctacctgcactggtatcagcagaagtccggcgcaagccccaaagtgtggatctacagcaccagcaatctggcctctggcgtgccaggcagattttctggctctggcagcggcacaagctacagcctgacaatcagctccgtggaagccgaagatgccgccacctactactgccagcagtacagcggctaccccatcacatttggagccggcaccaaggtggaagtgaagagactcgagggacagcctaaggccaatcctaccgtgacactgttccctccaagcagcgaagaactccaggccaacaaggccacacttgtgtgcctgatctccgacttctaccctggggctgtgacagtggcttggaaggccgatggatctcctgtgaaagccggcgtggaaaccaccaagccatccaagcagagcaacaacaaatacgccgccagctcctacctgagcctgacacctgagcagtggaagtcccacagatcctacagctgccaagtgacccacgaaggcagcaccgtggaaaagacagtggcccctacagagtgcagcggatccctgggagagcctcagctgtgctatatcctggacgccatcctgtttctgtacggcatcgtgctgaccctgctgtactgccggctgaagatccaagtgcggaaggccgccatcaccagctacgagaaatccgacggcgtgtacaccggcctgagcaccagaaatcaagagacatacgagacactgaagcacgaaaagcctccacaaagggccaagcgatctggatctggagcaacaaacttctcactactcaaacaagcaggtgacgtggaggagaatcccgggcctactagtatggactggatttggcgcatccttttccttgtcggcgctgctaccggcgcgcattccttcgaacaggttcagctcaaagaatctggccccgtgctggtggccccaagccagacactgtctatcacctgtaccgtgtccggcttcagcctggcctcctacaacatccactgggtccgacagcctccaggcaaaggactggaatggctgggagtgatttgggctggcggcagcaccaactacaacagcgcactgatgagccggctgagcatcagcaaggacaacagcaagagccaggtgttcctccagatgaactccctccagaccgacgacaccgccatgtactactgcgccaagagaagcgacgactacagttggttcgcctactggggccagggcacactggttactgtgtctgcttctacgcgtgcctctacaaagggaccctccgtgtttcctctggctcccagcagcaagtctacaagcggaggaacagccgctctgggctgcctggtcaaggattactttcccgagcctgtgaccgtgtcctggaatagcggagcactgacaagcggcgtgcacacctttccagccgtgctgcaaagcagcggcctgtactctctgagcagcgtggtcacagtgcctagctctagcctgggcacccagacctacatctgcaatgtgaaccacaagcctagcaacaccaaggtggacaagagagtggaacccaagagctgtggtaccctcggagaaccacagctctgttacattctggatgctatcctgttcctctatgggatcgtcctgacactcctgtattgcagactcaaaattcaagttcgcaaagccgccattacctcttacgagaagagtgatggggtgtacacaggactgtctacccggaatcaagaaacctacgaaaccctcaaacatgagaagccacctcagtaa

SEQ ID NO: 35778 - DNA, 1866 bp, synthetic construct
  source 1..1866: mol_type = other DNA
atggccttaccagtgaccgccttgctcctgccgctggccttgctgctccacgccgccaggccggagaacgtgctgacacagagccctgccatcatgagtgcctctccaggcgagaaagtgaccatgacctgtagagccagcagcagcgtgtccagcagctacctgcactggtatcagcagaagtccggcgcaagccccaaagtgtggatctacagcaccagcaatctggcctctggcgtgccaggcagattttctggctctggcagcggcacaagctacagcctgacaatcagctccgtggaagccgaagatgccgccacctactactgccagcagtacagcggctaccccatcacatttggagccggcaccaaggtggaagtgaagagactcgaggacctgaagaacgtgttcccacctgaggtggccgtgttcgagcctagcgaggccgagatcagccacacccagaaagccaccctcgtgtgcctggctaccggcttctaccccgaccatgtggaactgtcttggtgggtcaacggcaaagaggtgcacagcggcgtgtgtaccgacccccagccactgaaagaacagcccgccctgaacgacagccggtactgcctgagcagcagactgagagtgtccgccaccttctggcagaacccccggaaccacttcagatgccaggtgcagttctacggcctgagcgagaacgacgagtggacccaggacagagccaagcccgtgacccagatcgtgtctgccgaagcctggggcagagccgattgcggctttaccagcgagagctaccagcagggcgtgctgagcgcctactacatgtacttgttgctgctgctgaagtccgtggtgtacttcgccatcatcacatgctgcctgctgcggagaaccgccttctgctgcaacggcgagaagtctagggccaagcgatctggatctggagcaacaaacttctcactactcaaacaagcaggtgacgtggaggagaatcccgggcctactagtatggactggatttggcgcatccttttccttgtcggcgctgctaccggcgcgcattccttcgaacaggttcagctcaaagaatctggccccgtgctggtggccccaagccagacactgtctatcacctgtaccgtgtccggcttcagcctggcctcctacaacatccactgggtccgacagcctccaggcaaaggactggaatggctgggagtgatttgggctggcggcagcaccaactacaacagcgcactgatgagccggctgagcatcagcaaggacaacagcaagagccaggtgttcctccagatgaactccctccagaccgacgacaccgccatgtactactgcgccaagagaagcgacgactacagttggttcgcctactggggccagggcacactggttactgtgtctgcttctacgcgtatccagaaccctgatcctgccgtgtaccagctgcgggatagcaagagcagcgacaagagcgtgtgtctgttcaccgacttcgacagccagaccaacgtgtcccagagcaaggactccgacgtgtacatcaccgataagtgcgtgctggacatgcggagcatggacttcaagagcaactccgccgtggcctggtccaacaagtccgatttcgcctgcgccaacgccttcaacaacagcattatccccgaggacacattcttcccaagccccgagagcagctgcgacgtgaagctggtggaaaagagcttcgagacagacaccaacctgaacttccagaacctgagcgtgatcggcttcagaatcctgctgctgaaagtggccggctttaacctgctgatgaccctgcggctgtggtccagc

SEQ ID NO: 35779 - DNA, 1887 bp, synthetic construct
  source 1..1887: mol_type = other DNA
atggccttaccagtgaccgccttgctcctgccgctggccttgctgctccacgccgccaggccggagaacgtgctgacacagagccctgccatcatgagtgcctctccaggcgagaaagtgaccatgacctgtagagccagcagcagcgtgtccagcagctacctgcactggtatcagcagaagtccggcgcaagccccaaagtgtggatctacagcaccagcaatctggcctctggcgtgccaggcagattttctggctctggcagcggcacaagctacagcctgacaatcagctccgtggaagccgaagatgccgccacctactactgccagcagtacagcggctaccccatcacatttggagccggcaccaaggtggaagtgaagagactcgaggacaagcagctggacgccgacgtgtcccccaagcctaccatcttcctgccctctatcgccgagacaaagctccagaaggccggcacctacctgtgcctgctggaaaagttcttcccagatgtgattaagatccactggcaggaaaagaagtccaacaccatcctgggcagccaggaaggcaacaccatgaagaccaacgacacctacatgaagttcagctggctgaccgtgcccgagaagtccctggacaaagaacacagatgcatcgtgcggcacgaaaacaacaagaacggcgtggaccaggaaatcatcttcccacccatcaagaccgatgtgattacaatggaccccaaggacaactgctccaaggacgccaacgataccctgctgctccagctgaccaacaccagcgcctactacatgtacgagatcctgctgggcaaggccaccctgtacgccgtgctggtgtctgccctggtgctgatggctatggtcaagcggaaggacagccggggaagggccaagcgatctggatctggagcaacaaacttctcactactcaaacaagcaggtgacgtggaggagaatcccgggcctactagtatggactggatttggcgcatccttttccttgtcggcgctgctaccggcgcgcattccttcgaacaggttcagctcaaagaatctggccccgtgctggtggccccaagccagacactgtctatcacctgtaccgtgtccggcttcagcctggcctcctacaacatccactgggtccgacagcctccaggcaaaggactggaatggctgggagtgatttgggctggcggcagcaccaactacaacagcgcactgatgagccggctgagcatcagcaaggacaacagcaagagccaggtgttcctccagatgaactccctccagaccgacgacaccgccatgtactactgcgccaagagaagcgacgactacagttggttcgcctactggggccagggcacactggttactgtgtctgcttctacgcgtagccagcctcacaccaagcccagcgtgttcgtgatgaagaacggcaccaacgtggcctgcctcgtgaaagagttctaccccaaggacatcaggatcaacctggtgtccagcaagaagatcaccgagttcgaccccgccatcgtgatctcccccagcggcaagtacaacgccgtgaagctggggaagtatgaggacagcaacagcgtgacctgctccgtgcagcacgacaacaagaccgtgcacagcaccgactttgaagtgaaaaccgactccaccgaccacgtgaagcccaaagagacagagaacaccaagcagcccagcaagagctgccacaagcccaaggccatcgtgcacaccgagaaagtgaacatgatgagcctgaccgtgatcggcttcagaatcctgctgctgaaagtggccggctttaacctgctgatgaccctgcggctgtggtccagctaa

SEQ ID NO: 35780 - DNA, 1887 bp, synthetic construct
  source 1..1887: mol_type = other DNA
atggccttaccagtgaccgccttgctcctgccgctggccttgctgctccacgccgccaggccggagaacgtgctgacacagagccctgccatcatgagtgcctctccaggcgagaaagtgaccatgacctgtagagccagcagcagcgtgtccagcagctacctgcactggtatcagcagaagtccggcgcaagccccaaagtgtggatctacagcaccagcaatctggcctctggcgtgccaggcagattttctggctctggcagcggcacaagctacagcctgacaatcagctccgtggaagccgaagatgccgccacctactactgccagcagtacagcggctaccccatcacatttggagccggcaccaaggtggaagtgaagagactcgaggacaagcagctggacgccgacgtgtcccccaagcctaccatcttcctgccctctatcgccgagacaaagctccagaaggccggcacctacctgtgcctgctggaaaagttcttcccagatgtgattaagatccactggcaggaaaagaagtccaacaccatcctgggcagccaggaaggcaacaccatgaagaccaacgacacctacatgaagttcagctggctgaccgtgcccgagaagtccctggacaaagaacacagatgcatcgtgcggcacgaaaacaacaagaacggcgtggaccaggaaatcatcttcccacccatcaagaccgatgtgattacaatggaccccaaggacaactgctccaaggacgccaacgataccctgctgctccagctgaccaacaccagcgccaccatcctgtacgagatcctgctgggcaaggccaccctgtacgccgtgctggtgtctgccctggtgctgatggctatggtcaagcggaaggacagccggggaagggccaagcgatctggatctggagcaacaaacttctcactactcaaacaagcaggtgacgtggaggagaatcccgggcctactagtatggactggatttggcgcatccttttccttgtcggcgctgctaccggcgcgcattccttcgaacaggttcagctcaaagaatctggccccgtgctggtggccccaagccagacactgtctatcacctgtaccgtgtccggcttcagcctggcctcctacaacatccactgggtccgacagcctccaggcaaaggactggaatggctgggagtgatttgggctggcggcagcaccaactacaacagcgcactgatgagccggctgagcatcagcaaggacaacagcaagagccaggtgttcctccagatgaactccctccagaccgacgacaccgccatgtactactgcgccaagagaagcgacgactacagttggttcgcctactggggccagggcacactggttactgtgtctgcttctacgcgtagccagcctcacaccaagcccagcgtgttcgtgatgaagaacggcaccaacgtggcctgcctcgtgaaagagttctaccccaaggacatcaggatcaacctggtgtccagcaagaagatcaccgagttcgaccccgccatcgtgatctcccccagcggcaagtacaacgccgtgaagctggggaagtatgaggacagcaacagcgtgacctgctccgtgcagcacgacaacaagaccgtgcacagcaccgactttgaagtgaaaaccgactccaccgaccacgtgaagcccaaagagacagagaacaccaagcagcccagcaagagctgccacaagcccaaggccatcgtgcacaccgagaaagtgaacatgatgagcctgaccgtgatcggcttcagaatcctgctgctgaaagtggccggctttaacctgctgatgaccctgcggctgtggtccagctaa

SEQ ID NO: 35781 - DNA, 1887 bp, synthetic construct
  source 1..1887: mol_type = other DNA
atggccttaccagtgaccgccttgctcctgccgctggccttgctgctccacgccgccaggccggagaacgtgctgacacagagccctgccatcatgagtgcctctccaggcgagaaagtgaccatgacctgtagagccagcagcagcgtgtccagcagctacctgcactggtatcagcagaagtccggcgcaagccccaaagtgtggatctacagcaccagcaatctggcctctggcgtgccaggcagattttctggctctggcagcggcacaagctacagcctgacaatcagctccgtggaagccgaagatgccgccacctactactgccagcagtacagcggctaccccatcacatttggagccggcaccaaggtggaagtgaagagactcgaggacaagcagctggacgccgacgtgtcccccaagcctaccatcttcctgccctctatcgccgagacaaagctccagaaggccggcacctacctgtgcctgctggaaaagttcttcccagatgtgattaagatccactggcaggaaaagaagtccaacaccatcctgggcagccaggaaggcaacaccatgaagaccaacgacacctacatgaagttcagctggctgaccgtgcccgagaagtccctggacaaagaacacagatgcatcgtgcggcacgaaaacaacaagaacggcgtggaccaggaaatcatcttcccacccatcaagaccgatgtgattacaatggaccccaaggacaactgctccaaggacgccaacgataccctgctgctccagctgaccaacaccagcgcctactacatgtacgagatcctgctgggcaaggccaccctgtacgccgtgctggtgtctgccctggtgctgatggctatggtcaagcggaaggacagccggggaagggccaagcgatctggatctggagcaacaaacttctcactactcaaacaagcaggtgacgtggaggagaatcccgggcctactagtatggactggatttggcgcatccttttccttgtcggcgctgctaccggcgcgcattccttcgaacaggttcagctcaaagaatctggccccgtgctggtggccccaagccagacactgtctatcacctgtaccgtgtccggcttcagcctggcctcctacaacatccactgggtccgacagcctccaggcaaaggactggaatggctgggagtgatttgggctggcggcagcaccaactacaacagcgcactgatgagccggctgagcatcagcaaggacaacagcaagagccaggtgttcctccagatgaactccctccagaccgacgacaccgccatgtactactgcgccaagagaagcgacgactacagttggttcgcctactggggccagggcacactggttactgtgtctgcttctacgcgtagccagcctcacaccaagcccagcgtgttcgtgatgaagaacggcaccaacgtggcctgcctcgtgaaagagttctaccccaaggacatcaggatcaacctggtgtccagcaagaagatcaccgagttcgaccccgccatcgtgatctcccccagcggcaagtacaacgccgtgaagctggggaagtacgaggacagcaacagcgtgacctgctccgtgcagcacgacaacaagaccgtgcacagcaccgactttgaagtgaaaaccgactccaccgaccacgtgaagcccaaagagacagagaacaccaagcagcccagcaagagctgccacaagcccaaggccatcgtgcacaccgagaaagtgaacatgatgagcctgaccgtgctgggcttcagaatcctgctgctgaaagtggccggctttaacctgctgatgaccctgcggctgtggtccagctaa

SEQ ID NO: 35782 - DNA, 1887 bp, synthetic construct
  source 1..1887: mol_type = other DNA
atggccttaccagtgaccgccttgctcctgccgctggccttgctgctccacgccgccaggccggagaacgtgctgacacagagccctgccatcatgagtgcctctccaggcgagaaagtgaccatgacctgtagagccagcagcagcgtgtccagcagctacctgcactggtatcagcagaagtccggcgcaagccccaaagtgtggatctacagcaccagcaatctggcctctggcgtgccaggcagattttctggctctggcagcggcacaagctacagcctgacaatcagctccgtggaagccgaagatgccgccacctactactgccagcagtacagcggctaccccatcacatttggagccggcaccaaggtggaagtgaagagactcgaggacaagcagctggacgccgacgtgtcccccaagcctaccatcttcctgccctctatcgccgagacaaagctccagaaggccggcacctacctgtgcctgctggaaaagttcttcccagatgtgattaagatccactggcaggaaaagaagtccaacaccatcctgggcagccaggaaggcaacaccatgaagaccaacgacacctacatgaagttcagctggctgaccgtgcccgagaagtccctggacaaagaacacagatgcatcgtgcggcacgaaaacaacaagaacggcgtggaccaggaaatcatcttcccacccatcaagaccgatgtgattacaatggaccccaaggacaactgctccaaggacgccaacgataccctgctgctccagctgaccaacaccagcgccaccatcctgtacgagatcctgctgggcaaggccaccctgtacgccgtgctggtgtctgccctggtgctgatggctatggtcaagcggaaggacagccggggaagggccaagcgatctggatctggagcaacaaacttctcactactcaaacaagcaggtgacgtggaggagaatcccgggcctactagtatggactggatttggcgcatccttttccttgtcggcgctgctaccggcgcgcattccttcgaacaggttcagctcaaagaatctggccccgtgctggtggccccaagccagacactgtctatcacctgtaccgtgtccggcttcagcctggcctcctacaacatccactgggtccgacagcctccaggcaaaggactggaatggctgggagtgatttgggctggcggcagcaccaactacaacagcgcactgatgagccggctgagcatcagcaaggacaacagcaagagccaggtgttcctccagatgaactccctccagaccgacgacaccgccatgtactactgcgccaagagaagcgacgactacagttggttcgcctactggggccagggcacactggttactgtgtctgcttctacgcgtagccagcctcacaccaagcccagcgtgttcgtgatgaagaacggcaccaacgtggcctgcctcgtgaaagagttctaccccaaggacatcaggatcaacctggtgtccagcaagaagatcaccgagttcgaccccgccatcgtgatctcccccagcggcaagtacaacgccgtgaagctggggaagtacgaggacagcaacagcgtgacctgctccgtgcagcacgacaacaagaccgtgcacagcaccgactttgaagtgaaaaccgactccaccgaccacgtgaagcccaaagagacagagaacaccaagcagcccagcaagagctgccacaagcccaaggccatcgtgcacaccgagaaagtgaacatgatgagcctgaccgtgctgggcttcagaatcctgctgctgaaagtggccggctttaacctgctgatgaccctgcggctgtggtccagctaa

SEQ ID NO: 35783 - DNA, 1869 bp, synthetic construct
  source 1..1869: mol_type = other DNA
atggccttaccagtgaccgccttgctcctgccgctggccttgctgctccacgccgccaggccggagaacgtgctgacacagagccctgccatcatgagtgcctctccaggcgagaaagtgaccatgacctgtagagccagcagcagcgtgtccagcagctacctgcactggtatcagcagaagtccggcgcaagccccaaagtgtggatctacagcaccagcaatctggcctctggcgtgccaggcagattttctggctctggcagcggcacaagctacagcctgacaatcagctccgtggaagccgaagatgccgccacctactactgccagcagtacagcggctaccccatcacatttggagccggcaccaaggtggaagtgaagagactcgaggacctgaagaacgtgttcccacctgaggtggccgtgttcgagcctagcgaggccgagatcagccacacccagaaagccaccctcgtgtgcctggctaccggcttctaccccgaccatgtggaactgtcttggtgggtcaacggcaaagaggtgcacagcggcgtgtgtaccgacccccagccactgaaagaacagcccgccctgaacgacagccggtactgcctgagcagcagactgagagtgtccgccaccttctggcagaacccccggaaccacttcagatgccaggtgcagttctacggcctgagcgagaacgacgagtggacccaggacagagccaagcccgtgacccagatcgtgtctgccgaagcctggggcagagccgattgcggctttaccagcgagagctaccagcagggcgtgctgagcgccaccatcctgtacttgttgctgctgctgaagtccgtggtgtacttcgccatcatcacatgctgcctgctgcggagaaccgccttctgctgcaacggcgagaagtctagggccaagcgatctggatctggagcaacaaacttctcactactcaaacaagcaggtgacgtggaggagaatcccgggcctactagtatggactggatttggcgcatccttttccttgtcggcgctgctaccggcgcgcattccttcgaacaggttcagctcaaagaatctggccccgtgctggtggccccaagccagacactgtctatcacctgtaccgtgtccggcttcagcctggcctcctacaacatccactgggtccgacagcctccaggcaaaggactggaatggctgggagtgatttgggctggcggcagcaccaactacaacagcgcactgatgagccggctgagcatcagcaaggacaacagcaagagccaggtgttcctccagatgaactccctccagaccgacgacaccgccatgtactactgcgccaagagaagcgacgactacagttggttcgcctactggggccagggcacactggttactgtgtctgcttctacgcgtatccagaaccctgatcctgccgtgtaccagctgcgggatagcaagagcagcgacaagagcgtgtgtctgttcaccgacttcgacagccagaccaacgtgtcccagagcaaggactccgacgtgtacatcaccgataagtgcgtgctggacatgcggagcatggacttcaagagcaactccgccgtggcctggtccaacaagtccgatttcgcctgcgccaacgccttcaacaacagcattatccccgaggacacattcttcccaagccccgagagcagctgcgacgtgaagctggtggaaaagagcttcgagacagacaccaacctgaacttccagaacctgagcgtgatcggcctgcggatgctgttcgccaaaaccgtggccgtgaacttcctgctgaccgccaagctgttcttcctctaa

SEQ ID NO: 35784 - DNA, 1956 bp, synthetic construct
  source 1..1956: mol_type = other DNA
atggccttaccagtgaccgccttgctcctgccgctggccttgctgctccacgccgccaggccggagaacgtgctgacacagagccctgccatcatgagtgcctctccaggcgagaaagtgaccatgacctgtagagccagcagcagcgtgtccagcagctacctgcactggtatcagcagaagtccggcgcaagccccaaagtgtggatctacagcaccagcaatctggcctctggcgtgccaggcagattttctggctctggcagcggcacaagctacagcctgacaatcagctccgtggaagccgaagatgccgccacctactactgccagcagtacagcggctaccccatcacatttggagccggcaccaaggtggaagtgaagagactcgaggacctgaagaacgtgttcccacctgaggtggccgtgttcgagcctagcgaggccgagatcagccacacccagaaagccaccctcgtgtgcctggctaccggcttctaccccgaccatgtggaactgtcttggtgggtcaacggcaaagaggtgcacagcggcgtgtctaccgacccccagccactgaaagaacagcccgccctgaacgacagccggtactgcctgagcagcagactgagagtgtccgccaccttctggcagaacccccggaaccacttcagatgccaggtgcagttctacggcctgagcgagaacgacgagtggacccaggacagagccaagcccgtgacccagatcgtgtctgccgaagcctggggcagagccgattgcggatcctccaaggacgccaacgataccctgctgctccagctgaccaacaccagcgcctactacatgtacttgttgctgctgctgaagtccgtggtgtacttcgccatcatcacatgctgcctgctgcggagaaccgccttctgctgcaacggcgagaagtctagggccaagcgatctggatctggagcaacaaacttctcactactcaaacaagcaggtgacgtggaggagaatcccgggcctactagtatggactggatttggcgcatccttttccttgtcggcgctgctaccggcgcgcattccttcgaacaggttcagctcaaagaatctggccccgtgctggtggccccaagccagacactgtctatcacctgtaccgtgtccggcttcagcctggcctcctacaacatccactgggtccgacagcctccaggcaaaggactggaatggctgggagtgatttgggctggcggcagcaccaactacaacagcgcactgatgagccggctgagcatcagcaaggacaacagcaagagccaggtgttcctccagatgaactccctccagaccgacgacaccgccatgtactactgcgccaagagaagcgacgactacagttggttcgcctactggggccagggcacactggttactgtgtctgcttctacgcgtatccagaaccctgatcctgccgtgtaccagctgcgggatagcaagagcagcgacaagagcgtgtgtctgttcaccgacttcgacagccagaccaacgtgtcccagagcaaggactccgacgtgtacatcaccgataagaccgtgctggacatgcggagcatggacttcaagagcaactccgccgtggcctggtccaacaagtccgatttcgcctgcgccaacgccttcaacaacagcattatccccgaggacacattcttcccaagccccgagagcagctgcggtaccgaagtgaaaaccgactccaccgaccacgtgaagcccaaagagacagagaacaccaagcagcccagcaagagctgccacaagcccaaggccatcgtgcacaccgagaaagtgaacatgatgagcctgaccgtgctgggcctgcggatgctgttcgccaaaaccgtggccgtgaacttcctgctgaccgccaagctgttcttcctctaa

SEQ ID NO: 35785 - DNA, 1866 bp, synthetic construct
  source 1..1866: mol_type = other DNA
atggccttaccagtgaccgccttgctcctgccgctggccttgctgctccacgccgccaggccggagaacgtgctgacacagagccctgccatcatgagtgcctctccaggcgagaaagtgaccatgacctgtagagccagcagcagcgtgtccagcagctacctgcactggtatcagcagaagtccggcgcaagccccaaagtgtggatctacagcaccagcaatctggcctctggcgtgccaggcagattttctggctctggcagcggcacaagctacagcctgacaatcagctccgtggaagccgaagatgccgccacctactactgccagcagtacagcggctaccccatcacatttggagccggcaccaaggtggaagtgaagagactcgaggacctgaagaacgtgttcccacctgaggtggccgtgttcgagcctagcgaggccgagatcagccacacccagaaagccaccctcgtgtgcctggctaccggcttctaccccgaccatgtggaactgtcttggtgggtcaacggcaaagaggtgcacagcggcgtgtgtaccgacccccagccactgaaagaacagcccgccctgaacgacagccggtactgcctgagcagcagactgagagtgtccgccaccttctggcagaacccccggaaccacttcagatgccaggtgcagttctacggcctgagcgagaacgacgagtggacccaggacagagccaagcccgtgacccagatcgtgtctgccgaagcctggggcagagccgattgcgacgtgaagctggtggaaaagagcttcgagacagacaccaacctgaacttccagaacctgagcgtgatcggcttcagaatcctgctgctgaaagtggccggctttaacctgctgatgaccctgcggctgtggtccagcagggccaagcgatctggatctggagcaacaaacttctcactactcaaacaagcaggtgacgtggaggagaatcccgggcctactagtatggactggatttggcgcatccttttccttgtcggcgctgctaccggcgcgcattccttcgaacaggttcagctcaaagaatctggccccgtgctggtggccccaagccagacactgtctatcacctgtaccgtgtccggcttcagcctggcctcctacaacatccactgggtccgacagcctccaggcaaaggactggaatggctgggagtgatttgggctggcggcagcaccaactacaacagcgcactgatgagccggctgagcatcagcaaggacaacagcaagagccaggtgttcctccagatgaactccctccagaccgacgacaccgccatgtactactgcgccaagagaagcgacgactacagttggttcgcctactggggccagggcacactggttactgtgtctgcttctacgcgtatccagaaccctgatcctgccgtgtaccagctgcgggatagcaagagcagcgacaagagcgtgtgtctgttcaccgacttcgacagccagaccaacgtgtcccagagcaaggactccgacgtgtacatcaccgataagtgcgtgctggacatgcggagcatggacttcaagagcaactccgccgtggcctggtccaacaagtccgatttcgcctgcgccaacgccttcaacaacagcattatccccgaggacacattcttcccaagccccgagagcagctgcggctttaccagcgagagctaccagcagggcgtgctgagcgccaccatcctgtacgagatcctgctgggcaaggccaccctgtacgccgtgctggtgtctgccctggtgctgatggctatggtcaagcggaaggacagccggggataa

SEQ ID NO: 35786 - DNA, 1866 bp, synthetic construct
  source 1..1866: mol_type = other DNA
atggccttaccagtgaccgccttgctcctgccgctggccttgctgctccacgccgccaggccggagaacgtgctgacacagagccctgccatcatgagtgcctctccaggcgagaaagtgaccatgacctgtagagccagcagcagcgtgtccagcagctacctgcactggtatcagcagaagtccggcgcaagccccaaagtgtggatctacagcaccagcaatctggcctctggcgtgccaggcagattttctggctctggcagcggcacaagctacagcctgacaatcagctccgtggaagccgaagatgccgccacctactactgccagcagtacagcggctaccccatcacatttggagccggcaccaaggtggaagtgaagagactcgaggacctgaagaacgtgttcccacctgaggtggccgtgttcgagcctagcgaggccgagatcagccacacccagaaagccaccctcgtgtgcctggctaccggcttctaccccgaccatgtggaactgtcttggtgggtcaacggcaaagaggtgcacagcggcgtgtgtaccgacccccagccactgaaagaacagcccgccctgaacgacagccggtactgcctgagcagcagactgagagtgtccgccaccttctggcagaacccccggaaccacttcagatgccaggtgcagttctacggcctgagcgagaacgacgagtggacccaggacagagccaagcccgtgacccagatcgtgtctgccgaagcctggggcagagccgattgcggctttaccagcgagagctaccagcagggcgtgctgagcgccaccaacctgagcgtgatcggcttcagaatcctgctgctgaaagtggccggctttaacctgctgatgaccctgcggctgtggtccagcagggccaagcgatctggatctggagcaacaaacttctcactactcaaacaagcaggtgacgtggaggagaatcccgggcctactagtatggactggatttggcgcatccttttccttgtcggcgctgctaccggcgcgcattccttcgaacaggttcagctcaaagaatctggccccgtgctggtggccccaagccagacactgtctatcacctgtaccgtgtccggcttcagcctggcctcctacaacatccactgggtccgacagcctccaggcaaaggactggaatggctgggagtgatttgggctggcggcagcaccaactacaacagcgcactgatgagccggctgagcatcagcaaggacaacagcaagagccaggtgttcctccagatgaactccctccagaccgacgacaccgccatgtactactgcgccaagagaagcgacgactacagttggttcgcctactggggccagggcacactggttactgtgtctgcttctacgcgtatccagaaccctgatcctgccgtgtaccagctgcgggatagcaagagcagcgacaagagcgtgtgtctgttcaccgacttcgacagccagaccaacgtgtcccagagcaaggactccgacgtgtacatcaccgataagtgcgtgctggacatgcggagcatggacttcaagagcaactccgccgtggcctggtccaacaagtccgatttcgcctgcgccaacgccttcaacaacagcattatccccgaggacacattcttcccaagccccgagagcagctgcgacgtgaagctggtggaaaagagcttcgagacagacaccaacctgaacttccagatcctgtacgagatcctgctgggcaaggccaccctgtacgccgtgctggtgtctgccctggtgctgatggctatggtcaagcggaaggacagccggggataa

SEQ ID NO: 35787 - DNA, 1866 bp, synthetic construct; identical to SEQ ID NO: 35785
  source 1..1866: mol_type = other DNA

SEQ ID NO: 35788 - DNA, 1866 bp, synthetic construct; identical to SEQ ID NO: 35786
  source 1..1866: mol_type = other DNA

SEQ ID NO: 35789 - DNA, 1863 bp, synthetic construct
  source 1..1863: mol_type = other DNA
atggccttaccagtgaccgccttgctcctgccgctggccttgctgctccacgccgccaggccggagaacgtgctgacacagagccctgccatcatgagtgcctctccaggcgagaaagtgaccatgacctgtagagccagcagcagcgtgtccagcagctacctgcactggtatcagcagaagtccggcgcaagccccaaagtgtggatctacagcaccagcaatctggcctctggcgtgccaggcagattttctggctctggcagcggcacaagctacagcctgacaatcagctccgtggaagccgaagatgccgccacctactactgccagcagtacagcggctaccccatcacatttggagccggcaccaaggtggaagtgaagagactcgaggacctgaagaacgtgttcccacctgaggtggccgtgttcgagcctagcgaggccgagatcagccacacccagaaagccaccctcgtgtgcctggctaccggcttctaccccgaccatgtggaactgtcttggtgggtcaacggcaaagaggtgcacagcggcgtgtgtaccgacccccagccactgaaagaacagcccgccctgaacgacagccggtactgcctgagcagcagactgagagtgtccgccaccttctggcagaacccccggaaccacttcagatgccaggtgcagttctacggcctgagcgagaacgacgagtggacccaggacagagccaagcccgtgacccagatcgtgtctgccgaagcctggggcagagccgattgcgacgtgaagctggtggaaaagagcttcgagacagacaccaacctgaacttccagaacctgagcgtgatcggcttcagaatcctgctgctgaaagtggccggctttaacctgctgatgaccctgcggctgtggtccagcagggccaagcgatctggatctggagcaacaaacttctcactactcaaacaagcaggtgacgtggaggagaatcccgggcctactagtatggactggatttggcgcatccttttccttgtcggcgctgctaccggcgcgcattccttcgaacaggttcagctcaaagaatctggccccgtgctggtggccccaagccagacactgtctatcacctgtaccgtgtccggcttcagcctggcctcctacaacatccactgggtccgacagcctccaggcaaaggactggaatggctgggagtgatttgggctggcggcagcaccaactacaacagcgcactgatgagccggctgagcatcagcaaggacaacagcaagagccaggtgttcctccagatgaactccctccagaccgacgacaccgccatgtactactgcgccaagagaagcgacgactacagttggttcgcctactggggccagggcacactggttactgtgtctgcttctacgcgtatccagaaccctgatcctgccgtgtaccagctgcgggatagcaagagcagcgacaagagcgtgtgtctgttcaccgacttcgacagccagaccaacgtgtcccagagcaaggactccgacgtgtacatcaccgataagtgcgtgctggacatgcggagcatggacttcaagagcaactccgccgtggcctggtccaacaagtccgatttcgcctgcgccaacgccttcaacaacagcattatccccgaggacacattcttcccaagccccgagagcagctgcggctttaccagcgagagctaccagcagggcgtgctgagcgccaccatcctgtacgagatcctgctgggcaaggccaccctgtacgccgtgctggtgtctgccctggtgctgatggctatggtcaagcggaaggacagccgggga

SEQ ID NO: 35790 - DNA, 1875 bp, synthetic construct
  source 1..1875: mol_type = other DNA
atggccttaccagtgaccgccttgctcctgccgctggccttgctgctccacgccgccaggccggagaacgtgctgacacagagccctgccatcatgagtgcctctccaggcgagaaagtgaccatgacctgtagagccagcagcagcgtgtccagcagctacctgcactggtatcagcagaagtccggcgcaagccccaaagtgtggatctacagcaccagcaatctggcctctggcgtgccaggcagattttctggctctggcagcggcacaagctacagcctgacaatcagctccgtggaagccgaagatgccgccacctactactgccagcagtacagcggctaccccatcacatttggagccggcaccaaggtggaagtgaagagactcgaggccgacgtgtcccccaagcctaccatcttcctgccctctatcgccgagacaaagctccagaaggccggcacctacctgtgcctgctggaaaagttcttcccagatgtgattaagatccactggcaggaaaagaagtccaacaccatcctgggcagccaggaaggcaacaccatgaagaccaacgacacctacatgaagttcagctggctgaccgtgcccgagaagtccctggacaaagaacacagatgcatcgtgcggcacgaaaacaacaagaacggcgtggaccaggaaatcatcttcccacccatcaagaccgatgtgattacaatggaccccaaggacaactgctccaaggacgccaacgataccctgctgctccagctgaccaacaccagcgcctactacatgtacttgttgctgctgctgaagtccgtggtgtacttcgccatcatcacatgctgcctgctgcggagaaccgccttctgctgcaacggcgagaagtctagggccaagcgatctggatctggagcaacaaacttctcactactcaaacaagcaggtgacgtggaggagaatcccgggcctactagtatggactggatttggcgcatccttttccttgtcggcgctgctaccggcgcgcattccttcgaacaggttcagctcaaagaatctggccccgtgctggtggccccaagccagacactgtctatcacctgtaccgtgtccggcttcagcctggcctcctacaacatccactgggtccgacagcctccaggcaaaggactggaatggctgggagtgatttgggctggcggcagcaccaactacaacagcgcactgatgagccggctgagcatcagcaaggacaacagcaagagccaggtgttcctccagatgaactccctccagaccgacgacaccgccatgtactactgcgccaagagaagcgacgactacagttggttcgcctactggggccagggcacactggttactgtgtctgcttctacgcgtagccagcctcacaccaagcccagcgtgttcgtgatgaagaacggcaccaacgtggcctgcctcgtgaaagagttctaccccaaggacatcaggatcaacctggtgtccagcaagaagatcaccgagttcgaccccgccatcgtgatctcccccagcggcaagtacaacgccgtgaagctggggaagtatgaggacagcaacagcgtgacctgctccgtgcagcacgacaacaagaccgtgcacagcaccgactttgaagtgaaaaccgactccaccgaccacgtgaagcccaaagagacagagaacaccaagcagcccagcaagagctgccacaagcccaaggccatcgtgcacaccgagaaagtgaacatgatgagcctgaccgtgatcggcttcagaatcctgctgctgaaagtggccggctttaacctgctgatgaccctgcggctgtggtccagctaa

SEQ ID NO: 35791 - DNA, 1875 bp, synthetic construct
  source 1..1875: mol_type = other DNA
atggccttaccagtgaccgccttgctcctgccgctggccttgctgctccacgccgccaggccggagaacgtgctgacacagagccctgccatcatgagtgcctctccaggcgagaaagtgaccatgacctgtagagccagcagcagcgtgtccagcagctacctgcactggtatcagcagaagtccggcgcaagccccaaagtgtggatctacagcaccagcaatctggcctctggcgtgccaggcagattttctggctctggcagcggcacaagctacagcctgacaatcagctccgtggaagccgaagatgccgccacctactactgccagcagtacagcggctaccccatcacatttggagccggcaccaaggtggaagtgaagagactcgaggccgacgtgtcccccaagcctaccatcttcctgccctctatcgccgagacaaagctccagaaggccggcacctacctgtgcctgctggaaaagttcttcccagatgtgattaagatccactggcaggaaaagaagtccaacaccatcctgggcagccaggaaggcaacaccatgaagaccaacgacacctacatgaagttcagctggctgaccgtgcccgagaagtccctggacaaagaacacagatgcatcgtgcggcacgaaaacaacaagaacggcgtggaccaggaaatcatcttcccacccatcaagaccgatgtgattacaatggaccccaaggacaactgctccaaggacgccaacgataccctgctgctccagctgaccaacaccagcgcctactacatgtacttgttgctgctgctgaagtccgtggtgtacttcgccatcatcacatgctgcctgctgcggagaaccgccttctgctgcaacggcgagaagtctagggccaagcgatctggatctggagcaacaaacttctcactactcaaacaagcaggtgacgtggaggagaatcccgggcctactagtatggactggatttggcgcatccttttccttgtcggcgctgctaccggcgcgcattccttcgaacaggttcagctcaaagaatctggccccgtgctggtggccccaagccagacactgtctatcacctgtaccgtgtccggcttcagcctggcctcctacaacatccactgggtccgacagcctccaggcaaaggactggaatggctgggagtgatttgggctggcggcagcaccaactacaacagcgcactgatgagccggctgagcatcagcaaggacaacagcaagagccaggtgttcctccagatgaactccctccagaccgacgacaccgccatgtactactgcgccaagagaagcgacgactacagttggttcgcctactggggccagggcacactggttactgtgtctgcttctacgcgtagccagcctcacaccaagcccagcgtgttcgtgatgaagaacggcaccaacgtggcctgcctcgtgaaagagttctaccccaaggacatcaggatcaacctggtgtccagcaagaagatcaccgagttcgaccccgccatcgtgatctcccccagcggcaagtacaacgccgtgaagctggggaagtacgaggacagcaacagcgtgacctgctccgtgcagcacgacaacaagaccgtgcacagcaccgactttgaagtgaaaaccgactccaccgaccacgtgaagcccaaagagacagagaacaccaagcagcccagcaagagctgccacaagcccaaggccatcgtgcacaccgagaaagtgaacatgatgagcctgaccgtgctgggcttcagaatcctgctgctgaaagtggccggctttaacctgctgatgaccctgcggctgtggtccagctaa

SEQ ID NO: 35792 - DNA, 1863 bp, synthetic construct; identical to SEQ ID NO: 35789
  source 1..1863: mol_type = other DNA

SEQ ID NO: 35793 - DNA, 1875 bp, synthetic construct
  source 1..1875: mol_type = other DNA
atggccttaccagtgaccgccttgctcctgccgctggccttgctgctccacgccgccaggccggagaacgtgctgacacagagccctgccatcatgagtgcctctccaggcgagaaagtgaccatgacctgtagagccagcagcagcgtgtccagcagctacctgcactggtatcagcagaagtccggcgcaagccccaaagtgtggatctacagcaccagcaatctggcctctggcgtgccaggcagattttctggctctggcagcggcacaagctacagcctgacaatcagctccgtggaagccgaagatgccgccacctactactgccagcagtacagcggctaccccatcacatttggagccggcaccaaggtggaagtgaagagactcgagatccagaaccctgatcctgccgtgtaccagctgcgggatagcaagagcagcgacaagagcgtgtgtctgttcaccgacttcgacagccagaccaacgtgtcccagagcaaggactccgacgtgtacatcaccgataagtgcgtgctggacatgcggagcatggacttcaagagcaactccgccgtggcctggtccaacaagtccgatttcgcctgcgccaacgccttcaacaacagcattatccccgaggacacattcttcccaagccccgagagcagctgcggctttaccagcgagagctaccagcagggcgtgctgagcgccaccatcctgtacgagatcctgctgggcaaggccaccctgtacgccgtgctggtgtctgccctggtgctgatggctatggtcaagcggaaggacagccggggacgcgccaagagaagcggatctggcgtgaagcagaccctgaatttcgacctgctgaagctggctggcgacgtggaatccaacccaggccctactagtatggactggatttggcgcatccttttccttgtcggcgctgctaccggcgcgcattccttcgaacaggttcagctcaaagaatctggccccgtgctggtggccccaagccagacactgtctatcacctgtaccgtgtccggcttcagcctggcctcctacaacatccactgggtccgacagcctccaggcaaaggactggaatggctgggagtgatttgggctggcggcagcaccaactacaacagcgcactgatgagccggctgagcatcagcaaggacaacagcaagagccaggtgttcctccagatgaactccctccagaccgacgacaccgccatgtactactgcgccaagagaagcgacgactacagttggttcgcctactggggccagggcacactggttactgtgtctgcttctacgcgtgaggacctgaagaacgtgttcccacctgaggtggccgtgttcgagcctagcgaggccgagatcagccacacccagaaagccaccctcgtgtgcctggctaccggcttctaccccgaccatgtggaactgtcttggtgggtcaacggcaaagaggtgcacagcggcgtgtgtaccgacccccagccactgaaagaacagcccgccctgaacgacagccggtactgcctgagcagcagactgagagtgtccgccaccttctggcagaacccccggaaccacttcagatgccaggtgcagttctacggcctgagcgagaacgacgagtggacccaggacagagccaagcccgtgacccagatcgtgtctgccgaagcctggggcagagccgattgcgacgtgaagctggtggaaaagagcttcgagacagacaccaacctgaacttccagaacctgagcgtgatcggcttcagaatcctgctgctgaaagtggccggctttaacctgctgatgaccctgcggctgtggtccagc

SEQ ID NO: 35794 - DNA, 2268 bp, synthetic construct
  source 1..2268: mol_type = other DNA
atggccttaccagtgaccgccttgctcctgccgctggccttgctgctccacgccgccaggccggaagtgcagctggttgaatctggcggaggactggttcagcctggcggatctctgagactgtcttgtgccgccagcggcttcagcttcagcgacttttggatgagctgggtccgacaggcccctggcaaaggacttgaatgggtcgccacaatcagccaggccggcagcgagaaggactacgtggactctgtgaagggcagattcaccatcagccgggacaacgccaagaagtccctgtacctccagatgaacagcctgagagccgaggacaccgccgtgtactattgtgcctctggcgtgtacagcttcgactacagaggccagggcaccctggtcacagtctcttctggtaccggcggaggcggatctggcggcggaggtagcggtggcggaggatctgaattcgagaacgtgctgacacagagccctgccatcatgagtgcctctccaggcgagaaagtgaccatgacctgtagagccagcagcagcgtgtccagcagctacctgcactggtatcagcagaagtccggcgcaagccccaaagtgtggatctacagcaccagcaatctggcctctggcgtgccaggcagattttctggctctggcagcggcacaagctacagcctgacaatcagctccgtggaagccgaagatgccgccacctactactgccagcagtacagcggctaccccatcacatttggagccggcaccaaggtggaagtgaagagactcgaggacctgaagaacgtgttcccacctgaggtggccgtgttcgagcctagcgaggccgagatcagccacacccagaaagccaccctcgtgtgcctggctaccggcttctaccccgaccatgtggaactgtcttggtgggtcaacggcaaagaggtgcacagcggcgtgtgtaccgacccccagccactgaaagaacagcccgccctgaacgacagccggtactgcctgagcagcagactgagagtgtccgccaccttctggcagaacccccggaaccacttcagatgccaggtgcagttctacggcctgagcgagaacgacgagtggacccaggacagagccaagcccgtgacccagatcgtgtctgccgaagcctggggcagagccgattgcgacgtgaagctggtggaaaagagcttcgagacagacaccaacctgaacttccagaacctgagcgtgatcggcttcagaatcctgctgctgaaagtggccggctttaacctgctgatgaccctgcggctgtggtccagcagggccaagcgatctggatctggagcaacaaacttctcactactcaaacaagcaggtgacgtggaggagaatcccgggcctactagtatggactggatttggcgcatccttttccttgtcggcgctgctaccggcgcgcattccttcgaacaggttcagctcaaagaatctggccccgtgctggtggccccaagccagacactgtctatcacctgtaccgtgtccggcttcagcctggcctcctacaacatccactgggtccgacagcctccaggcaaaggactggaatggctgggagtgatttgggctggcggcagcaccaactacaacagcgcactgatgagccggctgagcatcagcaaggacaacagcaagagccaggtgttcctccagatgaactccctccagaccgacgacaccgccatgtactactgcgccaagagaagcgacgactacagttggttcgcctactggggccagggcacactggttactgtgtctgcttctacgcgtatccagaaccctgatcctgccgtgtaccagctgcgggatagcaagagcagcgacaagagcgtgtgtctgttcaccgacttcgacagccagaccaacgtgtcccagagcaaggactccgacgtgtacatcaccgataagtgcgtgctggacatgcggagcatggacttcaagagcaactccgccgtggcctggtccaacaagtccgatttcgcctgcgccaacgccttcaacaacagcattatccccgaggacacattcttcccaagccccgagagcagctgcggctttaccagcgagagctaccagcagggcgtgctgagcgccaccatcctgtacgagatcctgctgggcaaggccaccctgtacgccgtgctggtgtctgccctggtgctgatggctatggtcaagcggaaggacagccgggga

SEQ ID NO: 35795 - DNA, 2280 bp, synthetic construct
  source 1..2280: mol_type = other DNA
atggccttaccagtgaccgccttgctcctgccgctggccttgctgctccacgccgccaggccggaagtgcagctggttgaatctggcggaggactggttcagcctggcggatctctgagactgtcttgtgccgccagcggcttcagcttcagcgacttttggatgagctgggtccgacaggcccctggcaaaggacttgaatgggtcgccacaatcagccaggccggcagcgagaaggactacgtggactctgtgaagggcagattcaccatcagccgggacaacgccaagaagtccctgtacctccagatgaacagcctgagagccgaggacaccgccgtgtactattgtgcctctggcgtgtacagcttcgactacagaggccagggcaccctggtcacagtctcttctggtaccggcggaggcggatctggcggcggaggtagcggtggcggaggatctgaattcgagaacgtgctgacacagagccctgccatcatgagtgcctctccaggcgagaaagtgaccatgacctgtagagccagcagcagcgtgtccagcagctacctgcactggtatcagcagaagtccggcgcaagccccaaagtgtggatctacagcaccagcaatctggcctctggcgtgccaggcagattttctggctctggcagcggcacaagctacagcctgacaatcagctccgtggaagccgaagatgccgccacctactactgccagcagtacagcggctaccccatcacatttggagccggcaccaaggtggaagtgaagagactcgagatccagaaccctgatcctgccgtgtaccagctgcgggatagcaagagcagcgacaagagcgtgtgtctgttcaccgacttcgacagccagaccaacgtgtcccagagcaaggactccgacgtgtacatcaccgataagtgcgtgctggacatgcggagcatggacttcaagagcaactccgccgtggcctggtccaacaagtccgatttcgcctgcgccaacgccttcaacaacagcattatccccgaggacacattcttcccaagccccgagagcagctgcggctttaccagcgagagctaccagcagggcgtgctgagcgccaccatcctgtacgagatcctgctgggcaaggccaccctgtacgccgtgctggtgtctgccctggtgctgatggctatggtcaagcggaaggacagccggggacgcgccaagagaagcggatctggcgtgaagcagaccctgaatttcgacctgctgaagctggctggcgacgtggaatccaacccaggccctactagtatggactggatttggcgcatccttttccttgtcggcgctgctaccggcgcgcattccttcgaacaggttcagctcaaagaatctggccccgtgctggtggccccaagccagacactgtctatcacctgtaccgtgtccggcttcagcctggcctcctacaacatccactgggtccgacagcctccaggcaaaggactggaatggctgggagtgatttgggctggcggcagcaccaactacaacagcgcactgatgagccggctgagcatcagcaaggacaacagcaagagccaggtgttcctccagatgaactccctccagaccgacgacaccgccatgtactactgcgccaagagaagcgacgactacagttggttcgcctactggggccagggcacactggttactgtgtctgcttctacgcgtgaggacctgaagaacgtgttcccacctgaggtggccgtgttcgagcctagcgaggccgagatcagccacacccagaaagccaccctcgtgtgcctggctaccggcttctaccccgaccatgtggaactgtcttggtgggtcaacggcaaagaggtgcacagcggcgtgtgtaccgacccccagccactgaaagaacagcccgccctgaacgacagccggtactgcctgagcagcagactgagagtgtccgccaccttctggcagaacccccggaaccacttcagatgccaggtgcagttctacggcctgagcgagaacgacgagtggacccaggacagagccaagcccgtgacccagatcgtgtctgccgaagcctggggcagagccgattgcgacgtgaagctggtggaaaagagcttcgagacagacaccaacctgaacttccagaacctgagcgtgatcggcttcagaatcctgctgctgaaagtggccggctttaacctgctgatgaccctgcggctgtggtccagc

SEQ ID NO: 35796 - DNA, 2679 bp, synthetic construct
  source 1..2679: mol_type = other DNA
atggccttaccagtgaccgccttgctcctgccgctggccttgctgctccacgccgccaggccggaagtgcagctggttgaatctggcggaggactggttcagcctggcggatctctgagactgtcttgtgccgccagcggcttcagcttcagcgacttttggatgagctgggtccgacaggcccctggcaaaggacttgaatgggtcgccacaatcagccaggccggcagcgagaaggactacgtggactctgtgaagggcagattcaccatcagccgggacaacgccaagaagtccctgtacctccagatgaacagcctgagagccgaggacaccgccgtgtactattgtgcctctggcgtgtacagcttcgactacagaggccagggcaccctggtcacagtctcttctggtaccggcggaggcggatctggcggcggaggtagcggtggcggaggatctgaattcgagaacgtgctgacacagagccctgccatcatgagtgcctctccaggcgagaaagtgaccatgacctgtagagccagcagcagcgtgtccagcagctacctgcactggtatcagcagaagtccggcgcaagccccaaagtgtggatctacagcaccagcaatctggcctctggcgtgccaggcagattttctggctctggcagcggcacaagctacagcctgacaatcagctccgtggaagccgaagatgccgccacctactactgccagcagtacagcggctaccccatcacatttggagccggcaccaaggtggaagtgaagagactcgaggacctgaagaacgtgttcccacctgaggtggccgtgttcgagcctagcgaggccgagatcagccacacccagaaagccaccctcgtgtgcctggctaccggcttctaccccgaccatgtggaactgtcttggtgggtcaacggcaaagaggtgcacagcggcgtgtgtaccgacccccagccactgaaagaacagcccgccctgaacgacagccggtactgcctgagcagcagactgagagtgtccgccaccttctggcagaacccccggaaccacttcagatgccaggtgcagttctacggcctgagcgagaacgacgagtggacccaggacagagccaagcccgtgacccagatcgtgtctgccgaagcctggggcagagccgattgcgacgtgaagctggtggaaaagagcttcgagacagacaccaacctgaacttccagaacctgagcgtgatcggcttcagaatcctgctgctgaaagtggccggctttaacctgctgatgaccctgcggctgtggtccagcagggccaagcgatctggatctggagcaacaaacttctcactactcaaacaagcaggtgacgtggaggagaatcccgggcctactagtatggactggatttggcgcatccttttccttgtcggcgctgctaccggcgcgcattccgggccccagctccagctgcaagagtctggacctggcctggtcaagcctagcgagacactgagcctgacctgtaccgtgtccggcgatagcatcagcagcggcgattactactggggctggatcagacagcctcctggcaaaggactggaatggatcggccacatctactacagcggcgtgacctactacaaccccagcctgaagtccagagtgaccatcagcgtggacaccagccggaaccagttctccctgaagctgtctagcgtgacagccgccgataccgccgtgtactactgcaccagagaggacagcagcaactggcggagtagaggccagggaacactggtcacagttagctctggatccggcggaggcggaagtggaggcggaggatctggcggcggaggctctttcgaacaggttcagctcaaagaatctggccccgtgctggtggccccaagccagacactgtctatcacctgtaccgtgtccggcttcagcctggcctcctacaacatccactgggtccgacagcctccaggcaaaggactggaatggctgggagtgatttgggctggcggcagcaccaactacaacagcgcactgatgagccggctgagcatcagcaaggacaacagcaagagccaggtgttcctccagatgaactccctccagaccgacgacaccgccatgtactactgcgccaagagaagcgacgactacagttggttcgcctactggggccagggcacactggttactgtgtctgcttctacgcgtatccagaaccctgatcctgccgtgtaccagctgcgggatagcaagagcagcgacaagagcgtgtgtctgttcaccgacttcgacagccagaccaacgtgtcccagagcaaggactccgacgtgtacatcaccgataagtgcgtgctggacatgcggagcatggacttcaagagcaactccgccgtggcctggtccaacaagtccgatttcgcctgcgccaacgccttcaacaacagcattatccccgaggacacattcttcccaagccccgagagcagctgcggctttaccagcgagagctaccagcagggcgtgctgagcgccaccatcctgtacgagatcctgctgggcaaggccaccctgtacgccgtgctggtgtctgccctggtgctgatggctatggtcaagcggaaggacagccgggga

SEQ ID NO: 35797 - DNA, 2691 bp, synthetic construct
  source 1..2691: mol_type = other DNA
atggccttaccagtgaccgccttgctcctgccgctggccttgctgctccacgccgccaggccggaagtgcagctggttgaatctggcggaggactggttcagcctggcggatctctgagactgtcttgtgccgccagcggcttcagcttcagcgacttttggatgagctgggtccgacaggcccctggcaaaggacttgaatgggtcgccacaatcagccaggccggcagcgagaaggactacgtggactctgtgaagggcagattcaccatcagccgggacaacgccaagaagtccctgtacctccagatgaacagcctgagagccgaggacaccgccgtgtactattgtgcctctggcgtgtacagcttcgactacagaggccagggcaccctggtcacagtctcttctggtaccggcggaggcggatctggcggcggaggtagcggtggcggaggatctgaattcgagaacgtgctgacacagagccctgccatcatgagtgcctctccaggcgagaaagtgaccatgacctgtagagccagcagcagcgtgtccagcagctacctgcactggtatcagcagaagtccggcgcaagccccaaagtgtggatctacagcaccagcaatctggcctctggcgtgccaggcagattttctggctctggcagcggcacaagctacagcctgacaatcagctccgtggaagccgaagatgccgccacctactactgccagcagtacagcggctaccccatcacatttggagccggcaccaaggtggaagtgaagagactcgagatccagaaccctgatcctgccgtgtaccagctgcgggatagcaagagcagcgacaagagcgtgtgtctgttcaccgacttcgacagccagaccaacgtgtcccagagcaaggactccgacgtgtacatcaccgataagtgcgtgctggacatgcggagcatggacttcaagagcaactccgccgtggcctggtccaacaagtccgatttcgcctgcgccaacgccttcaacaacagcattatccccgaggacacattcttcccaagccccgagagcagctgcggctttaccagcgagagctaccagcagggcgtgctgagcgccaccatcctgtacgagatcctgctgggcaaggccaccctgtacgccgtgctggtgtctgccctggtgctgatggctatggtcaagcggaaggacagccggggacgcgccaagagaagcggatctggcgtgaagcagaccctgaatttcgacctgctgaagctggctggcgacgtggaatccaacccaggccctactagtatggactggatttggcgcatccttttccttgtcggcgctgctaccggcgcgcattccgggccccagctccagctgcaagagtctggacctggcctggtcaagcctagcgagacactgagcctgacctgtaccgtgtccggcgatagcatcagcagcggcgattactactggggctggatcagacagcctcctggcaaaggactggaatggatcggccacatctactacagcggcgtgacctactacaaccccagcctgaagtccagagtgaccatcagcgtggacaccagccggaaccagttctccctgaagctgtctagcgtgacagccgccgataccgccgtgtactactgcaccagagaggacagcagcaactggcggagtagaggccagggaacactggtcacagttagctctggatccggcggaggcggaagtggaggcggaggatctggcggcggaggctctttcgaacaggttcagctcaaagaatctggccccgtgctggtggccccaagccagacactgtctatcacctgtaccgtgtccggcttcagcctggcctcctacaacatccactgggtccgacagcctccaggcaaaggactggaatggctgggagtgatttgggctggcggcagcaccaactacaacagcgcactgatgagccggctgagcatcagcaaggacaacagcaagagccaggtgttcctccagatgaactccctccagaccgacgacaccgccatgtactactgcgccaagagaagcgacgactacagttggttcgcctactggggccagggcacactggttactgtgtctgcttctacgcgtgaggacctgaagaacgtgttcccacctgaggtggccgtgttcgagcctagcgaggccgagatcagccacacccagaaagccaccctcgtgtgcctggctaccggcttctaccccgaccatgtggaactgtcttggtgggtcaacggcaaagaggtgcacagcggcgtgtgtaccgacccccagccactgaaagaacagcccgccctgaacgacagccggtactgcctgagcagcagactgagagtgtccgccaccttctggcagaacccccggaaccacttcagatgccaggtgcagttctacggcctgagcgagaacgacgagtggacccaggacagagccaagcccgtgacccagatcgtgtctgccgaagcctggggcagagccgattgcgacgtgaagctggtggaaaagagcttcgagacagacaccaacctgaacttccagaacctgagcgtgatcggcttcagaatcctgctgctgaaagtggccggctttaacctgctgatgaccctgcggctgtggtccagc

SEQ ID NO: 35798 - DNA, 2073 bp, synthetic construct
  source 1..2073: mol_type = other DNA
atggccttaccagtgaccgccttgctcctgccgctggccttgctgctccacgccgccaggccggagaacgtgctgacacagagccctgccatcatgagtgcctctccaggcgagaaagtgaccatgacctgtagagccagcagcagcgtgtccagcagctacctgcactggtatcagcagaagtccggcgcaagccccaaagtgtggatctacagcaccagcaatctggcctctggcgtgccaggcagattttctggctctggcagcggcacaagctacagcctgacaatcagctccgtggaagccgaagatgccgccacctactactgccagcagtacagcggctaccccatcacatttggagccggcaccaaggtggaagtgaagagactcgaggacctgaagaacgtgttcccacctgaggtggccgtgttcgagcctagcgaggccgagatcagccacacccagaaagccaccctcgtgtgcctggctaccggcttctaccccgaccatgtggaactgtcttggtgggtcaacggcaaagaggtgcacagcggcgtgtgtaccgacccccagccactgaaagaacagcccgccctgaacgacagccggtactgcctgagcagcagactgagagtgtccgccaccttctggcagaacccccggaaccacttcagatgccaggtgcagttctacggcctgagcgagaacgacgagtggacccaggacagagccaagcccgtgacccagatcgtgtctgccgaagcctggggcagagccgattgcgacgtgaagctggtggaaaagagcttcgagacagacaccaacctgaacttccagaacctgagcgtgatcggcttcagaatcctgctgctgaaagtggccggctttaacctgctgatgaccctgcggctgtggtccagcagggccaagcgatctggatctggagcaacaaacttctcactactcaaacaagcaggtgacgtggaggagaatcccgggcctactagtatggactggatttggcgcatccttttccttgtcggcgctgctaccggcgcccattccgggcccatggaccccgacctggaaatcagagccgccttcctgcggcagagaaacacagccctgagaacagaggtggccgagctggaacaagaggtgcagcggctggaaaacgaggtgtcccagtacgagacaagatacggccctctcggaggcggaaaaggatccggcggcggaggatctggcggaggcggatctgggggcggaggctctttcgaacaggttcagctcaaagaatctggccccgtgctggtggccccaagccagacactgtctatcacctgtaccgtgtccggcttcagcctggcctcctacaacatccactgggtccgacagcctccaggcaaaggactggaatggctgggagtgatttgggctggcggcagcaccaactacaacagcgcactgatgagccggctgagcatcagcaaggacaacagcaagagccaggtgttcctccagatgaactccctccagaccgacgacaccgccatgtactactgcgccaagagaagcgacgactacagttggttcgcctactggggccagggcacactggttactgtgtctgcttctacgcgtatccagaaccctgatcctgccgtgtaccagctgcgggatagcaagagcagcgacaagagcgtgtgtctgttcaccgacttcgacagccagaccaacgtgtcccagagcaaggactccgacgtgtacatcaccgataagtgcgtgctggacatgcggagcatggacttcaagagcaactccgccgtggcctggtccaacaagtccgatttcgcctgcgccaacgccttcaacaacagcattatccccgaggacacattcttcccaagccccgagagcagctgcggctttaccagcgagagctaccagcagggcgtgctgagcgccaccatcctgtacgagatcctgctgggcaaggccaccctgtacgccgtgctggtgtctgccctggtgctgatggctatggtcaagcggaaggacagccgggga

SEQ ID NO: 35799 - DNA, 2085 bp, synthetic construct
  source 1..2085: mol_type = other DNA
atggccttaccagtgaccgccttgctcctgccgctggccttgctgctccacgccgccaggccggagaacgtgctgacacagagccctgccatcatgagtgcctctccaggcgagaaagtgaccatgacctgtagagccagcagcagcgtgtccagcagctacctgcactggtatcagcagaagtccggcgcaagccccaaagtgtggatctacagcaccagcaatctggcctctggcgtgccaggcagattttctggctctggcagcggcacaagctacagcctgacaatcagctccgtggaagccgaagatgccgccacctactactgccagcagtacagcggctaccccatcacatttggagccggcaccaaggtggaagtgaagagactcgagatccagaaccctgatcctgccgtgtaccagctgcgggatagcaagagcagcgacaagagcgtgtgtctgttcaccgacttcgacagccagaccaacgtgtcccagagcaaggactccgacgtgtacatcaccgataagtgcgtgctggacatgcggagcatggacttcaagagcaactccgccgtggcctggtccaacaagtccgatttcgcctgcgccaacgccttcaacaacagcattatccccgaggacacattcttcccaagccccgagagcagctgcggctttaccagcgagagctaccagcagggcgtgctgagcgccaccatcctgtacgagatcctgctgggcaaggccaccctgtacgccgtgctggtgtctgccctggtgctgatggctatggtcaagcggaaggacagccggggacgcgccaagagaagcggatctggcgtgaagcagaccctgaatttcgacctgctgaagctggctggcgacgtggaatccaacccaggccctactagtatggactggatttggcgcatccttttccttgtcggcgctgctaccggcgcccattccgggcccatggaccccgacctggaaatcagagccgccttcctgcggcagagaaacacagccctgagaacagaggtggccgagctggaacaagaggtgcagcggctggaaaacgaggtgtcccagtacgagacaagatacggccctctcggaggcggaaaaggatccggcggcggaggatctggcggaggcggatctgggggcggaggctctttcgaacaggttcagctcaaagaatctggccccgtgctggtggccccaagccagacactgtctatcacctgtaccgtgtccggcttcagcctggcctcctacaacatccactgggtccgacagcctccaggcaaaggactggaatggctgggagtgatttgggctggcggcagcaccaactacaacagcgcactgatgagccggctgagcatcagcaaggacaacagcaagagccaggtgttcctccagatgaactccctccagaccgacgacaccgccatgtactactgcgccaagagaagcgacgactacagttggttcgcctactggggccagggcacactggttactgtgtctgcttctacgcgtgaggacctgaagaacgtgttcccacctgaggtggccgtgttcgagcctagcgaggccgagatcagccacacccagaaagccaccctcgtgtgcctggctaccggcttctaccccgaccatgtggaactgtcttggtgggtcaacggcaaagaggtgcacagcggcgtgtgtaccgacccccagccactgaaagaacagcccgccctgaacgacagccggtactgcctgagcagcagactgagagtgtccgccaccttctggcagaacccccggaaccacttcagatgccaggtgcagttctacggcctgagcgagaacgacgagtggacccaggacagagccaagcccgtgacccagatcgtgtctgccgaagcctggggcagagccgattgcgacgtgaagctggtggaaaagagcttcgagacagacaccaacctgaacttccagaacctgagcgtgatcggcttcagaatcctgctgctgaaagtggccggctttaacctgctgatgaccctgcggctgtggtccagc

SEQ ID NO: 35800 - DNA, 2004 bp, synthetic construct
  source 1..2004: mol_type = other DNA
atggccttaccagtgaccgccttgctcctgccgctggccttgctgctccacgccgccaggccggagaacgtgctgacacagagccctgccatcatgagtgcctctccaggcgagaaagtgaccatgacctgtagagccagcagcagcgtgtccagcagctacctgcactggtatcagcagaagtccggcgcaagccccaaagtgtggatctacagcaccagcaatctggcctctggcgtgccaggcagattttctggctctggcagcggcacaagctacagcctgacaatcagctccgtggaagccgaagatgccgccacctactactgccagcagtacagcggctaccccatcacatttggagccggcaccaaggtggaagtgaagagactcgaggacctgaagaacgtgttcccacctgaggtggccgtgttcgagcctagcgaggccgagatcagccacacccagaaagccaccctcgtgtgcctggctaccggcttctaccccgaccatgtggaactgtcttggtgggtcaacggcaaagaggtgcacagcggcgtgtgtaccgacccccagccactgaaagaacagcccgccctgaacgacagccggtactgcctgagcagcagactgagagtgtccgccaccttctggcagaacccccggaaccacttcagatgccaggtgcagttctacggcctgagcgagaacgacgagtggacccaggacagagccaagcccgtgacccagatcgtgtctgccgaagcctggggcagagccgattgcgacgtgaagctggtggaaaagagcttcgagacagacaccaacctgaacttccagaacctgagcgtgatcggcttcagaatcctgctgctgaaagtggccggctttaacctgctgatgaccctgcggctgtggtccagcagggccaagcgatctggatctggagcaacaaacttctcactactcaaacaagcaggtgacgtggaggagaatcccgggcctactagtatggactggatttggcgcatccttttccttgtcggcgctgctaccggcgcccattccgggcccgaagttgctgccctcgagaaggaggtagcagctttggaaaaagaagtcgcagcccttgagaaagaagttgcggctctggagaagggatccggcggcggaggatctggcggaggcggatctgggggcggaggctctttcgaacaggttcagctcaaagaatctggccccgtgctggtggccccaagccagacactgtctatcacctgtaccgtgtccggcttcagcctggcctcctacaacatccactgggtccgacagcctccaggcaaaggactggaatggctgggagtgatttgggctggcggcagcaccaactacaacagcgcactgatgagccggctgagcatcagcaaggacaacagcaagagccaggtgttcctccagatgaactccctccagaccgacgacaccgccatgtactactgcgccaagagaagcgacgactacagttggttcgcctactggggccagggcacactggttactgtgtctgcttctacgcgtatccagaaccctgatcctgccgtgtaccagctgcgggatagcaagagcagcgacaagagcgtgtgtctgttcaccgacttcgacagccagaccaacgtgtcccagagcaaggactccgacgtgtacatcaccgataagtgcgtgctggacatgcggagcatggacttcaagagcaactccgccgtggcctggtccaacaagtccgatttcgcctgcgccaacgccttcaacaacagcattatccccgaggacacattcttcccaagccccgagagcagctgcggctttaccagcgagagctaccagcagggcgtgctgagcgccaccatcctgtacgagatcctgctgggcaaggccaccctgtacgccgtgctggtgtctgccctggtgctgatggctatggtcaagcggaaggacagccgggga

SEQ ID NO: 35801 - DNA, 2016 bp, synthetic construct
  source 1..2016: mol_type = other DNA
atggccttaccagtgaccgccttgctcctgccgctggccttgctgctccacgccgccaggccggagaacgtgctgacacagagccctgccatcatgagtgcctctccaggcgagaaagtgaccatgacctgtagagccagcagcagcgtgtccagcagctacctgcactggtatcagcagaagtccggcgcaagccccaaagtgtggatctacagcaccagcaatctggcctctggcgtgccaggcagattttctggctctggcagcggcacaagctacagcctgacaatcagctccgtggaagccgaagatgccgccacctactactgccagcagtacagcggctaccccatcacatttggagccggcaccaaggtggaagtgaagagactcgagatccagaaccctgatcctgccgtgtaccagctgcgggatagcaagagcagcgacaagagcgtgtgtctgttcaccgacttcgacagccagaccaacgtgtcccagagcaaggactccgacgtgtacatcaccgataagtgcgtgctggacatgcggagcatggacttcaagagcaactccgccgtggcctggtccaacaagtccgatttcgcctgcgccaacgccttcaacaacagcattatccccgaggacacattcttcccaagccccgagagcagctgcggctttaccagcgagagctaccagcagggcgtgctgagcgccaccatcctgtacgagatcctgctgggcaaggccaccctgtacgccgtgctggtgtctgccctggtgctgatggctatggtcaagcggaaggacagccggggacgcgccaagagaagcggatctggcgtgaagcagaccctgaatttcgacctgctgaagctggctggcgacgtggaatccaacccaggccctactagtatggactggatttggcgcatccttttccttgtcggcgctgctaccggcgcccattccgggcccgaagttgctgccctcgagaaggaggtagcagctttggaaaaagaagtcgcagcccttgagaaagaagttgcggctctggagaagggatccggcggcggaggatctggcggaggcggatctgggggcggaggctctttcgaacaggttcagctcaaagaatctggccccgtgctggtggccccaagccagacactgtctatcacctgtaccgtgtccggcttcagcctggcctcctacaacatccactgggtccgacagcctccaggcaaaggactggaatggctgggagtgatttgggctggcggcagcaccaactacaacagcgcactgatgagccggctgagcatcagcaaggacaacagcaagagccaggtgttcctccagatgaactccctccagaccgacgacaccgccatgtactactgcgccaagagaagcgacgactacagttggttcgcctactggggccagggcacactggttactgtgtctgcttctacgcgtgaggacctgaagaacgtgttcccacctgaggtggccgtgttcgagcctagcgaggccgagatcagccacacccagaaagccaccctcgtgtgcctggctaccggcttctaccccgaccatgtggaactgtcttggtgggtcaacggcaaagaggtgcacagcggcgtgtgtaccgacccccagccactgaaagaacagcccgccctgaacgacagccggtactgcctgagcagcagactgagagtgtccgccaccttctggcagaacccccggaaccacttcagatgccaggtgcagttctacggcctgagcgagaacgacgagtggacccaggacagagccaagcccgtgacccagatcgtgtctgccgaagcctggggcagagccgattgcgacgtgaagctggtggaaaagagcttcgagacagacaccaacctgaacttccagaacctgagcgtgatcggcttcagaatcctgctgctgaaagtggccggctttaacctgctgatgaccctgcggctgtggtccagc

SEQ ID NO: 35802 - DNA, 2274 bp, synthetic construct
  source 1..2274: mol_type = other DNA
atggccttaccagtgaccgccttgctcctgccgctggccttgctgctccacgccgccaggccggagaacgtgctgacacagagccctgccatcatgagtgcctctccaggcgagaaagtgaccatgacctgtagagccagcagcagcgtgtccagcagctacctgcactggtatcagcagaagtccggcgcaagccccaaagtgtggatctacagcaccagcaatctggcctctggcgtgccaggcagattttctggctctggcagcggcacaagctacagcctgacaatcagctccgtggaagccgaagatgccgccacctactactgccagcagtacagcggctaccccatcacatttggagccggcaccaaggtggaagtgaagagactcgaggacctgaagaacgtgttcccacctgaggtggccgtgttcgagcctagcgaggccgagatcagccacacccagaaagccaccctcgtgtgcctggctaccggcttctaccccgaccatgtggaactgtcttggtgggtcaacggcaaagaggtgcacagcggcgtgtgtaccgacccccagccactgaaagaacagcccgccctgaacgacagccggtactgcctgagcagcagactgagagtgtccgccaccttctggcagaacccccggaaccacttcagatgccaggtgcagttctacggcctgagcgagaacgacgagtggacccaggacagagccaagcccgtgacccagatcgtgtctgccgaagcctggggcagagccgattgcgacgtgaagctggtggaaaagagcttcgagacagacaccaacctgaacttccagaacctgagcgtgatcggcttcagaatcctgctgctgaaagtggccggctttaacctgctgatgaccctgcggctgtggtccagcagggccaagcgatctggatctggagcaacaaacttctcactactcaaacaagcaggtgacgtggaggagaatcccgggcctactagtatggactggatttggcgcatccttttccttgtcggcgctgctaccggcgcccattccgggccccaggttcagctgcaagagtctggcggaggacttgctcaagctggcggaagcctgagactgtcttgtgccgcctctggcagaaccttcagcatgggctggtttagacaggcccctggcaaagagagagagttcgtcgccgccatcacatacagcggcggcagcccttactacgcctcttctgtcagaggccggttcaccatcagccgggacaacgccaagaacaccgtgtacctccagatgaacagcctgaagccagaggacaccgccgtgtactactgtgccgccaatccaacctacggcagcgactggaatgccgagaattggggccagggcacccaagtgacagtgtctagtggatccggcggcggaggatctggcggaggcggatctgggggcggaggctctttcgaacaggttcagctcaaagaatctggccccgtgctggtggccccaagccagacactgtctatcacctgtaccgtgtccggcttcagcctggcctcctacaacatccactgggtccgacagcctccaggcaaaggactggaatggctgggagtgatttgggctggcggcagcaccaactacaacagcgcactgatgagccggctgagcatcagcaaggacaacagcaagagccaggtgttcctccagatgaactccctccagaccgacgacaccgccatgtactactgcgccaagagaagcgacgactacagttggttcgcctactggggccagggcacactggttactgtgtctgcttctacgcgtatccagaaccctgatcctgccgtgtaccagctgcgggatagcaagagcagcgacaagagcgtgtgtctgttcaccgacttcgacagccagaccaacgtgtcccagagcaaggactccgacgtgtacatcaccgataagtgcgtgctggacatgcggagcatggacttcaagagcaactccgccgtggcctggtccaacaagtccgatttcgcctgcgccaacgccttcaacaacagcattatccccgaggacacattcttcccaagccccgagagcagctgcggctttaccagcgagagctaccagcagggcgtgctgagcgccaccatcctgtacgagatcctgctgggcaaggccaccctgtacgccgtgctggtgtctgccctggtgctgatggctatggtcaagcggaaggacagccgggga

SEQ ID NO: 35803 - DNA, 2286 bp, synthetic construct
  source 1..2286: mol_type = other DNA
atggccttaccagtgaccgccttgctcctgccgctggccttgctgctccacgccgccaggccggagaacgtgctgacacagagccctgccatcatgagtgcctctccaggcgagaaagtgaccatgacctgtagagccagcagcagcgtgtccagcagctacctgcactggtatcagcagaagtccggcgcaagccccaaagtgtggatctacagcaccagcaatctggcctctggcgtgccaggcagattttctggctctggcagcggcacaagctacagcctgacaatcagctccgtggaagccgaagatgccgccacctactactgccagcagtacagcggctaccccatcacatttggagccggcaccaaggtggaagtgaagagactcgagatccagaaccctgatcctgccgtgtaccagctgcgggatagcaagagcagcgacaagagcgtgtgtctgttcaccgacttcgacagccagaccaacgtgtcccagagcaaggactccgacgtgtacatcaccgataagtgcgtgctggacatgcggagcatggacttcaagagcaactccgccgtggcctggtccaacaagtccgatttcgcctgcgccaacgccttcaacaacagcattatccccgaggacacattcttcccaagccccgagagcagctgcggctttaccagcgagagctaccagcagggcgtgctgagcgccaccatcctgtacgagatcctgctgggcaaggccaccctgtacgccgtgctggtgtctgccctggtgctgatggctatggtcaagcggaaggacagccggggacgcgccaagagaagcggatctggcgtgaagcagaccctgaatttcgacctgctgaagctggctggcgacgtggaatccaacccaggccctactagtatggactggatttggcgcatccttttccttgtcggcgctgctaccggcgcccattccgggccccaggttcagctgcaagagtctggcggaggacttgctcaagctggcggaagcctgagactgtcttgtgccgcctctggcagaaccttcagcatgggctggtttagacaggcccctggcaaagagagagagttcgtcgccgccatcacatacagcggcggcagcccttactacgcctcttctgtcagaggccggttcaccatcagccgggacaacgccaagaacaccgtgtacctccagatgaacagcctgaagccagaggacaccgccgtgtactactgtgccgccaatccaacctacggcagcgactggaatgccgagaattggggccagggcacccaagtgacagtgtctagtggatccggcggcggaggatctggcggaggcggatctgggggcggaggctctttcgaacaggttcagctcaaagaatctggccccgtgctggtggccccaagccagacactgtctatcacctgtaccgtgtccggcttcagcctggcctcctacaacatccactgggtccgacagcctccaggcaaaggactggaatggctgggagtgatttgggctggcggcagcaccaactacaacagcgcactgatgagccggctgagcatcagcaaggacaacagcaagagccaggtgttcctccagatgaactccctccagaccgacgacaccgccatgtactactgcgccaagagaagcgacgactacagttggttcgcctactggggccagggcacactggttactgtgtctgcttctacgcgtgaggacctgaagaacgtgttcccacctgaggtggccgtgttcgagcctagcgaggccgagatcagccacacccagaaagccaccctcgtgtgcctggctaccggcttctaccccgaccatgtggaactgtcttggtgggtcaacggcaaagaggtgcacagcggcgtgtgtaccgacccccagccactgaaagaacagcccgccctgaacgacagccggtactgcctgagcagcagactgagagtgtccgccaccttctggcagaacccccggaaccacttcagatgccaggtgcagttctacggcctgagcgagaacgacgagtggacccaggacagagccaagcccgtgacccagatcgtgtctgccgaagcctggggcagagccgattgcgacgtgaagctggtggaaaagagcttcgagacagacaccaacctgaacttccagaacctgagcgtgatcggcttcagaatcctgctgctgaaagtggccggctttaacctgctgatgaccctgcggctgtggtccagc

SEQ ID NO: 35804 - DNA, 2292 bp, synthetic construct
  source 1..2292: mol_type = other DNA
atggccttaccagtgaccgccttgctcctgccgctggccttgctgctccacgccgccaggccggaagtgcaactggtggaatctggaggctctctggtgcagccagggggaagcctgagactgtcttgtgccgcttccggcttcaccttcgacgactacgccatgagctgggtgcgccaggtgccaggcaaaggcctggaatgggtgtccagcatcaactggagcggcacccacaccgattacgccgactccgtgaaaggcagattcacaatcagcagaaacaacgccaacaataccctgtacctgcagatgaactccctgaagtctgaggatacagcagtgtattattgcgccaagaactggcgggacgccggcaccacttggtttgagaaaagcggctctgccggacagggaacccaagtgacagtgtcctccggtaccggcggaggcggatctggcggcggaggtagcggtggcggaggatctgaattcgagaacgtgctgacacagagccctgccatcatgagtgcctctccaggcgagaaagtgaccatgacctgtagagccagcagcagcgtgtccagcagctacctgcactggtatcagcagaagtccggcgcaagccccaaagtgtggatctacagcaccagcaatctggcctctggcgtgccaggcagattttctggctctggcagcggcacaagctacagcctgacaatcagctccgtggaagccgaagatgccgccacctactactgccagcagtacagcggctaccccatcacatttggagccggcaccaaggtggaagtgaagagactcgaggacctgaagaacgtgttcccacctgaggtggccgtgttcgagcctagcgaggccgagatcagccacacccagaaagccaccctcgtgtgcctggctaccggcttctaccccgaccatgtggaactgtcttggtgggtcaacggcaaagaggtgcacagcggcgtgtgtaccgacccccagccactgaaagaacagcccgccctgaacgacagccggtactgcctgagcagcagactgagagtgtccgccaccttctggcagaacccccggaaccacttcagatgccaggtgcagttctacggcctgagcgagaacgacgagtggacccaggacagagccaagcccgtgacccagatcgtgtctgccgaagcctggggcagagccgattgcgacgtgaagctggtggaaaagagcttcgagacagacaccaacctgaacttccagaacctgagcgtgatcggcttcagaatcctgctgctgaaagtggccggctttaacctgctgatgaccctgcggctgtggtccagcagggccaagcgatctggatctggagcaacaaacttctcactactcaaacaagcaggtgacgtggaggagaatcccgggcctactagtatggactggatttggcgcatccttttccttgtcggcgctgctaccggcgcgcattccttcgaacaggttcagctcaaagaatctggccccgtgctggtggccccaagccagacactgtctatcacctgtaccgtgtccggcttcagcctggcctcctacaacatccactgggtccgacagcctccaggcaaaggactggaatggctgggagtgatttgggctggcggcagcaccaactacaacagcgcactgatgagccggctgagcatcagcaaggacaacagcaagagccaggtgttcctccagatgaactccctccagaccgacgacaccgccatgtactactgcgccaagagaagcgacgactacagttggttcgcctactggggccagggcacactggttactgtgtctgcttctacgcgtatccagaaccctgatcctgccgtgtaccagctgcgggatagcaagagcagcgacaagagcgtgtgtctgttcaccgacttcgacagccagaccaacgtgtcccagagcaaggactccgacgtgtacatcaccgataagtgcgtgctggacatgcggagcatggacttcaagagcaactccgccgtggcctggtccaacaagtccgatttcgcctgcgccaacgccttcaacaacagcattatccccgaggacacattcttcccaagccccgagagcagctgcggctttaccagcgagagctaccagcagggcgtgctgagcgccaccatcctgtacgagatcctgctgggcaaggccaccctgtacgccgtgctggtgtctgccctggtgctgatggctatggtcaagcggaaggacagccgggga

SEQ ID NO: 35805 - DNA, 2304 bp, synthetic construct
  source 1..2304: mol_type = other DNA
atggccttaccagtgaccgccttgctcctgccgctggccttgctgctccacgccgccaggccggaagtgcaactggtggaatctggaggctctctggtgcagccagggggaagcctgagactgtcttgtgccgcttccggcttcaccttcgacgactacgccatgagctgggtgcgccaggtgccaggcaaaggcctggaatgggtgtccagcatcaactggagcggcacccacaccgattacgccgactccgtgaaaggcagattcacaatcagcagaaacaacgccaacaataccctgtacctgcagatgaactccctgaagtctgaggatacagcagtgtattattgcgccaagaactggcgggacgccggcaccacttggtttgagaaaagcggctctgccggacagggaacccaagtgacagtgtcctccggtaccggcggaggcggatctggcggcggaggtagcggtggcggaggatctgaattcgagaacgtgctgacacagagccctgccatcatgagtgcctctccaggcgagaaagtgaccatgacctgtagagccagcagcagcgtgtccagcagctacctgcactggtatcagcagaagtccggcgcaagccccaaagtgtggatctacagcaccagcaatctggcctctggcgtgccaggcagattttctggctctggcagcggcacaagctacagcctgacaatcagctccgtggaagccgaagatgccgccacctactactgccagcagtacagcggctaccccatcacatttggagccggcaccaaggtggaagtgaagagactcgagatccagaaccctgatcctgccgtgtaccagctgcgggatagcaagagcagcgacaagagcgtgtgtctgttcaccgacttcgacagccagaccaacgtgtcccagagcaaggactccgacgtgtacatcaccgataagtgcgtgctggacatgcggagcatggacttcaagagcaactccgccgtggcctggtccaacaagtccgatttcgcctgcgccaacgccttcaacaacagcattatccccgaggacacattcttcccaagccccgagagcagctgcggctttaccagcgagagctaccagcagggcgtgctgagcgccaccatcctgtacgagatcctgctgggcaaggccaccctgtacgccgtgctggtgtctgccctggtgctgatggctatggtcaagcggaaggacagccggggacgcgccaagagaagcggatctggcgtgaagcagaccctgaatttcgacctgctgaagctggctggcgacgtggaatccaacccaggccctactagtatggactggatttggcgcatccttttccttgtcggcgctgctaccggcgcgcattccttcgaacaggttcagctcaaagaatctggccccgtgctggtggccccaagccagacactgtctatcacctgtaccgtgtccggcttcagcctggcctcctacaacatccactgggtccgacagcctccaggcaaaggactggaatggctgggagtgatttgggctggcggcagcaccaactacaacagcgcactgatgagccggctgagcatcagcaaggacaacagcaagagccaggtgttcctccagatgaactccctccagaccgacgacaccgccatgtactactgcgccaagagaagcgacgactacagttggttcgcctactggggccagggcacactggttactgtgtctgcttctacgcgtgaggacctgaagaacgtgttcccacctgaggtggccgtgttcgagcctagcgaggccgagatcagccacacccagaaagccaccctcgtgtgcctggctaccggcttctaccccgaccatgtggaactgtcttggtgggtcaacggcaaagaggtgcacagcggcgtgtgtaccgacccccagccactgaaagaacagcccgccctgaacgacagccggtactgcctgagcagcagactgagagtgtccgccaccttctggcagaacccccggaaccacttcagatgccaggtgcagttctacggcctgagcgagaacgacgagtggacccaggacagagccaagcccgtgacccagatcgtgtctgccgaagcctggggcagagccgattgcgacgtgaagctggtggaaaagagcttcgagacagacaccaacctgaacttccagaacctgagcgtgatcggcttcagaatcctgctgctgaaagtggccggctttaacctgctgatgaccctgcggctgtggtccagc

SEQ ID NO: 35806 - DNA, 2286 bp, synthetic construct
  source 1..2286: mol_type = other DNA
atggccttaccagtgaccgccttgctcctgccgctggccttgctgctccacgccgccaggccggaagttcagctgcttgagtctggcggaggactggttcaacctggcggaagcctgagactgtcttgtgccgccagcggcttcatcttcagcagctacgccatgagctgggtccgacaggctcctggaaagggccaagaatgggtttccggcgttagcggcacaggcgtgaacacctactacgccgatagcgtgaagggcagattcaccatcagccgggacaacagcaagaacaccctgtacctccagatgaacagcctgagagccgaggacaccgccgtgtactattgtgcctctggcaaaggctgggacagcggctcttggtacgaggactatagaggccagggcaccctggtcacagtttcttcaggtaccggcggaggcggatctggcggcggaggtagcggtggcggaggatctgaattcgagaacgtgctgacacagagccctgccatcatgagtgcctctccaggcgagaaagtgaccatgacctgtagagccagcagcagcgtgtccagcagctacctgcactggtatcagcagaagtccggcgcaagccccaaagtgtggatctacagcaccagcaatctggcctctggcgtgccaggcagattttctggctctggcagcggcacaagctacagcctgacaatcagctccgtggaagccgaagatgccgccacctactactgccagcagtacagcggctaccccatcacatttggagccggcaccaaggtggaagtgaagagactcgaggacctgaagaacgtgttcccacctgaggtggccgtgttcgagcctagcgaggccgagatcagccacacccagaaagccaccctcgtgtgcctggctaccggcttctaccccgaccatgtggaactgtcttggtgggtcaacggcaaagaggtgcacagcggcgtgtgtaccgacccccagccactgaaagaacagcccgccctgaacgacagccggtactgcctgagcagcagactgagagtgtccgccaccttctggcagaacccccggaaccacttcagatgccaggtgcagttctacggcctgagcgagaacgacgagtggacccaggacagagccaagcccgtgacccagatcgtgtctgccgaagcctggggcagagccgattgcgacgtgaagctggtggaaaagagcttcgagacagacaccaacctgaacttccagaacctgagcgtgatcggcttcagaatcctgctgctgaaagtggccggctttaacctgctgatgaccctgcggctgtggtccagcagggccaagcgatctggatctggagcaacaaacttctcactactcaaacaagcaggtgacgtggaggagaatcccgggcctactagtatggactggatttggcgcatccttttccttgtcggcgctgctaccggcgcgcattccttcgaacaggttcagctcaaagaatctggccccgtgctggtggccccaagccagacactgtctatcacctgtaccgtgtccggcttcagcctggcctcctacaacatccactgggtccgacagcctccaggcaaaggactggaatggctgggagtgatttgggctggcggcagcaccaactacaacagcgcactgatgagccggctgagcatcagcaaggacaacagcaagagccaggtgttcctccagatgaactccctccagaccgacgacaccgccatgtactactgcgccaagagaagcgacgactacagttggttcgcctactggggccagggcacactggttactgtgtctgcttctacgcgtatccagaaccctgatcctgccgtgtaccagctgcgggatagcaagagcagcgacaagagcgtgtgtctgttcaccgacttcgacagccagaccaacgtgtcccagagcaaggactccgacgtgtacatcaccgataagtgcgtgctggacatgcggagcatggacttcaagagcaactccgccgtggcctggtccaacaagtccgatttcgcctgcgccaacgccttcaacaacagcattatccccgaggacacattcttcccaagccccgagagcagctgcggctttaccagcgagagctaccagcagggcgtgctgagcgccaccatcctgtacgagatcctgctgggcaaggccaccctgtacgccgtgctggtgtctgccctggtgctgatggctatggtcaagcggaaggacagccgggga

SEQ ID NO: 35807 - DNA, 2298 bp, synthetic construct
  source 1..2298: mol_type = other DNA
atggccttaccagtgaccgccttgctcctgccgctggccttgctgctccacgccgccaggccggaagttcagctgcttgagtctggcggaggactggttcaacctggcggaagcctgagactgtcttgtgccgccagcggcttcatcttcagcagctacgccatgagctgggtccgacaggctcctggaaagggccaagaatgggtttccggcgttagcggcacaggcgtgaacacctactacgccgatagcgtgaagggcagattcaccatcagccgggacaacagcaagaacaccctgtacctccagatgaacagcctgagagccgaggacaccgccgtgtactattgtgcctctggcaaaggctgggacagcggctcttggtacgaggactatagaggccagggcaccctggtcacagtttcttcaggtaccggcggaggcggatctggcggcggaggtagcggtggcggaggatctgaattcgagaacgtgctgacacagagccctgccatcatgagtgcctctccaggcgagaaagtgaccatgacctgtagagccagcagcagcgtgtccagcagctacctgcactggtatcagcagaagtccggcgcaagccccaaagtgtggatctacagcaccagcaatctggcctctggcgtgccaggcagattttctggctctggcagcggcacaagctacagcctgacaatcagctccgtggaagccgaagatgccgccacctactactgccagcagtacagcggctaccccatcacatttggagccggcaccaaggtggaagtgaagagactcgagatccagaaccctgatcctgccgtgtaccagctgcgggatagcaagagcagcgacaagagcgtgtgtctgttcaccgacttcgacagccagaccaacgtgtcccagagcaaggactccgacgtgtacatcaccgataagtgcgtgctggacatgcggagcatggacttcaagagcaactccgccgtggcctggtccaacaagtccgatttcgcctgcgccaacgccttcaacaacagcattatccccgaggacacattcttcccaagccccgagagcagctgcggctttaccagcgagagctaccagcagggcgtgctgagcgccaccatcctgtacgagatcctgctgggcaaggccaccctgtacgccgtgctggtgtctgccctggtgctgatggctatggtcaagcggaaggacagccggggacgcgccaagagaagcggatctggcgtgaagcagaccctgaatttcgacctgctgaagctggctggcgacgtggaatccaacccaggccctactagtatggactggatttggcgcatccttttccttgtcggcgctgctaccggcgcgcattccttcgaacaggttcagctcaaagaatctggccccgtgctggtggccccaagccagacactgtctatcacctgtaccgtgtccggcttcagcctggcctcctacaacatccactgggtccgacagcctccaggcaaaggactggaatggctgggagtgatttgggctggcggcagcaccaactacaacagcgcactgatgagccggctgagcatcagcaaggacaacagcaagagccaggtgttcctccagatgaactccctccagaccgacgacaccgccatgtactactgcgccaagagaagcgacgactacagttggttcgcctactggggccagggcacactggttactgtgtctgcttctacgcgtgaggacctgaagaacgtgttcccacctgaggtggccgtgttcgagcctagcgaggccgagatcagccacacccagaaagccaccctcgtgtgcctggctaccggcttctaccccgaccatgtggaactgtcttggtgggtcaacggcaaagaggtgcacagcggcgtgtgtaccgacccccagccactgaaagaacagcccgccctgaacgacagccggtactgcctgagcagcagactgagagtgtccgccaccttctggcagaacccccggaaccacttcagatgccaggtgcagttctacggcctgagcgagaacgacgagtggacccaggacagagccaagcccgtgacccagatcgtgtctgccgaagcctggggcagagccgattgcgacgtgaagctggtggaaaagagcttcgagacagacaccaacctgaacttccagaacctgagcgtgatcggcttcagaatcctgctgctgaaagtggccggctttaacctgctgatgaccctgcggctgtggtccagc

SEQ ID NO: 35808 - DNA, 2190 bp, synthetic construct
  source 1..2190: mol_type = other DNA
atggccttaccagtgaccgccttgctcctgccgctggccttgctgctccacgccgccaggccgatgctgcccgctcctaagaatctggtggtgtccagaatcaccgaggacagcgccagactgtcttggacagctcctgatgccgccttcgacagcttccccatccggtacatcgagacactgatctggggcgaagccatctggctggatgtgcctggaagcgagagaagctacgacctgaccggactgaagcctggcacagagtatgccgtggtcatcaccggcgtgaaaggcggcagattctctagccctctggtggcctctttcaccaccggtaccggcggaggcggatctggcggcggaggtagcggtggcggaggatctgaattcgagaacgtgctgacacagagccctgccatcatgagtgcctctccaggcgagaaagtgaccatgacctgtagagccagcagcagcgtgtccagcagctacctgcactggtatcagcagaagtccggcgcaagccccaaagtgtggatctacagcaccagcaatctggcctctggcgtgccaggcagattttctggctctggcagcggcacaagctacagcctgacaatcagctccgtggaagccgaagatgccgccacctactactgccagcagtacagcggctaccccatcacatttggagccggcaccaaggtggaagtgaagagactcgaggacctgaagaacgtgttcccacctgaggtggccgtgttcgagcctagcgaggccgagatcagccacacccagaaagccaccctcgtgtgcctggctaccggcttctaccccgaccatgtggaactgtcttggtgggtcaacggcaaagaggtgcacagcggcgtgtgtaccgacccccagccactgaaagaacagcccgccctgaacgacagccggtactgcctgagcagcagactgagagtgtccgccaccttctggcagaacccccggaaccacttcagatgccaggtgcagttctacggcctgagcgagaacgacgagtggacccaggacagagccaagcccgtgacccagatcgtgtctgccgaagcctggggcagagccgattgcgacgtgaagctggtggaaaagagcttcgagacagacaccaacctgaacttccagaacctgagcgtgatcggcttcagaatcctgctgctgaaagtggccggctttaacctgctgatgaccctgcggctgtggtccagcagggccaagcgatctggatctggagcaacaaacttctcactactcaaacaagcaggtgacgtggaggagaatcccgggcctactagtatggactggatttggcgcatccttttccttgtcggcgctgctaccggcgcgcattccttcgaacaggttcagctcaaagaatctggccccgtgctggtggccccaagccagacactgtctatcacctgtaccgtgtccggcttcagcctggcctcctacaacatccactgggtccgacagcctccaggcaaaggactggaatggctgggagtgatttgggctggcggcagcaccaactacaacagcgcactgatgagccggctgagcatcagcaaggacaacagcaagagccaggtgttcctccagatgaactccctccagaccgacgacaccgccatgtactactgcgccaagagaagcgacgactacagttggttcgcctactggggccagggcacactggttactgtgtctgcttctacgcgtatccagaaccctgatcctgccgtgtaccagctgcgggatagcaagagcagcgacaagagcgtgtgtctgttcaccgacttcgacagccagaccaacgtgtcccagagcaaggactccgacgtgtacatcaccgataagtgcgtgctggacatgcggagcatggacttcaagagcaactccgccgtggcctggtccaacaagtccgatttcgcctgcgccaacgccttcaacaacagcattatccccgaggacacattcttcccaagccccgagagcagctgcggctttaccagcgagagctaccagcagggcgtgctgagcgccaccatcctgtacgagatcctgctgggcaaggccaccctgtacgccgtgctggtgtctgccctggtgctgatggctatggtcaagcggaaggacagccgggga

SEQ ID NO: 35809 - DNA, 2202 bp, synthetic construct
  source 1..2202: mol_type = other DNA
atggccttaccagtgaccgccttgctcctgccgctggccttgctgctccacgccgccaggccgatgctgcccgctcctaagaatctggtggtgtccagaatcaccgaggacagcgccagactgtcttggacagctcctgatgccgccttcgacagcttccccatccggtacatcgagacactgatctggggcgaagccatctggctggatgtgcctggaagcgagagaagctacgacctgaccggactgaagcctggcacagagtatgccgtggtcatcaccggcgtgaaaggcggcagattctctagccctctggtggcctctttcaccaccggtaccggcggaggcggatctggcggcggaggtagcggtggcggaggatctgaattcgagaacgtgctgacacagagccctgccatcatgagtgcctctccaggcgagaaagtgaccatgacctgtagagccagcagcagcgtgtccagcagctacctgcactggtatcagcagaagtccggcgcaagccccaaagtgtggatctacagcaccagcaatctggcctctggcgtgccaggcagattttctggctctggcagcggcacaagctacagcctgacaatcagctccgtggaagccgaagatgccgccacctactactgccagcagtacagcggctaccccatcacatttggagccggcaccaaggtggaagtgaagagactcgagatccagaaccctgatcctgccgtgtaccagctgcgggatagcaagagcagcgacaagagcgtgtgtctgttcaccgacttcgacagccagaccaacgtgtcccagagcaaggactccgacgtgtacatcaccgataagtgcgtgctggacatgcggagcatggacttcaagagcaactccgccgtggcctggtccaacaagtccgatttcgcctgcgccaacgccttcaacaacagcattatccccgaggacacattcttcccaagccccgagagcagctgcggctttaccagcgagagctaccagcagggcgtgctgagcgccaccatcctgtacgagatcctgctgggcaaggccaccctgtacgccgtgctggtgtctgccctggtgctgatggctatggtcaagcggaaggacagccggggacgcgccaagagaagcggatctggcgtgaagcagaccctgaatttcgacctgctgaagctggctggcgacgtggaatccaacccaggccctactagtatggactggatttggcgcatccttttccttgtcggcgctgctaccggcgcgcattccttcgaacaggttcagctcaaagaatctggccccgtgctggtggccccaagccagacactgtctatcacctgtaccgtgtccggcttcagcctggcctcctacaacatccactgggtccgacagcctccaggcaaaggactggaatggctgggagtgatttgggctggcggcagcaccaactacaacagcgcactgatgagccggctgagcatcagcaaggacaacagcaagagccaggtgttcctccagatgaactccctccagaccgacgacaccgccatgtactactgcgccaagagaagcgacgactacagttggttcgcctactggggccagggcacactggttactgtgtctgcttctacgcgtgaggacctgaagaacgtgttcccacctgaggtggccgtgttcgagcctagcgaggccgagatcagccacacccagaaagccaccctcgtgtgcctggctaccggcttctaccccgaccatgtggaactgtcttggtgggtcaacggcaaagaggtgcacagcggcgtgtgtaccgacccccagccactgaaagaacagcccgccctgaacgacagccggtactgcctgagcagcagactgagagtgtccgccaccttctggcagaacccccggaaccacttcagatgccaggtgcagttctacggcctgagcgagaacgacgagtggacccaggacagagccaagcccgtgacccagatcgtgtctgccgaagcctggggcagagccgattgcgacgtgaagctggtggaaaagagcttcgagacagacaccaacctgaacttccagaacctgagcgtgatcggcttcagaatcctgctgctgaaagtggccggctttaacctgctgatgaccctgcggctgtggtccagc

SEQ ID NO: 35810 - DNA, 2277 bp, synthetic construct
  source 1..2277: mol_type = other DNA
atggccttaccagtgaccgccttgctcctgccgctggccttgctgctccacgccgccaggccggaggtgcagctggttgaatctggcggaggactggttcagcctggcggatctctgagactgtcttgtgccgccagcggcttcaacatcaaggatacctgtatcggctgggttcgcagagcccctggcaaagaggaagaactggtcgccaaaatctgcaagtacagcggccacaccagatacgccgacagcgtgaagggcagattcaccatcagcgccgacaccagcaagaacaccgcctacctccagatgaacagcctgagagccgaggacaccgccgtgtactattgtgccgctgtgtccgtcagagatgggcactacaattactggggccagggcaccaccgtgaccgtttcttcaggtaccggcggaggcggatctggcggcggaggtagcggtggcggaggatctgaattcgagaacgtgctgacacagagccctgccatcatgagtgcctctccaggcgagaaagtgaccatgacctgtagagccagcagcagcgtgtccagcagctacctgcactggtatcagcagaagtccggcgcaagccccaaagtgtggatctacagcaccagcaatctggcctctggcgtgccaggcagattttctggctctggcagcggcacaagctacagcctgacaatcagctccgtggaagccgaagatgccgccacctactactgccagcagtacagcggctaccccatcacatttggagccggcaccaaggtggaagtgaagagactcgaggacctgaagaacgtgttcccacctgaggtggccgtgttcgagcctagcgaggccgagatcagccacacccagaaagccaccctcgtgtgcctggctaccggcttctaccccgaccatgtggaactgtcttggtgggtcaacggcaaagaggtgcacagcggcgtgtgtaccgacccccagccactgaaagaacagcccgccctgaacgacagccggtactgcctgagcagcagactgagagtgtccgccaccttctggcagaacccccggaaccacttcagatgccaggtgcagttctacggcctgagcgagaacgacgagtggacccaggacagagccaagcccgtgacccagatcgtgtctgccgaagcctggggcagagccgattgcgacgtgaagctggtggaaaagagcttcgagacagacaccaacctgaacttccagaacctgagcgtgatcggcttcagaatcctgctgctgaaagtggccggctttaacctgctgatgaccctgcggctgtggtccagcagggccaagcgatctggatctggagcaacaaacttctcactactcaaacaagcaggtgacgtggaggagaatcccgggcctactagtatggactggatttggcgcatccttttccttgtcggcgctgctaccggcgcgcattccttcgaacaggttcagctcaaagaatctggccccgtgctggtggccccaagccagacactgtctatcacctgtaccgtgtccggcttcagcctggcctcctacaacatccactgggtccgacagcctccaggcaaaggactggaatggctgggagtgatttgggctggcggcagcaccaactacaacagcgcactgatgagccggctgagcatcagcaaggacaacagcaagagccaggtgttcctccagatgaactccctccagaccgacgacaccgccatgtactactgcgccaagagaagcgacgactacagttggttcgcctactggggccagggcacactggttactgtgtctgcttctacgcgtatccagaaccctgatcctgccgtgtaccagctgcgggatagcaagagcagcgacaagagcgtgtgtctgttcaccgacttcgacagccagaccaacgtgtcccagagcaaggactccgacgtgtacatcaccgataagtgcgtgctggacatgcggagcatggacttcaagagcaactccgccgtggcctggtccaacaagtccgatttcgcctgcgccaacgccttcaacaacagcattatccccgaggacacattcttcccaagccccgagagcagctgcggctttaccagcgagagctaccagcagggcgtgctgagcgccaccatcctgtacgagatcctgctgggcaaggccaccctgtacgccgtgctggtgtctgccctggtgctgatggctatggtcaagcggaaggacagccgggga

SEQ ID NO: 35811 - DNA, 2289 bp, synthetic construct
  source 1..2289: mol_type = other DNA
atggccttaccagtgaccgccttgctcctgccgctggccttgctgctccacgccgccaggccggaggtgcagctggttgaatctggcggaggactggttcagcctggcggatctctgagactgtcttgtgccgccagcggcttcaacatcaaggatacctgtatcggctgggttcgcagagcccctggcaaagaggaagaactggtcgccaaaatctgcaagtacagcggccacaccagatacgccgacagcgtgaagggcagattcaccatcagcgccgacaccagcaagaacaccgcctacctccagatgaacagcctgagagccgaggacaccgccgtgtactattgtgccgctgtgtccgtcagagatgggcactacaattactggggccagggcaccaccgtgaccgtttcttcaggtaccggcggaggcggatctggcggcggaggtagcggtggcggaggatctgaattcgagaacgtgctgacacagagccctgccatcatgagtgcctctccaggcgagaaagtgaccatgacctgtagagccagcagcagcgtgtccagcagctacctgcactggtatcagcagaagtccggcgcaagccccaaagtgtggatctacagcaccagcaatctggcctctggcgtgccaggcagattttctggctctggcagcggcacaagctacagcctgacaatcagctccgtggaagccgaagatgccgccacctactactgccagcagtacagcggctaccccatcacatttggagccggcaccaaggtggaagtgaagagactcgagatccagaaccctgatcctgccgtgtaccagctgcgggatagcaagagcagcgacaagagcgtgtgtctgttcaccgacttcgacagccagaccaacgtgtcccagagcaaggactccgacgtgtacatcaccgataagtgcgtgctggacatgcggagcatggacttcaagagcaactccgccgtggcctggtccaacaagtccgatttcgcctgcgccaacgccttcaacaacagcattatccccgaggacacattcttcccaagccccgagagcagctgcggctttaccagcgagagctaccagcagggcgtgctgagcgccaccatcctgtacgagatcctgctgggcaaggccaccctgtacgccgtgctggtgtctgccctggtgctgatggctatggtcaagcggaaggacagccggggacgcgccaagagaagcggatctggcgtgaagcagaccctgaatttcgacctgctgaagctggctggcgacgtggaatccaacccaggccctactagtatggactggatttggcgcatccttttccttgtcggcgctgctaccggcgcgcattccttcgaacaggttcagctcaaagaatctggccccgtgctggtggccccaagccagacactgtctatcacctgtaccgtgtccggcttcagcctggcctcctacaacatccactgggtccgacagcctccaggcaaaggactggaatggctgggagtgatttgggctggcggcagcaccaactacaacagcgcactgatgagccggctgagcatcagcaaggacaacagcaagagccaggtgttcctccagatgaactccctccagaccgacgacaccgccatgtactactgcgccaagagaagcgacgactacagttggttcgcctactggggccagggcacactggttactgtgtctgcttctacgcgtgaggacctgaagaacgtgttcccacctgaggtggccgtgttcgagcctagcgaggccgagatcagccacacccagaaagccaccctcgtgtgcctggctaccggcttctaccccgaccatgtggaactgtcttggtgggtcaacggcaaagaggtgcacagcggcgtgtgtaccgacccccagccactgaaagaacagcccgccctgaacgacagccggtactgcctgagcagcagactgagagtgtccgccaccttctggcagaacccccggaaccacttcagatgccaggtgcagttctacggcctgagcgagaacgacgagtggacccaggacagagccaagcccgtgacccagatcgtgtctgccgaagcctggggcagagccgattgcgacgtgaagctggtggaaaagagcttcgagacagacaccaacctgaacttccagaacctgagcgtgatcggcttcagaatcctgctgctgaaagtggccggctttaacctgctgatgaccctgcggctgtggtccagc

SEQ ID NO: 35812 - DNA, 3393 bp, synthetic construct
  source 1..3393: mol_type = other DNA
atggccttaccagtgaccgccttgctcctgccgctggccttgctgctccacgccgccaggccggaagtgcagctggttgaatctggcggaggactggttcaggctggcggatctctgagactgtcttgtgccgccagcggcagaacctttagcatgggctggtttagacaggcccctggcaaagagagagagttcgtcgccgccatcacatactctggcggcagcccttactacgccgactctgtgaagggcagattcaccatcagccgggacaacgccaagaacaccgtgtacctccagatgaacagcctgaagcctgaggacaccgccgtgtactactgcgccgccaatccaacatacggcagcgactggaacgccgagaattggggccagggaacccaagtgacagtgtctagcggtaccggcggaggcggatctggcggcggaggtagcggtggcggaggatctgaattcgagaacgtgctgacacagagccctgccatcatgagtgcctctccaggcgagaaagtgaccatgacctgtagagccagcagcagcgtgtccagcagctacctgcactggtatcagcagaagtccggcgcaagccccaaagtgtggatctacagcaccagcaatctggcctctggcgtgccaggcagattttctggctctggcagcggcacaagctacagcctgacaatcagctccgtggaagccgaagatgccgccacctactactgccagcagtacagcggctaccccatcacatttggagccggcaccaaggtggaagtgaagagactcgaggacctgaagaacgtgttcccacctgaggtggccgtgttcgagcctagcgaggccgagatcagccacacccagaaagccaccctcgtgtgcctggctaccggcttctaccccgaccatgtggaactgtcttggtgggtcaacggcaaagaggtgcacagcggcgtgtgtaccgacccccagccactgaaagaacagcccgccctgaacgacagccggtactgcctgagcagcagactgagagtgtccgccaccttctggcagaacccccggaaccacttcagatgccaggtgcagttctacggcctgagcgagaacgacgagtggacccaggacagagccaagcccgtgacccagatcgtgtctgccgaagcctggggcagagccgattgcgacgtgaagctggtggaaaagagcttcgagacagacaccaacctgaacttccagaacctgagcgtgatcggcttcagaatcctgctgctgaaagtggccggctttaacctgctgatgaccctgcggctgtggtccagcagggccaagcgatctggatctggagcaacaaacttctcactactcaaacaagcaggtgacgtggaggagaatcccgggcctactagtgccaccatggactggatttggcgcatccttttccttgtcggcgctgctaccggcgcccattccgggcccgaagtgcaactggttgaatccggtggcggcctggtgcaagcaggcggatctctcagacttagctgtgccgcctccggcagaaccttcacaatgggatggtttaggcaggctccagggaaagagagagagttcgtcgccgccatctctctgtctcccacactggcctactacgccgactctgtgaaaggccggttcaccatctccagagataatgccaagaacaccgtggtgctgcaaatgaactctctgaaacccgaggatacagccctgtactattgtgccgctgaccggaagtccgtgatgagcatcagacccgattactggggacagggcacacaagtcacagtgtcctctggatccggcggcggaggatctggcggaggcggatctgggggcggaggctctttcgaacaggttcagctcaaagaatctggccccgtgctggtggccccaagccagacactgtctatcacctgtaccgtgtccggcttcagcctggcctcctacaacatccactgggtccgacagcctccaggcaaaggactggaatggctgggagtgatttgggctggcggcagcaccaactacaacagcgcactgatgagccggctgagcatcagcaaggacaacagcaagagccaggtgttcctccagatgaactccctccagaccgacgacaccgccatgtactactgcgccaagagaagcgacgactacagttggttcgcctactggggccagggcacactggttactgtgtctgcttctacgcgtatccagaaccctgatcctgccgtgtaccagctgcgggatagcaagagcagcgacaagagcgtgtgtctgttcaccgacttcgacagccagaccaacgtgtcccagagcaaggactccgacgtgtacatcaccgataagtgcgtgctggacatgcggagcatggacttcaagagcaactccgccgtggcctggtccaacaagtccgatttcgcctgcgccaacgccttcaacaacagcattatccccgaggacacattcttcccaagccccgagagcagctgcggctttaccagcgagagctaccagcagggcgtgctgagcgccaccatcctgtacgagatcctgctgggcaaggccaccctgtacgccgtgctggtgtctgccctggtgctgatggctatggtcaagcggaaggacagccggggacgcgccaagagaagcggatctggcgtgaagcagaccctgaatttcgacctgctgaagctggctggcgacgtggaatccaacccaggcccttctagaggccatatgaccgagtacaagcccacggtgcgcctcgccacccgcgacgacgtccccagggccgtacgcaccctcgccgccgcgttcgccgactaccccgccacgcgccacaccgtcgatccggaccgccacatcgagcgggtcaccgagctgcaagaactcttcctcacgcgcgtcgggctcgacatcggcaaggtgtgggtcgcggacgacggcgccgcggtggcggtctggaccacgccggagagcgtcgaagcgggggcggtgttcgccgagatcggcccgcgcatggccgagttgagcggttcccggctggccgcgcagcaacagatggaaggcctcctggcgccgcaccggcccaaggagcccgcgtggttcctggccaccgtcggcgtctcgcccgaccaccagggcaagggtctgggcagcgccgtcgtgctccccggagtggaggcggccgagcgcgccggggtgcccgccttcctggagacctccgcgccccgcaacctccccttctacgagcggctcggcttcaccgtcaccgccgacgtcgaggtgcccgaaggaccgcgcacctggtgcatgacccgcaagcccggtgcctga

SEQ ID NO: 35813 - DNA, 2307 bp, synthetic construct
  source 1..2307: mol_type = other DNA
atggccttaccagtgaccgccttgctcctgccgctggccttgctgctccacgccgccaggccggaagtgcagctggttgaatctggcggaggactggttcagcctggcggatctctgagactgtcttgtgccgcctctggcttcgccagcgactactatatcatcggctggttcagacaggcccctggcaaagagagagagggcgtcagctgtatcagcagcagatacgccaacaccaactacgccgacagcgtgaagggcagattcaccatcagccgggacaacgccaagaacaccgtgtacctccagatgaacagcctgaagcctgaggacaccgccgtgtactactgtgccgccgacaccagaagatacacctgtcctgacattgccaccatgcaccggaacttcgattcttggggccagggcacactggtcaccgtttcttctggtaccggcggaggcggatctggcggcggaggtagcggtggcggaggatctgaattcgagaacgtgctgacacagagccctgccatcatgagtgcctctccaggcgagaaagtgaccatgacctgtagagccagcagcagcgtgtccagcagctacctgcactggtatcagcagaagtccggcgcaagccccaaagtgtggatctacagcaccagcaatctggcctctggcgtgccaggcagattttctggctctggcagcggcacaagctacagcctgacaatcagctccgtggaagccgaagatgccgccacctactactgccagcagtacagcggctaccccatcacatttggagccggcaccaaggtggaagtgaagagactcgaggacctgaagaacgtgttcccacctgaggtggccgtgttcgagcctagcgaggccgagatcagccacacccagaaagccaccctcgtgtgcctggctaccggcttctaccccgaccatgtggaactgtcttggtgggtcaacggcaaagaggtgcacagcggcgtgtgtaccgacccccagccactgaaagaacagcccgccctgaacgacagccggtactgcctgagcagcagactgagagtgtccgccaccttctggcagaacccccggaaccacttcagatgccaggtgcagttctacggcctgagcgagaacgacgagtggacccaggacagagccaagcccgtgacccagatcgtgtctgccgaagcctggggcagagccgattgcgacgtgaagctggtggaaaagagcttcgagacagacaccaacctgaacttccagaacctgagcgtgatcggcttcagaatcctgctgctgaaagtggccggctttaacctgctgatgaccctgcggctgtggtccagcagggccaagcgatctggatctggagcaacaaacttctcactactcaaacaagcaggtgacgtggaggagaatcccgggcctactagtatggactggatttggcgcatccttttccttgtcggcgctgctaccggcgcgcattccttcgaacaggttcagctcaaagaatctggccccgtgctggtggccccaagccagacactgtctatcacctgtaccgtgtccggcttcagcctggcctcctacaacatccactgggtccgacagcctccaggcaaaggactggaatggctgggagtgatttgggctggcggcagcaccaactacaacagcgcactgatgagccggctgagcatcagcaaggacaacagcaagagccaggtgttcctccagatgaactccctccagaccgacgacaccgccatgtactactgcgccaagagaagcgacgactacagttggttcgcctactggggccagggcacactggttactgtgtctgcttctacgcgtatccagaaccctgatcctgccgtgtaccagctgcgggatagcaagagcagcgacaagagcgtgtgtctgttcaccgacttcgacagccagaccaacgtgtcccagagcaaggactccgacgtgtacatcaccgataagtgcgtgctggacatgcggagcatggacttcaagagcaactccgccgtggcctggtccaacaagtccgatttcgcctgcgccaacgccttcaacaacagcattatccccgaggacacattcttcccaagccccgagagcagctgcggctttaccagcgagagctaccagcagggcgtgctgagcgccaccatcctgtacgagatcctgctgggcaaggccaccctgtacgccgtgctggtgtctgccctggtgctgatggctatggtcaagcggaaggacagccggggataa

SEQ ID NO: 35814 - DNA, 2307 bp, synthetic construct
  source 1..2307: mol_type = other DNA
atggccttaccagtgaccgccttgctcctgccgctggccttgctgctccacgccgccaggccggaagtgcagctggttgaatctggcggaggactggttcagcctggcggatctctgagactgagctgtgaagccagcggcttcgccagcgacgattacatcatcggctggttcagacaggcccctggcaaagagagagagggcgtcagctgcatcagctctaagtacgccaacaccgtgtacaccgacagcgtgaagggcagattcagactgagcagaggcaccgccaagaataccgtgtacctccagatgagcgccctgaagcctgaggataccgccgtgtactactgcgctatggacagccgcagagtgacatgccctgagatcagcaccatgcaccggaacttcgattcttggggccagggcacactggtcacagtgtcatctggtaccggcggaggcggatctggcggcggaggtagcggtggcggaggatctgaattcgagaacgtgctgacacagagccctgccatcatgagtgcctctccaggcgagaaagtgaccatgacctgtagagccagcagcagcgtgtccagcagctacctgcactggtatcagcagaagtccggcgcaagccccaaagtgtggatctacagcaccagcaatctggcctctggcgtgccaggcagattttctggctctggcagcggcacaagctacagcctgacaatcagctccgtggaagccgaagatgccgccacctactactgccagcagtacagcggctaccccatcacatttggagccggcaccaaggtggaagtgaagagactcgaggacctgaagaacgtgttcccacctgaggtggccgtgttcgagcctagcgaggccgagatcagccacacccagaaagccaccctcgtgtgcctggctaccggcttctaccccgaccatgtggaactgtcttggtgggtcaacggcaaagaggtgcacagcggcgtgtgtaccgacccccagccactgaaagaacagcccgccctgaacgacagccggtactgcctgagcagcagactgagagtgtccgccaccttctggcagaacccccggaaccacttcagatgccaggtgcagttctacggcctgagcgagaacgacgagtggacccaggacagagccaagcccgtgacccagatcgtgtctgccgaagcctggggcagagccgattgcgacgtgaagctggtggaaaagagcttcgagacagacaccaacctgaacttccagaacctgagcgtgatcggcttcagaatcctgctgctgaaagtggccggctttaacctgctgatgaccctgcggctgtggtccagcagggccaagcgatctggatctggagcaacaaacttctcactactcaaacaagcaggtgacgtggaggagaatcccgggcctactagtatggactggatttggcgcatccttttccttgtcggcgctgctaccggcgcgcattccttcgaacaggttcagctcaaagaatctggccccgtgctggtggccccaagccagacactgtctatcacctgtaccgtgtccggcttcagcctggcctcctacaacatccactgggtccgacagcctccaggcaaaggactggaatggctgggagtgatttgggctggcggcagcaccaactacaacagcgcactgatgagccggctgagcatcagcaaggacaacagcaagagccaggtgttcctccagatgaactccctccagaccgacgacaccgccatgtactactgcgccaagagaagcgacgactacagttggttcgcctactggggccagggcacactggttactgtgtctgcttctacgcgtatccagaaccctgatcctgccgtgtaccagctgcgggatagcaagagcagcgacaagagcgtgtgtctgttcaccgacttcgacagccagaccaacgtgtcccagagcaaggactccgacgtgtacatcaccgataagtgcgtgctggacatgcggagcatggacttcaagagcaactccgccgtggcctggtccaacaagtccgatttcgcctgcgccaacgccttcaacaacagcattatccccgaggacacattcttcccaagccccgagagcagctgcggctttaccagcgagagctaccagcagggcgtgctgagcgccaccatcctgtacgagatcctgctgggcaaggccaccctgtacgccgtgctggtgtctgccctggtgctgatggctatggtcaagcggaaggacagccggggataa

SEQ ID NO: 35815 - DNA, 2304 bp, synthetic construct
  source 1..2304: mol_type = other DNA
atggccttaccagtgaccgccttgctcctgccgctggccttgctgctccacgccgccaggccggaagtgcagctggttgaatctggcggaggactggttcagcctggcggatctctgagactgtcttgtgccgcctctggcttcgccagcgactactatatcatcggctggttcagacaggcccctggcaaagagagagagggcgtcagctgtatcagcagcagatacgccaacaccaactacgccgacagcgtgaagggcagattcaccatcagccgggacaacgccaagaacaccgtgtacctccagatgaacagcctgaagcctgaggacaccgccgtgtactactgtgccgccgacaccagaagatacacctgtcctgacattgccaccatgcaccggaacttcgattcttggggccagggcacactggtcaccgtttcttctggtaccggcggaggcggatctggcggcggaggtagcggtggcggaggatctgaattcgagaacgtgctgacacagagccctgccatcatgagtgcctctccaggcgagaaagtgaccatgacctgtagagccagcagcagcgtgtccagcagctacctgcactggtatcagcagaagtccggcgcaagccccaaagtgtggatctacagcaccagcaatctggcctctggcgtgccaggcagattttctggctctggcagcggcacaagctacagcctgacaatcagctccgtggaagccgaagatgccgccacctactactgccagcagtacagcggctaccccatcacatttggagccggcaccaaggtggaagtgaagagactcgagatccagaaccctgatcctgccgtgtaccagctgcgggatagcaagagcagcgacaagagcgtgtgtctgttcaccgacttcgacagccagaccaacgtgtcccagagcaaggactccgacgtgtacatcaccgataagtgcgtgctggacatgcggagcatggacttcaagagcaactccgccgtggcctggtccaacaagtccgatttcgcctgcgccaacgccttcaacaacagcattatccccgaggacacattcttcccaagccccgagagcagctgcggctttaccagcgagagctaccagcagggcgtgctgagcgccaccatcctgtacgagatcctgctgggcaaggccaccctgtacgccgtgctggtgtctgccctggtgctgatggctatggtcaagcggaaggacagccggggaagggccaagcgatctggatctggagcaacaaacttctcactactcaaacaagcaggtgacgtggaggagaatcccgggcctactagtatggactggatttggcgcatccttttccttgtcggcgctgctaccggcgcgcattccttcgaacaggttcagctcaaagaatctggccccgtgctggtggccccaagccagacactgtctatcacctgtaccgtgtccggcttcagcctggcctcctacaacatccactgggtccgacagcctccaggcaaaggactggaatggctgggagtgatttgggctggcggcagcaccaactacaacagcgcactgatgagccggctgagcatcagcaaggacaacagcaagagccaggtgttcctccagatgaactccctccagaccgacgacaccgccatgtactactgcgccaagagaagcgacgactacagttggttcgcctactggggccagggcacactggttactgtgtctgcttctacgcgtgacctgaagaacgtgttcccacctgaggtggccgtgttcgagcctagcgaggccgagatcagccacacccagaaagccaccctcgtgtgcctggctaccggcttctaccccgaccatgtggaactgtcttggtgggtcaacggcaaagaggtgcacagcggcgtgtgtaccgacccccagccactgaaagaacagcccgccctgaacgacagccggtactgcctgagcagcagactgagagtgtccgccaccttctggcagaacccccggaaccacttcagatgccaggtgcagttctacggcctgagcgagaacgacgagtggacccaggacagagccaagcccgtgacccagatcgtgtctgccgaagcctggggcagagccgattgcgacgtgaagctggtggaaaagagcttcgagacagacaccaacctgaacttccagaacctgagcgtgatcggcttcagaatcctgctgctgaaagtggccggctttaacctgctgatgaccctgcggctgtggtccagc

SEQ ID NO: 35816 - DNA, 2304 bp, synthetic construct
  source 1..2304: mol_type = other DNA
atggccttaccagtgaccgccttgctcctgccgctggccttgctgctccacgccgccaggccggaagtgcagctggttgaatctggcggaggactggttcagcctggcggatctctgagactgagctgtgaagccagcggcttcgccagcgacgattacatcatcggctggttcagacaggcccctggcaaagagagagagggcgtcagctgcatcagctctaagtacgccaacaccgtgtacaccgacagcgtgaagggcagattcagactgagcagaggcaccgccaagaataccgtgtacctccagatgagcgccctgaagcctgaggataccgccgtgtactactgcgctatggacagccgcagagtgacatgccctgagatcagcaccatgcaccggaacttcgattcttggggccagggcacactggtcacagtgtcatctggtaccggcggaggcggatctggcggcggaggtagcggtggcggaggatctgaattcgagaacgtgctgacacagagccctgccatcatgagtgcctctccaggcgagaaagtgaccatgacctgtagagccagcagcagcgtgtccagcagctacctgcactggtatcagcagaagtccggcgcaagccccaaagtgtggatctacagcaccagcaatctggcctctggcgtgccaggcagattttctggctctggcagcggcacaagctacagcctgacaatcagctccgtggaagccgaagatgccgccacctactactgccagcagtacagcggctaccccatcacatttggagccggcaccaaggtggaagtgaagagactcgagatccagaaccctgatcctgccgtgtaccagctgcgggatagcaagagcagcgacaagagcgtgtgtctgttcaccgacttcgacagccagaccaacgtgtcccagagcaaggactccgacgtgtacatcaccgataagtgcgtgctggacatgcggagcatggacttcaagagcaactccgccgtggcctggtccaacaagtccgatttcgcctgcgccaacgccttcaacaacagcattatccccgaggacacattcttcccaagccccgagagcagctgcggctttaccagcgagagctaccagcagggcgtgctgagcgccaccatcctgtacgagatcctgctgggcaaggccaccctgtacgccgtgctggtgtctgccctggtgctgatggctatggtcaagcggaaggacagccggggaagggccaagcgatctggatctggagcaacaaacttctcactactcaaacaagcaggtgacgtggaggagaatcccgggcctactagtatggactggatttggcgcatccttttccttgtcggcgctgctaccggcgcgcattccttcgaacaggttcagctcaaagaatctggccccgtgctggtggccccaagccagacactgtctatcacctgtaccgtgtccggcttcagcctggcctcctacaacatccactgggtccgacagcctccaggcaaaggactggaatggctgggagtgatttgggctggcggcagcaccaactacaacagcgcactgatgagccggctgagcatcagcaaggacaacagcaagagccaggtgttcctccagatgaactccctccagaccgacgacaccgccatgtactactgcgccaagagaagcgacgactacagttggttcgcctactggggccagggcacactggttactgtgtctgcttctacgcgtgacctgaagaacgtgttcccacctgaggtggccgtgttcgagcctagcgaggccgagatcagccacacccagaaagccaccctcgtgtgcctggctaccggcttctaccccgaccatgtggaactgtcttggtgggtcaacggcaaagaggtgcacagcggcgtgtgtaccgacccccagccactgaaagaacagcccgccctgaacgacagccggtactgcctgagcagcagactgagagtgtccgccaccttctggcagaacccccggaaccacttcagatgccaggtgcagttctacggcctgagcgagaacgacgagtggacccaggacagagccaagcccgtgacccagatcgtgtctgccgaagcctggggcagagccgattgcgacgtgaagctggtggaaaagagcttcgagacagacaccaacctgaacttccagaacctgagcgtgatcggcttcagaatcctgctgctgaaagtggccggctttaacctgctgatgaccctgcggctgtggtccagc

SEQ ID NO: 35817 - DNA, 2277 bp, synthetic construct
  source 1..2277: mol_type = other DNA
atggccttaccagtgaccgccttgctcctgccgctggccttgctgctccacgccgccaggccgcaagtcaaactggaagaaagcggtggcggcctggtgcaacctggcgaatctctgagactgagctgtagcgccagcggctccatcttcaaggtgttcagagtgttcgccatgagctggtacaggcaaggccctggcaagcagagagagctggtcgcctctatcagcagcggcgagacaaccacatacgccgaatctgtgaaaggccggttcaccatcagccgggataatgccaagaataccgcctatctccagatggactccctgaagcctgaagatacagctgtgtactactgcaacgccgaccataccttcaccggcgatttttggggccagggaacccaagtgaccgtgtctagtggtaccggcggaggcggatctggcggcggaggtagcggtggcggaggatctgaattcgagaacgtgctgacacagagccctgccatcatgagtgcctctccaggcgagaaagtgaccatgacctgtagagccagcagcagcgtgtccagcagctacctgcactggtatcagcagaagtccggcgcaagccccaaagtgtggatctacagcaccagcaatctggcctctggcgtgccaggcagattttctggctctggcagcggcacaagctacagcctgacaatcagctccgtggaagccgaagatgccgccacctactactgccagcagtacagcggctaccccatcacatttggagccggcaccaaggtggaagtgaagagactcgagatccagaaccctgatcctgccgtgtaccagctgcgggatagcaagagcagcgacaagagcgtgtgtctgttcaccgacttcgacagccagaccaacgtgtcccagagcaaggactccgacgtgtacatcaccgataagtgcgtgctggacatgcggagcatggacttcaagagcaactccgccgtggcctggtccaacaagtccgatttcgcctgcgccaacgccttcaacaacagcattatccccgaggacacattcttcccaagccccgagagcagctgcggctttaccagcgagagctaccagcagggcgtgctgagcgccaccatcctgtacgagatcctgctgggcaaggccaccctgtacgccgtgctggtgtctgccctggtgctgatggctatggtcaagcggaaggacagccggggaagggccaagcgatctggatctggagcaacaaacttctcactactcaaacaagcaggtgacgtggaggagaatcccgggcctactagtatggactggatttggcgcatccttttccttgtcggcgctgctaccggcgcgcattccttcgaacaggttcagctcaaagaatctggccccgtgctggtggccccaagccagacactgtctatcacctgtaccgtgtccggcttcagcctggcctcctacaacatccactgggtccgacagcctccaggcaaaggactggaatggctgggagtgatttgggctggcggcagcaccaactacaacagcgcactgatgagccggctgagcatcagcaaggacaacagcaagagccaggtgttcctccagatgaactccctccagaccgacgacaccgccatgtactactgcgccaagagaagcgacgactacagttggttcgcctactggggccagggcacactggttactgtgtctgcttctacgcgtgacctgaagaacgtgttcccacctgaggtggccgtgttcgagcctagcgaggccgagatcagccacacccagaaagccaccctcgtgtgcctggctaccggcttctaccccgaccatgtggaactgtcttggtgggtcaacggcaaagaggtgcacagcggcgtgtgtaccgacccccagccactgaaagaacagcccgccctgaacgacagccggtactgcctgagcagcagactgagagtgtccgccaccttctggcagaacccccggaaccacttcagatgccaggtgcagttctacggcctgagcgagaacgacgagtggacccaggacagagccaagcccgtgacccagatcgtgtctgccgaagcctggggcagagccgattgcgacgtgaagctggtggaaaagagcttcgagacagacaccaacctgaacttccagaacctgagcgtgatcggcttcagaatcctgctgctgaaagtggccggctttaacctgctgatgaccctgcggctgtggtccagc

SEQ ID NO: 35818 - DNA, 2283 bp, synthetic construct
  source 1..2283: mol_type = other DNA
atggccttaccagtgaccgccttgctcctgccgctggccttgctgctccacgccgccaggccggagaacgtgctgacacagagccctgccatcatgagtgcctctccaggcgagaaagtgaccatgacctgtagagccagcagcagcgtgtccagcagctacctgcactggtatcagcagaagtccggcgcaagccccaaagtgtggatctacagcaccagcaatctggcctctggcgtgccaggcagattttctggctctggcagcggcacaagctacagcctgacaatcagctccgtggaagccgaagatgccgccacctactactgccagcagtacagcggctaccccatcacatttggagccggcaccaaggtggaagtgaagagactcgaggacctgaagaacgtgttcccacctgaggtggccgtgttcgagcctagcgaggccgagatcagccacacccagaaagccaccctcgtgtgcctggctaccggcttctaccccgaccatgtggaactgtcttggtgggtcaacggcaaagaggtgcacagcggcgtgtgtaccgacccccagccactgaaagaacagcccgccctgaacgacagccggtactgcctgagcagcagactgagagtgtccgccaccttctggcagaacccccggaaccacttcagatgccaggtgcagttctacggcctgagcgagaacgacgagtggacccaggacagagccaagcccgtgacccagatcgtgtctgccgaagcctggggcagagccgattgcgacgtgaagctggtggaaaagagcttcgagacagacaccaacctgaacttccagaacctgagcgtgatcggcttcagaatcctgctgctgaaagtggccggctttaacctgctgatgaccctgcggctgtggtccagcagggccaagcgatctggatctggagcaacaaacttctcactactcaaacaagcaggtgacgtggaggagaatcccgggcctactagtgccaccatggactggatttggcgcatccttttccttgtcggcgctgctaccggcgcccattccgggcccgaagtgcagctggttgaatctggcggaggactggttcaggctggcggatctctgagactgtcttgtgccgccagcggcagaacctttagcatgggctggtttagacaggcccctggcaaagagagagagttcgtcgccgccatcacatactctggcggcagcccttactacgccgactctgtgaagggcagattcaccatcagccgggacaacgccaagaacaccgtgtacctccagatgaacagcctgaagcctgaggacaccgccgtgtactactgcgccgccaatccaacatacggcagcgactggaacgccgagaattggggccagggaacccaagtgacagtgtctagcggatccggcggcggaggatctggcggaggcggatctgggggcggaggctctttcgaacaggttcagctcaaagaatctggccccgtgctggtggccccaagccagacactgtctatcacctgtaccgtgtccggcttcagcctggcctcctacaacatccactgggtccgacagcctccaggcaaaggactggaatggctgggagtgatttgggctggcggcagcaccaactacaacagcgcactgatgagccggctgagcatcagcaaggacaacagcaagagccaggtgttcctccagatgaactccctccagaccgacgacaccgccatgtactactgcgccaagagaagcgacgactacagttggttcgcctactggggccagggcacactggttactgtgtctgcttctacgcgtatccagaaccctgatcctgccgtgtaccagctgcgggatagcaagagcagcgacaagagcgtgtgtctgttcaccgacttcgacagccagaccaacgtgtcccagagcaaggactccgacgtgtacatcaccgataagtgcgtgctggacatgcggagcatggacttcaagagcaactccgccgtggcctggtccaacaagtccgatttcgcctgcgccaacgccttcaacaacagcattatccccgaggacacattcttcccaagccccgagagcagctgcggctttaccagcgagagctaccagcagggcgtgctgagcgccaccatcctgtacgagatcctgctgggcaaggccaccctgtacgccgtgctggtgtctgccctggtgctgatggctatggtcaagcggaaggacagccggggataa

SEQ ID NO: 35819 - DNA, 2286 bp, synthetic construct
  source 1..2286: mol_type = other DNA
atggccttaccagtgaccgccttgctcctgccgctggccttgctgctccacgccgccaggccggagaacgtgctgacacagagccctgccatcatgagtgcctctccaggcgagaaagtgaccatgacctgtagagccagcagcagcgtgtccagcagctacctgcactggtatcagcagaagtccggcgcaagccccaaagtgtggatctacagcaccagcaatctggcctctggcgtgccaggcagattttctggctctggcagcggcacaagctacagcctgacaatcagctccgtggaagccgaagatgccgccacctactactgccagcagtacagcggctaccccatcacatttggagccggcaccaaggtggaagtgaagagactcgaggacctgaagaacgtgttcccacctgaggtggccgtgttcgagcctagcgaggccgagatcagccacacccagaaagccaccctcgtgtgcctggctaccggcttctaccccgaccatgtggaactgtcttggtgggtcaacggcaaagaggtgcacagcggcgtgtgtaccgacccccagccactgaaagaacagcccgccctgaacgacagccggtactgcctgagcagcagactgagagtgtccgccaccttctggcagaacccccggaaccacttcagatgccaggtgcagttctacggcctgagcgagaacgacgagtggacccaggacagagccaagcccgtgacccagatcgtgtctgccgaagcctggggcagagccgattgcgacgtgaagctggtggaaaagagcttcgagacagacaccaacctgaacttccagaacctgagcgtgatcggcttcagaatcctgctgctgaaagtggccggctttaacctgctgatgaccctgcggctgtggtccagcagggccaagcgatctggatctggagcaacaaacttctcactactcaaacaagcaggtgacgtggaggagaatcccgggcctactagtgccaccatggactggatttggcgcatccttttccttgtcggcgctgctaccggcgcccattccgggcccgaagtgcaactggtggaatctgggggcggactggtgcagccaggcggaagtctgaggctgtcttgtgccgcctccggcagcatcttcggcttcaacgacatggcctggtatcggcaggctcccggaaaacagcgcgagctggtggctctgattagcagagtgggcgtgaccagcagcgccgactctgtgaagggcagattcacaatctccagagtgaacgccaaggatacagtgtacctccagatgaactctctgaaacctgaggatacagcagtgtactattgctacatggaccagcggctggacggcagcacactggcctactggggacagggaactcaagtgacagtgtctagcggatccggcggcggaggatctggcggaggcggatctgggggcggaggctctttcgaacaggttcagctcaaagaatctggccccgtgctggtggccccaagccagacactgtctatcacctgtaccgtgtccggcttcagcctggcctcctacaacatccactgggtccgacagcctccaggcaaaggactggaatggctgggagtgatttgggctggcggcagcaccaactacaacagcgcactgatgagccggctgagcatcagcaaggacaacagcaagagccaggtgttcctccagatgaactccctccagaccgacgacaccgccatgtactactgcgccaagagaagcgacgactacagttggttcgcctactggggccagggcacactggttactgtgtctgcttctacgcgtatccagaaccctgatcctgccgtgtaccagctgcgggatagcaagagcagcgacaagagcgtgtgtctgttcaccgacttcgacagccagaccaacgtgtcccagagcaaggactccgacgtgtacatcaccgataagtgcgtgctggacatgcggagcatggacttcaagagcaactccgccgtggcctggtccaacaagtccgatttcgcctgcgccaacgccttcaacaacagcattatccccgaggacacattcttcccaagccccgagagcagctgcggctttaccagcgagagctaccagcagggcgtgctgagcgccaccatcctgtacgagatcctgctgggcaaggccaccctgtacgccgtgctggtgtctgccctggtgctgatggctatggtcaagcggaaggacagccggggataa

SEQ ID NO: 35820 - DNA, 2274 bp, synthetic construct
  source 1..2274: mol_type = other DNA
atggccttaccagtgaccgccttgctcctgccgctggccttgctgctccacgccgccaggccggagaacgtgctgacacagagccctgccatcatgagtgcctctccaggcgagaaagtgaccatgacctgtagagccagcagcagcgtgtccagcagctacctgcactggtatcagcagaagtccggcgcaagccccaaagtgtggatctacagcaccagcaatctggcctctggcgtgccaggcagattttctggctctggcagcggcacaagctacagcctgacaatcagctccgtggaagccgaagatgccgccacctactactgccagcagtacagcggctaccccatcacatttggagccggcaccaaggtggaagtgaagagactcgaggacctgaagaacgtgttcccacctgaggtggccgtgttcgagcctagcgaggccgagatcagccacacccagaaagccaccctcgtgtgcctggctaccggcttctaccccgaccatgtggaactgtcttggtgggtcaacggcaaagaggtgcacagcggcgtgtgtaccgacccccagccactgaaagaacagcccgccctgaacgacagccggtactgcctgagcagcagactgagagtgtccgccaccttctggcagaacccccggaaccacttcagatgccaggtgcagttctacggcctgagcgagaacgacgagtggacccaggacagagccaagcccgtgacccagatcgtgtctgccgaagcctggggcagagccgattgcgacgtgaagctggtggaaaagagcttcgagacagacaccaacctgaacttccagaacctgagcgtgatcggcttcagaatcctgctgctgaaagtggccggctttaacctgctgatgaccctgcggctgtggtccagcagggccaagcgatctggatctggagcaacaaacttctcactactcaaacaagcaggtgacgtggaggagaatcccgggcctactagtgccaccatggactggatttggcgcatccttttccttgtcggcgctgctaccggcgcccattccgggcccgaggtgcagctggttgaatctggcggaggactggttcaggctggcggatctctgagactgtcttgtgccgccagcggctctgtgttcagcggcaatgtgatgggctggtacagacaggcccctggcaaagaaagagagtgggttgccgccattgccagcggcggcagcatctactacagagactctgtgaagggcagattcaccatcagccgggacaacgccaagaacaccgtgtacctccagatgaacagcctgaagcctgaggacaccgccgtgtactactgcaactctcaccctcctacactgccctattggggcctgggaacccaagtgacagtgtcctctggatccggcggcggaggatctggcggaggcggatctgggggcggaggctctttcgaacaggttcagctcaaagaatctggccccgtgctggtggccccaagccagacactgtctatcacctgtaccgtgtccggcttcagcctggcctcctacaacatccactgggtccgacagcctccaggcaaaggactggaatggctgggagtgatttgggctggcggcagcaccaactacaacagcgcactgatgagccggctgagcatcagcaaggacaacagcaagagccaggtgttcctccagatgaactccctccagaccgacgacaccgccatgtactactgcgccaagagaagcgacgactacagttggttcgcctactggggccagggcacactggttactgtgtctgcttctacgcgtatccagaaccctgatcctgccgtgtaccagctgcgggatagcaagagcagcgacaagagcgtgtgtctgttcaccgacttcgacagccagaccaacgtgtcccagagcaaggactccgacgtgtacatcaccgataagtgcgtgctggacatgcggagcatggacttcaagagcaactccgccgtggcctggtccaacaagtccgatttcgcctgcgccaacgccttcaacaacagcattatccccgaggacacattcttcccaagccccgagagcagctgcggctttaccagcgagagctaccagcagggcgtgctgagcgccaccatcctgtacgagatcctgctgggcaaggccaccctgtacgccgtgctggtgtctgccctggtgctgatggctatggtcaagcggaaggacagccggggataa

SEQ ID NO: 35821 - DNA, 2268 bp, synthetic construct
  source 1..2268: mol_type = other DNA
atggccttaccagtgaccgccttgctcctgccgctggccttgctgctccacgccgccaggccggagaacgtgctgacacagagccctgccatcatgagtgcctctccaggcgagaaagtgaccatgacctgtagagccagcagcagcgtgtccagcagctacctgcactggtatcagcagaagtccggcgcaagccccaaagtgtggatctacagcaccagcaatctggcctctggcgtgccaggcagattttctggctctggcagcggcacaagctacagcctgacaatcagctccgtggaagccgaagatgccgccacctactactgccagcagtacagcggctaccccatcacatttggagccggcaccaaggtggaagtgaagagactcgaggacctgaagaacgtgttcccacctgaggtggccgtgttcgagcctagcgaggccgagatcagccacacccagaaagccaccctcgtgtgcctggctaccggcttctaccccgaccatgtggaactgtcttggtgggtcaacggcaaagaggtgcacagcggcgtgtgtaccgacccccagccactgaaagaacagcccgccctgaacgacagccggtactgcctgagcagcagactgagagtgtccgccaccttctggcagaacccccggaaccacttcagatgccaggtgcagttctacggcctgagcgagaacgacgagtggacccaggacagagccaagcccgtgacccagatcgtgtctgccgaagcctggggcagagccgattgcgacgtgaagctggtggaaaagagcttcgagacagacaccaacctgaacttccagaacctgagcgtgatcggcttcagaatcctgctgctgaaagtggccggctttaacctgctgatgaccctgcggctgtggtccagcagggccaagcgatctggatctggagcaacaaacttctcactactcaaacaagcaggtgacgtggaggagaatcccgggcctactagtgccaccatggactggatttggcgcatccttttccttgtcggcgctgctaccggcgcccattccgggcccgaagttcagctgctggaatctggcggaggactcgttcaacctggcggctctctgagactgagctgtgccgcttctggcttcagcttctctagctacgccctgagctgggttcgacaagctcccggaaagggccttgaatgggtgtccagcatcggcgagaatgacggcaccacagactatgccgatgccgtgaaaggccggtttaccatcagcagagacaattccaagaacacgctctatctgcaaatgaactccctgcgcgtggaagatacagccgtgtattattgcgtgaaggacggcatccactggggacagggaaccctggttacagtgtctagcggatccggcggcggaggatctggcggaggcggatctgggggcggaggctctttcgaacaggttcagctcaaagaatctggccccgtgctggtggccccaagccagacactgtctatcacctgtaccgtgtccggcttcagcctggcctcctacaacatccactgggtccgacagcctccaggcaaaggactggaatggctgggagtgatttgggctggcggcagcaccaactacaacagcgcactgatgagccggctgagcatcagcaaggacaacagcaagagccaggtgttcctccagatgaactccctccagaccgacgacaccgccatgtactactgcgccaagagaagcgacgactacagttggttcgcctactggggccagggcacactggttactgtgtctgcttctacgcgtatccagaaccctgatcctgccgtgtaccagctgcgggatagcaagagcagcgacaagagcgtgtgtctgttcaccgacttcgacagccagaccaacgtgtcccagagcaaggactccgacgtgtacatcaccgataagtgcgtgctggacatgcggagcatggacttcaagagcaactccgccgtggcctggtccaacaagtccgatttcgcctgcgccaacgccttcaacaacagcattatccccgaggacacattcttcccaagccccgagagcagctgcggctttaccagcgagagctaccagcagggcgtgctgagcgccaccatcctgtacgagatcctgctgggcaaggccaccctgtacgccgtgctggtgtctgccctggtgctgatggctatggtcaagcggaaggacagccggggataa

SEQ ID NO: 35822 - DNA, 3375 bp, synthetic construct
  source 1..3375: mol_type = other DNA
atgggacccagactgctgttttgggctctgctgtgtctgctcggcacaggacctgttgaagctggcgtgacacagagccccacacacctgattaagaccagaggccagcaggccacactgagatgcagccctatcagcggccacaccagcgtgtactggtatcagcaggctctcggactgggcctccagttcctgctttggtacgacgagggcgaagagagaaaccggggcaacttccctcctcggttttccggcagacagttccccaactacagcagcgagctgaacgtgaacgccctggaactggaagatagcgccctgtacctgtgtgcctcttctcttggtggacctcgcggactggctggactgagaggggatgagcagtttttcggccctggcaccagactgaccgtgctggaaggtaccggcggaggcggatctggcggcggagaattcgagaacgtgctgacacagagccctgccatcatgagtgcctctccaggcgagaaagtgaccatgacctgtagagccagcagcagcgtgtccagcagctacctgcactggtatcagcagaagtccggcgcaagccccaaagtgtggatctacagcaccagcaatctggcctctggcgtgccaggcagattttctggctctggcagcggcacaagctacagcctgacaatcagctccgtggaagccgaagatgccgccacctactactgccagcagtacagcggctaccccatcacatttggagccggcaccaaggtggaagtgaagagactcgaggacctgaagaacgtgttcccacctgaggtggccgtgttcgagcctagcgaggccgagatcagccacacccagaaagccaccctcgtgtgcctggctaccggcttctaccccgaccatgtggaactgtcttggtgggtcaacggcaaagaggtgcacagcggcgtgtgtaccgacccccagccactgaaagaacagcccgccctgaacgacagccggtactgcctgagcagcagactgagagtgtccgccaccttctggcagaacccccggaaccacttcagatgccaggtgcagttctacggcctgagcgagaacgacgagtggacccaggacagagccaagcccgtgacccagatcgtgtctgccgaagcctggggcagagccgattgcgacgtgaagctggtggaaaagagcttcgagacagacaccaacctgaacttccagaacctgagcgtgatcggcttcagaatcctgctgctgaaagtggccggctttaacctgctgatgaccctgcggctgtggtccagcagggccaagcgatctggatctggagcaacaaacttctcactactcaaacaagcaggtgacgtggaggagaatcccgggcctactagtgccaccatggactggatttggcgcatccttttccttgtcggcgctgctaccggcgcccattccgggcccgaagtgcagctggttgaatctggcggaggactggttcaggctggcggatctctgagactgtcttgtgccgccagcggcagaacctttagcatgggctggtttagacaggcccctggcaaagagagagagttcgtcgccgccatcacatactctggcggcagcccttactacgccgactctgtgaagggcagattcaccatcagccgggacaacgccaagaacaccgtgtacctccagatgaacagcctgaagcctgaggacaccgccgtgtactactgcgccgccaatccaacatacggcagcgactggaacgccgagaattggggccagggaacccaagtgacagtgtctagcggatccggcggcggaggatctggcggaggcggatctgggggcggaggctctttcgaacaggttcagctcaaagaatctggccccgtgctggtggccccaagccagacactgtctatcacctgtaccgtgtccggcttcagcctggcctcctacaacatccactgggtccgacagcctccaggcaaaggactggaatggctgggagtgatttgggctggcggcagcaccaactacaacagcgcactgatgagccggctgagcatcagcaaggacaacagcaagagccaggtgttcctccagatgaactccctccagaccgacgacaccgccatgtactactgcgccaagagaagcgacgactacagttggttcgcctactggggccagggcacactggttactgtgtctgcttctacgcgtatccagaaccctgatcctgccgtgtaccagctgcgggatagcaagagcagcgacaagagcgtgtgtctgttcaccgacttcgacagccagaccaacgtgtcccagagcaaggactccgacgtgtacatcaccgataagtgcgtgctggacatgcggagcatggacttcaagagcaactccgccgtggcctggtccaacaagtccgatttcgcctgcgccaacgccttcaacaacagcattatccccgaggacacattcttcccaagccccgagagcagctgcggctttaccagcgagagctaccagcagggcgtgctgagcgccaccatcctgtacgagatcctgctgggcaaggccaccctgtacgccgtgctggtgtctgccctggtgctgatggctatggtcaagcggaaggacagccggggacgcgccaagagaagcggatctggcgtgaagcagaccctgaatttcgacctgctgaagctggctggcgacgtggaatccaacccaggcccttctagaggccatatgaccgagtacaagcccacggtgcgcctcgccacccgcgacgacgtccccagggccgtacgcaccctcgccgccgcgttcgccgactaccccgccacgcgccacaccgtcgatccggaccgccacatcgagcgggtcaccgagctgcaagaactcttcctcacgcgcgtcgggctcgacatcggcaaggtgtgggtcgcggacgacggcgccgcggtggcggtctggaccacgccggagagcgtcgaagcgggggcggtgttcgccgagatcggcccgcgcatggccgagttgagcggttcccggctggccgcgcagcaacagatggaaggcctcctggcgccgcaccggcccaaggagcccgcgtggttcctggccaccgtcggcgtctcgcccgaccaccagggcaagggtctgggcagcgccgtcgtgctccccggagtggaggcggccgagcgcgccggggtgcccgccttcctggagacctccgcgccccgcaacctccccttctacgagcggctcggcttcaccgtcaccgccgacgtcgaggtgcccgaaggaccgcgcacctggtgcatgacccgcaagcccggtgcctga

SEQ ID NO: 35823 - DNA, 3372 bp, synthetic construct
  source 1..3372: mol_type = other DNA
atgggacccagactgctgttttgggctctgctgtgtctgctcggcacaggacctgttgaagctggcgtgacacagagccccacacacctgattaagaccagaggccagcaggccacactgagatgcagccctatcagcggccacaccagcgtgtactggtatcagcaggctctcggactgggcctccagttcctgctttggtacgacgagggcgaagagagaaaccggggcaacttccctcctcggttttccggcagacagttccccaactacagcagcgagctgaacgtgaacgccctggaactggaagatagcgccctgtacctgtgtgccagctctctcggcggagatgaactgggagccgatggcaacgagcagttctttggccctggcaccagactgaccgtgctggaaggtaccggcggaggcggatctggcggcggaagcgaattcgagaacgtgctgacacagagccctgccatcatgagtgcctctccaggcgagaaagtgaccatgacctgtagagccagcagcagcgtgtccagcagctacctgcactggtatcagcagaagtccggcgcaagccccaaagtgtggatctacagcaccagcaatctggcctctggcgtgccaggcagattttctggctctggcagcggcacaagctacagcctgacaatcagctccgtggaagccgaagatgccgccacctactactgccagcagtacagcggctaccccatcacatttggagccggcaccaaggtggaagtgaagagactcgaggacctgaagaacgtgttcccacctgaggtggccgtgttcgagcctagcgaggccgagatcagccacacccagaaagccaccctcgtgtgcctggctaccggcttctaccccgaccatgtggaactgtcttggtgggtcaacggcaaagaggtgcacagcggcgtgtgtaccgacccccagccactgaaagaacagcccgccctgaacgacagccggtactgcctgagcagcagactgagagtgtccgccaccttctggcagaacccccggaaccacttcagatgccaggtgcagttctacggcctgagcgagaacgacgagtggacccaggacagagccaagcccgtgacccagatcgtgtctgccgaagcctggggcagagccgattgcgacgtgaagctggtggaaaagagcttcgagacagacaccaacctgaacttccagaacctgagcgtgatcggcttcagaatcctgctgctgaaagtggccggctttaacctgctgatgaccctgcggctgtggtccagcagggccaagcgatctggatctggagcaacaaacttctcactactcaaacaagcaggtgacgtggaggagaatcccgggcctactagtgccaccatggactggatttggcgcatccttttccttgtcggcgctgctaccggcgcccattccgggcccgaagtgcagctggttgaatctggcggaggactggttcaggctggcggatctctgagactgtcttgtgccgccagcggcagaacctttagcatgggctggtttagacaggcccctggcaaagagagagagttcgtcgccgccatcacatactctggcggcagcccttactacgccgactctgtgaagggcagattcaccatcagccgggacaacgccaagaacaccgtgtacctccagatgaacagcctgaagcctgaggacaccgccgtgtactactgcgccgccaatccaacatacggcagcgactggaacgccgagaattggggccagggaacccaagtgacagtgtctagcggatccggcggcggaggatctggcggaggcggatctgggggcggaggctctttcgaacaggttcagctcaaagaatctggccccgtgctggtggccccaagccagacactgtctatcacctgtaccgtgtccggcttcagcctggcctcctacaacatccactgggtccgacagcctccaggcaaaggactggaatggctgggagtgatttgggctggcggcagcaccaactacaacagcgcactgatgagccggctgagcatcagcaaggacaacagcaagagccaggtgttcctccagatgaactccctccagaccgacgacaccgccatgtactactgcgccaagagaagcgacgactacagttggttcgcctactggggccagggcacactggttactgtgtctgcttctacgcgtatccagaaccctgatcctgccgtgtaccagctgcgggatagcaagagcagcgacaagagcgtgtgtctgttcaccgacttcgacagccagaccaacgtgtcccagagcaaggactccgacgtgtacatcaccgataagtgcgtgctggacatgcggagcatggacttcaagagcaactccgccgtggcctggtccaacaagtccgatttcgcctgcgccaacgccttcaacaacagcattatccccgaggacacattcttcccaagccccgagagcagctgcggctttaccagcgagagctaccagcagggcgtgctgagcgccaccatcctgtacgagatcctgctgggcaaggccaccctgtacgccgtgctggtgtctgccctggtgctgatggctatggtcaagcggaaggacagccggggacgcgccaagagaagcggatctggcgtgaagcagaccctgaatttcgacctgctgaagctggctggcgacgtggaatccaacccaggcccttctagaggccatatgaccgagtacaagcccacggtgcgcctcgccacccgcgacgacgtccccagggccgtacgcaccctcgccgccgcgttcgccgactaccccgccacgcgccacaccgtcgatccggaccgccacatcgagcgggtcaccgagctgcaagaactcttcctcacgcgcgtcgggctcgacatcggcaaggtgtgggtcgcggacgacggcgccgcggtggcggtctggaccacgccggagagcgtcgaagcgggggcggtgttcgccgagatcggcccgcgcatggccgagttgagcggttcccggctggccgcgcagcaacagatggaaggcctcctggcgccgcaccggcccaaggagcccgcgtggttcctggccaccgtcggcgtctcgcccgaccaccagggcaagggtctgggcagcgccgtcgtgctccccggagtggaggcggccgagcgcgccggggtgcccgccttcctggagacctccgcgccccgcaacctccccttctacgagcggctcggcttcaccgtcaccgccgacgtcgaggtgcccgaaggaccgcgcacctggtgcatgacccgcaagcccggtgcctga

SEQ ID NO: 35824 - DNA, 2847 bp, synthetic construct
  source 1..2847: mol_type = other DNA
atggccttaccagtgaccgccttgctcctgccgctggccttgctgctccacgccgccaggccggagaacgtgctgacacagagccctgccatcatgagtgcctctccaggcgagaaagtgaccatgacctgtagagccagcagcagcgtgtccagcagctacctgcactggtatcagcagaagtccggcgcaagccccaaagtgtggatctacagcaccagcaatctggcctctggcgtgccaggcagattttctggctctggcagcggcacaagctacagcctgacaatcagctccgtggaagccgaagatgccgccacctactactgccagcagtacagcggctaccccatcacatttggagccggcaccaaggtggaagtgaagagactcgaggacctgaagaacgtgttcccacctgaggtggccgtgttcgagcctagcgaggccgagatcagccacacccagaaagccaccctcgtgtgcctggctaccggcttctaccccgaccatgtggaactgtcttggtgggtcaacggcaaagaggtgcacagcggcgtgtgtaccgacccccagccactgaaagaacagcccgccctgaacgacagccggtactgcctgagcagcagactgagagtgtccgccaccttctggcagaacccccggaaccacttcagatgccaggtgcagttctacggcctgagcgagaacgacgagtggacccaggacagagccaagcccgtgacccagatcgtgtctgccgaagcctggggcagagccgattgcgacgtgaagctggtggaaaagagcttcgagacagacaccaacctgaacttccagaacctgagcgtgatcggcttcagaatcctgctgctgaaagtggccggctttaacctgctgatgaccctgcggctgtggtccagcagggccaagcgatctggatctggagcaacaaacttctcactactcaaacaagcaggtgacgtggaggagaatcccgggcctactagtgccaccatggactggatttggcgcatccttttccttgtcggcgctgctaccggcgcccattccgggcccatgggaagctggcttgagttctaccacagactcaacgccattgacagcaggctgtgggcacttggcggaagcgaagctgaactcgccgcttttgaaaaagaaattgccgctttcgagtccgagcttcaggcttacaaaggcaaagggaatcctgaggtcgagagcctgagagatcacgctgcccacattagagagtggttgcaggcataccggcacaatggatccggcggcggaggatctggcggaggcggatctgggggcggaggctctttcgaacaggttcagctcaaagaatctggccccgtgctggtggccccaagccagacactgtctatcacctgtaccgtgtccggcttcagcctggcctcctacaacatccactgggtccgacagcctccaggcaaaggactggaatggctgggagtgatttgggctggcggcagcaccaactacaacagcgcactgatgagccggctgagcatcagcaaggacaacagcaagagccaggtgttcctccagatgaactccctccagaccgacgacaccgccatgtactactgcgccaagagaagcgacgactacagttggttcgcctactggggccagggcacactggttactgtgtctgcttctacgcgtatccagaaccctgatcctgccgtgtaccagctgcgggatagcaagagcagcgacaagagcgtgtgtctgttcaccgacttcgacagccagaccaacgtgtcccagagcaaggactccgacgtgtacatcaccgataagtgcgtgctggacatgcggagcatggacttcaagagcaactccgccgtggcctggtccaacaagtccgatttcgcctgcgccaacgccttcaacaacagcattatccccgaggacacattcttcccaagccccgagagcagctgcggctttaccagcgagagctaccagcagggcgtgctgagcgccaccatcctgtacgagatcctgctgggcaaggccaccctgtacgccgtgctggtgtctgccctggtgctgatggctatggtcaagcggaaggacagccggggacgcgccaagagaagcggatctggcgtgaagcagaccctgaatttcgacctgctgaagctggctggcgacgtggaatccaacccaggcccttctagaggccatatgaccgagtacaagcccacggtgcgcctcgccacccgcgacgacgtccccagggccgtacgcaccctcgccgccgcgttcgccgactaccccgccacgcgccacaccgtcgatccggaccgccacatcgagcgggtcaccgagctgcaagaactcttcctcacgcgcgtcgggctcgacatcggcaaggtgtgggtcgcggacgacggcgccgcggtggcggtctggaccacgccggagagcgtcgaagcgggggcggtgttcgccgagatcggcccgcgcatggccgagttgagcggttcccggctggccgcgcagcaacagatggaaggcctcctggcgccgcaccggcccaaggagcccgcgtggttcctggccaccgtcggcgtctcgcccgaccaccagggcaagggtctgggcagcgccgtcgtgctccccggagtggaggcggccgagcgcgccggggtgcccgccttcctggagacctccgcgccccgcaacctccccttctacgagcggctcggcttcaccgtcaccgccgacgtcgaggtgcccgaaggaccgcgcacctggtgcatgacccgcaagcccggtgcctga

SEQ ID NO: 35825 - DNA, 2847 bp, synthetic construct
  source 1..2847: mol_type = other DNA
atggccttaccagtgaccgccttgctcctgccgctggccttgctgctccacgccgccaggccggcatgcatgggcagttggttcgagttctacgaccggctgaatgccatcgacgccagactgtgggctctcggaggatctgaagctgagctggccgccttcgagaaagagatcgccgcctttgagagcgagctgcaagcctacaaaggcaagggcaaccccgaggtggaaaacctgagagtgcacgccgctgccatcagagaatggctccaggcttacagacacaacggtaccggcggaggcggatctggcggcggaggtagcggtggcggaggatctgaattcgagaacgtgctgacacagagccctgccatcatgagtgcctctccaggcgagaaagtgaccatgacctgtagagccagcagcagcgtgtccagcagctacctgcactggtatcagcagaagtccggcgcaagccccaaagtgtggatctacagcaccagcaatctggcctctggcgtgccaggcagattttctggctctggcagcggcacaagctacagcctgacaatcagctccgtggaagccgaagatgccgccacctactactgccagcagtacagcggctaccccatcacatttggagccggcaccaaggtggaagtgaagagactcgaggacctgaagaacgtgttcccacctgaggtggccgtgttcgagcctagcgaggccgagatcagccacacccagaaagccaccctcgtgtgcctggctaccggcttctaccccgaccatgtggaactgtcttggtgggtcaacggcaaagaggtgcacagcggcgtgtgtaccgacccccagccactgaaagaacagcccgccctgaacgacagccggtactgcctgagcagcagactgagagtgtccgccaccttctggcagaacccccggaaccacttcagatgccaggtgcagttctacggcctgagcgagaacgacgagtggacccaggacagagccaagcccgtgacccagatcgtgtctgccgaagcctggggcagagccgattgcgacgtgaagctggtggaaaagagcttcgagacagacaccaacctgaacttccagaacctgagcgtgatcggcttcagaatcctgctgctgaaagtggccggctttaacctgctgatgaccctgcggctgtggtccagcagggccaagcgatctggatctggagcaacaaacttctcactactcaaacaagcaggtgacgtggaggagaatcccgggcctactagtatggactggatttggcgcatccttttccttgtcggcgctgctaccggcgcgcattccttcgaacaggttcagctcaaagaatctggccccgtgctggtggccccaagccagacactgtctatcacctgtaccgtgtccggcttcagcctggcctcctacaacatccactgggtccgacagcctccaggcaaaggactggaatggctgggagtgatttgggctggcggcagcaccaactacaacagcgcactgatgagccggctgagcatcagcaaggacaacagcaagagccaggtgttcctccagatgaactccctccagaccgacgacaccgccatgtactactgcgccaagagaagcgacgactacagttggttcgcctactggggccagggcacactggttactgtgtctgcttctacgcgtatccagaaccctgatcctgccgtgtaccagctgcgggatagcaagagcagcgacaagagcgtgtgtctgttcaccgacttcgacagccagaccaacgtgtcccagagcaaggactccgacgtgtacatcaccgataagtgcgtgctggacatgcggagcatggacttcaagagcaactccgccgtggcctggtccaacaagtccgatttcgcctgcgccaacgccttcaacaacagcattatccccgaggacacattcttcccaagccccgagagcagctgcggctttaccagcgagagctaccagcagggcgtgctgagcgccaccatcctgtacgagatcctgctgggcaaggccaccctgtacgccgtgctggtgtctgccctggtgctgatggctatggtcaagcggaaggacagccggggacgcgccaagagaagcggatctggcgtgaagcagaccctgaatttcgacctgctgaagctggctggcgacgtggaatccaacccaggcccttctagaggccatatgaccgagtacaagcccacggtgcgcctcgccacccgcgacgacgtccccagggccgtacgcaccctcgccgccgcgttcgccgactaccccgccacgcgccacaccgtcgatccggaccgccacatcgagcgggtcaccgagctgcaagaactcttcctcacgcgcgtcgggctcgacatcggcaaggtgtgggtcgcggacgacggcgccgcggtggcggtctggaccacgccggagagcgtcgaagcgggggcggtgttcgccgagatcggcccgcgcatggccgagttgagcggttcccggctggccgcgcagcaacagatggaaggcctcctggcgccgcaccggcccaaggagcccgcgtggttcctggccaccgtcggcgtctcgcccgaccaccagggcaagggtctgggcagcgccgtcgtgctccccggagtggaggcggccgagcgcgccggggtgcccgccttcctggagacctccgcgccccgcaacctccccttctacgagcggctcggcttcaccgtcaccgccgacgtcgaggtgcccgaaggaccgcgcacctggtgcatgacccgcaagcccggtgcctga

SEQ ID NO: 35826 - DNA, 3198 bp, synthetic construct
  source 1..3198: mol_type = other DNA
atggccttaccagtgaccgccttgctcctgccgctggccttgctgctccacgccgccaggccggcatgcatggaccccgacctggaaatcagagccgccttcctgcggcagagaaacacagccctgagaacagaggtggccgagctggaacaagaggtgcagcggctggaaaacgaggtgtcccagtacgagacaagatacggccctctcggaggcggaaaaggtaccggcggaggcggatctggcggcggaggtagcggtggcggaggatctgaattcgagaacgtgctgacacagagccctgccatcatgagtgcctctccaggcgagaaagtgaccatgacctgtagagccagcagcagcgtgtccagcagctacctgcactggtatcagcagaagtccggcgcaagccccaaagtgtggatctacagcaccagcaatctggcctctggcgtgccaggcagattttctggctctggcagcggcacaagctacagcctgacaatcagctccgtggaagccgaagatgccgccacctactactgccagcagtacagcggctaccccatcacatttggagccggcaccaaggtggaagtgaagagactcgaggacctgaagaacgtgttcccacctgaggtggccgtgttcgagcctagcgaggccgagatcagccacacccagaaagccaccctcgtgtgcctggctaccggcttctaccccgaccatgtggaactgtcttggtgggtcaacggcaaagaggtgcacagcggcgtgtgtaccgacccccagccactgaaagaacagcccgccctgaacgacagccggtactgcctgagcagcagactgagagtgtccgccaccttctggcagaacccccggaaccacttcagatgccaggtgcagttctacggcctgagcgagaacgacgagtggacccaggacagagccaagcccgtgacccagatcgtgtctgccgaagcctggggcagagccgattgcgacgtgaagctggtggaaaagagcttcgagacagacaccaacctgaacttccagaacctgagcgtgatcggcttcagaatcctgctgctgaaagtggccggctttaacctgctgatgaccctgcggctgtggtccagcagggccaagcgatctggatctggagcaacaaacttctcactactcaaacaagcaggtgacgtggaggagaatcccgggcctactagtgccaccatggactggatttggcgcatccttttccttgtcggcgctgctaccggcgcccattccgggcccgaagtgcagctggttgaatctggcggaggactggttcaggctggcggatctctgagactgtcttgtgccgccagcggcagaacctttagcatgggctggtttagacaggcccctggcaaagagagagagttcgtcgccgccatcacatactctggcggcagcccttactacgccgactctgtgaagggcagattcaccatcagccgggacaacgccaagaacaccgtgtacctccagatgaacagcctgaagcctgaggacaccgccgtgtactactgcgccgccaatccaacatacggcagcgactggaacgccgagaattggggccagggaacccaagtgacagtgtctagcggatccggcggcggaggatctggcggaggcggatctgggggcggaggctctttcgaacaggttcagctcaaagaatctggccccgtgctggtggccccaagccagacactgtctatcacctgtaccgtgtccggcttcagcctggcctcctacaacatccactgggtccgacagcctccaggcaaaggactggaatggctgggagtgatttgggctggcggcagcaccaactacaacagcgcactgatgagccggctgagcatcagcaaggacaacagcaagagccaggtgttcctccagatgaactccctccagaccgacgacaccgccatgtactactgcgccaagagaagcgacgactacagttggttcgcctactggggccagggcacactggttactgtgtctgcttctacgcgtatccagaaccctgatcctgccgtgtaccagctgcgggatagcaagagcagcgacaagagcgtgtgtctgttcaccgacttcgacagccagaccaacgtgtcccagagcaaggactccgacgtgtacatcaccgataagtgcgtgctggacatgcggagcatggacttcaagagcaactccgccgtggcctggtccaacaagtccgatttcgcctgcgccaacgccttcaacaacagcattatccccgaggacacattcttcccaagccccgagagcagctgcggctttaccagcgagagctaccagcagggcgtgctgagcgccaccatcctgtacgagatcctgctgggcaaggccaccctgtacgccgtgctggtgtctgccctggtgctgatggctatggtcaagcggaaggacagccggggacgcgccaagagaagcggatctggcgtgaagcagaccctgaatttcgacctgctgaagctggctggcgacgtggaatccaacccaggcccttctagaggccatatgaccgagtacaagcccacggtgcgcctcgccacccgcgacgacgtccccagggccgtacgcaccctcgccgccgcgttcgccgactaccccgccacgcgccacaccgtcgatccggaccgccacatcgagcgggtcaccgagctgcaagaactcttcctcacgcgcgtcgggctcgacatcggcaaggtgtgggtcgcggacgacggcgccgcggtggcggtctggaccacgccggagagcgtcgaagcgggggcggtgttcgccgagatcggcccgcgcatggccgagttgagcggttcccggctggccgcgcagcaacagatggaaggcctcctggcgccgcaccggcccaaggagcccgcgtggttcctggccaccgtcggcgtctcgcccgaccaccagggcaagggtctgggcagcgccgtcgtgctccccggagtggaggcggccgagcgcgccggggtgcccgccttcctggagacctccgcgccccgcaacctccccttctacgagcggctcggcttcaccgtcaccgccgacgtcgaggtgcccgaaggaccgcgcacctggtgcatgacccgcaagcccggtgcctga

SEQ ID NO: 35827 - DNA, 2847 bp, synthetic construct
  source 1..2847: mol_type = other DNA
atggccttaccagtgaccgccttgctcctgccgctggccttgctgctccacgccgccaggccggagaacgtgctgacacagagccctgccatcatgagtgcctctccaggcgagaaagtgaccatgacctgtagagccagcagcagcgtgtccagcagctacctgcactggtatcagcagaagtccggcgcaagccccaaagtgtggatctacagcaccagcaatctggcctctggcgtgccaggcagattttctggctctggcagcggcacaagctacagcctgacaatcagctccgtggaagccgaagatgccgccacctactactgccagcagtacagcggctaccccatcacatttggagccggcaccaaggtggaagtgaagagactcgaggacctgaagaacgtgttcccacctgaggtggccgtgttcgagcctagcgaggccgagatcagccacacccagaaagccaccctcgtgtgcctggctaccggcttctaccccgaccatgtggaactgtcttggtgggtcaacggcaaagaggtgcacagcggcgtgtgtaccgacccccagccactgaaagaacagcccgccctgaacgacagccggtactgcctgagcagcagactgagagtgtccgccaccttctggcagaacccccggaaccacttcagatgccaggtgcagttctacggcctgagcgagaacgacgagtggacccaggacagagccaagcccgtgacccagatcgtgtctgccgaagcctggggcagagccgattgcgacgtgaagctggtggaaaagagcttcgagacagacaccaacctgaacttccagaacctgagcgtgatcggcttcagaatcctgctgctgaaagtggccggctttaacctgctgatgaccctgcggctgtggtccagcagggccaagcgatctggatctggagcaacaaacttctcactactcaaacaagcaggtgacgtggaggagaatcccgggcctactagtgccaccatggactggatttggcgcatccttttccttgtcggcgctgctaccggcgcccattccgggcccatgggatcttggagcgagttttacgatcggctgcacgccattcaccaccggctgtatgctctcggaggaagcgaagctgagctggccgcttttgaaaaagaaattgccgctttcgagtccgagcttcaggcttacaaaggcaaagggaatcctgaggtcgaggccctgagagataccgccgccttcatcagaacccggttgcaggcataccggcacaacggatccggcggcggaggatctggcggaggcggatctgggggcggaggctctttcgaacaggttcagctcaaagaatctggccccgtgctggtggccccaagccagacactgtctatcacctgtaccgtgtccggcttcagcctggcctcctacaacatccactgggtccgacagcctccaggcaaaggactggaatggctgggagtgatttgggctggcggcagcaccaactacaacagcgcactgatgagccggctgagcatcagcaaggacaacagcaagagccaggtgttcctccagatgaactccctccagaccgacgacaccgccatgtactactgcgccaagagaagcgacgactacagttggttcgcctactggggccagggcacactggttactgtgtctgcttctacgcgtatccagaaccctgatcctgccgtgtaccagctgcgggatagcaagagcagcgacaagagcgtgtgtctgttcaccgacttcgacagccagaccaacgtgtcccagagcaaggactccgacgtgtacatcaccgataagtgcgtgctggacatgcggagcatggacttcaagagcaactccgccgtggcctggtccaacaagtccgatttcgcctgcgccaacgccttcaacaacagcattatccccgaggacacattcttcccaagccccgagagcagctgcggctttaccagcgagagctaccagcagggcgtgctgagcgccaccatcctgtacgagatcctgctgggcaaggccaccctgtacgccgtgctggtgtctgccctggtgctgatggctatggtcaagcggaaggacagccggggacgcgccaagagaagcggatctggcgtgaagcagaccctgaatttcgacctgctgaagctggctggcgacgtggaatccaacccaggcccttctagaggccatatgaccgagtacaagcccacggtgcgcctcgccacccgcgacgacgtccccagggccgtacgcaccctcgccgccgcgttcgccgactaccccgccacgcgccacaccgtcgatccggaccgccacatcgagcgggtcaccgagctgcaagaactcttcctcacgcgcgtcgggctcgacatcggcaaggtgtgggtcgcggacgacggcgccgcggtggcggtctggaccacgccggagagcgtcgaagcgggggcggtgttcgccgagatcggcccgcgcatggccgagttgagcggttcccggctggccgcgcagcaacagatggaaggcctcctggcgccgcaccggcccaaggagcccgcgtggttcctggccaccgtcggcgtctcgcccgaccaccagggcaagggtctgggcagcgccgtcgtgctccccggagtggaggcggccgagcgcgccggggtgcccgccttcctggagacctccgcgccccgcaacctccccttctacgagcggctcggcttcaccgtcaccgccgacgtcgaggtgcccgaaggaccgcgcacctggtgcatgacccgcaagcccggtgcctga

SEQ ID NO: 35828 - DNA, 3477 bp, synthetic construct
  source 1..3477: mol_type = other DNA
atggccttaccagtgaccgccttgctcctgccgctggccttgctgctccacgccgccaggccggagaacgtgctgacacagagccctgccatcatgagtgcctctccaggcgagaaagtgaccatgacctgtagagccagcagcagcgtgtccagcagctacctgcactggtatcagcagaagtccggcgcaagccccaaagtgtggatctacagcaccagcaatctggcctctggcgtgccaggcagattttctggctctggcagcggcacaagctacagcctgacaatcagctccgtggaagccgaagatgccgccacctactactgccagcagtacagcggctaccccatcacatttggagccggcaccaaggtggaagtgaagagactcgaggacctgaagaacgtgttcccacctgaggtggccgtgttcgagcctagcgaggccgagatcagccacacccagaaagccaccctcgtgtgcctggctaccggcttctaccccgaccatgtggaactgtcttggtgggtcaacggcaaagaggtgcacagcggcgtgtgtaccgacccccagccactgaaagaacagcccgccctgaacgacagccggtactgcctgagcagcagactgagagtgtccgccaccttctggcagaacccccggaaccacttcagatgccaggtgcagttctacggcctgagcgagaacgacgagtggacccaggacagagccaagcccgtgacccagatcgtgtctgccgaagcctggggcagagccgattgcgacgtgaagctggtggaaaagagcttcgagacagacaccaacctgaacttccagaacctgagcgtgatcggcttcagaatcctgctgctgaaagtggccggctttaacctgctgatgaccctgcggctgtggtccagcagggccaagcgatctggatctggagcaacaaacttctcactactcaaacaagcaggtgacgtggaggagaatcccgggcctactagtaccatggactggatttggcgcatccttttccttgtcggcgctgctaccggcgcccattccctgttcaatcaagaggtgcagatccctctgaccgagagctactgtggcccctgtcctaagaactggatctgctacaagaacaactgctaccagttcttcgacgagagcaagaattggtacgagagccaggccagctgcatgagccagaatgccagcctgctgaaggtgtacagcaaagaggaccaggacctgctgaaactggtcaagagcgcccactggatgggccttgtgcacatccccaccaatggctcttggcagtgggaggacggcagcattctgagccctaacctgctgaccatcatcgagatgcagaagggcgactgcgccctgtacgccagcagctttaagggctacatcgagaattgcagcaccccgaacacctacatctgtatgcagagaaccgtttctggcggaggcggctctggaggaggcggaagtggcggcggaggcgacctctttaatcaagaagtccagattccactcaccgaatcctactgcggaccttgtccaaaaaattggatttgttataagaacaactgttatcaattctttgatgagtctaaaaattggtatgagtcccaggcttcctgcatgtctcagaacgcttctctgctgaaagtctactctaaagaagatcaggatctcctgaagctcgtcaagtctgcccattggatggggctcgtccacattcctaccaacggaagctggcaatgggaagatggctccatcctgtctccaaatctgctcacgattattgaaatgcagaaaggggattgtgctctctacgccagctccttcaagggatatattgagaactgtagcacgcccaatacttatatctgtatgcaacggaccgtgggatccggcggcggaggatctggcggaggcggatctgggggcggaggctctttcgaacaggttcagctcaaagaatctggccccgtgctggtggccccaagccagacactgtctatcacctgtaccgtgtccggcttcagcctggcctcctacaacatccactgggtccgacagcctccaggcaaaggactggaatggctgggagtgatttgggctggcggcagcaccaactacaacagcgcactgatgagccggctgagcatcagcaaggacaacagcaagagccaggtgttcctccagatgaactccctccagaccgacgacaccgccatgtactactgcgccaagagaagcgacgactacagttggttcgcctactggggccagggcacactggttactgtgtctgcttctacgcgtatccagaaccctgatcctgccgtgtaccagctgcgggatagcaagagcagcgacaagagcgtgtgtctgttcaccgacttcgacagccagaccaacgtgtcccagagcaaggactccgacgtgtacatcaccgataagtgcgtgctggacatgcggagcatggacttcaagagcaactccgccgtggcctggtccaacaagtccgatttcgcctgcgccaacgccttcaacaacagcattatccccgaggacacattcttcccaagccccgagagcagctgcggctttaccagcgagagctaccagcagggcgtgctgagcgccaccatcctgtacgagatcctgctgggcaaggccaccctgtacgccgtgctggtgtctgccctggtgctgatggctatggtcaagcggaaggacagccggggacgcgccaagagaagcggatctggcgtgaagcagaccctgaatttcgacctgctgaagctggctggcgacgtggaatccaacccaggcccttctagaggccatatgaccgagtacaagcccacggtgcgcctcgccacccgcgacgacgtccccagggccgtacgcaccctcgccgccgcgttcgccgactaccccgccacgcgccacaccgtcgatccggaccgccacatcgagcgggtcaccgagctgcaagaactcttcctcacgcgcgtcgggctcgacatcggcaaggtgtgggtcgcggacgacggcgccgcggtggcggtctggaccacgccggagagcgtcgaagcgggggcggtgttcgccgagatcggcccgcgcatggccgagttgagcggttcccggctggccgcgcagcaacagatggaaggcctcctggcgccgcaccggcccaaggagcccgcgtggttcctggccaccgtcggcgtctcgcccgaccaccagggcaagggtctgggcagcgccgtcgtgctccccggagtggaggcggccgagcgcgccggggtgcccgccttcctggagacctccgcgccccgcaacctccccttctacgagcggctcggcttcaccgtcaccgccgacgtcgaggtgcccgaaggaccgcgcacctggtgcatgacccgcaagcccggtgcctga

SEQ ID NO: 35829 - DNA, 1863 bp, synthetic construct
  source 1..1863: mol_type = other DNA
atggccttaccagtgaccgccttgctcctgccgctggccttgctgctccacgccgccaggccggagaacgtgctgacacagagccctgccatcatgagtgcctctccaggcgagaaagtgaccatgacctgtagagccagcagcagcgtgtccagcagctacctgcactggtatcagcagaagtccggcgcaagccccaaagtgtggatctacagcaccagcaatctggcctctggcgtgccaggcagattttctggctctggcagcggcacaagctacagcctgacaatcagctccgtggaagccgaagatgccgccacctactactgccagcagtacagcggctaccccatcacatttggagccggcaccaaggtggaagtgaagagactcgaggacctgaagaacgtgttcccacctgaggtggccgtgttcgagcctagcgaggccgagatcagccacacccagaaagccaccctcgtgtgcctggctaccggcttctaccccgaccatgtggaactgtcttggtgggtcaacggcaaagaggtgcacagcggcgtgtgtaccgacccccagccactgaaagaacagcccgccctgaacgacagccggtactgcctgagcagcagactgagagtgtccgccaccttctggcagaacccccggaaccacttcagatgccaggtgcagttctacggcctgagcgagaacgacgagtggacccaggacagagccaagcccgtgacccagatcgtgtctgccgaagcctggggcagagccgattgcggctttaccagcgagagctaccagcagggcgtgctgagcgccaccaacctgagcgtgatcggcttcagaatcctgctgctgaaagtggccggctttaacctgctgatgaccctgcggctgtggtccagcagggccaagcgatctggatctggagcaacaaacttctcactactcaaacaagcaggtgacgtggaggagaatcccgggcctactagtatggactggatttggcgcatccttttccttgtcggcgctgctaccggcgcgcattccttcgaacaggttcagctcaaagaatctggccccgtgctggtggccccaagccagacactgtctatcacctgtaccgtgtccggcttcagcctggcctcctacaacatccactgggtccgacagcctccaggcaaaggactggaatggctgggagtgatttgggctggcggcagcaccaactacaacagcgcactgatgagccggctgagcatcagcaaggacaacagcaagagccaggtgttcctccagatgaactccctccagaccgacgacaccgccatgtactactgcgccaagagaagcgacgactacagttggttcgcctactggggccagggcacactggttactgtgtctgcttctacgcgtatccagaaccctgatcctgccgtgtaccagctgcgggatagcaagagcagcgacaagagcgtgtgtctgttcaccgacttcgacagccagaccaacgtgtcccagagcaaggactccgacgtgtacatcaccgataagtgcgtgctggacatgcggagcatggacttcaagagcaactccgccgtggcctggtccaacaagtccgatttcgcctgcgccaacgccttcaacaacagcattatccccgaggacacattcttcccaagccccgagagcagctgcgacgtgaagctggtggaaaagagcttcgagacagacaccaacctgaacttccagatcctgtacgagatcctgctgggcaaggccaccctgtacgccgtgctggtgtctgccctggtgctgatggctatggtcaagcggaaggacagccgggga

SEQ ID NO: 35830 - DNA, 1875 bp, synthetic construct
  source 1..1875: mol_type = other DNA
atggccttaccagtgaccgccttgctcctgccgctggccttgctgctccacgccgccaggccggagaacgtgctgacacagagccctgccatcatgagtgcctctccaggcgagaaagtgaccatgacctgtagagccagcagcagcgtgtccagcagctacctgcactggtatcagcagaagtccggcgcaagccccaaagtgtggatctacagcaccagcaatctggcctctggcgtgccaggcagattttctggctctggcagcggcacaagctacagcctgacaatcagctccgtggaagccgaagatgccgccacctactactgccagcagtacagcggctaccccatcacatttggagccggcaccaaggtggaagtgaagagactcgagatccagaaccctgatcctgccgtgtaccagctgcgggatagcaagagcagcgacaagagcgtgtgtctgttcaccgacttcgacagccagaccaacgtgtcccagagcaaggactccgacgtgtacatcaccgataagtgcgtgctggacatgcggagcatggacttcaagagcaactccgccgtggcctggtccaacaagtccgatttcgcctgcgccaacgccttcaacaacagcattatccccgaggacacattcttcccaagccccgagagcagctgcgacgtgaagctggtggaaaagagcttcgagacagacaccaacctgaacttccagatcctgtacgagatcctgctgggcaaggccaccctgtacgccgtgctggtgtctgccctggtgctgatggctatggtcaagcggaaggacagccggggacgcgccaagagaagcggatctggcgtgaagcagaccctgaatttcgacctgctgaagctggctggcgacgtggaatccaacccaggccctactagtatggactggatttggcgcatccttttccttgtcggcgctgctaccggcgcgcattccttcgaacaggttcagctcaaagaatctggccccgtgctggtggccccaagccagacactgtctatcacctgtaccgtgtccggcttcagcctggcctcctacaacatccactgggtccgacagcctccaggcaaaggactggaatggctgggagtgatttgggctggcggcagcaccaactacaacagcgcactgatgagccggctgagcatcagcaaggacaacagcaagagccaggtgttcctccagatgaactccctccagaccgacgacaccgccatgtactactgcgccaagagaagcgacgactacagttggttcgcctactggggccagggcacactggttactgtgtctgcttctacgcgtgaggacctgaagaacgtgttcccacctgaggtggccgtgttcgagcctagcgaggccgagatcagccacacccagaaagccaccctcgtgtgcctggctaccggcttctaccccgaccatgtggaactgtcttggtgggtcaacggcaaagaggtgcacagcggcgtgtgtaccgacccccagccactgaaagaacagcccgccctgaacgacagccggtactgcctgagcagcagactgagagtgtccgccaccttctggcagaacccccggaaccacttcagatgccaggtgcagttctacggcctgagcgagaacgacgagtggacccaggacagagccaagcccgtgacccagatcgtgtctgccgaagcctggggcagagccgattgcggctttaccagcgagagctaccagcagggcgtgctgagcgccaccaacctgagcgtgatcggcttcagaatcctgctgctgaaagtggccggctttaacctgctgatgaccctgcggctgtggtccagc

SEQ ID NO: 35831 - DNA, 2268 bp, synthetic construct
  source 1..2268: mol_type = other DNA
atggccttaccagtgaccgccttgctcctgccgctggccttgctgctccacgccgccaggccggaagtgcagctggttgaatctggcggaggactggttcagcctggcggatctctgagactgtcttgtgccgccagcggcttcagcttcagcgacttttggatgagctgggtccgacaggcccctggcaaaggacttgaatgggtcgccacaatcagccaggccggcagcgagaaggactacgtggactctgtgaagggcagattcaccatcagccgggacaacgccaagaagtccctgtacctccagatgaacagcctgagagccgaggacaccgccgtgtactattgtgcctctggcgtgtacagcttcgactacagaggccagggcaccctggtcacagtctcttctggtaccggcggaggcggatctggcggcggaggtagcggtggcggaggatctgaattcgagaacgtgctgacacagagccctgccatcatgagtgcctctccaggcgagaaagtgaccatgacctgtagagccagcagcagcgtgtccagcagctacctgcactggtatcagcagaagtccggcgcaagccccaaagtgtggatctacagcaccagcaatctggcctctggcgtgccaggcagattttctggctctggcagcggcacaagctacagcctgacaatcagctccgtggaagccgaagatgccgccacctactactgccagcagtacagcggctaccccatcacatttggagccggcaccaaggtggaagtgaagagactcgaggacctgaagaacgtgttcccacctgaggtggccgtgttcgagcctagcgaggccgagatcagccacacccagaaagccaccctcgtgtgcctggctaccggcttctaccccgaccatgtggaactgtcttggtgggtcaacggcaaagaggtgcacagcggcgtgtgtaccgacccccagccactgaaagaacagcccgccctgaacgacagccggtactgcctgagcagcagactgagagtgtccgccaccttctggcagaacccccggaaccacttcagatgccaggtgcagttctacggcctgagcgagaacgacgagtggacccaggacagagccaagcccgtgacccagatcgtgtctgccgaagcctggggcagagccgattgcggctttaccagcgagagctaccagcagggcgtgctgagcgccaccaacctgagcgtgatcggcttcagaatcctgctgctgaaagtggccggctttaacctgctgatgaccctgcggctgtggtccagcagggccaagcgatctggatctggagcaacaaacttctcactactcaaacaagcaggtgacgtggaggagaatcccgggcctactagtatggactggatttggcgcatccttttccttgtcggcgctgctaccggcgcgcattccttcgaacaggttcagctcaaagaatctggccccgtgctggtggccccaagccagacactgtctatcacctgtaccgtgtccggcttcagcctggcctcctacaacatccactgggtccgacagcctccaggcaaaggactggaatggctgggagtgatttgggctggcggcagcaccaactacaacagcgcactgatgagccggctgagcatcagcaaggacaacagcaagagccaggtgttcctccagatgaactccctccagaccgacgacaccgccatgtactactgcgccaagagaagcgacgactacagttggttcgcctactggggccagggcacactggttactgtgtctgcttctacgcgtatccagaaccctgatcctgccgtgtaccagctgcgggatagcaagagcagcgacaagagcgtgtgtctgttcaccgacttcgacagccagaccaacgtgtcccagagcaaggactccgacgtgtacatcaccgataagtgcgtgctggacatgcggagcatggacttcaagagcaactccgccgtggcctggtccaacaagtccgatttcgcctgcgccaacgccttcaacaacagcattatccccgaggacacattcttcccaagccccgagagcagctgcgacgtgaagctggtggaaaagagcttcgagacagacaccaacctgaacttccagatcctgtacgagatcctgctgggcaaggccaccctgtacgccgtgctggtgtctgccctggtgctgatggctatggtcaagcggaaggacagccgggga

SEQ ID NO: 35832 - DNA, 2280 bp, synthetic construct
  source 1..2280: mol_type = other DNA
atggccttaccagtgaccgccttgctcctgccgctggccttgctgctccacgccgccaggccggaagtgcagctggttgaatctggcggaggactggttcagcctggcggatctctgagactgtcttgtgccgccagcggcttcagcttcagcgacttttggatgagctgggtccgacaggcccctggcaaaggacttgaatgggtcgccacaatcagccaggccggcagcgagaaggactacgtggactctgtgaagggcagattcaccatcagccgggacaacgccaagaagtccctgtacctccagatgaacagcctgagagccgaggacaccgccgtgtactattgtgcctctggcgtgtacagcttcgactacagaggccagggcaccctggtcacagtctcttctggtaccggcggaggcggatctggcggcggaggtagcggtggcggaggatctgaattcgagaacgtgctgacacagagccctgccatcatgagtgcctctccaggcgagaaagtgaccatgacctgtagagccagcagcagcgtgtccagcagctacctgcactggtatcagcagaagtccggcgcaagccccaaagtgtggatctacagcaccagcaatctggcctctggcgtgccaggcagattttctggctctggcagcggcacaagctacagcctgacaatcagctccgtggaagccgaagatgccgccacctactactgccagcagtacagcggctaccccatcacatttggagccggcaccaaggtggaagtgaagagactcgagatccagaaccctgatcctgccgtgtaccagctgcgggatagcaagagcagcgacaagagcgtgtgtctgttcaccgacttcgacagccagaccaacgtgtcccagagcaaggactccgacgtgtacatcaccgataagtgcgtgctggacatgcggagcatggacttcaagagcaactccgccgtggcctggtccaacaagtccgatttcgcctgcgccaacgccttcaacaacagcattatccccgaggacacattcttcccaagccccgagagcagctgcgacgtgaagctggtggaaaagagcttcgagacagacaccaacctgaacttccagatcctgtacgagatcctgctgggcaaggccaccctgtacgccgtgctggtgtctgccctggtgctgatggctatggtcaagcggaaggacagccggggacgcgccaagagaagcggatctggcgtgaagcagaccctgaatttcgacctgctgaagctggctggcgacgtggaatccaacccaggccctactagtatggactggatttggcgcatccttttccttgtcggcgctgctaccggcgcgcattccttcgaacaggttcagctcaaagaatctggccccgtgctggtggccccaagccagacactgtctatcacctgtaccgtgtccggcttcagcctggcctcctacaacatccactgggtccgacagcctccaggcaaaggactggaatggctgggagtgatttgggctggcggcagcaccaactacaacagcgcactgatgagccggctgagcatcagcaaggacaacagcaagagccaggtgttcctccagatgaactccctccagaccgacgacaccgccatgtactactgcgccaagagaagcgacgactacagttggttcgcctactggggccagggcacactggttactgtgtctgcttctacgcgtgaggacctgaagaacgtgttcccacctgaggtggccgtgttcgagcctagcgaggccgagatcagccacacccagaaagccaccctcgtgtgcctggctaccggcttctaccccgaccatgtggaactgtcttggtgggtcaacggcaaagaggtgcacagcggcgtgtgtaccgacccccagccactgaaagaacagcccgccctgaacgacagccggtactgcctgagcagcagactgagagtgtccgccaccttctggcagaacccccggaaccacttcagatgccaggtgcagttctacggcctgagcgagaacgacgagtggacccaggacagagccaagcccgtgacccagatcgtgtctgccgaagcctggggcagagccgattgcggctttaccagcgagagctaccagcagggcgtgctgagcgccaccaacctgagcgtgatcggcttcagaatcctgctgctgaaagtggccggctttaacctgctgatgaccctgcggctgtggtccagc

SEQ ID NO: 35833 - DNA, 2679 bp, synthetic construct
  source 1..2679: mol_type = other DNA
atggccttaccagtgaccgccttgctcctgccgctggccttgctgctccacgccgccaggccggaagtgcagctggttgaatctggcggaggactggttcagcctggcggatctctgagactgtcttgtgccgccagcggcttcagcttcagcgacttttggatgagctgggtccgacaggcccctggcaaaggacttgaatgggtcgccacaatcagccaggccggcagcgagaaggactacgtggactctgtgaagggcagattcaccatcagccgggacaacgccaagaagtccctgtacctccagatgaacagcctgagagccgaggacaccgccgtgtactattgtgcctctggcgtgtacagcttcgactacagaggccagggcaccctggtcacagtctcttctggtaccggcggaggcggatctggcggcggaggtagcggtggcggaggatctgaattcgagaacgtgctgacacagagccctgccatcatgagtgcctctccaggcgagaaagtgaccatgacctgtagagccagcagcagcgtgtccagcagctacctgcactggtatcagcagaagtccggcgcaagccccaaagtgtggatctacagcaccagcaatctggcctctggcgtgccaggcagattttctggctctggcagcggcacaagctacagcctgacaatcagctccgtggaagccgaagatgccgccacctactactgccagcagtacagcggctaccccatcacatttggagccggcaccaaggtggaagtgaagagactcgaggacctgaagaacgtgttcccacctgaggtggccgtgttcgagcctagcgaggccgagatcagccacacccagaaagccaccctcgtgtgcctggctaccggcttctaccccgaccatgtggaactgtcttggtgggtcaacggcaaagaggtgcacagcggcgtgtgtaccgacccccagccactgaaagaacagcccgccctgaacgacagccggtactgcctgagcagcagactgagagtgtccgccaccttctggcagaacccccggaaccacttcagatgccaggtgcagttctacggcctgagcgagaacgacgagtggacccaggacagagccaagcccgtgacccagatcgtgtctgccgaagcctggggcagagccgattgcggctttaccagcgagagctaccagcagggcgtgctgagcgccaccaacctgagcgtgatcggcttcagaatcctgctgctgaaagtggccggctttaacctgctgatgaccctgcggctgtggtccagcagggccaagcgatctggatctggagcaacaaacttctcactactcaaacaagcaggtgacgtggaggagaatcccgggcctactagtatggactggatttggcgcatccttttccttgtcggcgctgctaccggcgcgcattccgggccccagctccagctgcaagagtctggacctggcctggtcaagcctagcgagacactgagcctgacctgtaccgtgtccggcgatagcatcagcagcggcgattactactggggctggatcagacagcctcctggcaaaggactggaatggatcggccacatctactacagcggcgtgacctactacaaccccagcctgaagtccagagtgaccatcagcgtggacaccagccggaaccagttctccctgaagctgtctagcgtgacagccgccgataccgccgtgtactactgcaccagagaggacagcagcaactggcggagtagaggccagggaacactggtcacagttagctctggatccggcggaggcggaagtggaggcggaggatctggcggcggaggctctttcgaacaggttcagctcaaagaatctggccccgtgctggtggccccaagccagacactgtctatcacctgtaccgtgtccggcttcagcctggcctcctacaacatccactgggtccgacagcctccaggcaaaggactggaatggctgggagtgatttgggctggcggcagcaccaactacaacagcgcactgatgagccggctgagcatcagcaaggacaacagcaagagccaggtgttcctccagatgaactccctccagaccgacgacaccgccatgtactactgcgccaagagaagcgacgactacagttggttcgcctactggggccagggcacactggttactgtgtctgcttctacgcgtatccagaaccctgatcctgccgtgtaccagctgcgggatagcaagagcagcgacaagagcgtgtgtctgttcaccgacttcgacagccagaccaacgtgtcccagagcaaggactccgacgtgtacatcaccgataagtgcgtgctggacatgcggagcatggacttcaagagcaactccgccgtggcctggtccaacaagtccgatttcgcctgcgccaacgccttcaacaacagcattatccccgaggacacattcttcccaagccccgagagcagctgcgacgtgaagctggtggaaaagagcttcgagacagacaccaacctgaacttccagatcctgtacgagatcctgctgggcaaggccaccctgtacgccgtgctggtgtctgccctggtgctgatggctatggtcaagcggaaggacagccgggga

SEQ ID NO: 35834 - DNA, 2691 bp, synthetic construct
  source 1..2691: mol_type = other DNA
atggccttaccagtgaccgccttgctcctgccgctggccttgctgctccacgccgccaggccggaagtgcagctggttgaatctggcggaggactggttcagcctggcggatctctgagactgtcttgtgccgccagcggcttcagcttcagcgacttttggatgagctgggtccgacaggcccctggcaaaggacttgaatgggtcgccacaatcagccaggccggcagcgagaaggactacgtggactctgtgaagggcagattcaccatcagccgggacaacgccaagaagtccctgtacctccagatgaacagcctgagagccgaggacaccgccgtgtactattgtgcctctggcgtgtacagcttcgactacagaggccagggcaccctggtcacagtctcttctggtaccggcggaggcggatctggcggcggaggtagcggtggcggaggatctgaattcgagaacgtgctgacacagagccctgccatcatgagtgcctctccaggcgagaaagtgaccatgacctgtagagccagcagcagcgtgtccagcagctacctgcactggtatcagcagaagtccggcgcaagccccaaagtgtggatctacagcaccagcaatctggcctctggcgtgccaggcagattttctggctctggcagcggcacaagctacagcctgacaatcagctccgtggaagccgaagatgccgccacctactactgccagcagtacagcggctaccccatcacatttggagccggcaccaaggtggaagtgaagagactcgagatccagaaccctgatcctgccgtgtaccagctgcgggatagcaagagcagcgacaagagcgtgtgtctgttcaccgacttcgacagccagaccaacgtgtcccagagcaaggactccgacgtgtacatcaccgataagtgcgtgctggacatgcggagcatggacttcaagagcaactccgccgtggcctggtccaacaagtccgatttcgcctgcgccaacgccttcaacaacagcattatccccgaggacacattcttcccaagccccgagagcagctgcgacgtgaagctggtggaaaagagcttcgagacagacaccaacctgaacttccagatcctgtacgagatcctgctgggcaaggccaccctgtacgccgtgctggtgtctgccctggtgctgatggctatggtcaagcggaaggacagccggggacgcgccaagagaagcggatctggcgtgaagcagaccctgaatttcgacctgctgaagctggctggcgacgtggaatccaacccaggccctactagtatggactggatttggcgcatccttttccttgtcggcgctgctaccggcgcgcattccgggccccagctccagctgcaagagtctggacctggcctggtcaagcctagcgagacactgagcctgacctgtaccgtgtccggcgatagcatcagcagcggcgattactactggggctggatcagacagcctcctggcaaaggactggaatggatcggccacatctactacagcggcgtgacctactacaaccccagcctgaagtccagagtgaccatcagcgtggacaccagccggaaccagttctccctgaagctgtctagcgtgacagccgccgataccgccgtgtactactgcaccagagaggacagcagcaactggcggagtagaggccagggaacactggtcacagttagctctggatccggcggaggcggaagtggaggcggaggatctggcggcggaggctctttcgaacaggttcagctcaaagaatctggccccgtgctggtggccccaagccagacactgtctatcacctgtaccgtgtccggcttcagcctggcctcctacaacatccactgggtccgacagcctccaggcaaaggactggaatggctgggagtgatttgggctggcggcagcaccaactacaacagcgcactgatgagccggctgagcatcagcaaggacaacagcaagagccaggtgttcctccagatgaactccctccagaccgacgacaccgccatgtactactgcgccaagagaagcgacgactacagttggttcgcctactggggccagggcacactggttactgtgtctgcttctacgcgtgaggacctgaagaacgtgttcccacctgaggtggccgtgttcgagcctagcgaggccgagatcagccacacccagaaagccaccctcgtgtgcctggctaccggcttctaccccgaccatgtggaactgtcttggtgggtcaacggcaaagaggtgcacagcggcgtgtgtaccgacccccagccactgaaagaacagcccgccctgaacgacagccggtactgcctgagcagcagactgagagtgtccgccaccttctggcagaacccccggaaccacttcagatgccaggtgcagttctacggcctgagcgagaacgacgagtggacccaggacagagccaagcccgtgacccagatcgtgtctgccgaagcctggggcagagccgattgcggctttaccagcgagagctaccagcagggcgtgctgagcgccaccaacctgagcgtgatcggcttcagaatcctgctgctgaaagtggccggctttaacctgctgatgaccctgcggctgtggtccagc

SEQ ID NO: 35835 - DNA, 2175 bp, synthetic construct
  source 1..2175: mol_type = other DNA
atggccttaccagtgaccgccttgctcctgccgctggccttgctgctccacgccgccaggccggagaacgtgctgacacagagccctgccatcatgagtgcctctccaggcgagaaagtgaccatgacctgtagagccagcagcagcgtgtccagcagctacctgcactggtatcagcagaagtccggcgcaagccccaaagtgtggatctacagcaccagcaatctggcctctggcgtgccaggcagattttctggctctggcagcggcacaagctacagcctgacaatcagctccgtggaagccgaagatgccgccacctactactgccagcagtacagcggctaccccatcacatttggagccggcaccaaggtggaagtgaagagactcgaggacctgaagaacgtgttcccacctgaggtggccgtgttcgagcctagcgaggccgagatcagccacacccagaaagccaccctcgtgtgcctggctaccggcttctaccccgaccatgtggaactgtcttggtgggtcaacggcaaagaggtgcacagcggcgtgtgtaccgacccccagccactgaaagaacagcccgccctgaacgacagccggtactgcctgagcagcagactgagagtgtccgccaccttctggcagaacccccggaaccacttcagatgccaggtgcagttctacggcctgagcgagaacgacgagtggacccaggacagagccaagcccgtgacccagatcgtgtctgccgaagcctggggcagagccgatgatgtgattaagatccactggcaggaaaagaagtccaacaccatcctgggcagccaggaaggcaacaccatgaagaccaacgacacctacatgaagttcagctggctgaccgtgcccgagaagtccctggacaaagaacacagatgcatcgtgcggcacgaaaacaacaagaacggcgtggaccaggaaatcatcttcccacccatcaagaccgatgtgattacaatggaccccaaggacaactgctccaaggacgccaacgataccctgctgctccagctgaccaacaccagcgcctactacatgtacttgttgctgctgctgaagtccgtggtgtacttcgccatcatcacatgctgcctgctgatggctatggtcaagcggaaggacagccggggaagggccaagcgatctggatctggagcaacaaacttctcactactcaaacaagcaggtgacgtggaggagaatcccgggcctactagtatggactggatttggcgcatccttttccttgtcggcgctgctaccggcgcgcattccttcgaacaggttcagctcaaagaatctggccccgtgctggtggccccaagccagacactgtctatcacctgtaccgtgtccggcttcagcctggcctcctacaacatccactgggtccgacagcctccaggcaaaggactggaatggctgggagtgatttgggctggcggcagcaccaactacaacagcgcactgatgagccggctgagcatcagcaaggacaacagcaagagccaggtgttcctccagatgaactccctccagaccgacgacaccgccatgtactactgcgccaagagaagcgacgactacagttggttcgcctactggggccagggcacactggttactgtgtctgcttctacgcgtatccagaaccctgatcctgccgtgtaccagctgcgggatagcaagagcagcgacaagagcgtgtgtctgttcaccgacttcgacagccagaccaacgtgtcccagagcaaggactccgacgtgtacatcaccgataagtgcgtgctggacatgcggagcatggacttcaagagcaactccgccgtggcctggtccaacaagtccgatttcgcctgcgccaacgccttcaacaacagcattatccccgaggacacattcttcccaagccccgagagcagcgactccaccgaccacgtgaagcccaaagagacagagaacaccaagcagcccagcaagagctgccacaagcccaaggccatcgtgcacaccgagaaagtgaacatgatgagcctgaccgtgctgggcctgcggatgctgttcgccaaaaccgtggccgtgaacttcctgctgaccgccaagctgttcttcctcctcaccgcc

SEQ ID NO: 35836 - DNA, 2187 bp, synthetic construct
  source 1..2187: mol_type = other DNA
atggccttaccagtgaccgccttgctcctgccgctggccttgctgctccacgccgccaggccggagaacgtgctgacacagagccctgccatcatgagtgcctctccaggcgagaaagtgaccatgacctgtagagccagcagcagcgtgtccagcagctacctgcactggtatcagcagaagtccggcgcaagccccaaagtgtggatctacagcaccagcaatctggcctctggcgtgccaggcagattttctggctctggcagcggcacaagctacagcctgacaatcagctccgtggaagccgaagatgccgccacctactactgccagcagtacagcggctaccccatcacatttggagccggcaccaaggtggaagtgaagagactcgagatccagaaccctgatcctgccgtgtaccagctgcgggatagcaagagcagcgacaagagcgtgtgtctgttcaccgacttcgacagccagaccaacgtgtcccagagcaaggactccgacgtgtacatcaccgataagtgcgtgctggacatgcggagcatggacttcaagagcaactccgccgtggcctggtccaacaagtccgatttcgcctgcgccaacgccttcaacaacagcattatccccgaggacacattcttcccaagccccgagagcagcgactccaccgaccacgtgaagcccaaagagacagagaacaccaagcagcccagcaagagctgccacaagcccaaggccatcgtgcacaccgagaaagtgaacatgatgagcctgaccgtgctgggcctgcggatgctgttcgccaaaaccgtggccgtgaacttcctgctgaccgccaagctgttcttcctcctcaccgcccgcgccaagagaagcggatctggcgtgaagcagaccctgaatttcgacctgctgaagctggctggcgacgtggaatccaacccaggccctactagtatggactggatttggcgcatccttttccttgtcggcgctgctaccggcgcgcattccttcgaacaggttcagctcaaagaatctggccccgtgctggtggccccaagccagacactgtctatcacctgtaccgtgtccggcttcagcctggcctcctacaacatccactgggtccgacagcctccaggcaaaggactggaatggctgggagtgatttgggctggcggcagcaccaactacaacagcgcactgatgagccggctgagcatcagcaaggacaacagcaagagccaggtgttcctccagatgaactccctccagaccgacgacaccgccatgtactactgcgccaagagaagcgacgactacagttggttcgcctactggggccagggcacactggttactgtgtctgcttctacgcgtgaggacctgaagaacgtgttcccacctgaggtggccgtgttcgagcctagcgaggccgagatcagccacacccagaaagccaccctcgtgtgcctggctaccggcttctaccccgaccatgtggaactgtcttggtgggtcaacggcaaagaggtgcacagcggcgtgtgtaccgacccccagccactgaaagaacagcccgccctgaacgacagccggtactgcctgagcagcagactgagagtgtccgccaccttctggcagaacccccggaaccacttcagatgccaggtgcagttctacggcctgagcgagaacgacgagtggacccaggacagagccaagcccgtgacccagatcgtgtctgccgaagcctggggcagagccgatgatgtgattaagatccactggcaggaaaagaagtccaacaccatcctgggcagccaggaaggcaacaccatgaagaccaacgacacctacatgaagttcagctggctgaccgtgcccgagaagtccctggacaaagaacacagatgcatcgtgcggcacgaaaacaacaagaacggcgtggaccaggaaatcatcttcccacccatcaagaccgatgtgattacaatggaccccaaggacaactgctccaaggacgccaacgataccctgctgctccagctgaccaacaccagcgcctactacatgtacttgttgctgctgctgaagtccgtggtgtacttcgccatcatcacatgctgcctgctgatggctatggtcaagcggaaggacagccgggga

SEQ ID NO: 35837 - DNA, 2580 bp, synthetic construct
  source 1..2580: mol_type = other DNA
atggccttaccagtgaccgccttgctcctgccgctggccttgctgctccacgccgccaggccggaagtgcagctggttgaatctggcggaggactggttcagcctggcggatctctgagactgtcttgtgccgccagcggcttcagcttcagcgacttttggatgagctgggtccgacaggcccctggcaaaggacttgaatgggtcgccacaatcagccaggccggcagcgagaaggactacgtggactctgtgaagggcagattcaccatcagccgggacaacgccaagaagtccctgtacctccagatgaacagcctgagagccgaggacaccgccgtgtactattgtgcctctggcgtgtacagcttcgactacagaggccagggcaccctggtcacagtctcttctggtaccggcggaggcggatctggcggcggaggtagcggtggcggaggatctgaattcgagaacgtgctgacacagagccctgccatcatgagtgcctctccaggcgagaaagtgaccatgacctgtagagccagcagcagcgtgtccagcagctacctgcactggtatcagcagaagtccggcgcaagccccaaagtgtggatctacagcaccagcaatctggcctctggcgtgccaggcagattttctggctctggcagcggcacaagctacagcctgacaatcagctccgtggaagccgaagatgccgccacctactactgccagcagtacagcggctaccccatcacatttggagccggcaccaaggtggaagtgaagagactcgaggacctgaagaacgtgttcccacctgaggtggccgtgttcgagcctagcgaggccgagatcagccacacccagaaagccaccctcgtgtgcctggctaccggcttctaccccgaccatgtggaactgtcttggtgggtcaacggcaaagaggtgcacagcggcgtgtgtaccgacccccagccactgaaagaacagcccgccctgaacgacagccggtactgcctgagcagcagactgagagtgtccgccaccttctggcagaacccccggaaccacttcagatgccaggtgcagttctacggcctgagcgagaacgacgagtggacccaggacagagccaagcccgtgacccagatcgtgtctgccgaagcctggggcagagccgatgatgtgattaagatccactggcaggaaaagaagtccaacaccatcctgggcagccaggaaggcaacaccatgaagaccaacgacacctacatgaagttcagctggctgaccgtgcccgagaagtccctggacaaagaacacagatgcatcgtgcggcacgaaaacaacaagaacggcgtggaccaggaaatcatcttcccacccatcaagaccgatgtgattacaatggaccccaaggacaactgctccaaggacgccaacgataccctgctgctccagctgaccaacaccagcgcctactacatgtacttgttgctgctgctgaagtccgtggtgtacttcgccatcatcacatgctgcctgctgatggctatggtcaagcggaaggacagccggggaagggccaagcgatctggatctggagcaacaaacttctcactactcaaacaagcaggtgacgtggaggagaatcccgggcctactagtatggactggatttggcgcatccttttccttgtcggcgctgctaccggcgcgcattccttcgaacaggttcagctcaaagaatctggccccgtgctggtggccccaagccagacactgtctatcacctgtaccgtgtccggcttcagcctggcctcctacaacatccactgggtccgacagcctccaggcaaaggactggaatggctgggagtgatttgggctggcggcagcaccaactacaacagcgcactgatgagccggctgagcatcagcaaggacaacagcaagagccaggtgttcctccagatgaactccctccagaccgacgacaccgccatgtactactgcgccaagagaagcgacgactacagttggttcgcctactggggccagggcacactggttactgtgtctgcttctacgcgtatccagaaccctgatcctgccgtgtaccagctgcgggatagcaagagcagcgacaagagcgtgtgtctgttcaccgacttcgacagccagaccaacgtgtcccagagcaaggactccgacgtgtacatcaccgataagtgcgtgctggacatgcggagcatggacttcaagagcaactccgccgtggcctggtccaacaagtccgatttcgcctgcgccaacgccttcaacaacagcattatccccgaggacacattcttcccaagccccgagagcagcgactccaccgaccacgtgaagcccaaagagacagagaacaccaagcagcccagcaagagctgccacaagcccaaggccatcgtgcacaccgagaaagtgaacatgatgagcctgaccgtgctgggcctgcggatgctgttcgccaaaaccgtggccgtgaacttcctgctgaccgccaagctgttcttcctcctcaccgcc

SEQ ID NO: 35838 - DNA, 2592 bp, synthetic construct
  source 1..2592: mol_type = other DNA
atggccttaccagtgaccgccttgctcctgccgctggccttgctgctccacgccgccaggccggaagtgcagctggttgaatctggcggaggactggttcagcctggcggatctctgagactgtcttgtgccgccagcggcttcagcttcagcgacttttggatgagctgggtccgacaggcccctggcaaaggacttgaatgggtcgccacaatcagccaggccggcagcgagaaggactacgtggactctgtgaagggcagattcaccatcagccgggacaacgccaagaagtccctgtacctccagatgaacagcctgagagccgaggacaccgccgtgtactattgtgcctctggcgtgtacagcttcgactacagaggccagggcaccctggtcacagtctcttctggtaccggcggaggcggatctggcggcggaggtagcggtggcggaggatctgaattcgagaacgtgctgacacagagccctgccatcatgagtgcctctccaggcgagaaagtgaccatgacctgtagagccagcagcagcgtgtccagcagctacctgcactggtatcagcagaagtccggcgcaagccccaaagtgtggatctacagcaccagcaatctggcctctggcgtgccaggcagattttctggctctggcagcggcacaagctacagcctgacaatcagctccgtggaagccgaagatgccgccacctactactgccagcagtacagcggctaccccatcacatttggagccggcaccaaggtggaagtgaagagactcgagatccagaaccctgatcctgccgtgtaccagctgcgggatagcaagagcagcgacaagagcgtgtgtctgttcaccgacttcgacagccagaccaacgtgtcccagagcaaggactccgacgtgtacatcaccgataagtgcgtgctggacatgcggagcatggacttcaagagcaactccgccgtggcctggtccaacaagtccgatttcgcctgcgccaacgccttcaacaacagcattatccccgaggacacattcttcccaagccccgagagcagcgactccaccgaccacgtgaagcccaaagagacagagaacaccaagcagcccagcaagagctgccacaagcccaaggccatcgtgcacaccgagaaagtgaacatgatgagcctgaccgtgctgggcctgcggatgctgttcgccaaaaccgtggccgtgaacttcctgctgaccgccaagctgttcttcctcctcaccgcccgcgccaagagaagcggatctggcgtgaagcagaccctgaatttcgacctgctgaagctggctggcgacgtggaatccaacccaggccctactagtatggactggatttggcgcatccttttccttgtcggcgctgctaccggcgcgcattccttcgaacaggttcagctcaaagaatctggccccgtgctggtggccccaagccagacactgtctatcacctgtaccgtgtccggcttcagcctggcctcctacaacatccactgggtccgacagcctccaggcaaaggactggaatggctgggagtgatttgggctggcggcagcaccaactacaacagcgcactgatgagccggctgagcatcagcaaggacaacagcaagagccaggtgttcctccagatgaactccctccagaccgacgacaccgccatgtactactgcgccaagagaagcgacgactacagttggttcgcctactggggccagggcacactggttactgtgtctgcttctacgcgtgaggacctgaagaacgtgttcccacctgaggtggccgtgttcgagcctagcgaggccgagatcagccacacccagaaagccaccctcgtgtgcctggctaccggcttctaccccgaccatgtggaactgtcttggtgggtcaacggcaaagaggtgcacagcggcgtgtgtaccgacccccagccactgaaagaacagcccgccctgaacgacagccggtactgcctgagcagcagactgagagtgtccgccaccttctggcagaacccccggaaccacttcagatgccaggtgcagttctacggcctgagcgagaacgacgagtggacccaggacagagccaagcccgtgacccagatcgtgtctgccgaagcctggggcagagccgatgatgtgattaagatccactggcaggaaaagaagtccaacaccatcctgggcagccaggaaggcaacaccatgaagaccaacgacacctacatgaagttcagctggctgaccgtgcccgagaagtccctggacaaagaacacagatgcatcgtgcggcacgaaaacaacaagaacggcgtggaccaggaaatcatcttcccacccatcaagaccgatgtgattacaatggaccccaaggacaactgctccaaggacgccaacgataccctgctgctccagctgaccaacaccagcgcctactacatgtacttgttgctgctgctgaagtccgtggtgtacttcgccatcatcacatgctgcctgctgatggctatggtcaagcggaaggacagccgggga

SEQ ID NO: 35839 - DNA, 2991 bp, synthetic construct
  source 1..2991: mol_type = other DNA
atggccttaccagtgaccgccttgctcctgccgctggccttgctgctccacgccgccaggccggaagtgcagctggttgaatctggcggaggactggttcagcctggcggatctctgagactgtcttgtgccgccagcggcttcagcttcagcgacttttggatgagctgggtccgacaggcccctggcaaaggacttgaatgggtcgccacaatcagccaggccggcagcgagaaggactacgtggactctgtgaagggcagattcaccatcagccgggacaacgccaagaagtccctgtacctccagatgaacagcctgagagccgaggacaccgccgtgtactattgtgcctctggcgtgtacagcttcgactacagaggccagggcaccctggtcacagtctcttctggtaccggcggaggcggatctggcggcggaggtagcggtggcggaggatctgaattcgagaacgtgctgacacagagccctgccatcatgagtgcctctccaggcgagaaagtgaccatgacctgtagagccagcagcagcgtgtccagcagctacctgcactggtatcagcagaagtccggcgcaagccccaaagtgtggatctacagcaccagcaatctggcctctggcgtgccaggcagattttctggctctggcagcggcacaagctacagcctgacaatcagctccgtggaagccgaagatgccgccacctactactgccagcagtacagcggctaccccatcacatttggagccggcaccaaggtggaagtgaagagactcgaggacctgaagaacgtgttcccacctgaggtggccgtgttcgagcctagcgaggccgagatcagccacacccagaaagccaccctcgtgtgcctggctaccggcttctaccccgaccatgtggaactgtcttggtgggtcaacggcaaagaggtgcacagcggcgtgtgtaccgacccccagccactgaaagaacagcccgccctgaacgacagccggtactgcctgagcagcagactgagagtgtccgccaccttctggcagaacccccggaaccacttcagatgccaggtgcagttctacggcctgagcgagaacgacgagtggacccaggacagagccaagcccgtgacccagatcgtgtctgccgaagcctggggcagagccgatgatgtgattaagatccactggcaggaaaagaagtccaacaccatcctgggcagccaggaaggcaacaccatgaagaccaacgacacctacatgaagttcagctggctgaccgtgcccgagaagtccctggacaaagaacacagatgcatcgtgcggcacgaaaacaacaagaacggcgtggaccaggaaatcatcttcccacccatcaagaccgatgtgattacaatggaccccaaggacaactgctccaaggacgccaacgataccctgctgctccagctgaccaacaccagcgcctactacatgtacttgttgctgctgctgaagtccgtggtgtacttcgccatcatcacatgctgcctgctgatggctatggtcaagcggaaggacagccggggaagggccaagcgatctggatctggagcaacaaacttctcactactcaaacaagcaggtgacgtggaggagaatcccgggcctactagtatggactggatttggcgcatccttttccttgtcggcgctgctaccggcgcgcattccgggccccagctccagctgcaagagtctggacctggcctggtcaagcctagcgagacactgagcctgacctgtaccgtgtccggcgatagcatcagcagcggcgattactactggggctggatcagacagcctcctggcaaaggactggaatggatcggccacatctactacagcggcgtgacctactacaaccccagcctgaagtccagagtgaccatcagcgtggacaccagccggaaccagttctccctgaagctgtctagcgtgacagccgccgataccgccgtgtactactgcaccagagaggacagcagcaactggcggagtagaggccagggaacactggtcacagttagctctggatccggcggaggcggaagtggaggcggaggatctggcggcggaggctctttcgaacaggttcagctcaaagaatctggccccgtgctggtggccccaagccagacactgtctatcacctgtaccgtgtccggcttcagcctggcctcctacaacatccactgggtccgacagcctccaggcaaaggactggaatggctgggagtgatttgggctggcggcagcaccaactacaacagcgcactgatgagccggctgagcatcagcaaggacaacagcaagagccaggtgttcctccagatgaactccctccagaccgacgacaccgccatgtactactgcgccaagagaagcgacgactacagttggttcgcctactggggccagggcacactggttactgtgtctgcttctacgcgtatccagaaccctgatcctgccgtgtaccagctgcgggatagcaagagcagcgacaagagcgtgtgtctgttcaccgacttcgacagccagaccaacgtgtcccagagcaaggactccgacgtgtacatcaccgataagtgcgtgctggacatgcggagcatggacttcaagagcaactccgccgtggcctggtccaacaagtccgatttcgcctgcgccaacgccttcaacaacagcattatccccgaggacacattcttcccaagccccgagagcagcgactccaccgaccacgtgaagcccaaagagacagagaacaccaagcagcccagcaagagctgccacaagcccaaggccatcgtgcacaccgagaaagtgaacatgatgagcctgaccgtgctgggcctgcggatgctgttcgccaaaaccgtggccgtgaacttcctgctgaccgccaagctgttcttcctcctcaccgcc

SEQ ID NO: 35840 - DNA, 3003 bp, synthetic construct
  source 1..3003: mol_type = other DNA
atggccttaccagtgaccgccttgctcctgccgctggccttgctgctccacgccgccaggccggaagtgcagctggttgaatctggcggaggactggttcagcctggcggatctctgagactgtcttgtgccgccagcggcttcagcttcagcgacttttggatgagctgggtccgacaggcccctggcaaaggacttgaatgggtcgccacaatcagccaggccggcagcgagaaggactacgtggactctgtgaagggcagattcaccatcagccgggacaacgccaagaagtccctgtacctccagatgaacagcctgagagccgaggacaccgccgtgtactattgtgcctctggcgtgtacagcttcgactacagaggccagggcaccctggtcacagtctcttctggtaccggcggaggcggatctggcggcggaggtagcggtggcggaggatctgaattcgagaacgtgctgacacagagccctgccatcatgagtgcctctccaggcgagaaagtgaccatgacctgtagagccagcagcagcgtgtccagcagctacctgcactggtatcagcagaagtccggcgcaagccccaaagtgtggatctacagcaccagcaatctggcctctggcgtgccaggcagattttctggctctggcagcggcacaagctacagcctgacaatcagctccgtggaagccgaagatgccgccacctactactgccagcagtacagcggctaccccatcacatttggagccggcaccaaggtggaagtgaagagactcgagatccagaaccctgatcctgccgtgtaccagctgcgggatagcaagagcagcgacaagagcgtgtgtctgttcaccgacttcgacagccagaccaacgtgtcccagagcaaggactccgacgtgtacatcaccgataagtgcgtgctggacatgcggagcatggacttcaagagcaactccgccgtggcctggtccaacaagtccgatttcgcctgcgccaacgccttcaacaacagcattatccccgaggacacattcttcccaagccccgagagcagcgactccaccgaccacgtgaagcccaaagagacagagaacaccaagcagcccagcaagagctgccacaagcccaaggccatcgtgcacaccgagaaagtgaacatgatgagcctgaccgtgctgggcctgcggatgctgttcgccaaaaccgtggccgtgaacttcctgctgaccgccaagctgttcttcctcctcaccgcccgcgccaagagaagcggatctggcgtgaagcagaccctgaatttcgacctgctgaagctggctggcgacgtggaatccaacccaggccctactagtatggactggatttggcgcatccttttccttgtcggcgctgctaccggcgcgcattccgggccccagctccagctgcaagagtctggacctggcctggtcaagcctagcgagacactgagcctgacctgtaccgtgtccggcgatagcatcagcagcggcgattactactggggctggatcagacagcctcctggcaaaggactggaatggatcggccacatctactacagcggcgtgacctactacaaccccagcctgaagtccagagtgaccatcagcgtggacaccagccggaaccagttctccctgaagctgtctagcgtgacagccgccgataccgccgtgtactactgcaccagagaggacagcagcaactggcggagtagaggccagggaacactggtcacagttagctctggatccggcggaggcggaagtggaggcggaggatctggcggcggaggctctttcgaacaggttcagctcaaagaatctggccccgtgctggtggccccaagccagacactgtctatcacctgtaccgtgtccggcttcagcctggcctcctacaacatccactgggtccgacagcctccaggcaaaggactggaatggctgggagtgatttgggctggcggcagcaccaactacaacagcgcactgatgagccggctgagcatcagcaaggacaacagcaagagccaggtgttcctccagatgaactccctccagaccgacgacaccgccatgtactactgcgccaagagaagcgacgactacagttggttcgcctactggggccagggcacactggttactgtgtctgcttctacgcgtgaggacctgaagaacgtgttcccacctgaggtggccgtgttcgagcctagcgaggccgagatcagccacacccagaaagccaccctcgtgtgcctggctaccggcttctaccccgaccatgtggaactgtcttggtgggtcaacggcaaagaggtgcacagcggcgtgtgtaccgacccccagccactgaaagaacagcccgccctgaacgacagccggtactgcctgagcagcagactgagagtgtccgccaccttctggcagaacccccggaaccacttcagatgccaggtgcagttctacggcctgagcgagaacgacgagtggacccaggacagagccaagcccgtgacccagatcgtgtctgccgaagcctggggcagagccgatgatgtgattaagatccactggcaggaaaagaagtccaacaccatcctgggcagccaggaaggcaacaccatgaagaccaacgacacctacatgaagttcagctggctgaccgtgcccgagaagtccctggacaaagaacacagatgcatcgtgcggcacgaaaacaacaagaacggcgtggaccaggaaatcatcttcccacccatcaagaccgatgtgattacaatggaccccaaggacaactgctccaaggacgccaacgataccctgctgctccagctgaccaacaccagcgcctactacatgtacttgttgctgctgctgaagtccgtggtgtacttcgccatcatcacatgctgcctgctgatggctatggtcaagcggaaggacagccgggga

SEQ ID NO: 35841 - DNA, 2169 bp, synthetic construct
  source 1..2169: mol_type = other DNA
atggccttaccagtgaccgccttgctcctgccgctggccttgctgctccacgccgccaggccggagaacgtgctgacacagagccctgccatcatgagtgcctctccaggcgagaaagtgaccatgacctgtagagccagcagcagcgtgtccagcagctacctgcactggtatcagcagaagtccggcgcaagccccaaagtgtggatctacagcaccagcaatctggcctctggcgtgccaggcagattttctggctctggcagcggcacaagctacagcctgacaatcagctccgtggaagccgaagatgccgccacctactactgccagcagtacagcggctaccccatcacatttggagccggcaccaaggtggaagtgaagagactcgaggacctgaagaacgtgttcccacctgaggtggccgtgttcgagcctagcgaggccgagatcagccacacccagaaagccaccctcgtgtgcctggctaccggcttctaccccgaccatgtggaactgtcttggtgggtcaacggcaaagaggtgcacagcggcgtgtgtaccgacccccagccactgaaagaacagcccgccctgaacgacagccggtactgcctgagcagcagactgagagtgtccgccaccttctggcagaacccccggaaccacttcagatgccaggtgcagttctacggcctgagcgagaacgacgagtggacccaggacagagccaagcccgtgacccagatcgtgtctgccgaagcctggggcagagccgatgatgtgattaagatccactggcaggaaaagaagtccaacaccatcctgggcagccaggaaggcaacaccatgaagaccaacgacacctacatgaagttcagctggctgaccgtgcccgagaagtccctggacaaagaacacagatgcatcgtgcggcacgaaaacaacaagaacggcgtggaccaggaaatcatcttcccacccatcaagaccgatgtgattacaatggaccccaaggacaactgctccaaggacgccaacgataccctgctgctccagctgaccaacaccagcgcctactacatgtacttgttgctgctgctgaagtccgtggtgtacttcgccatcatcacatgctgcctgctgcggagaaccgccttctgctgcaacggcgagaagtctagggccaagcgatctggatctggagcaacaaacttctcactactcaaacaagcaggtgacgtggaggagaatcccgggcctactagtatggactggatttggcgcatccttttccttgtcggcgctgctaccggcgcgcattccttcgaacaggttcagctcaaagaatctggccccgtgctggtggccccaagccagacactgtctatcacctgtaccgtgtccggcttcagcctggcctcctacaacatccactgggtccgacagcctccaggcaaaggactggaatggctgggagtgatttgggctggcggcagcaccaactacaacagcgcactgatgagccggctgagcatcagcaaggacaacagcaagagccaggtgttcctccagatgaactccctccagaccgacgacaccgccatgtactactgcgccaagagaagcgacgactacagttggttcgcctactggggccagggcacactggttactgtgtctgcttctacgcgtatccagaaccctgatcctgccgtgtaccagctgcgggatagcaagagcagcgacaagagcgtgtgtctgttcaccgacttcgacagccagaccaacgtgtcccagagcaaggactccgacgtgtacatcaccgataagtgcgtgctggacatgcggagcatggacttcaagagcaactccgccgtggcctggtccaacaagtccgatttcgcctgcgccaacgccttcaacaacagcattatccccgaggacacattcttcccaagccccgagagcagcgactccaccgaccacgtgaagcccaaagagacagagaacaccaagcagcccagcaagagctgccacaagcccaaggccatcgtgcacaccgagaaagtgaacatgatgagcctgaccgtgctgggcctgcggatgctgttcgccaaaaccgtggccgtgaacttcctgctgaccgccaagctgttcttcctc

SEQ ID NO: 35842 - DNA, 2181 bp, synthetic construct
  source 1..2181: mol_type = other DNA
atggccttaccagtgaccgccttgctcctgccgctggccttgctgctccacgccgccaggccggagaacgtgctgacacagagccctgccatcatgagtgcctctccaggcgagaaagtgaccatgacctgtagagccagcagcagcgtgtccagcagctacctgcactggtatcagcagaagtccggcgcaagccccaaagtgtggatctacagcaccagcaatctggcctctggcgtgccaggcagattttctggctctggcagcggcacaagctacagcctgacaatcagctccgtggaagccgaagatgccgccacctactactgccagcagtacagcggctaccccatcacatttggagccggcaccaaggtggaagtgaagagactcgagatccagaaccctgatcctgccgtgtaccagctgcgggatagcaagagcagcgacaagagcgtgtgtctgttcaccgacttcgacagccagaccaacgtgtcccagagcaaggactccgacgtgtacatcaccgataagtgcgtgctggacatgcggagcatggacttcaagagcaactccgccgtggcctggtccaacaagtccgatttcgcctgcgccaacgccttcaacaacagcattatccccgaggacacattcttcccaagccccgagagcagcgactccaccgaccacgtgaagcccaaagagacagagaacaccaagcagcccagcaagagctgccacaagcccaaggccatcgtgcacaccgagaaagtgaacatgatgagcctgaccgtgctgggcctgcggatgctgttcgccaaaaccgtggccgtgaacttcctgctgaccgccaagctgttcttcctccgcgccaagagaagcggatctggcgtgaagcagaccctgaatttcgacctgctgaagctggctggcgacgtggaatccaacccaggccctactagtatggactggatttggcgcatccttttccttgtcggcgctgctaccggcgcgcattccttcgaacaggttcagctcaaagaatctggccccgtgctggtggccccaagccagacactgtctatcacctgtaccgtgtccggcttcagcctggcctcctacaacatccactgggtccgacagcctccaggcaaaggactggaatggctgggagtgatttgggctggcggcagcaccaactacaacagcgcactgatgagccggctgagcatcagcaaggacaacagcaagagccaggtgttcctccagatgaactccctccagaccgacgacaccgccatgtactactgcgccaagagaagcgacgactacagttggttcgcctactggggccagggcacactggttactgtgtctgcttctacgcgtgaggacctgaagaacgtgttcccacctgaggtggccgtgttcgagcctagcgaggccgagatcagccacacccagaaagccaccctcgtgtgcctggctaccggcttctaccccgaccatgtggaactgtcttggtgggtcaacggcaaagaggtgcacagcggcgtgtgtaccgacccccagccactgaaagaacagcccgccctgaacgacagccggtactgcctgagcagcagactgagagtgtccgccaccttctggcagaacccccggaaccacttcagatgccaggtgcagttctacggcctgagcgagaacgacgagtggacccaggacagagccaagcccgtgacccagatcgtgtctgccgaagcctggggcagagccgatgatgtgattaagatccactggcaggaaaagaagtccaacaccatcctgggcagccaggaaggcaacaccatgaagaccaacgacacctacatgaagttcagctggctgaccgtgcccgagaagtccctggacaaagaacacagatgcatcgtgcggcacgaaaacaacaagaacggcgtggaccaggaaatcatcttcccacccatcaagaccgatgtgattacaatggaccccaaggacaactgctccaaggacgccaacgataccctgctgctccagctgaccaacaccagcgcctactacatgtacttgttgctgctgctgaagtccgtggtgtacttcgccatcatcacatgctgcctgctgcggagaaccgccttctgctgcaacggcgagaagtct

SEQ ID NO: 35843 - DNA, 2574 bp, synthetic construct
  source 1..2574: mol_type = other DNA
atggccttaccagtgaccgccttgctcctgccgctggccttgctgctccacgccgccaggccggaagtgcagctggttgaatctggcggaggactggttcagcctggcggatctctgagactgtcttgtgccgccagcggcttcagcttcagcgacttttggatgagctgggtccgacaggcccctggcaaaggacttgaatgggtcgccacaatcagccaggccggcagcgagaaggactacgtggactctgtgaagggcagattcaccatcagccgggacaacgccaagaagtccctgtacctccagatgaacagcctgagagccgaggacaccgccgtgtactattgtgcctctggcgtgtacagcttcgactacagaggccagggcaccctggtcacagtctcttctggtaccggcggaggcggatctggcggcggaggtagcggtggcggaggatctgaattcgagaacgtgctgacacagagccctgccatcatgagtgcctctccaggcgagaaagtgaccatgacctgtagagccagcagcagcgtgtccagcagctacctgcactggtatcagcagaagtccggcgcaagccccaaagtgtggatctacagcaccagcaatctggcctctggcgtgccaggcagattttctggctctggcagcggcacaagctacagcctgacaatcagctccgtggaagccgaagatgccgccacctactactgccagcagtacagcggctaccccatcacatttggagccggcaccaaggtggaagtgaagagactcgaggacctgaagaacgtgttcccacctgaggtggccgtgttcgagcctagcgaggccgagatcagccacacccagaaagccaccctcgtgtgcctggctaccggcttctaccccgaccatgtggaactgtcttggtgggtcaacggcaaagaggtgcacagcggcgtgtgtaccgacccccagccactgaaagaacagcccgccctgaacgacagccggtactgcctgagcagcagactgagagtgtccgccaccttctggcagaacccccggaaccacttcagatgccaggtgcagttctacggcctgagcgagaacgacgagtggacccaggacagagccaagcccgtgacccagatcgtgtctgccgaagcctggggcagagccgatgatgtgattaagatccactggcaggaaaagaagtccaacaccatcctgggcagccaggaaggcaacaccatgaagaccaacgacacctacatgaagttcagctggctgaccgtgcccgagaagtccctggacaaagaacacagatgcatcgtgcggcacgaaaacaacaagaacggcgtggaccaggaaatcatcttcccacccatcaagaccgatgtgattacaatggaccccaaggacaactgctccaaggacgccaacgataccctgctgctccagctgaccaacaccagcgcctactacatgtacttgttgctgctgctgaagtccgtggtgtacttcgccatcatcacatgctgcctgctgcggagaaccgccttctgctgcaacggcgagaagtctagggccaagcgatctggatctggagcaacaaacttctcactactcaaacaagcaggtgacgtggaggagaatcccgggcctactagtatggactggatttggcgcatccttttccttgtcggcgctgctaccggcgcgcattccttcgaacaggttcagctcaaagaatctggccccgtgctggtggccccaagccagacactgtctatcacctgtaccgtgtccggcttcagcctggcctcctacaacatccactgggtccgacagcctccaggcaaaggactggaatggctgggagtgatttgggctggcggcagcaccaactacaacagcgcactgatgagccggctgagcatcagcaaggacaacagcaagagccaggtgttcctccagatgaactccctccagaccgacgacaccgccatgtactactgcgccaagagaagcgacgactacagttggttcgcctactggggccagggcacactggttactgtgtctgcttctacgcgtatccagaaccctgatcctgccgtgtaccagctgcgggatagcaagagcagcgacaagagcgtgtgtctgttcaccgacttcgacagccagaccaacgtgtcccagagcaaggactccgacgtgtacatcaccgataagtgcgtgctggacatgcggagcatggacttcaagagcaactccgccgtggcctggtccaacaagtccgatttcgcctgcgccaacgccttcaacaacagcattatccccgaggacacattcttcccaagccccgagagcagcgactccaccgaccacgtgaagcccaaagagacagagaacaccaagcagcccagcaagagctgccacaagcccaaggccatcgtgcacaccgagaaagtgaacatgatgagcctgaccgtgctgggcctgcggatgctgttcgccaaaaccgtggccgtgaacttcctgctgaccgccaagctgttcttcctc

SEQ ID NO: 35844 - DNA, 2985 bp, synthetic construct
  source 1..2985: mol_type = other DNA
atggccttaccagtgaccgccttgctcctgccgctggccttgctgctccacgccgccaggccggaagtgcagctggttgaatctggcggaggactggttcagcctggcggatctctgagactgtcttgtgccgccagcggcttcagcttcagcgacttttggatgagctgggtccgacaggcccctggcaaaggacttgaatgggtcgccacaatcagccaggccggcagcgagaaggactacgtggactctgtgaagggcagattcaccatcagccgggacaacgccaagaagtccctgtacctccagatgaacagcctgagagccgaggacaccgccgtgtactattgtgcctctggcgtgtacagcttcgactacagaggccagggcaccctggtcacagtctcttctggtaccggcggaggcggatctggcggcggaggtagcggtggcggaggatctgaattcgagaacgtgctgacacagagccctgccatcatgagtgcctctccaggcgagaaagtgaccatgacctgtagagccagcagcagcgtgtccagcagctacctgcactggtatcagcagaagtccggcgcaagccccaaagtgtggatctacagcaccagcaatctggcctctggcgtgccaggcagattttctggctctggcagcggcacaagctacagcctgacaatcagctccgtggaagccgaagatgccgccacctactactgccagcagtacagcggctaccccatcacatttggagccggcaccaaggtggaagtgaagagactcgaggacctgaagaacgtgttcccacctgaggtggccgtgttcgagcctagcgaggccgagatcagccacacccagaaagccaccctcgtgtgcctggctaccggcttctaccccgaccatgtggaactgtcttggtgggtcaacggcaaagaggtgcacagcggcgtgtgtaccgacccccagccactgaaagaacagcccgccctgaacgacagccggtactgcctgagcagcagactgagagtgtccgccaccttctggcagaacccccggaaccacttcagatgccaggtgcagttctacggcctgagcgagaacgacgagtggacccaggacagagccaagcccgtgacccagatcgtgtctgccgaagcctggggcagagccgatgatgtgattaagatccactggcaggaaaagaagtccaacaccatcctgggcagccaggaaggcaacaccatgaagaccaacgacacctacatgaagttcagctggctgaccgtgcccgagaagtccctggacaaagaacacagatgcatcgtgcggcacgaaaacaacaagaacggcgtggaccaggaaatcatcttcccacccatcaagaccgatgtgattacaatggaccccaaggacaactgctccaaggacgccaacgataccctgctgctccagctgaccaacaccagcgcctactacatgtacttgttgctgctgctgaagtccgtggtgtacttcgccatcatcacatgctgcctgctgcggagaaccgccttctgctgcaacggcgagaagtctagggccaagcgatctggatctggagcaacaaacttctcactactcaaacaagcaggtgacgtggaggagaatcccgggcctactagtatggactggatttggcgcatccttttccttgtcggcgctgctaccggcgcgcattccgggccccagctccagctgcaagagtctggacctggcctggtcaagcctagcgagacactgagcctgacctgtaccgtgtccggcgatagcatcagcagcggcgattactactggggctggatcagacagcctcctggcaaaggactggaatggatcggccacatctactacagcggcgtgacctactacaaccccagcctgaagtccagagtgaccatcagcgtggacaccagccggaaccagttctccctgaagctgtctagcgtgacagccgccgataccgccgtgtactactgcaccagagaggacagcagcaactggcggagtagaggccagggaacactggtcacagttagctctggatccggcggaggcggaagtggaggcggaggatctggcggcggaggctctttcgaacaggttcagctcaaagaatctggccccgtgctggtggccccaagccagacactgtctatcacctgtaccgtgtccggcttcagcctggcctcctacaacatccactgggtccgacagcctccaggcaaaggactggaatggctgggagtgatttgggctggcggcagcaccaactacaacagcgcactgatgagccggctgagcatcagcaaggacaacagcaagagccaggtgttcctccagatgaactccctccagaccgacgacaccgccatgtactactgcgccaagagaagcgacgactacagttggttcgcctactggggccagggcacactggttactgtgtctgcttctacgcgtatccagaaccctgatcctgccgtgtaccagctgcgggatagcaagagcagcgacaagagcgtgtgtctgttcaccgacttcgacagccagaccaacgtgtcccagagcaaggactccgacgtgtacatcaccgataagtgcgtgctggacatgcggagcatggacttcaagagcaactccgccgtggcctggtccaacaagtccgatttcgcctgcgccaacgccttcaacaacagcattatccccgaggacacattcttcccaagccccgagagcagcgactccaccgaccacgtgaagcccaaagagacagagaacaccaagcagcccagcaagagctgccacaagcccaaggccatcgtgcacaccgagaaagtgaacatgatgagcctgaccgtgctgggcctgcggatgctgttcgccaaaaccgtggccgtgaacttcctgctgaccgccaagctgttcttcctc

SEQ ID NO: 35845 - DNA, 1863 bp, synthetic construct
  source 1..1863: mol_type = other DNA
atggccttaccagtgaccgccttgctcctgccgctggccttgctgctccacgccgccaggccggagaacgtgctgacacagagccctgccatcatgagtgcctctccaggcgagaaagtgaccatgacctgtagagccagcagcagcgtgtccagcagctacctgcactggtatcagcagaagtccggcgcaagccccaaagtgtggatctacagcaccagcaatctggcctctggcgtgccaggcagattttctggctctggcagcggcacaagctacagcctgacaatcagctccgtggaagccgaagatgccgccacctactactgccagcagtacagcggctaccccatcacatttggagccggcaccaaggtggaagtgaagagactcgaggacctgaagaacgtgttcccacctgaggtggccgtgttcgagcctagcgaggccgagatcagccacacccagaaagccaccctcgtgtgcctggctaccggcttctaccccgaccatgtggaactgtcttggtgggtcaacggcaaagaggtgcacagcggcgtgtctaccgacccccagccactgaaagaacagcccgccctgaacgacagccggtactgcctgagcagcagactgagagtgtccgccaccttctggcagaacccccggaaccacttcagatgccaggtgcagttctacggcctgagcgagaacgacgagtggacccaggacagagccaagcccgtgacccagatcgtgtctgccgaagcctggggcagagccgattgcgacgtgaagctggtggaaaagagcttcgagacagacaccaacctgaacttccagaacctgagcgtgatcggcttcagaatcctgctgctgaaagtggccggctttaacctgctgatgaccctgcggctgtggtccagcagggccaagcgatctggatctggagcaacaaacttctcactactcaaacaagcaggtgacgtggaggagaatcccgggcctactagtatggactggatttggcgcatccttttccttgtcggcgctgctaccggcgcgcattccttcgaacaggttcagctcaaagaatctggccccgtgctggtggccccaagccagacactgtctatcacctgtaccgtgtccggcttcagcctggcctcctacaacatccactgggtccgacagcctccaggcaaaggactggaatggctgggagtgatttgggctggcggcagcaccaactacaacagcgcactgatgagccggctgagcatcagcaaggacaacagcaagagccaggtgttcctccagatgaactccctccagaccgacgacaccgccatgtactactgcgccaagagaagcgacgactacagttggttcgcctactggggccagggcacactggttactgtgtctgcttctacgcgtatccagaaccctgatcctgccgtgtaccagctgcgggatagcaagagcagcgacaagagcgtgtgtctgttcaccgacttcgacagccagaccaacgtgtcccagagcaaggactccgacgtgtacatcaccgataagaccgtgctggacatgcggagcatggacttcaagagcaactccgccgtggcctggtccaacaagtccgatttcgcctgcgccaacgccttcaacaacagcattatccccgaggacacattcttcccaagccccgagagcagctgcggctttaccagcgagagctaccagcagggcgtgctgagcgccaccatcctgtacgagatcctgctgggcaaggccaccctgtacgccgtgctggtgtctgccctggtgctgatggctatggtcaagcggaaggacagccgggga

SEQ ID NO: 35846 - DNA, 1863 bp, synthetic construct
  source 1..1863: mol_type = other DNA
atggccttaccagtgaccgccttgctcctgccgctggccttgctgctccacgccgccaggccggagaacgtgctgacacagagccctgccatcatgagtgcctctccaggcgagaaagtgaccatgacctgtagagccagcagcagcgtgtccagcagctacctgcactggtatcagcagaagtccggcgcaagccccaaagtgtggatctacagcaccagcaatctggcctctggcgtgccaggcagattttctggctctggcagcggcacaagctacagcctgacaatcagctccgtggaagccgaagatgccgccacctactactgccagcagtacagcggctaccccatcacatttggagccggcaccaaggtggaagtgaagagactcgaggacctgaagaacgtgttcccacctgaggtggccgtgttcgagcctagcgaggccgagatcagccacacccagaaagccaccctcgtgtgcctggctaccggcttctaccccgaccatgtggaactgtcttggtgggtcaacggcaaagaggtgcacagcggcgtgtctaccgacccccagccactgaaagaacagcccgccctgaacgacagccggtactgcctgagcagcagactgagagtgtccgccaccttctggcagaacccccggaaccacttcagatgccaggtgcagttctacggcctgagcgagaacgacgagtggacccaggacagagccaagcccgtgacccagatcgtgtctgccgaagcctggggcagagccgattgcggctttaccagcgagagctaccagcagggcgtgctgagcgccaccaacctgagcgtgatcggcttcagaatcctgctgctgaaagtggccggctttaacctgctgatgaccctgcggctgtggtccagcagggccaagcgatctggatctggagcaacaaacttctcactactcaaacaagcaggtgacgtggaggagaatcccgggcctactagtatggactggatttggcgcatccttttccttgtcggcgctgctaccggcgcgcattccttcgaacaggttcagctcaaagaatctggccccgtgctggtggccccaagccagacactgtctatcacctgtaccgtgtccggcttcagcctggcctcctacaacatccactgggtccgacagcctccaggcaaaggactggaatggctgggagtgatttgggctggcggcagcaccaactacaacagcgcactgatgagccggctgagcatcagcaaggacaacagcaagagccaggtgttcctccagatgaactccctccagaccgacgacaccgccatgtactactgcgccaagagaagcgacgactacagttggttcgcctactggggccagggcacactggttactgtgtctgcttctacgcgtatccagaaccctgatcctgccgtgtaccagctgcgggatagcaagagcagcgacaagagcgtgtgtctgttcaccgacttcgacagccagaccaacgtgtcccagagcaaggactccgacgtgtacatcaccgataagaccgtgctggacatgcggagcatggacttcaagagcaactccgccgtggcctggtccaacaagtccgatttcgcctgcgccaacgccttcaacaacagcattatccccgaggacacattcttcccaagccccgagagcagctgcgacgtgaagctggtggaaaagagcttcgagacagacaccaacctgaacttccagatcctgtacgagatcctgctgggcaaggccaccctgtacgccgtgctggtgtctgccctggtgctgatggctatggtcaagcggaaggacagccgggga

SEQ ID NO: 35847 - DNA, 2175 bp, synthetic construct
  source 1..2175: mol_type = other DNA
atggccttaccagtgaccgccttgctcctgccgctggccttgctgctccacgccgccaggccggagaacgtgctgacacagagccctgccatcatgagtgcctctccaggcgagaaagtgaccatgacctgtagagccagcagcagcgtgtccagcagctacctgcactggtatcagcagaagtccggcgcaagccccaaagtgtggatctacagcaccagcaatctggcctctggcgtgccaggcagattttctggctctggcagcggcacaagctacagcctgacaatcagctccgtggaagccgaagatgccgccacctactactgccagcagtacagcggctaccccatcacatttggagccggcaccaaggtggaagtgaagagactcgaggacctgaagaacgtgttcccacctgaggtggccgtgttcgagcctagcgaggccgagatcagccacacccagaaagccaccctcgtgtgcctggctaccggcttctaccccgaccatgtggaactgtcttggtgggtcaacggcaaagaggtgcacagcggcgtgtctaccgacccccagccactgaaagaacagcccgccctgaacgacagccggtactgcctgagcagcagactgagagtgtccgccaccttctggcagaacccccggaaccacttcagatgccaggtgcagttctacggcctgagcgagaacgacgagtggacccaggacagagccaagcccgtgacccagatcgtgtctgccgaagcctggggcagagccgatgatgtgattaagatccactggcaggaaaagaagtccaacaccatcctgggcagccaggaaggcaacaccatgaagaccaacgacacctacatgaagttcagctggctgaccgtgcccgagaagtccctggacaaagaacacagatgcatcgtgcggcacgaaaacaacaagaacggcgtggaccaggaaatcatcttcccacccatcaagaccgatgtgattacaatggaccccaaggacaactgctccaaggacgccaacgataccctgctgctccagctgaccaacaccagcgcctactacatgtacttgttgctgctgctgaagtccgtggtgtacttcgccatcatcacatgctgcctgctgatggctatggtcaagcggaaggacagccggggaagggccaagcgatctggatctggagcaacaaacttctcactactcaaacaagcaggtgacgtggaggagaatcccgggcctactagtatggactggatttggcgcatccttttccttgtcggcgctgctaccggcgcgcattccttcgaacaggttcagctcaaagaatctggccccgtgctggtggccccaagccagacactgtctatcacctgtaccgtgtccggcttcagcctggcctcctacaacatccactgggtccgacagcctccaggcaaaggactggaatggctgggagtgatttgggctggcggcagcaccaactacaacagcgcactgatgagccggctgagcatcagcaaggacaacagcaagagccaggtgttcctccagatgaactccctccagaccgacgacaccgccatgtactactgcgccaagagaagcgacgactacagttggttcgcctactggggccagggcacactggttactgtgtctgcttctacgcgtatccagaaccctgatcctgccgtgtaccagctgcgggatagcaagagcagcgacaagagcgtgtgtctgttcaccgacttcgacagccagaccaacgtgtcccagagcaaggactccgacgtgtacatcaccgataagaccgtgctggacatgcggagcatggacttcaagagcaactccgccgtggcctggtccaacaagtccgatttcgcctgcgccaacgccttcaacaacagcattatccccgaggacacattcttcccaagccccgagagcagcgactccaccgaccacgtgaagcccaaagagacagagaacaccaagcagcccagcaagagctgccacaagcccaaggccatcgtgcacaccgagaaagtgaacatgatgagcctgaccgtgctgggcctgcggatgctgttcgccaaaaccgtggccgtgaacttcctgctgaccgccaagctgttcttcctcctcaccgcc

SEQ ID NO: 35848 - DNA, 2169 bp, synthetic construct
  source 1..2169: mol_type = other DNA
atggccttaccagtgaccgccttgctcctgccgctggccttgctgctccacgccgccaggccggagaacgtgctgacacagagccctgccatcatgagtgcctctccaggcgagaaagtgaccatgacctgtagagccagcagcagcgtgtccagcagctacctgcactggtatcagcagaagtccggcgcaagccccaaagtgtggatctacagcaccagcaatctggcctctggcgtgccaggcagattttctggctctggcagcggcacaagctacagcctgacaatcagctccgtggaagccgaagatgccgccacctactactgccagcagtacagcggctaccccatcacatttggagccggcaccaaggtggaagtgaagagactcgaggacctgaagaacgtgttcccacctgaggtggccgtgttcgagcctagcgaggccgagatcagccacacccagaaagccaccctcgtgtgcctggctaccggcttctaccccgaccatgtggaactgtcttggtgggtcaacggcaaagaggtgcacagcggcgtgtctaccgacccccagccactgaaagaacagcccgccctgaacgacagccggtactgcctgagcagcagactgagagtgtccgccaccttctggcagaacccccggaaccacttcagatgccaggtgcagttctacggcctgagcgagaacgacgagtggacccaggacagagccaagcccgtgacccagatcgtgtctgccgaagcctggggcagagccgatgatgtgattaagatccactggcaggaaaagaagtccaacaccatcctgggcagccaggaaggcaacaccatgaagaccaacgacacctacatgaagttcagctggctgaccgtgcccgagaagtccctggacaaagaacacagatgcatcgtgcggcacgaaaacaacaagaacggcgtggaccaggaaatcatcttcccacccatcaagaccgatgtgattacaatggaccccaaggacaactgctccaaggacgccaacgataccctgctgctccagctgaccaacaccagcgcctactacatgtacttgttgctgctgctgaagtccgtggtgtacttcgccatcatcacatgctgcctgctgcggagaaccgccttctgctgcaacggcgagaagtctagggccaagcgatctggatctggagcaacaaacttctcactactcaaacaagcaggtgacgtggaggagaatcccgggcctactagtatggactggatttggcgcatccttttccttgtcggcgctgctaccggcgcgcattccttcgaacaggttcagctcaaagaatctggccccgtgctggtggccccaagccagacactgtctatcacctgtaccgtgtccggcttcagcctggcctcctacaacatccactgggtccgacagcctccaggcaaaggactggaatggctgggagtgatttgggctggcggcagcaccaactacaacagcgcactgatgagccggctgagcatcagcaaggacaacagcaagagccaggtgttcctccagatgaactccctccagaccgacgacaccgccatgtactactgcgccaagagaagcgacgactacagttggttcgcctactggggccagggcacactggttactgtgtctgcttctacgcgtatccagaaccctgatcctgccgtgtaccagctgcgggatagcaagagcagcgacaagagcgtgtgtctgttcaccgacttcgacagccagaccaacgtgtcccagagcaaggactccgacgtgtacatcaccgataagaccgtgctggacatgcggagcatggacttcaagagcaactccgccgtggcctggtccaacaagtccgatttcgcctgcgccaacgccttcaacaacagcattatccccgaggacacattcttcccaagccccgagagcagcgactccaccgaccacgtgaagcccaaagagacagagaacaccaagcagcccagcaagagctgccacaagcccaaggccatcgtgcacaccgagaaagtgaacatgatgagcctgaccgtgctgggcctgcggatgctgttcgccaaaaccgtggccgtgaacttcctgctgaccgccaagctgttcttcctc

SEQ ID NO: 35849 - DNA, 2601 bp, synthetic construct
  source 1..2601: mol_type = other DNA
atggccttaccagtgaccgccttgctcctgccgctggccttgctgctccacgccgccaggccgctcgaggaggacctgaagaacgtgttcccacctgaggtggccgtgttcgagcctagcgaggccgagatcagccacacccagaaagccaccctcgtgtgcctggctaccggcttctaccccgaccatgtggaactgtcttggtgggtcaacggcaaagaggtgcacagcggcgtgtgtaccgacccccagccactgaaagaacagcccgccctgaacgacagccggtactgcctgagcagcagactgagagtgtccgccaccttctggcagaacccccggaaccacttcagatgccaggtgcagttctacggcctgagcgagaacgacgagtggacccaggacagagccaagcccgtgacccagatcgtgtctgccgaagcctggggcagagccgattgcggctttaccagcgagagctaccagcagggcgtgctgagcgccaccaacctgagcgtgatcggcttcagaatcctgctgctgaaagtggccggctttaacctgctgatgaccctgcggctgtggtccagcagggccaagcgatctggatctggagcaacaaacttctcactactcaaacaagcaggtgacgtggaggagaatcccgggcctactagcatggccttaccagtgaccgccttgctcctgccgctggccttgctgctccacgccgccaggccggagaacgtgctgacacagagccctgccatcatgagtgcctctccaggcgagaaagtgaccatgacctgtagagccagcagcagcgtgtccagcagctacctgcactggtatcagcagaagtccggcgcaagccccaaagtgtggatctacagcaccagcaatctggcctctggcgtgccaggcagattttctggctctggcagcggcacaagctacagcctgacaatcagctccgtggaagccgaagatgccgccacctactactgccagcagtacagcggctaccccatcacatttggagccggcaccaaggtggaagtgaagagaggcggaggcggaagtggaggcggaggatctggcggcggaggctctcaggttcagctcaaagaatctggccccgtgctggtggccccaagccagacactgtctatcacctgtaccgtgtccggcttcagcctggcctcctacaacatccactgggtccgacagcctccaggcaaaggactggaatggctgggagtgatttgggctggcggcagcaccaactacaacagcgcactgatgagccggctgagcatcagcaaggacaacagcaagagccaggtgttcctccagatgaactccctccagaccgacgacaccgccatgtactactgcgccaagagaagcgacgactacagttggttcgcctactggggccagggcacactggttactgtgtctgcttctacgcgtatccagaaccctgatcctgccgtgtaccagctgcgggatagcaagagcagcgacaagagcgtgtgtctgttcaccgacttcgacagccagaccaacgtgtcccagagcaaggactccgacgtgtacatcaccgataagtgcgtgctggacatgcggagcatggacttcaagagcaactccgccgtggcctggtccaacaagtccgatttcgcctgcgccaacgccttcaacaacagcattatccccgaggacacattcttcccaagccccgagagcagctgcgacgtgaagctggtggaaaagagcttcgagacagacaccaacctgaacttccagatcctgtacgaggtgatcggcttcagaatcctgctgctgaaagtggccggctttaacctgctgatgaccctgcggctgtggtccagccgcgccaagagaagcggatctggcgtgaagcagaccctgaatttcgacctgctgaagctggctggcgacgtggaatccaacccaggcccttctagaggccatatgaccgagtacaagcccacggtgcgcctcgccacccgcgacgacgtccccagggccgtacgcaccctcgccgccgcgttcgccgactaccccgccacgcgccacaccgtcgatccggaccgccacatcgagcgggtcaccgagctgcaagaactcttcctcacgcgcgtcgggctcgacatcggcaaggtgtgggtcgcggacgacggcgccgcggtggcggtctggaccacgccggagagcgtcgaagcgggggcggtgttcgccgagatcggcccgcgcatggccgagttgagcggttcccggctggccgcgcagcaacagatggaaggcctcctggcgccgcaccggcccaaggagcccgcgtggttcctggccaccgtcggcgtctcgcccgaccaccagggcaagggtctgggcagcgccgtcgtgctccccggagtggaggcggccgagcgcgccggggtgcccgccttcctggagacctccgcgccccgcaacctccccttctacgagcggctcggcttcaccgtcaccgccgacgtcgaggtgcccgaaggaccgcgcacctggtgcatgacccgcaagcccggtgcctga

SEQ ID NO: 35850 - DNA, 2601 bp, synthetic construct
  source 1..2601: mol_type = other DNA
atggccttaccagtgaccgccttgctcctgccgctggccttgctgctccacgccgccaggccgctcgagatccagaaccctgatcctgccgtgtaccagctgcgggatagcaagagcagcgacaagagcgtgtgtctgttcaccgacttcgacagccagaccaacgtgtcccagagcaaggactccgacgtgtacatcaccgataagtgcgtgctggacatgcggagcatggacttcaagagcaactccgccgtggcctggtccaacaagtccgatttcgcctgcgccaacgccttcaacaacagcattatccccgaggacacattcttcccaagccccgagagcagctgcgacgtgaagctggtggaaaagagcttcgagacagacaccaacctgaacttccagatcctgtacgaggtgatcggcttcagaatcctgctgctgaaagtggccggctttaacctgctgatgaccctgcggctgtggtccagcagggccaagcgatctggatctggagcaacaaacttctcactactcaaacaagcaggtgacgtggaggagaatcccgggcctactagcatggccttaccagtgaccgccttgctcctgccgctggccttgctgctccacgccgccaggccggagaacgtgctgacacagagccctgccatcatgagtgcctctccaggcgagaaagtgaccatgacctgtagagccagcagcagcgtgtccagcagctacctgcactggtatcagcagaagtccggcgcaagccccaaagtgtggatctacagcaccagcaatctggcctctggcgtgccaggcagattttctggctctggcagcggcacaagctacagcctgacaatcagctccgtggaagccgaagatgccgccacctactactgccagcagtacagcggctaccccatcacatttggagccggcaccaaggtggaagtgaagagaggcggaggcggaagtggaggcggaggatctggcggcggaggctctcaggttcagctcaaagaatctggccccgtgctggtggccccaagccagacactgtctatcacctgtaccgtgtccggcttcagcctggcctcctacaacatccactgggtccgacagcctccaggcaaaggactggaatggctgggagtgatttgggctggcggcagcaccaactacaacagcgcactgatgagccggctgagcatcagcaaggacaacagcaagagccaggtgttcctccagatgaactccctccagaccgacgacaccgccatgtactactgcgccaagagaagcgacgactacagttggttcgcctactggggccagggcacactggttactgtgtctgcttctacgcgtgaggacctgaagaacgtgttcccacctgaggtggccgtgttcgagcctagcgaggccgagatcagccacacccagaaagccaccctcgtgtgcctggctaccggcttctaccccgaccatgtggaactgtcttggtgggtcaacggcaaagaggtgcacagcggcgtgtgtaccgacccccagccactgaaagaacagcccgccctgaacgacagccggtactgcctgagcagcagactgagagtgtccgccaccttctggcagaacccccggaaccacttcagatgccaggtgcagttctacggcctgagcgagaacgacgagtggacccaggacagagccaagcccgtgacccagatcgtgtctgccgaagcctggggcagagccgattgcggctttaccagcgagagctaccagcagggcgtgctgagcgccaccaacctgagcgtgatcggcttcagaatcctgctgctgaaagtggccggctttaacctgctgatgaccctgcggctgtggtccagccgcgccaagagaagcggatctggcgtgaagcagaccctgaatttcgacctgctgaagctggctggcgacgtggaatccaacccaggcccttctagaggccatatgaccgagtacaagcccacggtgcgcctcgccacccgcgacgacgtccccagggccgtacgcaccctcgccgccgcgttcgccgactaccccgccacgcgccacaccgtcgatccggaccgccacatcgagcgggtcaccgagctgcaagaactcttcctcacgcgcgtcgggctcgacatcggcaaggtgtgggtcgcggacgacggcgccgcggtggcggtctggaccacgccggagagcgtcgaagcgggggcggtgttcgccgagatcggcccgcgcatggccgagttgagcggttcccggctggccgcgcagcaacagatggaaggcctcctggcgccgcaccggcccaaggagcccgcgtggttcctggccaccgtcggcgtctcgcccgaccaccagggcaagggtctgggcagcgccgtcgtgctccccggagtggaggcggccgagcgcgccggggtgcccgccttcctggagacctccgcgccccgcaacctccccttctacgagcggctcggcttcaccgtcaccgccgacgtcgaggtgcccgaaggaccgcgcacctggtgcatgacccgcaagcccggtgcctga

SEQ ID NO: 35851 - DNA, 2601 bp, synthetic construct; identical to SEQ ID NO: 35849
  source 1..2601: mol_type = other DNA

SEQ ID NO: 35852 - DNA, 2925 bp, synthetic construct
  source 1..2925: mol_type = other DNA
atggccttaccagtgaccgccttgctcctgccgctggccttgctgctccacgccgccaggccgctcgaggaggacctgaagaacgtgttcccacctgaggtggccgtgttcgagcctagcgaggccgagatcagccacacccagaaagccaccctcgtgtgcctggctaccggcttctaccccgaccatgtggaactgtcttggtgggtcaacggcaaagaggtgcacagcggcgtgtctaccgacccccagccactgaaagaacagcccgccctgaacgacagccggtactgcctgagcagcagactgagagtgtccgccaccttctggcagaacccccggaaccacttcagatgccaggtgcagttctacggcctgagcgagaacgacgagtggacccaggacagagccaagcccgtgacccagatcgtgtctgccgaagcctggggcagagccgatgatgtgattaagatccactggcaggaaaagaagtccaacaccatcctgggcagccaggaaggcaacaccatgaagaccaacgacacctacatgaagttcagctggctgaccgtgcccgagaagtccctggacaaagaacacagatgcatcgtgcggcacgaaaacaacaagaacggcgtggaccaggaaatcatcttcccacccatcaagaccgatgtgattacaatggaccccaaggacaactgctccaaggacgccaacgataccctgctgctccagctgaccaacaccagcgcctactacatgtacttgttgctgctgctgaagtccgtggtgtacttcgccatcatcacatgctgcctgctgatggctatggtcaagcggaaggacagccggggaagggccaagcgatctggatctggagcaacaaacttctcactactcaaacaagcaggtgacgtggaggagaatcccgggcctactagcatggccttaccagtgaccgccttgctcctgccgctggccttgctgctccacgccgccaggccggagaacgtgctgacacagagccctgccatcatgagtgcctctccaggcgagaaagtgaccatgacctgtagagccagcagcagcgtgtccagcagctacctgcactggtatcagcagaagtccggcgcaagccccaaagtgtggatctacagcaccagcaatctggcctctggcgtgccaggcagattttctggctctggcagcggcacaagctacagcctgacaatcagctccgtggaagccgaagatgccgccacctactactgccagcagtacagcggctaccccatcacatttggagccggcaccaaggtggaagtgaagagaggcggaggcggaagtggaggcggaggatctggcggcggaggctctcaggttcagctcaaagaatctggccccgtgctggtggccccaagccagacactgtctatcacctgtaccgtgtccggcttcagcctggcctcctacaacatccactgggtccgacagcctccaggcaaaggactggaatggctgggagtgatttgggctggcggcagcaccaactacaacagcgcactgatgagccggctgagcatcagcaaggacaacagcaagagccaggtgttcctccagatgaactccctccagaccgacgacaccgccatgtactactgcgccaagagaagcgacgactacagttggttcgcctactggggccagggcacactggttactgtgtctgcttctacgcgtatccagaaccctgatcctgccgtgtaccagctgcgggatagcaagagcagcgacaagagcgtgtgtctgttcaccgacttcgacagccagaccaacgtgtcccagagcaaggactccgacgtgtacatcaccgataagaccgtgctggacatgcggagcatggacttcaagagcaactccgccgtggcctggtccaacaagtccgatttcgcctgcgccaacgccttcaacaacagcattatccccgaggacacattcttcccaagccccgagagcagcgactccaccgaccacgtgaagcccaaagagacagagaacaccaagcagcccagcaagagctgccacaagcccaaggccatcgtgcacaccgagaaagtgaacatgatgagcctgaccgtgctgggcctgcggatgctgttcgccaaaaccgtggccgtgaacttcctgctgaccgccaagctgttcttcctcctcaccgcccgcgccaagagaagcggatctggcgtgaagcagaccctgaatttcgacctgctgaagctggctggcgacgtggaatccaacccaggcccttctagaggccatatgaccgagtacaagcccacggtgcgcctcgccacccgcgacgacgtccccagggccgtacgcaccctcgccgccgcgttcgccgactaccccgccacgcgccacaccgtcgatccggaccgccacatcgagcgggtcaccgagctgcaagaactcttcctcacgcgcgtcgggctcgacatcggcaaggtgtgggtcgcggacgacggcgccgcggtggcggtctggaccacgccggagagcgtcgaagcgggggcggtgttcgccgagatcggcccgcgcatggccgagttgagcggttcccggctggccgcgcagcaacagatggaaggcctcctggcgccgcaccggcccaaggagcccgcgtggttcctggccaccgtcggcgtctcgcccgaccaccagggcaagggtctgggcagcgccgtcgtgctccccggagtggaggcggccgagcgcgccggggtgcccgccttcctggagacctccgcgccccgcaacctccccttctacgagcggctcggcttcaccgtcaccgccgacgtcgaggtgcccgaaggaccgcgcacctggtgcatgacccgcaagcccggtgcctga

SEQ ID NO: 35853 - DNA, 2925 bp, synthetic construct
  source 1..2925: mol_type = other DNA
atggccttaccagtgaccgccttgctcctgccgctggccttgctgctccacgccgccaggccgctcgagatccagaaccctgatcctgccgtgtaccagctgcgggatagcaagagcagcgacaagagcgtgtgtctgttcaccgacttcgacagccagaccaacgtgtcccagagcaaggactccgacgtgtacatcaccgataagaccgtgctggacatgcggagcatggacttcaagagcaactccgccgtggcctggtccaacaagtccgatttcgcctgcgccaacgccttcaacaacagcattatccccgaggacacattcttcccaagccccgagagcagcgactccaccgaccacgtgaagcccaaagagacagagaacaccaagcagcccagcaagagctgccacaagcccaaggccatcgtgcacaccgagaaagtgaacatgatgagcctgaccgtgctgggcctgcggatgctgttcgccaaaaccgtggccgtgaacttcctgctgaccgccaagctgttcttcctcctcaccgccagggccaagcgatctggatctggagcaacaaacttctcactactcaaacaagcaggtgacgtggaggagaatcccgggcctactagcatggccttaccagtgaccgccttgctcctgccgctggccttgctgctccacgccgccaggccggagaacgtgctgacacagagccctgccatcatgagtgcctctccaggcgagaaagtgaccatgacctgtagagccagcagcagcgtgtccagcagctacctgcactggtatcagcagaagtccggcgcaagccccaaagtgtggatctacagcaccagcaatctggcctctggcgtgccaggcagattttctggctctggcagcggcacaagctacagcctgacaatcagctccgtggaagccgaagatgccgccacctactactgccagcagtacagcggctaccccatcacatttggagccggcaccaaggtggaagtgaagagaggcggaggcggaagtggaggcggaggatctggcggcggaggctctcaggttcagctcaaagaatctggccccgtgctggtggccccaagccagacactgtctatcacctgtaccgtgtccggcttcagcctggcctcctacaacatccactgggtccgacagcctccaggcaaaggactggaatggctgggagtgatttgggctggcggcagcaccaactacaacagcgcactgatgagccggctgagcatcagcaaggacaacagcaagagccaggtgttcctccagatgaactccctccagaccgacgacaccgccatgtactactgcgccaagagaagcgacgactacagttggttcgcctactggggccagggcacactggttactgtgtctgcttctacgcgtgaggacctgaagaacgtgttcccacctgaggtggccgtgttcgagcctagcgaggccgagatcagccacacccagaaagccaccctcgtgtgcctggctaccggcttctaccccgaccatgtggaactgtcttggtgggtcaacggcaaagaggtgcacagcggcgtgtctaccgacccccagccactgaaagaacagcccgccctgaacgacagccggtactgcctgagcagcagactgagagtgtccgccaccttctggcagaacccccggaaccacttcagatgccaggtgcagttctacggcctgagcgagaacgacgagtggacccaggacagagccaagcccgtgacccagatcgtgtctgccgaagcctggggcagagccgatgatgtgattaagatccactggcaggaaaagaagtccaacaccatcctgggcagccaggaaggcaacaccatgaagaccaacgacacctacatgaagttcagctggctgaccgtgcccgagaagtccctggacaaagaacacagatgcatcgtgcggcacgaaaacaacaagaacggcgtggaccaggaaatcatcttcccacccatcaagaccgatgtgattacaatggaccccaaggacaactgctccaaggacgccaacgataccctgctgctccagctgaccaacaccagcgcctactacatgtacttgttgctgctgctgaagtccgtggtgtacttcgccatcatcacatgctgcctgctgatggctatggtcaagcggaaggacagccggggacgcgccaagagaagcggatctggcgtgaagcagaccctgaatttcgacctgctgaagctggctggcgacgtggaatccaacccaggcccttctagaggccatatgaccgagtacaagcccacggtgcgcctcgccacccgcgacgacgtccccagggccgtacgcaccctcgccgccgcgttcgccgactaccccgccacgcgccacaccgtcgatccggaccgccacatcgagcgggtcaccgagctgcaagaactcttcctcacgcgcgtcgggctcgacatcggcaaggtgtgggtcgcggacgacggcgccgcggtggcggtctggaccacgccggagagcgtcgaagcgggggcggtgttcgccgagatcggcccgcgcatggccgagttgagcggttcccggctggccgcgcagcaacagatggaaggcctcctggcgccgcaccggcccaaggagcccgcgtggttcctggccaccgtcggcgtctcgcccgaccaccagggcaagggtctgggcagcgccgtcgtgctccccggagtggaggcggccgagcgcgccggggtgcccgccttcctggagacctccgcgccccgcaacctccccttctacgagcggctcggcttcaccgtcaccgccgacgtcgaggtgcccgaaggaccgcgcacctggtgcatgacccgcaagcccggtgcctga

SEQ ID NO: 35854 - DNA, 2919 bp, synthetic construct
  source 1..2919: mol_type = other DNA
atggccttaccagtgaccgccttgctcctgccgctggccttgctgctccacgccgccaggccgctcgaggaggacctgaagaacgtgttcccacctgaggtggccgtgttcgagcctagcgaggccgagatcagccacacccagaaagccaccctcgtgtgcctggctaccggcttctaccccgaccatgtggaactgtcttggtgggtcaacggcaaagaggtgcacagcggcgtgtgtaccgacccccagccactgaaagaacagcccgccctgaacgacagccggtactgcctgagcagcagactgagagtgtccgccaccttctggcagaacccccggaaccacttcagatgccaggtgcagttctacggcctgagcgagaacgacgagtggacccaggacagagccaagcccgtgacccagatcgtgtctgccgaagcctggggcagagccgatgatgtgattaagatccactggcaggaaaagaagtccaacaccatcctgggcagccaggaaggcaacaccatgaagaccaacgacacctacatgaagttcagctggctgaccgtgcccgagaagtccctggacaaagaacacagatgcatcgtgcggcacgaaaacaacaagaacggcgtggaccaggaaatcatcttcccacccatcaagaccgatgtgattacaatggaccccaaggacaactgctccaaggacgccaacgataccctgctgctccagctgaccaacaccagcgcctactacatgtacttgttgctgctgctgaagtccgtggtgtacttcgccatcatcacatgctgcctgctgcggagaaccgccttctgctgcaacggcgagaagtctagggccaagcgatctggatctggagcaacaaacttctcactactcaaacaagcaggtgacgtggaggagaatcccgggcctactagcatggccttaccagtgaccgccttgctcctgccgctggccttgctgctccacgccgccaggccggagaacgtgctgacacagagccctgccatcatgagtgcctctccaggcgagaaagtgaccatgacctgtagagccagcagcagcgtgtccagcagctacctgcactggtatcagcagaagtccggcgcaagccccaaagtgtggatctacagcaccagcaatctggcctctggcgtgccaggcagattttctggctctggcagcggcacaagctacagcctgacaatcagctccgtggaagccgaagatgccgccacctactactgccagcagtacagcggctaccccatcacatttggagccggcaccaaggtggaagtgaagagaggcggaggcggaagtggaggcggaggatctggcggcggaggctctcaggttcagctcaaagaatctggccccgtgctggtggccccaagccagacactgtctatcacctgtaccgtgtccggcttcagcctggcctcctacaacatccactgggtccgacagcctccaggcaaaggactggaatggctgggagtgatttgggctggcggcagcaccaactacaacagcgcactgatgagccggctgagcatcagcaaggacaacagcaagagccaggtgttcctccagatgaactccctccagaccgacgacaccgccatgtactactgcgccaagagaagcgacgactacagttggttcgcctactggggccagggcacactggttactgtgtctgcttctacgcgtatccagaaccctgatcctgccgtgtaccagctgcgggatagcaagagcagcgacaagagcgtgtgtctgttcaccgacttcgacagccagaccaacgtgtcccagagcaaggactccgacgtgtacatcaccgataagtgcgtgctggacatgcggagcatggacttcaagagcaactccgccgtggcctggtccaacaagtccgatttcgcctgcgccaacgccttcaacaacagcattatccccgaggacacattcttcccaagccccgagagcagcgactccaccgaccacgtgaagcccaaagagacagagaacaccaagcagcccagcaagagctgccacaagcccaaggccatcgtgcacaccgagaaagtgaacatgatgagcctgaccgtgctgggcctgcggatgctgttcgccaaaaccgtggccgtgaacttcctgctgaccgccaagctgttcttcctccgcgccaagagaagcggatctggcgtgaagcagaccctgaatttcgacctgctgaagctggctggcgacgtggaatccaacccaggcccttctagaggccatatgaccgagtacaagcccacggtgcgcctcgccacccgcgacgacgtccccagggccgtacgcaccctcgccgccgcgttcgccgactaccccgccacgcgccacaccgtcgatccggaccgccacatcgagcgggtcaccgagctgcaagaactcttcctcacgcgcgtcgggctcgacatcggcaaggtgtgggtcgcggacgacggcgccgcggtggcggtctggaccacgccggagagcgtcgaagcgggggcggtgttcgccgagatcggcccgcgcatggccgagttgagcggttcccggctggccgcgcagcaacagatggaaggcctcctggcgccgcaccggcccaaggagcccgcgtggttcctggccaccgtcggcgtctcgcccgaccaccagggcaagggtctgggcagcgccgtcgtgctccccggagtggaggcggccgagcgcgccggggtgcccgccttcctggagacctccgcgccccgcaacctccccttctacgagcggctcggcttcaccgtcaccgccgacgtcgaggtgcccgaaggaccgcgcacctggtgcatgacccgcaagcccggtgcctga

SEQ ID NO: 35855 - DNA, 2919 bp, synthetic construct
  source 1..2919: mol_type = other DNA
atggccttaccagtgaccgccttgctcctgccgctggccttgctgctccacgccgccaggccgctcgagatccagaaccctgatcctgccgtgtaccagctgcgggatagcaagagcagcgacaagagcgtgtgtctgttcaccgacttcgacagccagaccaacgtgtcccagagcaaggactccgacgtgtacatcaccgataagtgcgtgctggacatgcggagcatggacttcaagagcaactccgccgtggcctggtccaacaagtccgatttcgcctgcgccaacgccttcaacaacagcattatccccgaggacacattcttcccaagccccgagagcagcgactccaccgaccacgtgaagcccaaagagacagagaacaccaagcagcccagcaagagctgccacaagcccaaggccatcgtgcacaccgagaaagtgaacatgatgagcctgaccgtgctgggcctgcggatgctgttcgccaaaaccgtggccgtgaacttcctgctgaccgccaagctgttcttcctcagggccaagcgatctggatctggagcaacaaacttctcactactcaaacaagcaggtgacgtggaggagaatcccgggcctactagcatggccttaccagtgaccgccttgctcctgccgctggccttgctgctccacgccgccaggccggagaacgtgctgacacagagccctgccatcatgagtgcctctccaggcgagaaagtgaccatgacctgtagagccagcagcagcgtgtccagcagctacctgcactggtatcagcagaagtccggcgcaagccccaaagtgtggatctacagcaccagcaatctggcctctggcgtgccaggcagattttctggctctggcagcggcacaagctacagcctgacaatcagctccgtggaagccgaagatgccgccacctactactgccagcagtacagcggctaccccatcacatttggagccggcaccaaggtggaagtgaagagaggcggaggcggaagtggaggcggaggatctggcggcggaggctctcaggttcagctcaaagaatctggccccgtgctggtggccccaagccagacactgtctatcacctgtaccgtgtccggcttcagcctggcctcctacaacatccactgggtccgacagcctccaggcaaaggactggaatggctgggagtgatttgggctggcggcagcaccaactacaacagcgcactgatgagccggctgagcatcagcaaggacaacagcaagagccaggtgttcctccagatgaactccctccagaccgacgacaccgccatgtactactgcgccaagagaagcgacgactacagttggttcgcctactggggccagggcacactggttactgtgtctgcttctacgcgtgaggacctgaagaacgtgttcccacctgaggtggccgtgttcgagcctagcgaggccgagatcagccacacccagaaagccaccctcgtgtgcctggctaccggcttctaccccgaccatgtggaactgtcttggtgggtcaacggcaaagaggtgcacagcggcgtgtgtaccgacccccagccactgaaagaacagcccgccctgaacgacagccggtactgcctgagcagcagactgagagtgtccgccaccttctggcagaacccccggaaccacttcagatgccaggtgcagttctacggcctgagcgagaacgacgagtggacccaggacagagccaagcccgtgacccagatcgtgtctgccgaagcctggggcagagccgatgatgtgattaagatccactggcaggaaaagaagtccaacaccatcctgggcagccaggaaggcaacaccatgaagaccaacgacacctacatgaagttcagctggctgaccgtgcccgagaagtccctggacaaagaacacagatgcatcgtgcggcacgaaaacaacaagaacggcgtggaccaggaaatcatcttcccacccatcaagaccgatgtgattacaatggaccccaaggacaactgctccaaggacgccaacgataccctgctgctccagctgaccaacaccagcgcctactacatgtacttgttgctgctgctgaagtccgtggtgtacttcgccatcatcacatgctgcctgctgcggagaaccgccttctgctgcaacggcgagaagtctcgcgccaagagaagcggatctggcgtgaagcagaccctgaatttcgacctgctgaagctggctggcgacgtggaatccaacccaggcccttctagaggccatatgaccgagtacaagcccacggtgcgcctcgccacccgcgacgacgtccccagggccgtacgcaccctcgccgccgcgttcgccgactaccccgccacgcgccacaccgtcgatccggaccgccacatcgagcgggtcaccgagctgcaagaactcttcctcacgcgcgtcgggctcgacatcggcaaggtgtgggtcgcggacgacggcgccgcggtggcggtctggaccacgccggagagcgtcgaagcgggggcggtgttcgccgagatcggcccgcgcatggccgagttgagcggttcccggctggccgcgcagcaacagatggaaggcctcctggcgccgcaccggcccaaggagcccgcgtggttcctggccaccgtcggcgtctcgcccgaccaccagggcaagggtctgggcagcgccgtcgtgctccccggagtggaggcggccgagcgcgccggggtgcccgccttcctggagacctccgcgccccgcaacctccccttctacgagcggctcggcttcaccgtcaccgccgacgtcgaggtgcccgaaggaccgcgcacctggtgcatgacccgcaagcccggtgcctga

SEQ ID NO: 35856 - DNA, 2919 bp, synthetic construct
  source 1..2919: mol_type = other DNA
atggccttaccagtgaccgccttgctcctgccgctggccttgctgctccacgccgccaggccgctcgaggaggacctgaagaacgtgttcccacctgaggtggccgtgttcgagcctagcgaggccgagatcagccacacccagaaagccaccctcgtgtgcctggctaccggcttctaccccgaccatgtggaactgtcttggtgggtcaacggcaaagaggtgcacagcggcgtgtctaccgacccccagccactgaaagaacagcccgccctgaacgacagccggtactgcctgagcagcagactgagagtgtccgccaccttctggcagaacccccggaaccacttcagatgccaggtgcagttctacggcctgagcgagaacgacgagtggacccaggacagagccaagcccgtgacccagatcgtgtctgccgaagcctggggcagagccgatgatgtgattaagatccactggcaggaaaagaagtccaacaccatcctgggcagccaggaaggcaacaccatgaagaccaacgacacctacatgaagttcagctggctgaccgtgcccgagaagtccctggacaaagaacacagatgcatcgtgcggcacgaaaacaacaagaacggcgtggaccaggaaatcatcttcccacccatcaagaccgatgtgattacaatggaccccaaggacaactgctccaaggacgccaacgataccctgctgctccagctgaccaacaccagcgcctactacatgtacttgttgctgctgctgaagtccgtggtgtacttcgccatcatcacatgctgcctgctgcggagaaccgccttctgctgcaacggcgagaagtctagggccaagcgatctggatctggagcaacaaacttctcactactcaaacaagcaggtgacgtggaggagaatcccgggcctactagcatggccttaccagtgaccgccttgctcctgccgctggccttgctgctccacgccgccaggccggagaacgtgctgacacagagccctgccatcatgagtgcctctccaggcgagaaagtgaccatgacctgtagagccagcagcagcgtgtccagcagctacctgcactggtatcagcagaagtccggcgcaagccccaaagtgtggatctacagcaccagcaatctggcctctggcgtgccaggcagattttctggctctggcagcggcacaagctacagcctgacaatcagctccgtggaagccgaagatgccgccacctactactgccagcagtacagcggctaccccatcacatttggagccggcaccaaggtggaagtgaagagaggcggaggcggaagtggaggcggaggatctggcggcggaggctctcaggttcagctcaaagaatctggccccgtgctggtggccccaagccagacactgtctatcacctgtaccgtgtccggcttcagcctggcctcctacaacatccactgggtccgacagcctccaggcaaaggactggaatggctgggagtgatttgggctggcggcagcaccaactacaacagcgcactgatgagccggctgagcatcagcaaggacaacagcaagagccaggtgttcctccagatgaactccctccagaccgacgacaccgccatgtactactgcgccaagagaagcgacgactacagttggttcgcctactggggccagggcacactggttactgtgtctgcttctacgcgtatccagaaccctgatcctgccgtgtaccagctgcgggatagcaagagcagcgacaagagcgtgtgtctgttcaccgacttcgacagccagaccaacgtgtcccagagcaaggactccgacgtgtacatcaccgataagaccgtgctggacatgcggagcatggacttcaagagcaactccgccgtggcctggtccaacaagtccgatttcgcctgcgccaacgccttcaacaacagcattatccccgaggacacattcttcccaagccccgagagcagcgactccaccgaccacgtgaagcccaaagagacagagaacaccaagcagcccagcaagagctgccacaagcccaaggccatcgtgcacaccgagaaagtgaacatgatgagcctgaccgtgctgggcctgcggatgctgttcgccaaaaccgtggccgtgaacttcctgctgaccgccaagctgttcttcctccgcgccaagagaagcggatctggcgtgaagcagaccctgaatttcgacctgctgaagctggctggcgacgtggaatccaacccaggcccttctagaggccatatgaccgagtacaagcccacggtgcgcctcgccacccgcgacgacgtccccagggccgtacgcaccctcgccgccgcgttcgccgactaccccgccacgcgccacaccgtcgatccggaccgccacatcgagcgggtcaccgagctgcaagaactcttcctcacgcgcgtcgggctcgacatcggcaaggtgtgggtcgcggacgacggcgccgcggtggcggtctggaccacgccggagagcgtcgaagcgggggcggtgttcgccgagatcggcccgcgcatggccgagttgagcggttcccggctggccgcgcagcaacagatggaaggcctcctggcgccgcaccggcccaaggagcccgcgtggttcctggccaccgtcggcgtctcgcccgaccaccagggcaagggtctgggcagcgccgtcgtgctccccggagtggaggcggccgagcgcgccggggtgcccgccttcctggagacctccgcgccccgcaacctccccttctacgagcggctcggcttcaccgtcaccgccgacgtcgaggtgcccgaaggaccgcgcacctggtgcatgacccgcaagcccggtgcctga

SEQ ID NO: 35857 - DNA, 2919 bp, synthetic construct
  source 1..2919: mol_type = other DNA
atggccttaccagtgaccgccttgctcctgccgctggccttgctgctccacgccgccaggccgctcgagatccagaaccctgatcctgccgtgtaccagctgcgggatagcaagagcagcgacaagagcgtgtgtctgttcaccgacttcgacagccagaccaacgtgtcccagagcaaggactccgacgtgtacatcaccgataagaccgtgctggacatgcggagcatggacttcaagagcaactccgccgtggcctggtccaacaagtccgatttcgcctgcgccaacgccttcaacaacagcattatccccgaggacacattcttcccaagccccgagagcagcgactccaccgaccacgtgaagcccaaagagacagagaacaccaagcagcccagcaagagctgccacaagcccaaggccatcgtgcacaccgagaaagtgaacatgatgagcctgaccgtgctgggcctgcggatgctgttcgccaaaaccgtggccgtgaacttcctgctgaccgccaagctgttcttcctcagggccaagcgatctggatctggagcaacaaacttctcactactcaaacaagcaggtgacgtggaggagaatcccgggcctactagcatggccttaccagtgaccgccttgctcctgccgctggccttgctgctccacgccgccaggccggagaacgtgctgacacagagccctgccatcatgagtgcctctccaggcgagaaagtgaccatgacctgtagagccagcagcagcgtgtccagcagctacctgcactggtatcagcagaagtccggcgcaagccccaaagtgtggatctacagcaccagcaatctggcctctggcgtgccaggcagattttctggctctggcagcggcacaagctacagcctgacaatcagctccgtggaagccgaagatgccgccacctactactgccagcagtacagcggctaccccatcacatttggagccggcaccaaggtggaagtgaagagaggcggaggcggaagtggaggcggaggatctggcggcggaggctctcaggttcagctcaaagaatctggccccgtgctggtggccccaagccagacactgtctatcacctgtaccgtgtccggcttcagcctggcctcctacaacatccactgggtccgacagcctccaggcaaaggactggaatggctgggagtgatttgggctggcggcagcaccaactacaacagcgcactgatgagccggctgagcatcagcaaggacaacagcaagagccaggtgttcctccagatgaactccctccagaccgacgacaccgccatgtactactgcgccaagagaagcgacgactacagttggttcgcctactggggccagggcacactggttactgtgtctgcttctacgcgtgaggacctgaagaacgtgttcccacctgaggtggccgtgttcgagcctagcgaggccgagatcagccacacccagaaagccaccctcgtgtgcctggctaccggcttctaccccgaccatgtggaactgtcttggtgggtcaacggcaaagaggtgcacagcggcgtgtctaccgacccccagccactgaaagaacagcccgccctgaacgacagccggtactgcctgagcagcagactgagagtgtccgccaccttctggcagaacccccggaaccacttcagatgccaggtgcagttctacggcctgagcgagaacgacgagtggacccaggacagagccaagcccgtgacccagatcgtgtctgccgaagcctggggcagagccgatgatgtgattaagatccactggcaggaaaagaagtccaacaccatcctgggcagccaggaaggcaacaccatgaagaccaacgacacctacatgaagttcagctggctgaccgtgcccgagaagtccctggacaaagaacacagatgcatcgtgcggcacgaaaacaacaagaacggcgtggaccaggaaatcatcttcccacccatcaagaccgatgtgattacaatggaccccaaggacaactgctccaaggacgccaacgataccctgctgctccagctgaccaacaccagcgcctactacatgtacttgttgctgctgctgaagtccgtggtgtacttcgccatcatcacatgctgcctgctgcggagaaccgccttctgctgcaacggcgagaagtctcgcgccaagagaagcggatctggcgtgaagcagaccctgaatttcgacctgctgaagctggctggcgacgtggaatccaacccaggcccttctagaggccatatgaccgagtacaagcccacggtgcgcctcgccacccgcgacgacgtccccagggccgtacgcaccctcgccgccgcgttcgccgactaccccgccacgcgccacaccgtcgatccggaccgccacatcgagcgggtcaccgagctgcaagaactcttcctcacgcgcgtcgggctcgacatcggcaaggtgtgggtcgcggacgacggcgccgcggtggcggtctggaccacgccggagagcgtcgaagcgggggcggtgttcgccgagatcggcccgcgcatggccgagttgagcggttcccggctggccgcgcagcaacagatggaaggcctcctggcgccgcaccggcccaaggagcccgcgtggttcctggccaccgtcggcgtctcgcccgaccaccagggcaagggtctgggcagcgccgtcgtgctccccggagtggaggcggccgagcgcgccggggtgcccgccttcctggagacctccgcgccccgcaacctccccttctacgagcggctcggcttcaccgtcaccgccgacgtcgaggtgcccgaaggaccgcgcacctggtgcatgacccgcaagcccggtgcctga

SEQ ID NO: 35858 - DNA, 2613 bp, synthetic construct
  source 1..2613: mol_type = other DNA
atggccttaccagtgaccgccttgctcctgccgctggccttgctgctccacgccgccaggccgctcgaggaggacctgaagaacgtgttcccacctgaggtggccgtgttcgagcctagcaaggccgagatcgcccacacccagaaagccaccctcgtgtgcctggctaccggcttctaccccgaccatgtggaactgtcttggtgggtcaacggcaaagaggtgcacagcggcgtgtgtaccgacccccagccactgaaagaacagcccgccctgaacgacagccggtactgcctgagcagcagactgagagtgtccgccaccttctggcagaacccccggaaccacttcagatgccaggtgcagttctacggcctgagcgagaacgacgagtggacccaggacagagccaagcccgtgacccagatcgtgtctgccgaagcctggggcagagccgattgcggcatcaccagcgccagctaccaccagggcgtgctgagcgccaccatcctgtacgagatcctgctgggcaaggccaccctgtacgccgtgctggtgtctgccctggtgctgatggctatggtcaagcggaaggacagccggggaagggccaagcgatctggatctggagcaacaaacttctcactactcaaacaagcaggtgacgtggaggagaatcccgggcctactagcatggccttaccagtgaccgccttgctcctgccgctggccttgctgctccacgccgccaggccggagaacgtgctgacacagagccctgccatcatgagtgcctctccaggcgagaaagtgaccatgacctgtagagccagcagcagcgtgtccagcagctacctgcactggtatcagcagaagtccggcgcaagccccaaagtgtggatctacagcaccagcaatctggcctctggcgtgccaggcagattttctggctctggcagcggcacaagctacagcctgacaatcagctccgtggaagccgaagatgccgccacctactactgccagcagtacagcggctaccccatcacatttggagccggcaccaaggtggaagtgaagagaggcggaggcggaagtggaggcggaggatctggcggcggaggctctcaggttcagctcaaagaatctggccccgtgctggtggccccaagccagacactgtctatcacctgtaccgtgtccggcttcagcctggcctcctacaacatccactgggtccgacagcctccaggcaaaggactggaatggctgggagtgatttgggctggcggcagcaccaactacaacagcgcactgatgagccggctgagcatcagcaaggacaacagcaagagccaggtgttcctccagatgaactccctccagaccgacgacaccgccatgtactactgcgccaagagaagcgacgactacagttggttcgcctactggggccagggcacactggttactgtgtctgcttctacgcgtatccagaaccctgatcctgccgtgtaccagctgcgggatagcaagagcagcgacaagagcgtgtgtctgttcaccgacttcgacagccagaccaacgtgtcccagagcaaggactccgacgtgtacatcaccgataagtgcgtgctggacatgcggagcatggacttcaagagcaactccgccgtggcctggtccaacaagtccgatttcgcctgcgccaacgccttcaacaacagcattatccccgaggacacattcttcccaagcagcgacgtgccctgcgacgtgaagctggtggaaaagagcttcgagacagacaccaacctgaacttccagaacctgagcgtgatcggcttcagaatcctgctgctgaaagtggccggctttaacctgctgatgaccctgcggctgtggtccagccgcgccaagagaagcggatctggcgtgaagcagaccctgaatttcgacctgctgaagctggctggcgacgtggaatccaacccaggcccttctagaggccatatgaccgagtacaagcccacggtgcgcctcgccacccgcgacgacgtccccagggccgtacgcaccctcgccgccgcgttcgccgactaccccgccacgcgccacaccgtcgatccggaccgccacatcgagcgggtcaccgagctgcaagaactcttcctcacgcgcgtcgggctcgacatcggcaaggtgtgggtcgcggacgacggcgccgcggtggcggtctggaccacgccggagagcgtcgaagcgggggcggtgttcgccgagatcggcccgcgcatggccgagttgagcggttcccggctggccgcgcagcaacagatggaaggcctcctggcgccgcaccggcccaaggagcccgcgtggttcctggccaccgtcggcgtctcgcccgaccaccagggcaagggtctgggcagcgccgtcgtgctccccggagtggaggcggccgagcgcgccggggtgcccgccttcctggagacctccgcgccccgcaacctccccttctacgagcggctcggcttcaccgtcaccgccgacgtcgaggtgcccgaaggaccgcgcacctggtgcatgacccgcaagcccggtgcctga

SEQ ID NO: 35859 - DNA, 2613 bp, synthetic construct
  source 1..2613: mol_type = other DNA
atggccttaccagtgaccgccttgctcctgccgctggccttgctgctccacgccgccaggccgctcgagatccagaaccctgatcctgccgtgtaccagctgcgggatagcaagagcagcgacaagagcgtgtgtctgttcaccgacttcgacagccagaccaacgtgtcccagagcaaggactccgacgtgtacatcaccgataagtgcgtgctggacatgcggagcatggacttcaagagcaactccgccgtggcctggtccaacaagtccgatttcgcctgcgccaacgccttcaacaacagcattatccccgaggacacattcttcccaagcagcgacgtgccctgcgacgtgaagctggtggaaaagagcttcgagacagacaccaacctgaacttccagaacctgagcgtgatcggcttcagaatcctgctgctgaaagtggccggctttaacctgctgatgaccctgcggctgtggtccagcagggccaagcgatctggatctggagcaacaaacttctcactactcaaacaagcaggtgacgtggaggagaatcccgggcctactagcatggccttaccagtgaccgccttgctcctgccgctggccttgctgctccacgccgccaggccggagaacgtgctgacacagagccctgccatcatgagtgcctctccaggcgagaaagtgaccatgacctgtagagccagcagcagcgtgtccagcagctacctgcactggtatcagcagaagtccggcgcaagccccaaagtgtggatctacagcaccagcaatctggcctctggcgtgccaggcagattttctggctctggcagcggcacaagctacagcctgacaatcagctccgtggaagccgaagatgccgccacctactactgccagcagtacagcggctaccccatcacatttggagccggcaccaaggtggaagtgaagagaggcggaggcggaagtggaggcggaggatctggcggcggaggctctcaggttcagctcaaagaatctggccccgtgctggtggccccaagccagacactgtctatcacctgtaccgtgtccggcttcagcctggcctcctacaacatccactgggtccgacagcctccaggcaaaggactggaatggctgggagtgatttgggctggcggcagcaccaactacaacagcgcactgatgagccggctgagcatcagcaaggacaacagcaagagccaggtgttcctccagatgaactccctccagaccgacgacaccgccatgtactactgcgccaagagaagcgacgactacagttggttcgcctactggggccagggcacactggttactgtgtctgcttctacgcgtgaggacctgaagaacgtgttcccacctgaggtggccgtgttcgagcctagcaaggccgagatcgcccacacccagaaagccaccctcgtgtgcctggctaccggcttctaccccgaccatgtggaactgtcttggtgggtcaacggcaaagaggtgcacagcggcgtgtgtaccgacccccagccactgaaagaacagcccgccctgaacgacagccggtactgcctgagcagcagactgagagtgtccgccaccttctggcagaacccccggaaccacttcagatgccaggtgcagttctacggcctgagcgagaacgacgagtggacccaggacagagccaagcccgtgacccagatcgtgtctgccgaagcctggggcagagccgattgcggcatcaccagcgccagctaccaccagggcgtgctgagcgccaccatcctgtacgagatcctgctgggcaaggccaccctgtacgccgtgctggtgtctgccctggtgctgatggctatggtcaagcggaaggacagccggggacgcgccaagagaagcggatctggcgtgaagcagaccctgaatttcgacctgctgaagctggctggcgacgtggaatccaacccaggcccttctagaggccatatgaccgagtacaagcccacggtgcgcctcgccacccgcgacgacgtccccagggccgtacgcaccctcgccgccgcgttcgccgactaccccgccacgcgccacaccgtcgatccggaccgccacatcgagcgggtcaccgagctgcaagaactcttcctcacgcgcgtcgggctcgacatcggcaaggtgtgggtcgcggacgacggcgccgcggtggcggtctggaccacgccggagagcgtcgaagcgggggcggtgttcgccgagatcggcccgcgcatggccgagttgagcggttcccggctggccgcgcagcaacagatggaaggcctcctggcgccgcaccggcccaaggagcccgcgtggttcctggccaccgtcggcgtctcgcccgaccaccagggcaagggtctgggcagcgccgtcgtgctccccggagtggaggcggccgagcgcgccggggtgcccgccttcctggagacctccgcgccccgcaacctccccttctacgagcggctcggcttcaccgtcaccgccgacgtcgaggtgcccgaaggaccgcgcacctggtgcatgacccgcaagcccggtgcctga

SEQ ID NO: 35860 - DNA, 2292 bp, synthetic construct
  source 1..2292: mol_type = other DNA
atggccttaccagtgaccgccttgctcctgccgctggccttgctgctccacgccgccaggccgctcgagcagagttttgggttgttggaccctaaattgtgctatctgttggacggaatcctgttcatttacggagtgatcctgaccgcattgttcctgcgggttaagttttccagatccgcagacgcacccgcttaccaacaagggcagaaccaactctacaatgaacttaatttggggcggagggaagagtacgacgttctggacaaaaggaggggacgagatcccgagatgggcggaaagcctcagcgaaggaagaatccgcaagaggggctttataacgaactccagaaagataaaatggcagaagcctatagtgagattgggatgaagggagaaaggaggaggggtaaaggtcacgatgggttgtaccaaggattgagcacagccactaaagatacctatgatgcgctccacatgcaggccctgccgccaagaagggccaagcgatctggatctggagcaacaaacttctcactactcaaacaagcaggtgacgtggaggagaatcccgggcctactagcatggccttaccagtgaccgccttgctcctgccgctggccttgctgctccacgccgccaggccggagaacgtgctgacacagagccctgccatcatgagtgcctctccaggcgagaaagtgaccatgacctgtagagccagcagcagcgtgtccagcagctacctgcactggtatcagcagaagtccggcgcaagccccaaagtgtggatctacagcaccagcaatctggcctctggcgtgccaggcagattttctggctctggcagcggcacaagctacagcctgacaatcagctccgtggaagccgaagatgccgccacctactactgccagcagtacagcggctaccccatcacatttggagccggcaccaaggtggaagtgaagagaggcggaggcggaagtggaggcggaggatctggcggcggaggctctcaggttcagctcaaagaatctggccccgtgctggtggccccaagccagacactgtctatcacctgtaccgtgtccggcttcagcctggcctcctacaacatccactgggtccgacagcctccaggcaaaggactggaatggctgggagtgatttgggctggcggcagcaccaactacaacagcgcactgatgagccggctgagcatcagcaaggacaacagcaagagccaggtgttcctccagatgaactccctccagaccgacgacaccgccatgtactactgcgccaagagaagcgacgactacagttggttcgcctactggggccagggcacactggttactgtgtctgcttctacgcgtgagctgggagagcctcagctgtgctatatcctggacgccatcctgtttctgtacggcatcgtgctgaccctgctgtactgccggctgaagatccaagtgcggaaggccgccatcaccagctacgagaaatccgacggcgtgtacaccggcctgagcaccagaaatcaagagacatacgagacactgaagcacgaaaagcctccacaacgcgccaagagaagcggatctggcgtgaagcagaccctgaatttcgacctgctgaagctggctggcgacgtggaatccaacccaggcccttctagaggccatatgaccgagtacaagcccacggtgcgcctcgccacccgcgacgacgtccccagggccgtacgcaccctcgccgccgcgttcgccgactaccccgccacgcgccacaccgtcgatccggaccgccacatcgagcgggtcaccgagctgcaagaactcttcctcacgcgcgtcgggctcgacatcggcaaggtgtgggtcgcggacgacggcgccgcggtggcggtctggaccacgccggagagcgtcgaagcgggggcggtgttcgccgagatcggcccgcgcatggccgagttgagcggttcccggctggccgcgcagcaacagatggaaggcctcctggcgccgcaccggcccaaggagcccgcgtggttcctggccaccgtcggcgtctcgcccgaccaccagggcaagggtctgggcagcgccgtcgtgctccccggagtggaggcggccgagcgcgccggggtgcccgccttcctggagacctccgcgccccgcaacctccccttctacgagcggctcggcttcaccgtcaccgccgacgtcgaggtgcccgaaggaccgcgcacctggtgcatgacccgcaagcccggtgcctga

SEQ ID NO: 35861 - DNA, 2925 bp, synthetic construct; identical to SEQ ID NO: 35852
  source 1..2925: mol_type = other DNA

SEQ ID NO: 35862 - DNA, 2925 bp, synthetic construct; identical to SEQ ID NO: 35853
  source 1..2925: mol_type = other DNA

SEQ ID NO: 35863 - DNA, 2922 bp, synthetic construct
  source 1..2922: mol_type = other DNA
atggccttaccagtgaccgccttgctcctgccgctggccttgctgctccacgccgccaggccgctcgaggaggaggacctgaagaacgtgttcccacctgaggtggccgtgttcgagcctagcgaggccgagatcagccacacccagaaagccaccctcgtgtgcctggctaccggcttctaccccgaccatgtggaactgtcttggtgggtcaacggcaaagaggtgcacagcggcgtgtgtaccgacccccagccactgaaagaacagcccgccctgaacgacagccggtactgcctgagcagcagactgagagtgtccgccaccttctggcagaacccccggaaccacttcagatgccaggtgcagttctacggcctgagcgagaacgacgagtggacccaggacagagccaagcccgtgacccagatcgtgtctgccgaagcctggggcagagccgatgatgtgattaagatccactggcaggaaaagaagtccaacaccatcctgggcagccaggaaggcaacaccatgaagaccaacgacacctacatgaagttcagctggctgaccgtgcccgagaagtccctggacaaagaacacagatgcatcgtgcggcacgaaaacaacaagaacggcgtggaccaggaaatcatcttcccacccatcaagaccgatgtgattacaatggaccccaaggacaactgctccaaggacgccaacgataccctgctgctccagctgaccaacaccagcgcctactacatgtacttgttgctgctgctgaagtccgtggtgtacttcgccatcatcacatgctgcctgctgcggagaaccgccttctgctgcaacggcgagaagtctagggccaagcgatctggatctggagcaacaaacttctcactactcaaacaagcaggtgacgtggaggagaatcccgggcctactagcatggccttaccagtgaccgccttgctcctgccgctggccttgctgctccacgccgccaggccggagaacgtgctgacacagagccctgccatcatgagtgcctctccaggcgagaaagtgaccatgacctgtagagccagcagcagcgtgtccagcagctacctgcactggtatcagcagaagtccggcgcaagccccaaagtgtggatctacagcaccagcaatctggcctctggcgtgccaggcagattttctggctctggcagcggcacaagctacagcctgacaatcagctccgtggaagccgaagatgccgccacctactactgccagcagtacagcggctaccccatcacatttggagccggcaccaaggtggaagtgaagagaggcggaggcggaagtggaggcggaggatctggcggcggaggctctcaggttcagctcaaagaatctggccccgtgctggtggccccaagccagacactgtctatcacctgtaccgtgtccggcttcagcctggcctcctacaacatccactgggtccgacagcctccaggcaaaggactggaatggctgggagtgatttgggctggcggcagcaccaactacaacagcgcactgatgagccggctgagcatcagcaaggacaacagcaagagccaggtgttcctccagatgaactccctccagaccgacgacaccgccatgtactactgcgccaagagaagcgacgactacagttggttcgcctactggggccagggcacactggttactgtgtctgcttctacgcgtatccagaaccctgatcctgccgtgtaccagctgcgggatagcaagagcagcgacaagagcgtgtgtctgttcaccgacttcgacagccagaccaacgtgtcccagagcaaggactccgacgtgtacatcaccgataagtgcgtgctggacatgcggagcatggacttcaagagcaactccgccgtggcctggtccaacaagtccgatttcgcctgcgccaacgccttcaacaacagcattatccccgaggacacattcttcccaagccccgagagcagcgactccaccgaccacgtgaagcccaaagagacagagaacaccaagcagcccagcaagagctgccacaagcccaaggccatcgtgcacaccgagaaagtgaacatgatgagcctgaccgtgctgggcctgcggatgctgttcgccaaaaccgtggccgtgaacttcctgctgaccgccaagctgttcttcctccgcgccaagagaagcggatctggcgtgaagcagaccctgaatttcgacctgctgaagctggctggcgacgtggaatccaacccaggcccttctagaggccatatgaccgagtacaagcccacggtgcgcctcgccacccgcgacgacgtccccagggccgtacgcaccctcgccgccgcgttcgccgactaccccgccacgcgccacaccgtcgatccggaccgccacatcgagcgggtcaccgagctgcaagaactcttcctcacgcgcgtcgggctcgacatcggcaaggtgtgggtcgcggacgacggcgccgcggtggcggtctggaccacgccggagagcgtcgaagcgggggcggtgttcgccgagatcggcccgcgcatggccgagttgagcggttcccggctggccgcgcagcaacagatggaaggcctcctggcgccgcaccggcccaaggagcccgcgtggttcctggccaccgtcggcgtctcgcccgaccaccagggcaagggtctgggcagcgccgtcgtgctccccggagtggaggcggccgagcgcgccggggtgcccgccttcctggagacctccgcgccccgcaacctccccttctacgagcggctcggcttcaccgtcaccgccgacgtcgaggtgcccgaaggaccgcgcacctggtgcatgacccgcaagcccggtgcctga

SEQ ID NO: 35864 - DNA, 2922 bp, synthetic construct
  source 1..2922: mol_type = other DNA
atggccttaccagtgaccgccttgctcctgccgctggccttgctgctccacgccgccaggccgctcgagatccagaaccctgatcctgccgtgtaccagctgcgggatagcaagagcagcgacaagagcgtgtgtctgttcaccgacttcgacagccagaccaacgtgtcccagagcaaggactccgacgtgtacatcaccgataagtgcgtgctggacatgcggagcatggacttcaagagcaactccgccgtggcctggtccaacaagtccgatttcgcctgcgccaacgccttcaacaacagcattatccccgaggacacattcttcccaagccccgagagcagcgactccaccgaccacgtgaagcccaaagagacagagaacaccaagcagcccagcaagagctgccacaagcccaaggccatcgtgcacaccgagaaagtgaacatgatgagcctgaccgtgctgggcctgcggatgctgttcgccaaaaccgtggccgtgaacttcctgctgaccgccaagctgttcttcctcagggccaagcgatctggatctggagcaacaaacttctcactactcaaacaagcaggtgacgtggaggagaatcccgggcctactagcatggccttaccagtgaccgccttgctcctgccgctggccttgctgctccacgccgccaggccggagaacgtgctgacacagagccctgccatcatgagtgcctctccaggcgagaaagtgaccatgacctgtagagccagcagcagcgtgtccagcagctacctgcactggtatcagcagaagtccggcgcaagccccaaagtgtggatctacagcaccagcaatctggcctctggcgtgccaggcagattttctggctctggcagcggcacaagctacagcctgacaatcagctccgtggaagccgaagatgccgccacctactactgccagcagtacagcggctaccccatcacatttggagccggcaccaaggtggaagtgaagagaggcggaggcggaagtggaggcggaggatctggcggcggaggctctcaggttcagctcaaagaatctggccccgtgctggtggccccaagccagacactgtctatcacctgtaccgtgtccggcttcagcctggcctcctacaacatccactgggtccgacagcctccaggcaaaggactggaatggctgggagtgatttgggctggcggcagcaccaactacaacagcgcactgatgagccggctgagcatcagcaaggacaacagcaagagccaggtgttcctccagatgaactccctccagaccgacgacaccgccatgtactactgcgccaagagaagcgacgactacagttggttcgcctactggggccagggcacactggttactgtgtctgcttctacgcgtgaggaggacctgaagaacgtgttcccacctgaggtggccgtgttcgagcctagcgaggccgagatcagccacacccagaaagccaccctcgtgtgcctggctaccggcttctaccccgaccatgtggaactgtcttggtgggtcaacggcaaagaggtgcacagcggcgtgtgtaccgacccccagccactgaaagaacagcccgccctgaacgacagccggtactgcctgagcagcagactgagagtgtccgccaccttctggcagaacccccggaaccacttcagatgccaggtgcagttctacggcctgagcgagaacgacgagtggacccaggacagagccaagcccgtgacccagatcgtgtctgccgaagcctggggcagagccgatgatgtgattaagatccactggcaggaaaagaagtccaacaccatcctgggcagccaggaaggcaacaccatgaagaccaacgacacctacatgaagttcagctggctgaccgtgcccgagaagtccctggacaaagaacacagatgcatcgtgcggcacgaaaacaacaagaacggcgtggaccaggaaatcatcttcccacccatcaagaccgatgtgattacaatggaccccaaggacaactgctccaaggacgccaacgataccctgctgctccagctgaccaacaccagcgcctactacatgtacttgttgctgctgctgaagtccgtggtgtacttcgccatcatcacatgctgcctgctgcggagaaccgccttctgctgcaacggcgagaagtctcgcgccaagagaagcggatctggcgtgaagcagaccctgaatttcgacctgctgaagctggctggcgacgtggaatccaacccaggcccttctagaggccatatgaccgagtacaagcccacggtgcgcctcgccacccgcgacgacgtccccagggccgtacgcaccctcgccgccgcgttcgccgactaccccgccacgcgccacaccgtcgatccggaccgccacatcgagcgggtcaccgagctgcaagaactcttcctcacgcgcgtcgggctcgacatcggcaaggtgtgggtcgcggacgacggcgccgcggtggcggtctggaccacgccggagagcgtcgaagcgggggcggtgttcgccgagatcggcccgcgcatggccgagttgagcggttcccggctggccgcgcagcaacagatggaaggcctcctggcgccgcaccggcccaaggagcccgcgtggttcctggccaccgtcggcgtctcgcccgaccaccagggcaagggtctgggcagcgccgtcgtgctccccggagtggaggcggccgagcgcgccggggtgcccgccttcctggagacctccgcgccccgcaacctccccttctacgagcggctcggcttcaccgtcaccgccgacgtcgaggtgcccgaaggaccgcgcacctggtgcatgacccgcaagcccggtgcctga

SEQ ID NO: 35865 - DNA, 2613 bp, synthetic construct
  source 1..2613: mol_type = other DNA
atggccttaccagtgaccgccttgctcctgccgctggccttgctgctccacgccgccaggccgctcgaggaggacctgaagaacgtgttcccacctgaggtggccgtgttcgagcctagcgaggccgagatcagccacacccagaaagccaccctcgtgtgcctggctaccggcttctaccccgaccatgtggaactgtcttggtgggtcaacggcaaagaggtgcacagcggcgtgtctaccgacccccagccactgaaagaacagcccgccctgaacgacagccggtactgcctgagcagcagactgagagtgtccgccaccttctggcagaacccccggaaccacttcagatgccaggtgcagttctacggcctgagcgagaacgacgagtggacccaggacagagccaagcccgtgacccagatcgtgtctgccgaagcctggggcagagccgattgcggctttaccagcgagagctaccagcagggcgtgctgagcgccaccaacctgagcgtgatcggcttcagaatcctgctgctgaaagtggccggctttaacctgctgatgaccctgcggctgtggtccagcagggccaagcgatctggatctggagcaacaaacttctcactactcaaacaagcaggtgacgtggaggagaatcccgggcctactagcatggccttaccagtgaccgccttgctcctgccgctggccttgctgctccacgccgccaggccggagaacgtgctgacacagagccctgccatcatgagtgcctctccaggcgagaaagtgaccatgacctgtagagccagcagcagcgtgtccagcagctacctgcactggtatcagcagaagtccggcgcaagccccaaagtgtggatctacagcaccagcaatctggcctctggcgtgccaggcagattttctggctctggcagcggcacaagctacagcctgacaatcagctccgtggaagccgaagatgccgccacctactactgccagcagtacagcggctaccccatcacatttggagccggcaccaaggtggaagtgaagagaggcggaggcggaagtggaggcggaggatctggcggcggaggctctcaggttcagctcaaagaatctggccccgtgctggtggccccaagccagacactgtctatcacctgtaccgtgtccggcttcagcctggcctcctacaacatccactgggtccgacagcctccaggcaaaggactggaatggctgggagtgatttgggctggcggcagcaccaactacaacagcgcactgatgagccggctgagcatcagcaaggacaacagcaagagccaggtgttcctccagatgaactccctccagaccgacgacaccgccatgtactactgcgccaagagaagcgacgactacagttggttcgcctactggggccagggcacactggttactgtgtctgcttctacgcgtatccagaaccctgatcctgccgtgtaccagctgcgggatagcaagagcagcgacaagagcgtgtgtctgttcaccgacttcgacagccagaccaacgtgtcccagagcaaggactccgacgtgtacatcaccgataagaccgtgctggacatgcggagcatggacttcaagagcaactccgccgtggcctggtccaacaagtccgatttcgcctgcgccaacgccttcaacaacagcattatccccgaggacacattcttcccaagccccgagagcagctgcgacgtgaagctggtggaaaagagcttcgagacagacaccaacctgaacttccagatcctgtacgagatcctgctgggcaaggccaccctgtacgccgtgctggtgtctgccctggtgctgatggctatggtcaagcggaaggacagccggggacgcgccaagagaagcggatctggcgtgaagcagaccctgaatttcgacctgctgaagctggctggcgacgtggaatccaacccaggcccttctagaggccatatgaccgagtacaagcccacggtgcgcctcgccacccgcgacgacgtccccagggccgtacgcaccctcgccgccgcgttcgccgactaccccgccacgcgccacaccgtcgatccggaccgccacatcgagcgggtcaccgagctgcaagaactcttcctcacgcgcgtcgggctcgacatcggcaaggtgtgggtcgcggacgacggcgccgcggtggcggtctggaccacgccggagagcgtcgaagcgggggcggtgttcgccgagatcggcccgcgcatggccgagttgagcggttcccggctggccgcgcagcaacagatggaaggcctcctggcgccgcaccggcccaaggagcccgcgtggttcctggccaccgtcggcgtctcgcccgaccaccagggcaagggtctgggcagcgccgtcgtgctccccggagtggaggcggccgagcgcgccggggtgcccgccttcctggagacctccgcgccccgcaacctccccttctacgagcggctcggcttcaccgtcaccgccgacgtcgaggtgcccgaaggaccgcgcacctggtgcatgacccgcaagcccggtgcctga

SEQ ID NO: 35866 - DNA, 2613 bp, synthetic construct
  source 1..2613: mol_type = other DNA
atggccttaccagtgaccgccttgctcctgccgctggccttgctgctccacgccgccaggccgctcgagatccagaaccctgatcctgccgtgtaccagctgcgggatagcaagagcagcgacaagagcgtgtgtctgttcaccgacttcgacagccagaccaacgtgtcccagagcaaggactccgacgtgtacatcaccgataagaccgtgctggacatgcggagcatggacttcaagagcaactccgccgtggcctggtccaacaagtccgatttcgcctgcgccaacgccttcaacaacagcattatccccgaggacacattcttcccaagccccgagagcagctgcgacgtgaagctggtggaaaagagcttcgagacagacaccaacctgaacttccagatcctgtacgagatcctgctgggcaaggccaccctgtacgccgtgctggtgtctgccctggtgctgatggctatggtcaagcggaaggacagccggggaagggccaagcgatctggatctggagcaacaaacttctcactactcaaacaagcaggtgacgtggaggagaatcccgggcctactagcatggccttaccagtgaccgccttgctcctgccgctggccttgctgctccacgccgccaggccggagaacgtgctgacacagagccctgccatcatgagtgcctctccaggcgagaaagtgaccatgacctgtagagccagcagcagcgtgtccagcagctacctgcactggtatcagcagaagtccggcgcaagccccaaagtgtggatctacagcaccagcaatctggcctctggcgtgccaggcagattttctggctctggcagcggcacaagctacagcctgacaatcagctccgtggaagccgaagatgccgccacctactactgccagcagtacagcggctaccccatcacatttggagccggcaccaaggtggaagtgaagagaggcggaggcggaagtggaggcggaggatctggcggcggaggctctcaggttcagctcaaagaatctggccccgtgctggtggccccaagccagacactgtctatcacctgtaccgtgtccggcttcagcctggcctcctacaacatccactgggtccgacagcctccaggcaaaggactggaatggctgggagtgatttgggctggcggcagcaccaactacaacagcgcactgatgagccggctgagcatcagcaaggacaacagcaagagccaggtgttcctccagatgaactccctccagaccgacgacaccgccatgtactactgcgccaagagaagcgacgactacagttggttcgcctactggggccagggcacactggttactgtgtctgcttctacgcgtgaggacctgaagaacgtgttcccacctgaggtggccgtgttcgagcctagcgaggccgagatcagccacacccagaaagccaccctcgtgtgcctggctaccggcttctaccccgaccatgtggaactgtcttggtgggtcaacggcaaagaggtgcacagcggcgtgtctaccgacccccagccactgaaagaacagcccgccctgaacgacagccggtactgcctgagcagcagactgagagtgtccgccaccttctggcagaacccccggaaccacttcagatgccaggtgcagttctacggcctgagcgagaacgacgagtggacccaggacagagccaagcccgtgacccagatcgtgtctgccgaagcctggggcagagccgattgcggctttaccagcgagagctaccagcagggcgtgctgagcgccaccaacctgagcgtgatcggcttcagaatcctgctgctgaaagtggccggctttaacctgctgatgaccctgcggctgtggtccagccgcgccaagagaagcggatctggcgtgaagcagaccctgaatttcgacctgctgaagctggctggcgacgtggaatccaacccaggcccttctagaggccatatgaccgagtacaagcccacggtgcgcctcgccacccgcgacgacgtccccagggccgtacgcaccctcgccgccgcgttcgccgactaccccgccacgcgccacaccgtcgatccggaccgccacatcgagcgggtcaccgagctgcaagaactcttcctcacgcgcgtcgggctcgacatcggcaaggtgtgggtcgcggacgacggcgccgcggtggcggtctggaccacgccggagagcgtcgaagcgggggcggtgttcgccgagatcggcccgcgcatggccgagttgagcggttcccggctggccgcgcagcaacagatggaaggcctcctggcgccgcaccggcccaaggagcccgcgtggttcctggccaccgtcggcgtctcgcccgaccaccagggcaagggtctgggcagcgccgtcgtgctccccggagtggaggcggccgagcgcgccggggtgcccgccttcctggagacctccgcgccccgcaacctccccttctacgagcggctcggcttcaccgtcaccgccgacgtcgaggtgcccgaaggaccgcgcacctggtgcatgacccgcaagcccggtgcctga

SEQ ID NO: 35867 - DNA, 2613 bp, synthetic construct
  source 1..2613: mol_type = other DNA
atggccttaccagtgaccgccttgctcctgccgctggccttgctgctccacgccgccaggccgctcgaggaggacctgaagaacgtgttcccacctgaggtggccgtgttcgagcctagcgaggccgagatcagccacacccagaaagccaccctcgtgtgcctggctaccggcttctaccccgaccatgtggaactgtcttggtgggtcaacggcaaagaggtgcacagcggcgtgtgtaccgacccccagccactgaaagaacagcccgccctgaacgacagccggtactgcctgagcagcagactgagagtgtccgccaccttctggcagaacccccggaaccacttcagatgccaggtgcagttctacggcctgagcgagaacgacgagtggacccaggacagagccaagcccgtgacccagatcgtgtctgccgaagcctggggcagagccgattgcgacgtgaagctggtggaaaagagcttcgagacagacaccaacctgaacttccagaacctgagcgtgatcggcttcagaatcctgctgctgaaagtggccggctttaacctgctgatgaccctgcggctgtggtccagcagggccaagcgatctggatctggagcaacaaacttctcactactcaaacaagcaggtgacgtggaggagaatcccgggcctactagcatggccttaccagtgaccgccttgctcctgccgctggccttgctgctccacgccgccaggccggagaacgtgctgacacagagccctgccatcatgagtgcctctccaggcgagaaagtgaccatgacctgtagagccagcagcagcgtgtccagcagctacctgcactggtatcagcagaagtccggcgcaagccccaaagtgtggatctacagcaccagcaatctggcctctggcgtgccaggcagattttctggctctggcagcggcacaagctacagcctgacaatcagctccgtggaagccgaagatgccgccacctactactgccagcagtacagcggctaccccatcacatttggagccggcaccaaggtggaagtgaagagaggcggaggcggaagtggaggcggaggatctggcggcggaggctctcaggttcagctcaaagaatctggccccgtgctggtggccccaagccagacactgtctatcacctgtaccgtgtccggcttcagcctggcctcctacaacatccactgggtccgacagcctccaggcaaaggactggaatggctgggagtgatttgggctggcggcagcaccaactacaacagcgcactgatgagccggctgagcatcagcaaggacaacagcaagagccaggtgttcctccagatgaactccctccagaccgacgacaccgccatgtactactgcgccaagagaagcgacgactacagttggttcgcctactggggccagggcacactggttactgtgtctgcttctacgcgtatccagaaccctgatcctgccgtgtaccagctgcgggatagcaagagcagcgacaagagcgtgtgtctgttcaccgacttcgacagccagaccaacgtgtcccagagcaaggactccgacgtgtacatcaccgataagtgcgtgctggacatgcggagcatggacttcaagagcaactccgccgtggcctggtccaacaagtccgatttcgcctgcgccaacgccttcaacaacagcattatccccgaggacacattcttcccaagccccgagagcagctgcggctttaccagcgagagctaccagcagggcgtgctgagcgccaccatcctgtacgagatcctgctgggcaaggccaccctgtacgccgtgctggtgtctgccctggtgctgatggctatggtcaagcggaaggacagccggggacgcgccaagagaagcggatctggcgtgaagcagaccctgaatttcgacctgctgaagctggctggcgacgtggaatccaacccaggcccttctagaggccatatgaccgagtacaagcccacggtgcgcctcgccacccgcgacgacgtccccagggccgtacgcaccctcgccgccgcgttcgccgactaccccgccacgcgccacaccgtcgatccggaccgccacatcgagcgggtcaccgagctgcaagaactcttcctcacgcgcgtcgggctcgacatcggcaaggtgtgggtcgcggacgacggcgccgcggtggcggtctggaccacgccggagagcgtcgaagcgggggcggtgttcgccgagatcggcccgcgcatggccgagttgagcggttcccggctggccgcgcagcaacagatggaaggcctcctggcgccgcaccggcccaaggagcccgcgtggttcctggccaccgtcggcgtctcgcccgaccaccagggcaagggtctgggcagcgccgtcgtgctccccggagtggaggcggccgagcgcgccggggtgcccgccttcctggagacctccgcgccccgcaacctccccttctacgagcggctcggcttcaccgtcaccgccgacgtcgaggtgcccgaaggaccgcgcacctggtgcatgacccgcaagcccggtgcctga

SEQ ID NO: 35868 - DNA, 2613 bp, synthetic construct
  source 1..2613: mol_type = other DNA
atggccttaccagtgaccgccttgctcctgccgctggccttgctgctccacgccgccaggccgctcgaggaggacctgaagaacgtgttcccacctgaggtggccgtgttcgagcctagcgaggccgagatcagccacacccagaaagccaccctcgtgtgcctggctaccggcttctaccccgaccatgtggaactgtcttggtgggtcaacggcaaagaggtgcacagcggcgtgtctaccgacccccagccactgaaagaacagcccgccctgaacgacagccggtactgcctgagcagcagactgagagtgtccgccaccttctggcagaacccccggaaccacttcagatgccaggtgcagttctacggcctgagcgagaacgacgagtggacccaggacagagccaagcccgtgacccagatcgtgtctgccgaagcctggggcagagccgattgcgacgtgaagctggtggaaaagagcttcgagacagacaccaacctgaacttccagaacctgagcgtgatcggcttcagaatcctgctgctgaaagtggccggctttaacctgctgatgaccctgcggctgtggtccagcagggccaagcgatctggatctggagcaacaaacttctcactactcaaacaagcaggtgacgtggaggagaatcccgggcctactagcatggccttaccagtgaccgccttgctcctgccgctggccttgctgctccacgccgccaggccggagaacgtgctgacacagagccctgccatcatgagtgcctctccaggcgagaaagtgaccatgacctgtagagccagcagcagcgtgtccagcagctacctgcactggtatcagcagaagtccggcgcaagccccaaagtgtggatctacagcaccagcaatctggcctctggcgtgccaggcagattttctggctctggcagcggcacaagctacagcctgacaatcagctccgtggaagccgaagatgccgccacctactactgccagcagtacagcggctaccccatcacatttggagccggcaccaaggtggaagtgaagagaggcggaggcggaagtggaggcggaggatctggcggcggaggctctcaggttcagctcaaagaatctggccccgtgctggtggccccaagccagacactgtctatcacctgtaccgtgtccggcttcagcctggcctcctacaacatccactgggtccgacagcctccaggcaaaggactggaatggctgggagtgatttgggctggcggcagcaccaactacaacagcgcactgatgagccggctgagcatcagcaaggacaacagcaagagccaggtgttcctccagatgaactccctccagaccgacgacaccgccatgtactactgcgccaagagaagcgacgactacagttggttcgcctactggggccagggcacactggttactgtgtctgcttctacgcgtatccagaaccctgatcctgccgtgtaccagctgcgggatagcaagagcagcgacaagagcgtgtgtctgttcaccgacttcgacagccagaccaacgtgtcccagagcaaggactccgacgtgtacatcaccgataagaccgtgctggacatgcggagcatggacttcaagagcaactccgccgtggcctggtccaacaagtccgatttcgcctgcgccaacgccttcaacaacagcattatccccgaggacacattcttcccaagccccgagagcagctgcggctttaccagcgagagctaccagcagggcgtgctgagcgccaccatcctgtacgagatcctgctgggcaaggccaccctgtacgccgtgctggtgtctgccctggtgctgatggctatggtcaagcggaaggacagccggggacgcgccaagagaagcggatctggcgtgaagcagaccctgaatttcgacctgctgaagctggctggcgacgtggaatccaacccaggcccttctagaggccatatgaccgagtacaagcccacggtgcgcctcgccacccgcgacgacgtccccagggccgtacgcaccctcgccgccgcgttcgccgactaccccgccacgcgccacaccgtcgatccggaccgccacatcgagcgggtcaccgagctgcaagaactcttcctcacgcgcgtcgggctcgacatcggcaaggtgtgggtcgcggacgacggcgccgcggtggcggtctggaccacgccggagagcgtcgaagcgggggcggtgttcgccgagatcggcccgcgcatggccgagttgagcggttcccggctggccgcgcagcaacagatggaaggcctcctggcgccgcaccggcccaaggagcccgcgtggttcctggccaccgtcggcgtctcgcccgaccaccagggcaagggtctgggcagcgccgtcgtgctccccggagtggaggcggccgagcgcgccggggtgcccgccttcctggagacctccgcgccccgcaacctccccttctacgagcggctcggcttcaccgtcaccgccgacgtcgaggtgcccgaaggaccgcgcacctggtgcatgacccgcaagcccggtgcctga

SEQ ID NO: 35869 - DNA, 2922 bp, synthetic construct
  source 1..2922: mol_type = other DNA
atggccttaccagtgaccgccttgctcctgccgctggccttgctgctccacgccgccaggccgctcgaggaggaggacctgaagaacgtgttcccacctgaggtggccgtgttcgagcctagcgaggccgagatcagccacacccagaaagccaccctcgtgtgcctggctaccggcttctaccccgaccatgtggaactgtcttggtgggtcaacggcaaagaggtgcacagcggcgtgtctaccgacccccagccactgaaagaacagcccgccctgaacgacagccggtactgcctgagcagcagactgagagtgtccgccaccttctggcagaacccccggaaccacttcagatgccaggtgcagttctacggcctgagcgagaacgacgagtggacccaggacagagccaagcccgtgacccagatcgtgtctgccgaagcctggggcagagccgatgatgtgattaagatccactggcaggaaaagaagtccaacaccatcctgggcagccaggaaggcaacaccatgaagaccaacgacacctacatgaagttcagctggctgaccgtgcccgagaagtccctggacaaagaacacagatgcatcgtgcggcacgaaaacaacaagaacggcgtggaccaggaaatcatcttcccacccatcaagaccgatgtgattacaatggaccccaaggacaactgctccaaggacgccaacgataccctgctgctccagctgaccaacaccagcgcctactacatgtacttgttgctgctgctgaagtccgtggtgtacttcgccatcatcacatgctgcctgctgcggagaaccgccttctgctgcaacggcgagaagtctagggccaagcgatctggatctggagcaacaaacttctcactactcaaacaagcaggtgacgtggaggagaatcccgggcctactagcatggccttaccagtgaccgccttgctcctgccgctggccttgctgctccacgccgccaggccggagaacgtgctgacacagagccctgccatcatgagtgcctctccaggcgagaaagtgaccatgacctgtagagccagcagcagcgtgtccagcagctacctgcactggtatcagcagaagtccggcgcaagccccaaagtgtggatctacagcaccagcaatctggcctctggcgtgccaggcagattttctggctctggcagcggcacaagctacagcctgacaatcagctccgtggaagccgaagatgccgccacctactactgccagcagtacagcggctaccccatcacatttggagccggcaccaaggtggaagtgaagagaggcggaggcggaagtggaggcggaggatctggcggcggaggctctcaggttcagctcaaagaatctggccccgtgctggtggccccaagccagacactgtctatcacctgtaccgtgtccggcttcagcctggcctcctacaacatccactgggtccgacagcctccaggcaaaggactggaatggctgggagtgatttgggctggcggcagcaccaactacaacagcgcactgatgagccggctgagcatcagcaaggacaacagcaagagccaggtgttcctccagatgaactccctccagaccgacgacaccgccatgtactactgcgccaagagaagcgacgactacagttggttcgcctactggggccagggcacactggttactgtgtctgcttctacgcgtatccagaaccctgatcctgccgtgtaccagctgcgggatagcaagagcagcgacaagagcgtgtgtctgttcaccgacttcgacagccagaccaacgtgtcccagagcaaggactccgacgtgtacatcaccgataagaccgtgctggacatgcggagcatggacttcaagagcaactccgccgtggcctggtccaacaagtccgatttcgcctgcgccaacgccttcaacaacagcattatccccgaggacacattcttcccaagccccgagagcagcgactccaccgaccacgtgaagcccaaagagacagagaacaccaagcagcccagcaagagctgccacaagcccaaggccatcgtgcacaccgagaaagtgaacatgatgagcctgaccgtgctgggcctgcggatgctgttcgccaaaaccgtggccgtgaacttcctgctgaccgccaagctgttcttcctccgcgccaagagaagcggatctggcgtgaagcagaccctgaatttcgacctgctgaagctggctggcgacgtggaatccaacccaggcccttctagaggccatatgaccgagtacaagcccacggtgcgcctcgccacccgcgacgacgtccccagggccgtacgcaccctcgccgccgcgttcgccgactaccccgccacgcgccacaccgtcgatccggaccgccacatcgagcgggtcaccgagctgcaagaactcttcctcacgcgcgtcgggctcgacatcggcaaggtgtgggtcgcggacgacggcgccgcggtggcggtctggaccacgccggagagcgtcgaagcgggggcggtgttcgccgagatcggcccgcgcatggccgagttgagcggttcccggctggccgcgcagcaacagatggaaggcctcctggcgccgcaccggcccaaggagcccgcgtggttcctggccaccgtcggcgtctcgcccgaccaccagggcaagggtctgggcagcgccgtcgtgctccccggagtggaggcggccgagcgcgccggggtgcccgccttcctggagacctccgcgccccgcaacctccccttctacgagcggctcggcttcaccgtcaccgccgacgtcgaggtgcccgaaggaccgcgcacctggtgcatgacccgcaagcccggtgcctga

SEQ ID NO: 35870 - DNA, 2613 bp, synthetic construct
  source 1..2613: mol_type = other DNA
atggccttaccagtgaccgccttgctcctgccgctggccttgctgctccacgccgccaggccgctcgaggaggacctgaagaacgtgttcccacctgaggtggccgtgttcgagcctagcgaggccgagatcagccacacccagaaagccaccctcgtgtgcctggctaccggcttctaccccgaccatgtggaactgtcttggtgggtcaacggcaaagaggtgcacagcggcgtgtgtaccgacccccagccactgaaagaacagcccgccctgaacgacagccggtactgcctgagcagcagactgagagtgtccgccaccttctggcagaacccccggaaccacttcagatgccaggtgcagttctacggcctgagcgagaacgacgagtggacccaggacagagccaagcccgtgacccagatcgtgtctgccgaagcctggggcagagccgattgcggctttaccagcgagagctaccagcagggcgtgctgagcgccaccaacctgagcgtgatcggcttcagaatcctgctgctgaaagtggccggctttaacctgctgatgaccctgcggctgtggtccagcagggccaagcgatctggatctggagcaacaaacttctcactactcaaacaagcaggtgacgtggaggagaatcccgggcctactagcatggccttaccagtgaccgccttgctcctgccgctggccttgctgctccacgccgccaggccggagaacgtgctgacacagagccctgccatcatgagtgcctctccaggcgagaaagtgaccatgacctgtagagccagcagcagcgtgtccagcagctacctgcactggtatcagcagaagtccggcgcaagccccaaagtgtggatctacagcaccagcaatctggcctctggcgtgccaggcagattttctggctctggcagcggcacaagctacagcctgacaatcagctccgtggaagccgaagatgccgccacctactactgccagcagtacagcggctaccccatcacatttggagccggcaccaaggtggaagtgaagagaggcggaggcggaagtggaggcggaggatctggcggcggaggctctcaggttcagctcaaagaatctggccccgtgctggtggccccaagccagacactgtctatcacctgtaccgtgtccggcttcagcctggcctcctacaacatccactgggtccgacagcctccaggcaaaggactggaatggctgggagtgatttgggctggcggcagcaccaactacaacagcgcactgatgagccggctgagcatcagcaaggacaacagcaagagccaggtgttcctccagatgaactccctccagaccgacgacaccgccatgtactactgcgccaagagaagcgacgactacagttggttcgcctactggggccagggcacactggttactgtgtctgcttctacgcgtatccagaaccctgatcctgccgtgtaccagctgcgggatagcaagagcagcgacaagagcgtgtgtctgttcaccgacttcgacagccagaccaacgtgtcccagagcaaggactccgacgtgtacatcaccgataagtgcgtgctggacatgcggagcatggacttcaagagcaactccgccgtggcctggtccaacaagtccgatttcgcctgcgccaacgccttcaacaacagcattatccccgaggacacattcttcccaagccccgagagcagctgcgacgtgaagctggtggaaaagagcttcgagacagacaccaacctgaacttccagatcctgtacgagatcctgctgggcaaggccaccctgtacgccgtgctggtgtctgccctggtgctgatggctatggtcaagcggaaggacagccggggacgcgccaagagaagcggatctggcgtgaagcagaccctgaatttcgacctgctgaagctggctggcgacgtggaatccaacccaggcccttctagaggccatatgaccgagtacaagcccacggtgcgcctcgccacccgcgacgacgtccccagggccgtacgcaccctcgccgccgcgttcgccgactaccccgccacgcgccacaccgtcgatccggaccgccacatcgagcgggtcaccgagctgcaagaactcttcctcacgcgcgtcgggctcgacatcggcaaggtgtgggtcgcggacgacggcgccgcggtggcggtctggaccacgccggagagcgtcgaagcgggggcggtgttcgccgagatcggcccgcgcatggccgagttgagcggttcccggctggccgcgcagcaacagatggaaggcctcctggcgccgcaccggcccaaggagcccgcgtggttcctggccaccgtcggcgtctcgcccgaccaccagggcaagggtctgggcagcgccgtcgtgctccccggagtggaggcggccgagcgcgccggggtgcccgccttcctggagacctccgcgccccgcaacctccccttctacgagcggctcggcttcaccgtcaccgccgacgtcgaggtgcccgaaggaccgcgcacctggtgcatgacccgcaagcccggtgcctga

SEQ ID NO: 35871 - DNA, 2700 bp, synthetic construct
  source 1..2700: mol_type = other DNA
atggccttaccagtgaccgccttgctcctgccgctggccttgctgctccacgccgccaggccgctcgaggaggaggacctgaagaacgtgttcccacctgaggtggccgtgttcgagcctagcgaggccgagatcagccacacccagaaagccaccctcgtgtgcctggctaccggcttctaccccgaccatgtggaactgtcttggtgggtcaacggcaaagaggtgcacagcggcgtgtgtaccgacccccagccactgaaagaacagcccgccctgaacgacagccggtactgcctgagcagcagactgagagtgtccgccaccttctggcagaacccccggaaccacttcagatgccaggtgcagttctacggcctgagcgagaacgacgagtggacccaggacagagccaagcccgtgacccagatcgtgtctgccgaagcctggggcagagccgattgcggctttaccagcgagagctaccagcagggcgtgctgagcgccaccaacctgagcgtgatcggcttcagaatcctgctgctgaaagtggccggctttaacctgctgatgaccctgcggctgtggtccagcagggccaagcgatctggatctggagcaacaaacttctcactactcaaacaagcaggtgacgtggaggagaatcccgggcctactagcatggccttaccagtgaccgccttgctcctgccgctggccttgctgctccacgccgccaggccggagaacgtgctgacacagagccctgccatcatgagtgcctctccaggcgagaaagtgaccatgacctgtagagccagcagcagcgtgtccagcagctacctgcactggtatcagcagaagtccggcgcaagccccaaagtgtggatctacagcaccagcaatctggcctctggcgtgccaggcagattttctggctctggcagcggcacaagctacagcctgacaatcagctccgtggaagccgaagatgccgccacctactactgccagcagtacagcggctaccccatcacatttggagccggcaccaaggtggaagtgaagagaggcggaggcggaagtggaggcggaggatctggcggcggaggctctcaggttcagctcaaagaatctggccccgtgctggtggccccaagccagacactgtctatcacctgtaccgtgtccggcttcagcctggcctcctacaacatccactgggtccgacagcctccaggcaaaggactggaatggctgggagtgatttgggctggcggcagcaccaactacaacagcgcactgatgagccggctgagcatcagcaaggacaacagcaagagccaggtgttcctccagatgaactccctccagaccgacgacaccgccatgtactactgcgccaagagaagcgacgactacagttggttcgcctactggggccagggcacactggttactgtgtctgcttctacgcgtggacagcctaaggccaatcctaccgtgacactgttccctccaagcagcgaagaactccaggccaacaaggccacacttgtgtgcctgatctccgacttctaccctggggctgtgacagtggcttggaaggccgatggatctcctgtgaaagccggcgtggaaaccaccaagccatccaagcagagcaacaacaaatacgccgccagctcctacctgagcctgacacctgagcagtggaagtcccacagatcctacagctgccaagtgacccacgaaggcagcaccgtggaaaagacagtggcccctacagagtgcagccccatcaagaccgatgtgattacaatggaccccaaggacaactgctccaaggacgccaacgataccctgctgctccagctgaccaacaccagcgcctactacatgtacttgttgctgctgctgaagtccgtggtgtacttcgccatcatcacatgctgcctgctgcggagaaccgccttctgctgcaacggcgagaagtctcgcgccaagagaagcggatctggcgtgaagcagaccctgaatttcgacctgctgaagctggctggcgacgtggaatccaacccaggcccttctagaggccatatgaccgagtacaagcccacggtgcgcctcgccacccgcgacgacgtccccagggccgtacgcaccctcgccgccgcgttcgccgactaccccgccacgcgccacaccgtcgatccggaccgccacatcgagcgggtcaccgagctgcaagaactcttcctcacgcgcgtcgggctcgacatcggcaaggtgtgggtcgcggacgacggcgccgcggtggcggtctggaccacgccggagagcgtcgaagcgggggcggtgttcgccgagatcggcccgcgcatggccgagttgagcggttcccggctggccgcgcagcaacagatggaaggcctcctggcgccgcaccggcccaaggagcccgcgtggttcctggccaccgtcggcgtctcgcccgaccaccagggcaagggtctgggcagcgccgtcgtgctccccggagtggaggcggccgagcgcgccggggtgcccgccttcctggagacctccgcgccccgcaacctccccttctacgagcggctcggcttcaccgtcaccgccgacgtcgaggtgcccgaaggaccgcgcacctggtgcatgacccgcaagcccggtgcctga

SEQ ID NO: 35872 - DNA, 2700 bp, synthetic construct
  source 1..2700: mol_type = other DNA
atggccttaccagtgaccgccttgctcctgccgctggccttgctgctccacgccgccaggccgctcgagggacagcctaaggccaatcctaccgtgacactgttccctccaagcagcgaagaactccaggccaacaaggccacacttgtgtgcctgatctccgacttctaccctggggctgtgacagtggcttggaaggccgatggatctcctgtgaaagccggcgtggaaaccaccaagccatccaagcagagcaacaacaaatacgccgccagctcctacctgagcctgacacctgagcagtggaagtcccacagatcctacagctgccaagtgacccacgaaggcagcaccgtggaaaagacagtggcccctacagagtgcagccccatcaagaccgatgtgattacaatggaccccaaggacaactgctccaaggacgccaacgataccctgctgctccagctgaccaacaccagcgcctactacatgtacttgttgctgctgctgaagtccgtggtgtacttcgccatcatcacatgctgcctgctgcggagaaccgccttctgctgcaacggcgagaagtctagggccaagcgatctggatctggagcaacaaacttctcactactcaaacaagcaggtgacgtggaggagaatcccgggcctactagcatggccttaccagtgaccgccttgctcctgccgctggccttgctgctccacgccgccaggccggagaacgtgctgacacagagccctgccatcatgagtgcctctccaggcgagaaagtgaccatgacctgtagagccagcagcagcgtgtccagcagctacctgcactggtatcagcagaagtccggcgcaagccccaaagtgtggatctacagcaccagcaatctggcctctggcgtgccaggcagattttctggctctggcagcggcacaagctacagcctgacaatcagctccgtggaagccgaagatgccgccacctactactgccagcagtacagcggctaccccatcacatttggagccggcaccaaggtggaagtgaagagaggcggaggcggaagtggaggcggaggatctggcggcggaggctctcaggttcagctcaaagaatctggccccgtgctggtggccccaagccagacactgtctatcacctgtaccgtgtccggcttcagcctggcctcctacaacatccactgggtccgacagcctccaggcaaaggactggaatggctgggagtgatttgggctggcggcagcaccaactacaacagcgcactgatgagccggctgagcatcagcaaggacaacagcaagagccaggtgttcctccagatgaactccctccagaccgacgacaccgccatgtactactgcgccaagagaagcgacgactacagttggttcgcctactggggccagggcacactggttactgtgtctgcttctacgcgtgaggaggacctgaagaacgtgttcccacctgaggtggccgtgttcgagcctagcgaggccgagatcagccacacccagaaagccaccctcgtgtgcctggctaccggcttctaccccgaccatgtggaactgtcttggtgggtcaacggcaaagaggtgcacagcggcgtgtgtaccgacccccagccactgaaagaacagcccgccctgaacgacagccggtactgcctgagcagcagactgagagtgtccgccaccttctggcagaacccccggaaccacttcagatgccaggtgcagttctacggcctgagcgagaacgacgagtggacccaggacagagccaagcccgtgacccagatcgtgtctgccgaagcctggggcagagccgattgcggctttaccagcgagagctaccagcagggcgtgctgagcgccaccaacctgagcgtgatcggcttcagaatcctgctgctgaaagtggccggctttaacctgctgatgaccctgcggctgtggtccagccgcgccaagagaagcggatctggcgtgaagcagaccctgaatttcgacctgctgaagctggctggcgacgtggaatccaacccaggcccttctagaggccatatgaccgagtacaagcccacggtgcgcctcgccacccgcgacgacgtccccagggccgtacgcaccctcgccgccgcgttcgccgactaccccgccacgcgccacaccgtcgatccggaccgccacatcgagcgggtcaccgagctgcaagaactcttcctcacgcgcgtcgggctcgacatcggcaaggtgtgggtcgcggacgacggcgccgcggtggcggtctggaccacgccggagagcgtcgaagcgggggcggtgttcgccgagatcggcccgcgcatggccgagttgagcggttcccggctggccgcgcagcaacagatggaaggcctcctggcgccgcaccggcccaaggagcccgcgtggttcctggccaccgtcggcgtctcgcccgaccaccagggcaagggtctgggcagcgccgtcgtgctccccggagtggaggcggccgagcgcgccggggtgcccgccttcctggagacctccgcgccccgcaacctccccttctacgagcggctcggcttcaccgtcaccgccgacgtcgaggtgcccgaaggaccgcgcacctggtgcatgacccgcaagcccggtgcctga

SEQ ID NO: 35873 - DNA, 2691 bp, synthetic construct
  source 1..2691: mol_type = other DNA
atggccttaccagtgaccgccttgctcctgccgctggccttgctgctccacgccgccaggccgctcgaggaggcctctacaaagggaccctccgtgtttcctctggctcccagcagcaagtctacaagcggaggaacagccgctctgggctgcctggtcaaggattactttcccgagcctgtgaccgtgtcctggaatagcggagcactgacaagcggcgtgcacacctttccagccgtgctgcaaagcagcggcctgtactctctgagcagcgtggtcacagtgcctagctctagcctgggcacccagacctacatctgcaatgtgaaccacaagcctagcaacaccaaggtggacaagagagtggaacccaagagctgtcccatcaagaccgatgtgattacaatggaccccaaggacaactgctccaaggacgccaacgataccctgctgctccagctgaccaacaccagcgcctactacatgtacttgttgctgctgctgaagtccgtggtgtacttcgccatcatcacatgctgcctgctgcggagaaccgccttctgctgcaacggcgagaagtctagggccaagcgatctggatctggagcaacaaacttctcactactcaaacaagcaggtgacgtggaggagaatcccgggcctactagcatggccttaccagtgaccgccttgctcctgccgctggccttgctgctccacgccgccaggccggagaacgtgctgacacagagccctgccatcatgagtgcctctccaggcgagaaagtgaccatgacctgtagagccagcagcagcgtgtccagcagctacctgcactggtatcagcagaagtccggcgcaagccccaaagtgtggatctacagcaccagcaatctggcctctggcgtgccaggcagattttctggctctggcagcggcacaagctacagcctgacaatcagctccgtggaagccgaagatgccgccacctactactgccagcagtacagcggctaccccatcacatttggagccggcaccaaggtggaagtgaagagaggcggaggcggaagtggaggcggaggatctggcggcggaggctctcaggttcagctcaaagaatctggccccgtgctggtggccccaagccagacactgtctatcacctgtaccgtgtccggcttcagcctggcctcctacaacatccactgggtccgacagcctccaggcaaaggactggaatggctgggagtgatttgggctggcggcagcaccaactacaacagcgcactgatgagccggctgagcatcagcaaggacaacagcaagagccaggtgttcctccagatgaactccctccagaccgacgacaccgccatgtactactgcgccaagagaagcgacgactacagttggttcgcctactggggccagggcacactggttactgtgtctgcttctacgcgtggacagcctaaggccaatcctaccgtgacactgttccctccaagcagcgaagaactccaggccaacaaggccacacttgtgtgcctgatctccgacttctaccctggggctgtgacagtggcttggaaggccgatggatctcctgtgaaagccggcgtggaaaccaccaagccatccaagcagagcaacaacaaatacgccgccagctcctacctgagcctgacacctgagcagtggaagtcccacagatcctacagctgccaagtgacccacgaaggcagcaccgtggaaaagacagtggcccctacagagtgcagcgaagtgaaaaccgactccaccgaccacgtgaagcccaaagagacagagaacaccaagcagcccagcaagagctgccacaagcccaaggccatcgtgcacaccgagaaagtgaacatgatgagcctgaccgtgctgggcctgcggatgctgttcgccaaaaccgtggccgtgaacttcctgctgaccgccaagctgttcttcctccgcgccaagagaagcggatctggcgtgaagcagaccctgaatttcgacctgctgaagctggctggcgacgtggaatccaacccaggcccttctagaggccatatgaccgagtacaagcccacggtgcgcctcgccacccgcgacgacgtccccagggccgtacgcaccctcgccgccgcgttcgccgactaccccgccacgcgccacaccgtcgatccggaccgccacatcgagcgggtcaccgagctgcaagaactcttcctcacgcgcgtcgggctcgacatcggcaaggtgtgggtcgcggacgacggcgccgcggtggcggtctggaccacgccggagagcgtcgaagcgggggcggtgttcgccgagatcggcccgcgcatggccgagttgagcggttcccggctggccgcgcagcaacagatggaaggcctcctggcgccgcaccggcccaaggagcccgcgtggttcctggccaccgtcggcgtctcgcccgaccaccagggcaagggtctgggcagcgccgtcgtgctccccggagtggaggcggccgagcgcgccggggtgcccgccttcctggagacctccgcgccccgcaacctccccttctacgagcggctcggcttcaccgtcaccgccgacgtcgaggtgcccgaaggaccgcgcacctggtgcatgacccgcaagcccggtgcctga

SEQ ID NO: 35874 - DNA, 2625 bp, synthetic construct
  source 1..2625: mol_type = other DNA
atggccttaccagtgaccgccttgctcctgccgctggccttgctgctccacgccgccaggccgctcgaggaggcctctacaaagggaccctccgtgtttcctctggctcccagcagcaagtctacaagcggaggaacagccgctctgggctgcctggtcaaggattactttcccgagcctgtgaccgtgtcctggaatagcggagcactgacaagcggcgtgcacacctttccagccgtgctgcaaagcagcggcctgtactctctgagcagcgtggtcacagtgcctagctctagcctgggcacccagacctacatctgcaatgtgaaccacaagcctagcaacaccaaggtggacaagagagtggaacccaagagctgtggcagagccgattgcggctttaccagcgagagctaccagcagggcgtgctgagcgccaccatcctgtacgagatcctgctgggcaaggccaccctgtacgccgtgctggtgtctgccctggtgctgatggctatggtcaagcggaaggacagccggggaagggccaagcgatctggatctggagcaacaaacttctcactactcaaacaagcaggtgacgtggaggagaatcccgggcctactagcatggccttaccagtgaccgccttgctcctgccgctggccttgctgctccacgccgccaggccggagaacgtgctgacacagagccctgccatcatgagtgcctctccaggcgagaaagtgaccatgacctgtagagccagcagcagcgtgtccagcagctacctgcactggtatcagcagaagtccggcgcaagccccaaagtgtggatctacagcaccagcaatctggcctctggcgtgccaggcagattttctggctctggcagcggcacaagctacagcctgacaatcagctccgtggaagccgaagatgccgccacctactactgccagcagtacagcggctaccccatcacatttggagccggcaccaaggtggaagtgaagagaggcggaggcggaagtggaggcggaggatctggcggcggaggctctcaggttcagctcaaagaatctggccccgtgctggtggccccaagccagacactgtctatcacctgtaccgtgtccggcttcagcctggcctcctacaacatccactgggtccgacagcctccaggcaaaggactggaatggctgggagtgatttgggctggcggcagcaccaactacaacagcgcactgatgagccggctgagcatcagcaaggacaacagcaagagccaggtgttcctccagatgaactccctccagaccgacgacaccgccatgtactactgcgccaagagaagcgacgactacagttggttcgcctactggggccagggcacactggttactgtgtctgcttctacgcgtggacagcctaaggccaatcctaccgtgacactgttccctccaagcagcgaagaactccaggccaacaaggccacacttgtgtgcctgatctccgacttctaccctggggctgtgacagtggcttggaaggccgatggatctcctgtgaaagccggcgtggaaaccaccaagccatccaagcagagcaacaacaaatacgccgccagctcctacctgagcctgacacctgagcagtggaagtcccacagatcctacagctgccaagtgacccacgaaggcagcaccgtggaaaagacagtggcccctacagagtgcagcatccccgaggacacattcttcccaagccccgagagcagctgcgacgtgaagctggtggaaaagagcttcgagacagacaccaacctgaacttccagaacctgagcgtgatcggcttcagaatcctgctgctgaaagtggccggctttaacctgctgatgaccctgcggctgtggtccagccgcgccaagagaagcggatctggcgtgaagcagaccctgaatttcgacctgctgaagctggctggcgacgtggaatccaacccaggcccttctagaggccatatgaccgagtacaagcccacggtgcgcctcgccacccgcgacgacgtccccagggccgtacgcaccctcgccgccgcgttcgccgactaccccgccacgcgccacaccgtcgatccggaccgccacatcgagcgggtcaccgagctgcaagaactcttcctcacgcgcgtcgggctcgacatcggcaaggtgtgggtcgcggacgacggcgccgcggtggcggtctggaccacgccggagagcgtcgaagcgggggcggtgttcgccgagatcggcccgcgcatggccgagttgagcggttcccggctggccgcgcagcaacagatggaaggcctcctggcgccgcaccggcccaaggagcccgcgtggttcctggccaccgtcggcgtctcgcccgaccaccagggcaagggtctgggcagcgccgtcgtgctccccggagtggaggcggccgagcgcgccggggtgcccgccttcctggagacctccgcgccccgcaacctccccttctacgagcggctcggcttcaccgtcaccgccgacgtcgaggtgcccgaaggaccgcgcacctggtgcatgacccgcaagcccggtgcctga

SEQ ID NO: 35875 - DNA, 2625 bp, synthetic construct
  source 1..2625: mol_type = other DNA
atggccttaccagtgaccgccttgctcctgccgctggccttgctgctccacgccgccaggccgctcgaggaggcctctacaaagggaccctccgtgtttcctctggctcccagcagcaagtctacaagcggaggaacagccgctctgggctgcctggtcaaggattactttcccgagcctgtgaccgtgtcctggaatagcggagcactgacaagcggcgtgcacacctttccagccgtgctgcaaagcagcggcctgtactctctgagcagcgtggtcacagtgcctagctctagcctgggcacccagacctacatctgcaatgtgaaccacaagcctagcaacaccaaggtggacaagagagtggaacccaagagctgtatccccgaggacacattcttcccaagccccgagagcagctgcgacgtgaagctggtggaaaagagcttcgagacagacaccaacctgaacttccagaacctgagcgtgatcggcttcagaatcctgctgctgaaagtggccggctttaacctgctgatgaccctgcggctgtggtccagcagggccaagcgatctggatctggagcaacaaacttctcactactcaaacaagcaggtgacgtggaggagaatcccgggcctactagcatggccttaccagtgaccgccttgctcctgccgctggccttgctgctccacgccgccaggccggagaacgtgctgacacagagccctgccatcatgagtgcctctccaggcgagaaagtgaccatgacctgtagagccagcagcagcgtgtccagcagctacctgcactggtatcagcagaagtccggcgcaagccccaaagtgtggatctacagcaccagcaatctggcctctggcgtgccaggcagattttctggctctggcagcggcacaagctacagcctgacaatcagctccgtggaagccgaagatgccgccacctactactgccagcagtacagcggctaccccatcacatttggagccggcaccaaggtggaagtgaagagaggcggaggcggaagtggaggcggaggatctggcggcggaggctctcaggttcagctcaaagaatctggccccgtgctggtggccccaagccagacactgtctatcacctgtaccgtgtccggcttcagcctggcctcctacaacatccactgggtccgacagcctccaggcaaaggactggaatggctgggagtgatttgggctggcggcagcaccaactacaacagcgcactgatgagccggctgagcatcagcaaggacaacagcaagagccaggtgttcctccagatgaactccctccagaccgacgacaccgccatgtactactgcgccaagagaagcgacgactacagttggttcgcctactggggccagggcacactggttactgtgtctgcttctacgcgtggacagcctaaggccaatcctaccgtgacactgttccctccaagcagcgaagaactccaggccaacaaggccacacttgtgtgcctgatctccgacttctaccctggggctgtgacagtggcttggaaggccgatggatctcctgtgaaagccggcgtggaaaccaccaagccatccaagcagagcaacaacaaatacgccgccagctcctacctgagcctgacacctgagcagtggaagtcccacagatcctacagctgccaagtgacccacgaaggcagcaccgtggaaaagacagtggcccctacagagtgcagcggcagagccgattgcggctttaccagcgagagctaccagcagggcgtgctgagcgccaccatcctgtacgagatcctgctgggcaaggccaccctgtacgccgtgctggtgtctgccctggtgctgatggctatggtcaagcggaaggacagccggggacgcgccaagagaagcggatctggcgtgaagcagaccctgaatttcgacctgctgaagctggctggcgacgtggaatccaacccaggcccttctagaggccatatgaccgagtacaagcccacggtgcgcctcgccacccgcgacgacgtccccagggccgtacgcaccctcgccgccgcgttcgccgactaccccgccacgcgccacaccgtcgatccggaccgccacatcgagcgggtcaccgagctgcaagaactcttcctcacgcgcgtcgggctcgacatcggcaaggtgtgggtcgcggacgacggcgccgcggtggcggtctggaccacgccggagagcgtcgaagcgggggcggtgttcgccgagatcggcccgcgcatggccgagttgagcggttcccggctggccgcgcagcaacagatggaaggcctcctggcgccgcaccggcccaaggagcccgcgtggttcctggccaccgtcggcgtctcgcccgaccaccagggcaagggtctgggcagcgccgtcgtgctccccggagtggaggcggccgagcgcgccggggtgcccgccttcctggagacctccgcgccccgcaacctccccttctacgagcggctcggcttcaccgtcaccgccgacgtcgaggtgcccgaaggaccgcgcacctggtgcatgacccgcaagcccggtgcctga

SEQ ID NO: 35876 - DNA, 1863 bp, synthetic construct
  source 1..1863: mol_type = other DNA
atggccttaccagtgaccgccttgctcctgccgctggccttgctgctccacgccgccaggccggagaacgtgctgacacagagccctgccatcatgagtgcctctccaggcgagaaagtgaccatgacctgtagagccagcagcagcgtgtccagcagctacctgcactggtatcagcagaagtccggcgcaagccccaaagtgtggatctacagcaccagcaatctggcctctggcgtgccaggcagattttctggctctggcagcggcacaagctacagcctgacaatcagctccgtggaagccgaagatgccgccacctactactgccagcagtacagcggctaccccatcacatttggagccggcaccaaggtggaagtgaagagactcgaggacctgaagaacgtgttcccacctgaggtggccgtgttcgagcctagcgaggccgagatcagccacacccagaaagccaccctcgtgtgcctggctaccggcttctaccccgaccatgtggaactgtcttggtgggtcaacggcaaagaggtgcacagcggcgtgtgtaccgacccccagccactgaaagaacagcccgccctgaacgacagccggtactgcctgagcagcagactgagagtgtccgccaccttctggcagaacccccggaaccacttcagatgccaggtgcagttctacggcctgagcgagaacgacgagtggacccaggacagagccaagcccgtgacccagatcgtgtctgccgaagcctggggcagagccgatagcggctttaccagcgagagctaccagcagggcgtgctgagcgccaccatcctgtacgagatcctgctgggcaaggccaccctgtacgccgtgctggtgtctgccctggtgctgatggctatggtcaagcggaaggacagccggggaagggccaagcgatctggatctggagcaacaaacttctcactactcaaacaagcaggtgacgtggaggagaatcccgggcctactagtatggactggatttggcgcatccttttccttgtcggcgctgctaccggcgcgcattccttcgaacaggttcagctcaaagaatctggccccgtgctggtggccccaagccagacactgtctatcacctgtaccgtgtccggcttcagcctggcctcctacaacatccactgggtccgacagcctccaggcaaaggactggaatggctgggagtgatttgggctggcggcagcaccaactacaacagcgcactgatgagccggctgagcatcagcaaggacaacagcaagagccaggtgttcctccagatgaactccctccagaccgacgacaccgccatgtactactgcgccaagagaagcgacgactacagttggttcgcctactggggccagggcacactggttactgtgtctgcttctacgcgtatccagaaccctgatcctgccgtgtaccagctgcgggatagcaagagcagcgacaagagcgtgtgtctgttcaccgacttcgacagccagaccaacgtgtcccagagcaaggactccgacgtgtacatcaccgataagtgcgtgctggacatgcggagcatggacttcaagagcaactccgccgtggcctggtccaacaagtccgatttcgcctgcgccaacgccttcaacaacagcattatccccgaggacacattcttcccaagccccgagagcagcagcgacgtgaagctggtggaaaagagcttcgagacagacaccaacctgaacttccagaacctgagcgtgatcggcttcagaatcctgctgctgaaagtggccggctttaacctgctgatgaccctgcggctgtggtccagc

SEQ ID NO: 35877 - DNA, 2703 bp, synthetic construct
  source 1..2703: mol_type = other DNA
atggccttaccagtgaccgccttgctcctgccgctggccttgctgctccacgccgccaggccggaggttcagctgcttgagtctggcggaggactggttcaacctggcggaagcctgagactgtcttgtgccgcctctggcagaaccttcagcatgggctggtatagacaggcccctggcaagggcctcgaatttgtgtctgccatcacatacagcggcggcagcccttactacgccgattctgtgaagggcagattcaccatcagccgggacaacagcaagaacaccgtgtacctccagatgaacagcctgagagccgaggacaccgccgtgtactactgtgccgccaatccaacctacggcagcgactggaatgccgagaattggggccagggcacactggtcacagtgtctagtggtaccggcggaggcggatctggcggcggaggtagcggtggcggaggatctgaattcgagaacgtgctgacacagagccctgccatcatgagtgcctctccaggcgagaaagtgaccatgacctgtagagccagcagcagcgtgtccagcagctacctgcactggtatcagcagaagtccggcgcaagccccaaagtgtggatctacagcaccagcaatctggcctctggcgtgccaggcagattttctggctctggcagcggcacaagctacagcctgacaatcagctccgtggaagccgaagatgccgccacctactactgccagcagtacagcggctaccccatcacatttggagccggcaccaaggtggaagtgaagagactcgagatccagaaccctgatcctgccgtgtaccagctgcgggatagcaagagcagcgacaagagcgtgtgtctgttcaccgacttcgacagccagaccaacgtgtcccagagcaaggactccgacgtgtacatcaccgataagtgcgtgctggacatgcggagcatggacttcaagagcaactccgccgtggcctggtccaacaagtccgatttcgcctgcgccaacgccttcaacaacagcattatccccgaggacacattcttcccaagcagcgacgtgccctgcgacgtgaagctggtggaaaagagcttcgagacagacaccaacctgaacttccagaacctgagcgtgatcggcttcagaatcctgctgctgaaagtggccggctttaacctgctgatgaccctgcggctgtggtccagccgcgccaagagaagcggatctggcgtgaagcagaccctgaatttcgacctgctgaagctggctggcgacgtggaatccaacccaggccctactagtaccatggactggatttggcgcatccttttccttgtcggcgctgctaccggcacccattccgggcccgaagtgcaactggttgaatccggtggcggcctggtgcaacccggcggatctctcagacttagctgtgccgcctccggcagaaccttcacaatgggatggtacaggcaggctccagggaaagagagagagttcgtcgccgccatctctctgtctcccacactggcctactacgccgactctgtgaaaggccggttcaccatctccagagataatagcaagaacaccgtggtgctgcaaatgaactctctgagagccgaggatacagccctgtactattgtgccgctgaccggaagtccgtgatgagcatcagacccgattactggggacagggcacactggtcacagtgtctagtggatccggcggcggaggatctggcggaggcggatctgggggcggaggctctttcgaacaggttcagctcaaagaatctggccccgtgctggtggccccaagccagacactgtctatcacctgtaccgtgtccggcttcagcctggcctcctacaacatccactgggtccgacagcctccaggcaaaggactggaatggctgggagtgatttgggctggcggcagcaccaactacaacagcgcactgatgagccggctgagcatcagcaaggacaacagcaagagccaggtgttcctccagatgaactccctccagaccgacgacaccgccatgtactactgcgccaagagaagcgacgactacagttggttcgcctactggggccagggcacactggttactgtgtctgcttctacgcgtgaggacctgaagaacgtgttcccacctgaggtggccgtgttcgagcctagcaaggccgagatcgcccacacccagaaagccaccctcgtgtgcctggctaccggcttctaccccgaccatgtggaactgtcttggtgggtcaacggcaaagaggtgcacagcggcgtgtgtaccgacccccagccactgaaagaacagcccgccctgaacgacagccggtactgcctgagcagcagactgagagtgtccgccaccttctggcagaacccccggaaccacttcagatgccaggtgcagttctacggcctgagcgagaacgacgagtggacccaggacagagccaagcccgtgacccagatcgtgtctgccgaagcctggggcagagccgattgcggcatcaccagcgccagctaccaccagggcgtgctgagcgccaccatcctgtacgagatcctgctgggcaaggccaccctgtacgccgtgctggtgtctgccctggtgctgatggctatggtcaagcggaaggacagccggggataa

SEQ ID NO: 35878 - DNA, 2703 bp, synthetic construct
  source 1..2703: mol_type = other DNA
atggccttaccagtgaccgccttgctcctgccgctggccttgctgctccacgccgccaggccggaagtgcagctggttgaatctggcggaggactggttcaggctggcggatctctgagactgtcttgtgccgccagcggcagaacctttagcatgggctggtttagacaggcccctggcaaagagagagagttcgtcgccgccatcacatactctggcggcagcccttactacgccgactctgtgaagggcagattcaccatcagccgggacaacgccaagaacaccgtgtacctccagatgaacagcctgaagcctgaggacaccgccgtgtactactgcgccgccaatccaacatacggcagcgactggaacgccgagaattggggccagggaacccaagtgacagtgtctagcggtaccggcggaggcggatctggcggcggaggtagcggtggcggaggatctgaattcgagaacgtgctgacacagagccctgccatcatgagtgcctctccaggcgagaaagtgaccatgacctgtagagccagcagcagcgtgtccagcagctacctgcactggtatcagcagaagtccggcgcaagccccaaagtgtggatctacagcaccagcaatctggcctctggcgtgccaggcagattttctggctctggcagcggcacaagctacagcctgacaatcagctccgtggaagccgaagatgccgccacctactactgccagcagtacagcggctaccccatcacatttggagccggcaccaaggtggaagtgaagagactcgagatccagaaccctgatcctgccgtgtaccagctgcgggatagcaagagcagcgacaagagcgtgtgtctgttcaccgacttcgacagccagaccaacgtgtcccagagcaaggactccgacgtgtacatcaccgataagtgcgtgctggacatgcggagcatggacttcaagagcaactccgccgtggcctggtccaacaagtccgatttcgcctgcgccaacgccttcaacaacagcattatccccgaggacacattcttcccaagcagcgacgtgccctgcgacgtgaagctggtggaaaagagcttcgagacagacaccaacctgaacttccagaacctgagcgtgatcggcttcagaatcctgctgctgaaagtggccggctttaacctgctgatgaccctgcggctgtggtccagccgcgccaagagaagcggatctggcgtgaagcagaccctgaatttcgacctgctgaagctggctggcgacgtggaatccaacccaggccctactagtaccatggactggatttggcgcatccttttccttgtcggcgctgctaccggcgcccattccgggcccgaagtgcaactggttgaatccggtggcggcctggtgcaacccggcggatctctcagacttagctgtgccgcctccggcagaaccttcacaatgggatggtacaggcaggctccagggaaagagagagagttcgtcgccgccatctctctgtctcccacactggcctactacgccgactctgtgaaaggccggttcaccatctccagagataatagcaagaacaccgtggtgctgcaaatgaactctctgagagccgaggatacagccctgtactattgtgccgctgaccggaagtccgtgatgagcatcagacccgattactggggacagggcacactggtcacagtgtctagtggatccggcggcggaggatctggcggaggcggatctgggggcggaggctctttcgaacaggttcagctcaaagaatctggccccgtgctggtggccccaagccagacactgtctatcacctgtaccgtgtccggcttcagcctggcctcctacaacatccactgggtccgacagcctccaggcaaaggactggaatggctgggagtgatttgggctggcggcagcaccaactacaacagcgcactgatgagccggctgagcatcagcaaggacaacagcaagagccaggtgttcctccagatgaactccctccagaccgacgacaccgccatgtactactgcgccaagagaagcgacgactacagttggttcgcctactggggccagggcacactggttactgtgtctgcttctacgcgtgaggacctgaagaacgtgttcccacctgaggtggccgtgttcgagcctagcaaggccgagatcgcccacacccagaaagccaccctcgtgtgcctggctaccggcttctaccccgaccatgtggaactgtcttggtgggtcaacggcaaagaggtgcacagcggcgtgtgtaccgacccccagccactgaaagaacagcccgccctgaacgacagccggtactgcctgagcagcagactgagagtgtccgccaccttctggcagaacccccggaaccacttcagatgccaggtgcagttctacggcctgagcgagaacgacgagtggacccaggacagagccaagcccgtgacccagatcgtgtctgccgaagcctggggcagagccgattgcggcatcaccagcgccagctaccaccagggcgtgctgagcgccaccatcctgtacgagatcctgctgggcaaggccaccctgtacgccgtgctggtgtctgccctggtgctgatggctatggtcaagcggaaggacagccggggataa

SEQ ID NO: 35879 - DNA, 2694 bp, synthetic construct
  source 1..2694: mol_type = other DNA
atggccttaccagtgaccgccttgctcctgccgctggccttgctgctccacgccgccaggccggaagtgcagctggttgaatctggcggaggactggttcaggctggcggatctctgagactgtcttgtgccgccagcggcagaacctttagcatgggctggtttagacaggcccctggcaaagagagagagttcgtcgccgccatcacatactctggcggcagcccttactacgccgactctgtgaagggcagattcaccatcagccgggacaacgccaagaacaccgtgtacctccagatgaacagcctgaagcctgaggacaccgccgtgtactactgcgccgccaatccaacatacggcagcgactggaacgccgagaattggggccagggaacccaagtgacagtgtctagcggtaccggcggaggcggatctggcggcggaggtagcggtggcggaggatctgaattcgagaacgtgctgacacagagccctgccatcatgagtgcctctccaggcgagaaagtgaccatgacctgtagagccagcagcagcgtgtccagcagctacctgcactggtatcagcagaagtccggcgcaagccccaaagtgtggatctacagcaccagcaatctggcctctggcgtgccaggcagattttctggctctggcagcggcacaagctacagcctgacaatcagctccgtggaagccgaagatgccgccacctactactgccagcagtacagcggctaccccatcacatttggagccggcaccaaggtggaagtgaagagactcgaggacctgaagaacgtgttcccacctgaggtggccgtgttcgagcctagcgaggccgagatcagccacacccagaaagccaccctcgtgtgcctggctaccggcttctaccccgaccatgtggaactgtcttggtgggtcaacggcaaagaggtgcacagcggcgtgtgtaccgacccccagccactgaaagaacagcccgccctgaacgacagccggtactgcctgagcagcagactgagagtgtccgccaccttctggcagaacccccggaaccacttcagatgccaggtgcagttctacggcctgagcgagaacgacgagtggacccaggacagagccaagcccgtgacccagatcgtgtctgccgaagcctggggcagagccgattgcggctttaccagcgagagctaccagcagggcgtgctgagcgccaccatcctgtacgagatcctgctgggcaaggccaccctgtacgccgtgctggtgtctgccctggtgctgatggctatggtcaagcggaaggacagccggggaagggccaagcgatctggatctggagcaacaaacttctcactactcaaacaagcaggtgacgtggaggagaatcccgggcctactagtgccaccatggactggatttggcgcatccttttccttgtcggcgctgctaccggcgcccattccgggcccgaagtgcaactggttgaatccggtggcggcctggtgcaagcaggcggatctctcagacttagctgtgccgcctccggcagaaccttcacaatgggatggtttaggcaggctccagggaaagagagagagttcgtcgccgccatctctctgtctcccacactggcctactacgccgactctgtgaaaggccggttcaccatctccagagataatgccaagaacaccgtggtgctgcaaatgaactctctgaaacccgaggatacagccctgtactattgtgccgctgaccggaagtccgtgatgagcatcagacccgattactggggacagggcacacaagtcacagtgtcctctggatccggcggcggaggatctggcggaggcggatctgggggcggaggctctttcgaacaggttcagctcaaagaatctggccccgtgctggtggccccaagccagacactgtctatcacctgtaccgtgtccggcttcagcctggcctcctacaacatccactgggtccgacagcctccaggcaaaggactggaatggctgggagtgatttgggctggcggcagcaccaactacaacagcgcactgatgagccggctgagcatcagcaaggacaacagcaagagccaggtgttcctccagatgaactccctccagaccgacgacaccgccatgtactactgcgccaagagaagcgacgactacagttggttcgcctactggggccagggcacactggttactgtgtctgcttctacgcgtatccagaaccctgatcctgccgtgtaccagctgcgggatagcaagagcagcgacaagagcgtgtgtctgttcaccgacttcgacagccagaccaacgtgtcccagagcaaggactccgacgtgtacatcaccgataagtgcgtgctggacatgcggagcatggacttcaagagcaactccgccgtggcctggtccaacaagtccgatttcgcctgcgccaacgccttcaacaacagcattatccccgaggacacattcttcccaagccccgagagcagctgcgacgtgaagctggtggaaaagagcttcgagacagacaccaacctgaacttccagaacctgagcgtgatcggcttcagaatcctgctgctgaaagtggccggctttaacctgctgatgaccctgcggctgtggtccagctaa

SEQ ID NO: 35880 - DNA, 2307 bp, synthetic construct
  source 1..2307: mol_type = other DNA
atggccttaccagtgaccgccttgctcctgccgctggccttgctgctccacgccgccaggccggaagtgcagctggttgaatctggcggaggactggttcagcctggcggatctctgagactgagctgtgaagccagcggcttcgccagcgacgattacatcatcggctggttcagacaggcccctggcaaagagagagagggcgtcagctgcatcagctctaagtacgccaacaccgtgtacaccgacagcgtgaagggcagattcagactgagcagaggcaccgccaagaataccgtgtacctccagatgagcgccctgaagcctgaggataccgccgtgtactactgcgctatggacagccgcagagtgacatgccctgagatcagcaccatgcaccggaacttcgattcttggggccagggcacactggtcacagtgtcatctggtaccggcggaggcggatctggcggcggaggtagcggtggcggaggatctgaattcgagaacgtgctgacacagagccctgccatcatgagtgcctctccaggcgagaaagtgaccatgacctgtagagccagcagcagcgtgtccagcagctacctgcactggtatcagcagaagtccggcgcaagccccaaagtgtggatctacagcaccagcaatctggcctctggcgtgccaggcagattttctggctctggcagcggcacaagctacagcctgacaatcagctccgtggaagccgaagatgccgccacctactactgccagcagtacagcggctaccccatcacatttggagccggcaccaaggtggaagtgaagagactcgaggacctgaagaacgtgttcccacctgaggtggccgtgttcgagcctagcaaggccgagatcgcccacacccagaaagccaccctcgtgtgcctggctaccggcttctaccccgaccatgtggaactgtcttggtgggtcaacggcaaagaggtgcacagcggcgtgtgtaccgacccccagccactgaaagaacagcccgccctgaacgacagccggtactgcctgagcagcagactgagagtgtccgccaccttctggcagaacccccggaaccacttcagatgccaggtgcagttctacggcctgagcgagaacgacgagtggacccaggacagagccaagcccgtgacccagatcgtgtctgccgaagcctggggcagagccgattgcggcatcaccagcgccagctaccaccagggcgtgctgagcgccaccatcctgtacgagatcctgctgggcaaggccaccctgtacgccgtgctggtgtctgccctggtgctgatggctatggtcaagcggaaggacagccggggaagggccaagcgatctggatctggagcaacaaacttctcactactcaaacaagcaggtgacgtggaggagaatcccgggcctactagtatggactggatttggcgcatccttttccttgtcggcgctgctaccggcgcgcattccttcgaacaggttcagctcaaagaatctggccccgtgctggtggccccaagccagacactgtctatcacctgtaccgtgtccggcttcagcctggcctcctacaacatccactgggtccgacagcctccaggcaaaggactggaatggctgggagtgatttgggctggcggcagcaccaactacaacagcgcactgatgagccggctgagcatcagcaaggacaacagcaagagccaggtgttcctccagatgaactccctccagaccgacgacaccgccatgtactactgcgccaagagaagcgacgactacagttggttcgcctactggggccagggcacactggttactgtgtctgcttctacgcgtatccagaaccctgatcctgccgtgtaccagctgcgggatagcaagagcagcgacaagagcgtgtgtctgttcaccgacttcgacagccagaccaacgtgtcccagagcaaggactccgacgtgtacatcaccgataagtgcgtgctggacatgcggagcatggacttcaagagcaactccgccgtggcctggtccaacaagtccgatttcgcctgcgccaacgccttcaacaacagcattatccccgaggacacattcttcccaagcagcgacgtgccctgcgacgtgaagctggtggaaaagagcttcgagacagacaccaacctgaacttccagaacctgagcgtgatcggcttcagaatcctgctgctgaaagtggccggctttaacctgctgatgaccctgcggctgtggtccagctaa

SEQ ID NO: 35881 - DNA, 2280 bp, synthetic construct
  source 1..2280: mol_type = other DNA
atggccttaccagtgaccgccttgctcctgccgctggccttgctgctccacgccgccaggccggagaacgtgctgacacagagccctgccatcatgagtgcctctccaggcgagaaagtgaccatgacctgtagagccagcagcagcgtgtccagcagctacctgcactggtatcagcagaagtccggcgcaagccccaaagtgtggatctacagcaccagcaatctggcctctggcgtgccaggcagattttctggctctggcagcggcacaagctacagcctgacaatcagctccgtggaagccgaagatgccgccacctactactgccagcagtacagcggctaccccatcacatttggagccggcaccaaggtggaagtgaagagactcgaggacctgaagaacgtgttcccacctgaggtggccgtgttcgagcctagcgaggccgagatcagccacacccagaaagccaccctcgtgtgcctggctaccggcttctaccccgaccatgtggaactgtcttggtgggtcaacggcaaagaggtgcacagcggcgtgtgtaccgacccccagccactgaaagaacagcccgccctgaacgacagccggtactgcctgagcagcagactgagagtgtccgccaccttctggcagaacccccggaaccacttcagatgccaggtgcagttctacggcctgagcgagaacgacgagtggacccaggacagagccaagcccgtgacccagatcgtgtctgccgaagcctggggcagagccgattgcggctttaccagcgagagctaccagcagggcgtgctgagcgccaccatcctgtacgagatcctgctgggcaaggccaccctgtacgccgtgctggtgtctgccctggtgctgatggctatggtcaagcggaaggacagccggggaagggccaagcgatctggatctggagcaacaaacttctcactactcaaacaagcaggtgacgtggaggagaatcccgggcctactagtaccatggactggatttggcgcatccttttccttgtcggcgctgctaccggcgcccattccgggcccgaagtgcaactggttgaatccggtggcggcctggtgcaacccggcggatctctcagacttagctgtgccgcctccggcagaaccttcacaatgggatggtacaggcaggctccagggaaagagagagagttcgtcgccgccatctctctgtctcccacactggcctactacgccgactctgtgaaaggccggttcaccatctccagagataatagcaagaacaccgtggtgctgcaaatgaactctctgagagccgaggatacagccctgtactattgtgccgctgaccggaagtccgtgatgagcatcagacccgattactggggacagggcacactggtcacagtgtctagtggatccggcggcggaggatctggcggaggcggatctgggggcggaggctctttcgaacaggttcagctcaaagaatctggccccgtgctggtggccccaagccagacactgtctatcacctgtaccgtgtccggcttcagcctggcctcctacaacatccactgggtccgacagcctccaggcaaaggactggaatggctgggagtgatttgggctggcggcagcaccaactacaacagcgcactgatgagccggctgagcatcagcaaggacaacagcaagagccaggtgttcctccagatgaactccctccagaccgacgacaccgccatgtactactgcgccaagagaagcgacgactacagttggttcgcctactggggccagggcacactggttactgtgtctgcttctacgcgtatccagaaccctgatcctgccgtgtaccagctgcgggatagcaagagcagcgacaagagcgtgtgtctgttcaccgacttcgacagccagaccaacgtgtcccagagcaaggactccgacgtgtacatcaccgataagtgcgtgctggacatgcggagcatggacttcaagagcaactccgccgtggcctggtccaacaagtccgatttcgcctgcgccaacgccttcaacaacagcattatccccgaggacacattcttcccaagccccgagagcagctgcgacgtgaagctggtggaaaagagcttcgagacagacaccaacctgaacttccagaacctgagcgtgatcggcttcagaatcctgctgctgaaagtggccggctttaacctgctgatgaccctgcggctgtggtccagctaa

SEQ ID NO: 35882 - DNA, 2298 bp, synthetic construct
  source 1..2298: mol_type = other DNA
atggccttaccagtgaccgccttgctcctgccgctggccttgctgctccacgccgccaggccggagaacgtgctgacacagagccctgccatcatgagtgcctctccaggcgagaaagtgaccatgacctgtagagccagcagcagcgtgtccagcagctacctgcactggtatcagcagaagtccggcgcaagccccaaagtgtggatctacagcaccagcaatctggcctctggcgtgccaggcagattttctggctctggcagcggcacaagctacagcctgacaatcagctccgtggaagccgaagatgccgccacctactactgccagcagtacagcggctaccccatcacatttggagccggcaccaaggtggaagtgaagagactcgaggacctgaagaacgtgttcccacctgaggtggccgtgttcgagcctagcgaggccgagatcagccacacccagaaagccaccctcgtgtgcctggctaccggcttctaccccgaccatgtggaactgtcttggtgggtcaacggcaaagaggtgcacagcggcgtgtgtaccgacccccagccactgaaagaacagcccgccctgaacgacagccggtactgcctgagcagcagactgagagtgtccgccaccttctggcagaacccccggaaccacttcagatgccaggtgcagttctacggcctgagcgagaacgacgagtggacccaggacagagccaagcccgtgacccagatcgtgtctgccgaagcctggggcagagccgattgcggctttaccagcgagagctaccagcagggcgtgctgagcgccaccatcctgtacgagatcctgctgggcaaggccaccctgtacgccgtgctggtgtctgccctggtgctgatggctatggtcaagcggaaggacagccggggaagggccaagcgatctggatctggagcaacaaacttctcactactcaaacaagcaggtgacgtggaggagaatcccgggcctactagtaccatggactggatttggcgcatccttttccttgtcggcgctgctaccggcgcccattccgggccccaggtgcagctggttgaatctggcggaggactggttcagcctggcggatctctgagactgtcttgtgccgccagcggcaacatcaacagcagaaactgcatgggctggttcagacaggcccctggcaagggaagagaaggcgtggcagctatcggccaagtgaccggcagaacctactacgtggacagcgtgaagggcagattcaccatcagcctggacaacagcaagaacaccctgtacctccagatgaacagcctgagagccgaggacaccgccgtgtactattgtgctgctgcccctggctgtctgctgtctgcacttagaagcgccgactacagaaactggggccagggcacactggtcaccgtttcttctggatccggcggcggaggatctggcggaggcggatctgggggcggaggctctttcgaacaggttcagctcaaagaatctggccccgtgctggtggccccaagccagacactgtctatcacctgtaccgtgtccggcttcagcctggcctcctacaacatccactgggtccgacagcctccaggcaaaggactggaatggctgggagtgatttgggctggcggcagcaccaactacaacagcgcactgatgagccggctgagcatcagcaaggacaacagcaagagccaggtgttcctccagatgaactccctccagaccgacgacaccgccatgtactactgcgccaagagaagcgacgactacagttggttcgcctactggggccagggcacactggttactgtgtctgcttctacgcgtatccagaaccctgatcctgccgtgtaccagctgcgggatagcaagagcagcgacaagagcgtgtgtctgttcaccgacttcgacagccagaccaacgtgtcccagagcaaggactccgacgtgtacatcaccgataagtgcgtgctggacatgcggagcatggacttcaagagcaactccgccgtggcctggtccaacaagtccgatttcgcctgcgccaacgccttcaacaacagcattatccccgaggacacattcttcccaagccccgagagcagctgcgacgtgaagctggtggaaaagagcttcgagacagacaccaacctgaacttccagaacctgagcgtgatcggcttcagaatcctgctgctgaaagtggccggctttaacctgctgatgaccctgcggctgtggtccagc

SEQ ID NO: 35883 - DNA, 2301 bp, synthetic construct
  source 1..2301: mol_type = other DNA
atggccttaccagtgaccgccttgctcctgccgctggccttgctgctccacgccgccaggccggagaacgtgctgacacagagccctgccatcatgagtgcctctccaggcgagaaagtgaccatgacctgtagagccagcagcagcgtgtccagcagctacctgcactggtatcagcagaagtccggcgcaagccccaaagtgtggatctacagcaccagcaatctggcctctggcgtgccaggcagattttctggctctggcagcggcacaagctacagcctgacaatcagctccgtggaagccgaagatgccgccacctactactgccagcagtacagcggctaccccatcacatttggagccggcaccaaggtggaagtgaagagactcgaggacctgaagaacgtgttcccacctgaggtggccgtgttcgagcctagcgaggccgagatcagccacacccagaaagccaccctcgtgtgcctggctaccggcttctaccccgaccatgtggaactgtcttggtgggtcaacggcaaagaggtgcacagcggcgtgtgtaccgacccccagccactgaaagaacagcccgccctgaacgacagccggtactgcctgagcagcagactgagagtgtccgccaccttctggcagaacccccggaaccacttcagatgccaggtgcagttctacggcctgagcgagaacgacgagtggacccaggacagagccaagcccgtgacccagatcgtgtctgccgaagcctggggcagagccgattgcggctttaccagcgagagctaccagcagggcgtgctgagcgccaccatcctgtacgagatcctgctgggcaaggccaccctgtacgccgtgctggtgtctgccctggtgctgatggctatggtcaagcggaaggacagccggggaagggccaagcgatctggatctggagcaacaaacttctcactactcaaacaagcaggtgacgtggaggagaatcccgggcctactagtaccatggactggatttggcgcatccttttccttgtcggcgctgctaccggcgcccattccgggccccaggtgcagctggttgaatctggcggaggatctgttcaggctggcggctctctgagactgtcttgtggcgcttccggcaacatcagcagcagaaactgcatgggctggttcagacaggcccctggcaaagagagagaaggcgttgccgccatcggacaagtgaccggcagatcctactacgtggacagcgtgaagggcagattcaccatcagcctggacaacgccaagaacaccctgtacctccagatgaacacactgaagcccgaggacaccgccatgtactactgtgctgctgcccctggctgtctgctgtctgcacttagaagcgccgactacagaaactggggccagggaacccaagtgacagtgtctagtggatccggcggcggaggatctggcggaggcggatctgggggcggaggctctttcgaacaggttcagctcaaagaatctggccccgtgctggtggccccaagccagacactgtctatcacctgtaccgtgtccggcttcagcctggcctcctacaacatccactgggtccgacagcctccaggcaaaggactggaatggctgggagtgatttgggctggcggcagcaccaactacaacagcgcactgatgagccggctgagcatcagcaaggacaacagcaagagccaggtgttcctccagatgaactccctccagaccgacgacaccgccatgtactactgcgccaagagaagcgacgactacagttggttcgcctactggggccagggcacactggttactgtgtctgcttctacgcgtatccagaaccctgatcctgccgtgtaccagctgcgggatagcaagagcagcgacaagagcgtgtgtctgttcaccgacttcgacagccagaccaacgtgtcccagagcaaggactccgacgtgtacatcaccgataagtgcgtgctggacatgcggagcatggacttcaagagcaactccgccgtggcctggtccaacaagtccgatttcgcctgcgccaacgccttcaacaacagcattatccccgaggacacattcttcccaagccccgagagcagctgcgacgtgaagctggtggaaaagagcttcgagacagacaccaacctgaacttccagaacctgagcgtgatcggcttcagaatcctgctgctgaaagtggccggctttaacctgctgatgaccctgcggctgtggtccagctaa

SEQ ID NO: 35884 - DNA, 2724 bp, synthetic construct
  source 1..2724: mol_type = other DNA
atggccttaccagtgaccgccttgctcctgccgctggccttgctgctccacgccgccaggccggaagtgcagctggttgaatctggcggaggactggttcaggctggcggatctctgagactgtcttgtgccgccagcggcagaacctttagcatgggctggtttagacaggcccctggcaaagagagagagttcgtcgccgccatcacatactctggcggcagcccttactacgccgactctgtgaagggcagattcaccatcagccgggacaacgccaagaacaccgtgtacctccagatgaacagcctgaagcctgaggacaccgccgtgtactactgcgccgccaatccaacatacggcagcgactggaacgccgagaattggggccagggaacccaagtgacagtgtctagcggtaccggcggaggcggatctggcggcggaggtagcggtggcggaggatctgaattcgagaacgtgctgacacagagccctgccatcatgagtgcctctccaggcgagaaagtgaccatgacctgtagagccagcagcagcgtgtccagcagctacctgcactggtatcagcagaagtccggcgcaagccccaaagtgtggatctacagcaccagcaatctggcctctggcgtgccaggcagattttctggctctggcagcggcacaagctacagcctgacaatcagctccgtggaagccgaagatgccgccacctactactgccagcagtacagcggctaccccatcacatttggagccggcaccaaggtggaagtgaagagactcgagatccagaaccctgatcctgccgtgtaccagctgcgggatagcaagagcagcgacaagagcgtgtgtctgttcaccgacttcgacagccagaccaacgtgtcccagagcaaggactccgacgtgtacatcaccgataagtgcgtgctggacatgcggagcatggacttcaagagcaactccgccgtggcctggtccaacaagtccgatttcgcctgcgccaacgccttcaacaacagcattatccccgaggacacattcttcccaagcagcgacgtgccctgcgacgtgaagctggtggaaaagagcttcgagacagacaccaacctgaacttccagaacctgagcgtgatcggcttcagaatcctgctgctgaaagtggccggctttaacctgctgatgaccctgcggctgtggtccagccgcgccaagagaagcggatctggcgtgaagcagaccctgaatttcgacctgctgaagctggctggcgacgtggaatccaacccaggccctactagtaccatggactggatttggcgcatccttttccttgtcggcgctgctaccggcgcccattccgggccccaggtgcagctggttgaatctggcggaggatctgttcaggctggcggctctctgagactgtcttgtggcgcttccggcaacatcagcagcagaaactgcatgggctggttcagacaggcccctggcaaagagagagaaggcgttgccgccatcggacaagtgaccggcagatcctactacgtggacagcgtgaagggcagattcaccatcagcctggacaacgccaagaacaccctgtacctccagatgaacacactgaagcccgaggacaccgccatgtactactgtgctgctgcccctggctgtctgctgtctgcacttagaagcgccgactacagaaactggggccagggaacccaagtgacagtgtctagtggatccggcggcggaggatctggcggaggcggatctgggggcggaggctctttcgaacaggttcagctcaaagaatctggccccgtgctggtggccccaagccagacactgtctatcacctgtaccgtgtccggcttcagcctggcctcctacaacatccactgggtccgacagcctccaggcaaaggactggaatggctgggagtgatttgggctggcggcagcaccaactacaacagcgcactgatgagccggctgagcatcagcaaggacaacagcaagagccaggtgttcctccagatgaactccctccagaccgacgacaccgccatgtactactgcgccaagagaagcgacgactacagttggttcgcctactggggccagggcacactggttactgtgtctgcttctacgcgtgaggacctgaagaacgtgttcccacctgaggtggccgtgttcgagcctagcaaggccgagatcgcccacacccagaaagccaccctcgtgtgcctggctaccggcttctaccccgaccatgtggaactgtcttggtgggtcaacggcaaagaggtgcacagcggcgtgtgtaccgacccccagccactgaaagaacagcccgccctgaacgacagccggtactgcctgagcagcagactgagagtgtccgccaccttctggcagaacccccggaaccacttcagatgccaggtgcagttctacggcctgagcgagaacgacgagtggacccaggacagagccaagcccgtgacccagatcgtgtctgccgaagcctggggcagagccgattgcggcatcaccagcgccagctaccaccagggcgtgctgagcgccaccatcctgtacgagatcctgctgggcaaggccaccctgtacgccgtgctggtgtctgccctggtgctgatggctatggtcaagcggaaggacagccggggataa

SEQ ID NO: 35885 - DNA, 2715 bp, synthetic construct
  source 1..2715: mol_type = other DNA
atggccttaccagtgaccgccttgctcctgccgctggccttgctgctccacgccgccaggccgcaggtgcagctggttgaatctggcggaggatctgttcaggctggcggctctctgagactgtcttgtggcgcttccggcaacatcagcagcagaaactgcatgggctggttcagacaggcccctggcaaagagagagaaggcgttgccgccatcggacaagtgaccggcagatcctactacgtggacagcgtgaagggcagattcaccatcagcctggacaacgccaagaacaccctgtacctccagatgaacacactgaagcccgaggacaccgccatgtactactgtgctgctgcccctggctgtctgctgtctgcacttagaagcgccgactacagaaactggggccagggaacccaagtgacagtgtctagtggtaccggcggaggcggatctggcggcggaggtagcggtggcggaggatctgaattcgagaacgtgctgacacagagccctgccatcatgagtgcctctccaggcgagaaagtgaccatgacctgtagagccagcagcagcgtgtccagcagctacctgcactggtatcagcagaagtccggcgcaagccccaaagtgtggatctacagcaccagcaatctggcctctggcgtgccaggcagattttctggctctggcagcggcacaagctacagcctgacaatcagctccgtggaagccgaagatgccgccacctactactgccagcagtacagcggctaccccatcacatttggagccggcaccaaggtggaagtgaagagactcgaggacctgaagaacgtgttcccacctgaggtggccgtgttcgagcctagcgaggccgagatcagccacacccagaaagccaccctcgtgtgcctggctaccggcttctaccccgaccatgtggaactgtcttggtgggtcaacggcaaagaggtgcacagcggcgtgtgtaccgacccccagccactgaaagaacagcccgccctgaacgacagccggtactgcctgagcagcagactgagagtgtccgccaccttctggcagaacccccggaaccacttcagatgccaggtgcagttctacggcctgagcgagaacgacgagtggacccaggacagagccaagcccgtgacccagatcgtgtctgccgaagcctggggcagagccgattgcggctttaccagcgagagctaccagcagggcgtgctgagcgccaccatcctgtacgagatcctgctgggcaaggccaccctgtacgccgtgctggtgtctgccctggtgctgatggctatggtcaagcggaaggacagccggggaagggccaagcgatctggatctggagcaacaaacttctcactactcaaacaagcaggtgacgtggaggagaatcccgggcctactagtgccaccatggactggatttggcgcatccttttccttgtcggcgctgctaccggcgcccattccgggcccgaagtgcaactggttgaatccggtggcggcctggtgcaagcaggcggatctctcagacttagctgtgccgcctccggcagaaccttcacaatgggatggtttaggcaggctccagggaaagagagagagttcgtcgccgccatctctctgtctcccacactggcctactacgccgactctgtgaaaggccggttcaccatctccagagataatgccaagaacaccgtggtgctgcaaatgaactctctgaaacccgaggatacagccctgtactattgtgccgctgaccggaagtccgtgatgagcatcagacccgattactggggacagggcacacaagtcacagtgtcctctggatccggcggcggaggatctggcggaggcggatctgggggcggaggctctttcgaacaggttcagctcaaagaatctggccccgtgctggtggccccaagccagacactgtctatcacctgtaccgtgtccggcttcagcctggcctcctacaacatccactgggtccgacagcctccaggcaaaggactggaatggctgggagtgatttgggctggcggcagcaccaactacaacagcgcactgatgagccggctgagcatcagcaaggacaacagcaagagccaggtgttcctccagatgaactccctccagaccgacgacaccgccatgtactactgcgccaagagaagcgacgactacagttggttcgcctactggggccagggcacactggttactgtgtctgcttctacgcgtatccagaaccctgatcctgccgtgtaccagctgcgggatagcaagagcagcgacaagagcgtgtgtctgttcaccgacttcgacagccagaccaacgtgtcccagagcaaggactccgacgtgtacatcaccgataagtgcgtgctggacatgcggagcatggacttcaagagcaactccgccgtggcctggtccaacaagtccgatttcgcctgcgccaacgccttcaacaacagcattatccccgaggacacattcttcccaagccccgagagcagctgcgacgtgaagctggtggaaaagagcttcgagacagacaccaacctgaacttccagaacctgagcgtgatcggcttcagaatcctgctgctgaaagtggccggctttaacctgctgatgaccctgcggctgtggtccagctaa

SEQ ID NO: 35886 - DNA, 2304 bp, synthetic construct
  source 1..2304: mol_type = other DNA
atggccttaccagtgaccgccttgctcctgccgctggccttgctgctccacgccgccaggccgcaggtgcagctggttgaatctggcggaggatctgttcaggctggcggctctctgagactgtcttgtggcgcttccggcaacatcagcagcagaaactgcatgggctggttcagacaggcccctggcaaagagagagaaggcgttgccgccatcggacaagtgaccggcagatcctactacgtggacagcgtgaagggcagattcaccatcagcctggacaacgccaagaacaccctgtacctccagatgaacacactgaagcccgaggacaccgccatgtactactgtgctgctgcccctggctgtctgctgtctgcacttagaagcgccgactacagaaactggggccagggaacccaagtgacagtgtctagtggtaccggcggaggcggatctggcggcggaggtagcggtggcggaggatctgaattcgagaacgtgctgacacagagccctgccatcatgagtgcctctccaggcgagaaagtgaccatgacctgtagagccagcagcagcgtgtccagcagctacctgcactggtatcagcagaagtccggcgcaagccccaaagtgtggatctacagcaccagcaatctggcctctggcgtgccaggcagattttctggctctggcagcggcacaagctacagcctgacaatcagctccgtggaagccgaagatgccgccacctactactgccagcagtacagcggctaccccatcacatttggagccggcaccaaggtggaagtgaagagactcgaggacctgaagaacgtgttcccacctgaggtggccgtgttcgagcctagcgaggccgagatcagccacacccagaaagccaccctcgtgtgcctggctaccggcttctaccccgaccatgtggaactgtcttggtgggtcaacggcaaagaggtgcacagcggcgtgtgtaccgacccccagccactgaaagaacagcccgccctgaacgacagccggtactgcctgagcagcagactgagagtgtccgccaccttctggcagaacccccggaaccacttcagatgccaggtgcagttctacggcctgagcgagaacgacgagtggacccaggacagagccaagcccgtgacccagatcgtgtctgccgaagcctggggcagagccgattgcggctttaccagcgagagctaccagcagggcgtgctgagcgccaccatcctgtacgagatcctgctgggcaaggccaccctgtacgccgtgctggtgtctgccctggtgctgatggctatggtcaagcggaaggacagccggggaagggccaagcgatctggatctggagcaacaaacttctcactactcaaacaagcaggtgacgtggaggagaatcccgggcctactagtgccaccatggactggatttggcgcatccttttccttgtcggcgctgctaccggcgcccattccttcgaacaggttcagctcaaagaatctggccccgtgctggtggccccaagccagacactgtctatcacctgtaccgtgtccggcttcagcctggcctcctacaacatccactgggtccgacagcctccaggcaaaggactggaatggctgggagtgatttgggctggcggcagcaccaactacaacagcgcactgatgagccggctgagcatcagcaaggacaacagcaagagccaggtgttcctccagatgaactccctccagaccgacgacaccgccatgtactactgcgccaagagaagcgacgactacagttggttcgcctactggggccagggcacactggttactgtgtctgcttctacgcgtatccagaaccctgatcctgccgtgtaccagctgcgggatagcaagagcagcgacaagagcgtgtgtctgttcaccgacttcgacagccagaccaacgtgtcccagagcaaggactccgacgtgtacatcaccgataagtgcgtgctggacatgcggagcatggacttcaagagcaactccgccgtggcctggtccaacaagtccgatttcgcctgcgccaacgccttcaacaacagcattatccccgaggacacattcttcccaagccccgagagcagctgcgacgtgaagctggtggaaaagagcttcgagacagacaccaacctgaacttccagaacctgagcgtgatcggcttcagaatcctgctgctgaaagtggccggctttaacctgctgatgaccctgcggctgtggtccagctaa

SEQ ID NO: 35887 - DNA, 2304 bp, synthetic construct
  source 1..2304: mol_type = other DNA
atggccttaccagtgaccgccttgctcctgccgctggccttgctgctccacgccgccaggccgcaagttcagctggtggaaagcggtggtggcgttgtgcaacctggtggaagtctgaggctgagctgtgccgcttctggcctgagctttagcacctacactgtggcctggttcaggcaggctcccggaaagggtcttgaaggcgtggccgccattccttacaccagccagcacatggtgtacacagacagcgtcagaggccggttcaccatcagcagagacaactccaagaatacgctctatctccagatgaactctctgcgcgccgaagatacagccgtgtattactgcgccaccgacagacggcctggcacctctatgctggctatcaacggctacaacagatggggacagggaaccaccgtgaccgtgtcatctggtaccggcggaggcggatctggcggcggaggtagcggtggcggaggatctgaattcgagaacgtgctgacacagagccctgccatcatgagtgcctctccaggcgagaaagtgaccatgacctgtagagccagcagcagcgtgtccagcagctacctgcactggtatcagcagaagtccggcgcaagccccaaagtgtggatctacagcaccagcaatctggcctctggcgtgccaggcagattttctggctctggcagcggcacaagctacagcctgacaatcagctccgtggaagccgaagatgccgccacctactactgccagcagtacagcggctaccccatcacatttggagccggcaccaaggtggaagtgaagagactcgaggacctgaagaacgtgttcccacctgaggtggccgtgttcgagcctagcgaggccgagatcagccacacccagaaagccaccctcgtgtgcctggctaccggcttctaccccgaccatgtggaactgtcttggtgggtcaacggcaaagaggtgcacagcggcgtgtgtaccgacccccagccactgaaagaacagcccgccctgaacgacagccggtactgcctgagcagcagactgagagtgtccgccaccttctggcagaacccccggaaccacttcagatgccaggtgcagttctacggcctgagcgagaacgacgagtggacccaggacagagccaagcccgtgacccagatcgtgtctgccgaagcctggggcagagccgattgcggctttaccagcgagagctaccagcagggcgtgctgagcgccaccatcctgtacgagatcctgctgggcaaggccaccctgtacgccgtgctggtgtctgccctggtgctgatggctatggtcaagcggaaggacagccggggaagggccaagcgatctggatctggagcaacaaacttctcactactcaaacaagcaggtgacgtggaggagaatcccgggcctactagtgccaccatggactggatttggcgcatccttttccttgtcggcgctgctaccggcgcccattccttcgaacaggttcagctcaaagaatctggccccgtgctggtggccccaagccagacactgtctatcacctgtaccgtgtccggcttcagcctggcctcctacaacatccactgggtccgacagcctccaggcaaaggactggaatggctgggagtgatttgggctggcggcagcaccaactacaacagcgcactgatgagccggctgagcatcagcaaggacaacagcaagagccaggtgttcctccagatgaactccctccagaccgacgacaccgccatgtactactgcgccaagagaagcgacgactacagttggttcgcctactggggccagggcacactggttactgtgtctgcttctacgcgtatccagaaccctgatcctgccgtgtaccagctgcgggatagcaagagcagcgacaagagcgtgtgtctgttcaccgacttcgacagccagaccaacgtgtcccagagcaaggactccgacgtgtacatcaccgataagtgcgtgctggacatgcggagcatggacttcaagagcaactccgccgtggcctggtccaacaagtccgatttcgcctgcgccaacgccttcaacaacagcattatccccgaggacacattcttcccaagccccgagagcagctgcgacgtgaagctggtggaaaagagcttcgagacagacaccaacctgaacttccagaacctgagcgtgatcggcttcagaatcctgctgctgaaagtggccggctttaacctgctgatgaccctgcggctgtggtccagctaa

SEQ ID NO: 35888 - DNA, 2301 bp, synthetic construct
  source 1..2301: mol_type = other DNA
atggccttaccagtgaccgccttgctcctgccgctggccttgctgctccacgccgccaggccggagaacgtgctgacacagagccctgccatcatgagtgcctctccaggcgagaaagtgaccatgacctgtagagccagcagcagcgtgtccagcagctacctgcactggtatcagcagaagtccggcgcaagccccaaagtgtggatctacagcaccagcaatctggcctctggcgtgccaggcagattttctggctctggcagcggcacaagctacagcctgacaatcagctccgtggaagccgaagatgccgccacctactactgccagcagtacagcggctaccccatcacatttggagccggcaccaaggtggaagtgaagagactcgaggacctgaagaacgtgttcccacctgaggtggccgtgttcgagcctagcgaggccgagatcagccacacccagaaagccaccctcgtgtgcctggctaccggcttctaccccgaccatgtggaactgtcttggtgggtcaacggcaaagaggtgcacagcggcgtgtgtaccgacccccagccactgaaagaacagcccgccctgaacgacagccggtactgcctgagcagcagactgagagtgtccgccaccttctggcagaacccccggaaccacttcagatgccaggtgcagttctacggcctgagcgagaacgacgagtggacccaggacagagccaagcccgtgacccagatcgtgtctgccgaagcctggggcagagccgattgcggctttaccagcgagagctaccagcagggcgtgctgagcgccaccatcctgtacgagatcctgctgggcaaggccaccctgtacgccgtgctggtgtctgccctggtgctgatggctatggtcaagcggaaggacagccggggaagggccaagcgatctggatctggagcaacaaacttctcactactcaaacaagcaggtgacgtggaggagaatcccgggcctactagtaccatggactggatttggcgcatccttttccttgtcggcgctgctaccggcgcccattccgggccccaagttcagctggtggaaagcggtggtggcgttgtgcaacctggtggaagtctgaggctgagctgtgccgcttctggcctgagctttagcacctacactgtggcctggttcaggcaggctcccggaaagggtcttgaaggcgtggccgccattccttacaccagccagcacatggtgtacacagacagcgtcagaggccggttcaccatcagcagagacaactccaagaatacgctctatctccagatgaactctctgcgcgccgaagatacagccgtgtattactgcgccaccgacagacggcctggcacctctatgctggctatcaacggctacaacagatggggacagggaaccaccgtgaccgtgtcatctggatccggcggcggaggatctggcggaggcggatctgggggcggaggctctttcgaacaggttcagctcaaagaatctggccccgtgctggtggccccaagccagacactgtctatcacctgtaccgtgtccggcttcagcctggcctcctacaacatccactgggtccgacagcctccaggcaaaggactggaatggctgggagtgatttgggctggcggcagcaccaactacaacagcgcactgatgagccggctgagcatcagcaaggacaacagcaagagccaggtgttcctccagatgaactccctccagaccgacgacaccgccatgtactactgcgccaagagaagcgacgactacagttggttcgcctactggggccagggcacactggttactgtgtctgcttctacgcgtatccagaaccctgatcctgccgtgtaccagctgcgggatagcaagagcagcgacaagagcgtgtgtctgttcaccgacttcgacagccagaccaacgtgtcccagagcaaggactccgacgtgtacatcaccgataagtgcgtgctggacatgcggagcatggacttcaagagcaactccgccgtggcctggtccaacaagtccgatttcgcctgcgccaacgccttcaacaacagcattatccccgaggacacattcttcccaagccccgagagcagctgcgacgtgaagctggtggaaaagagcttcgagacagacaccaacctgaacttccagaacctgagcgtgatcggcttcagaatcctgctgctgaaagtggccggctttaacctgctgatgaccctgcggctgtggtccagctaa

SEQ ID NO: 35889 - DNA, 2307 bp, synthetic construct
  source 1..2307: mol_type = other DNA
atggccttaccagtgaccgccttgctcctgccgctggccttgctgctccacgccgccaggccggagaacgtgctgacacagagccctgccatcatgagtgcctctccaggcgagaaagtgaccatgacctgtagagccagcagcagcgtgtccagcagctacctgcactggtatcagcagaagtccggcgcaagccccaaagtgtggatctacagcaccagcaatctggcctctggcgtgccaggcagattttctggctctggcagcggcacaagctacagcctgacaatcagctccgtggaagccgaagatgccgccacctactactgccagcagtacagcggctaccccatcacatttggagccggcaccaaggtggaagtgaagagactcgaggacctgaagaacgtgttcccacctgaggtggccgtgttcgagcctagcgaggccgagatcagccacacccagaaagccaccctcgtgtgcctggctaccggcttctaccccgaccatgtggaactgtcttggtgggtcaacggcaaagaggtgcacagcggcgtgtgtaccgacccccagccactgaaagaacagcccgccctgaacgacagccggtactgcctgagcagcagactgagagtgtccgccaccttctggcagaacccccggaaccacttcagatgccaggtgcagttctacggcctgagcgagaacgacgagtggacccaggacagagccaagcccgtgacccagatcgtgtctgccgaagcctggggcagagccgattgcggctttaccagcgagagctaccagcagggcgtgctgagcgccaccatcctgtacgagatcctgctgggcaaggccaccctgtacgccgtgctggtgtctgccctggtgctgatggctatggtcaagcggaaggacagccggggaagggccaagcgatctggatctggagcaacaaacttctcactactcaaacaagcaggtgacgtggaggagaatcccgggcctactagtaccatggactggatttggcgcatccttttccttgtcggcgctgctaccggcgcccattccgggcccgaggtgcagctggttgaatctggcggaggatctgttcaggctggcggctctctgagactgtcttgtgccgccagcggctacacctacagcatcaactgcatgggctggttcagacaggcccctggcaaagagagagaaggcgttgccgccatctctaccggcggaggcagaaccgattaccgggattctgtgaagggcagattcaccatcagccaggacaacgccaagaacaccgtgtacctccagatgaacagcctgaagcctgaggacaccgccatgtactactgtgccggcaagaccacctatcctggctacggatgtggcctgggcagaagcgcctacaattattggggccagggcacccaagtgaccgtgtcatctggatccggcggcggaggatctggcggaggcggatctgggggcggaggctctttcgaacaggttcagctcaaagaatctggccccgtgctggtggccccaagccagacactgtctatcacctgtaccgtgtccggcttcagcctggcctcctacaacatccactgggtccgacagcctccaggcaaaggactggaatggctgggagtgatttgggctggcggcagcaccaactacaacagcgcactgatgagccggctgagcatcagcaaggacaacagcaagagccaggtgttcctccagatgaactccctccagaccgacgacaccgccatgtactactgcgccaagagaagcgacgactacagttggttcgcctactggggccagggcacactggttactgtgtctgcttctacgcgtatccagaaccctgatcctgccgtgtaccagctgcgggatagcaagagcagcgacaagagcgtgtgtctgttcaccgacttcgacagccagaccaacgtgtcccagagcaaggactccgacgtgtacatcaccgataagtgcgtgctggacatgcggagcatggacttcaagagcaactccgccgtggcctggtccaacaagtccgatttcgcctgcgccaacgccttcaacaacagcattatccccgaggacacattcttcccaagccccgagagcagctgcgacgtgaagctggtggaaaagagcttcgagacagacaccaacctgaacttccagaacctgagcgtgatcggcttcagaatcctgctgctgaaagtggccggctttaacctgctgatgaccctgcggctgtggtccagctaa

SEQ ID NO: 35890 - DNA, 1863 bp, synthetic construct
  source 1..1863: mol_type = other DNA
atggccttaccagtgaccgccttgctcctgccgctggccttgctgctccacgccgccaggccggagaacgtgctgacacagagccctgccatcatgagtgcctctccaggcgagaaagtgaccatgacctgtagagccagcagcagcgtgtccagcagctacctgcactggtatcagcagaagtccggcgcaagccccaaagtgtggatctacagcaccagcaatctggcctctggcgtgccaggcagattttctggctctggcagcggcacaagctacagcctgacaatcagctccgtggaagccgaagatgccgccacctactactgccagcagtacagcggctaccccatcacatttggagccggcaccaaggtggaagtgaagagactcgaggacctgaagcacgtgttcccacctgaggtggccgtgttcgagcctagcgacgccgagatctggcacacccagaaagccaccctcgtgtgcctggctaccggcttctaccccgaccatgtggaactgtcttggtgggtcaacggcaaagaggtgcacagcggcgtgtctaccgacccccagccactgaaagaacagcccgccctgaacgacagccggtactgcctgagcagcagactgagagtgtccgccaccttctggcagaacccccggaaccacttcagatgccaggtgcagttctacggcctgagcgagaacgacgagtggacccaggacagagccaagcccgtgacccagatcgtgtctgccgaagcctggggcagagccgattgcggctttaccagcgagagctaccagcagggcgtgctgagcgccaccatcctgtacgagatcctgctgggcaaggccaccctgtacgccgtgctggtgtctgccctggtgctgatggctatggtcaagcggaaggacagccggggaagggccaagcgatctggatctggagcaacaaacttctcactactcaaacaagcaggtgacgtggaggagaatcccgggcctactagtatggactggatttggcgcatccttttccttgtcggcgctgctaccggcgcgcattccttcgaacaggttcagctcaaagaatctggccccgtgctggtggccccaagccagacactgtctatcacctgtaccgtgtccggcttcagcctggcctcctacaacatccactgggtccgacagcctccaggcaaaggactggaatggctgggagtgatttgggctggcggcagcaccaactacaacagcgcactgatgagccggctgagcatcagcaaggacaacagcaagagccaggtgttcctccagatgaactccctccagaccgacgacaccgccatgtactactgcgccaagagaagcgacgactacagttggttcgcctactggggccagggcacactggttactgtgtctgcttctacgcgtatccagaaccctgatcctgccgtgtaccagctgcgggatagcaagagcagcgacaagagcgtgtgtctgttcaccgacttcgacagccagaccaacgtgtcccagagcaaggactccgacgtgtacatcaccgataagaccgtgctggacatgcggagcatggacttcaagagcaactccgccgtggcctggtccagcaagtccgatttcgcctgcgccaacgccttcaacaacagcattatccccgaggacacattcttcccaagccccgagatggcctgcgacgtgaagctggtggaaaagagcttcgagacagacaccaacctgaacttccagaacctgctcgtgatctggctgagaatcctgctgctgaaagtggccggctttaacctgctgatgaccctgcggctgtggtccagc

SEQ ID NO: 35891 - DNA, 1863 bp, synthetic construct
  source 1..1863: mol_type = other DNA
atggccttaccagtgaccgccttgctcctgccgctggccttgctgctccacgccgccaggccggagaacgtgctgacacagagccctgccatcatgagtgcctctccaggcgagaaagtgaccatgacctgtagagccagcagcagcgtgtccagcagctacctgcactggtatcagcagaagtccggcgcaagccccaaagtgtggatctacagcaccagcaatctggcctctggcgtgccaggcagattttctggctctggcagcggcacaagctacagcctgacaatcagctccgtggaagccgaagatgccgccacctactactgccagcagtacagcggctaccccatcacatttggagccggcaccaaggtggaagtgaagagactcgaggacctgaagcacgtgttcccacctgaggtggccgtgttcgagcctagcgacgccgagatctggcacacccagaaagccaccctcgtgtgcctggctaccggcttctaccccgaccatgtggaactgtcttggtgggtcaacggcaaagaggtgcacagcggcgtgtctaccgacccccagccactgaaagaacagcccgccctgaacgacagccggtactgcctgagcagcagactgagagtgtccgccaccttctggcagaacccccggaaccacttcagatgccaggtgcagttctacggcctgagcgagaacgacgagtggacccaggacagagccaagcccgtgacccagatcgtgtctgccgaagcctggggcagagccgattgcggctttaccagcgagagctaccagcagggcgtgctgagcgccaccatcctgtacgagatcctgctgggcaaggccaccctgtacgccgtgctggtgtctgccctggtgctgatggctatggtcaagcggaaggacagccggggaagggccaagcgatctggatctggagcaacaaacttctcactactcaaacaagcaggtgacgtggaggagaatcccgggcctactagtatggactggatttggcgcatccttttccttgtcggcgctgctaccggcgcgcattccttcgaacaggttcagctcaaagaatctggccccgtgctggtggccccaagccagacactgtctatcacctgtaccgtgtccggcttcagcctggcctcctacaacatccactgggtccgacagcctccaggcaaaggactggaatggctgggagtgatttgggctggcggcagcaccaactacaacagcgcactgatgagccggctgagcatcagcaaggacaacagcaagagccaggtgttcctccagatgaactccctccagaccgacgacaccgccatgtactactgcgccaagagaagcgacgactacagttggttcgcctactggggccagggcacactggttactgtgtctgcttctacgcgtatccagaaccctgatcctgccgtgtaccagctgcgggatagcaagagcagcgacaagagcgtgtgtctgttcaccgacttcgacagccagaccaacgtgtcccagagcaaggactccgacgtgtacatcaccgataagaccgtgctggacatgcggagcatggacttcaagagcaactccgccgtggcctggtccaccaagtccgatttcgcctgcgccaacgccttcaacaacagcattatccccgaggacacattcttcccaagccccgaggtggtgtgcgacgtgaagctggtggaaaagagcttcgagacagacaccaacctgaacttccagaacctggtggtgatcggcgccagaatcctgctgctgaaagtggccggctttaacctgctgatgaccctgcggctgtggtccagc

SEQ ID NO: 35892 - DNA, 1863 bp, synthetic construct
  source 1..1863: mol_type = other DNA
atggccttaccagtgaccgccttgctcctgccgctggccttgctgctccacgccgccaggccggagaacgtgctgacacagagccctgccatcatgagtgcctctccaggcgagaaagtgaccatgacctgtagagccagcagcagcgtgtccagcagctacctgcactggtatcagcagaagtccggcgcaagccccaaagtgtggatctacagcaccagcaatctggcctctggcgtgccaggcagattttctggctctggcagcggcacaagctacagcctgacaatcagctccgtggaagccgaagatgccgccacctactactgccagcagtacagcggctaccccatcacatttggagccggcaccaaggtggaagtgaagagactcgaggacctgaagaacgtgttcccacctgaggtggccgtgttcgagcctagcaaggccgagatcagcagaacccagaaagccaccctcgtgtgcctggctaccggcttctaccctcctcatgtggaactgtcttggtgggtcaacggcaaagaggtgcacgacggcgtgtgtaccgacccccagccactgaaagaacagcccgccctgaacgacagccggtactgcctgagcagcagactgagagtgtccgccaccttctggcagaacccccggaaccacttcagatgccaggtgcagttctacggcctgagcgagaacgacgagtggacccaggacagagccaagcccgtgacccagatcgtgtctgccgaagcctggggcagagccgattgcggctttaccagcgagagctaccagcagggcgtgctgagcgccaccatcctgtacgagatcctgctgggcaaggccaccctgtacgccgtgctggtgtctgccctggtgctgatggctatggtcaagcggaaggacagccggggaagggccaagcgatctggatctggagcaacaaacttctcactactcaaacaagcaggtgacgtggaggagaatcccgggcctactagtatggactggatttggcgcatccttttccttgtcggcgctgctaccggcgcgcattccttcgaacaggttcagctcaaagaatctggccccgtgctggtggccccaagccagacactgtctatcacctgtaccgtgtccggcttcagcctggcctcctacaacatccactgggtccgacagcctccaggcaaaggactggaatggctgggagtgatttgggctggcggcagcaccaactacaacagcgcactgatgagccggctgagcatcagcaaggacaacagcaagagccaggtgttcctccagatgaactccctccagaccgacgacaccgccatgtactactgcgccaagagaagcgacgactacagttggttcgcctactggggccagggcacactggttactgtgtctgcttctacgcgtatccagaaccctgatcctgccgtgtaccagctgcgggatagcaagagcagcgacaagttcgtgtgtctgttcaccgacttcgacagccagatcaacgtgtcccagagcaaggactccgacgtgtacatcaccgataagtgcgtgctggacatgcggagcatggacttcaagagcaactccgccgtggcctggtccaacaagtccgatttcacctgcgccaacgccttcaacaacagcattatccccgaggacacattcttcccaagccccgagagcagctgcgacgtgaagctggtggaaaagagcttcgagacagacaccaacctgaacttccagaacctgagcgtgatcggcttcagaatcctgctgctgaaagtggccggctttaacctgctgatgaccctgcggctgtggtccagc

SEQ ID NO: 35893 - DNA, 2289 bp, synthetic construct
  source 1..2289: mol_type = other DNA
atggccttaccagtgaccgccttgctcctgccgctggccttgctgctccacgccgccaggccggagaacgtgctgacacagagccctgccatcatgagtgcctctccaggcgagaaagtgaccatgacctgtagagccagcagcagcgtgtccagcagctacctgcactggtatcagcagaagtccggcgcaagccccaaagtgtggatctacagcaccagcaatctggcctctggcgtgccaggcagattttctggctctggcagcggcacaagctacagcctgacaatcagctccgtggaagccgaagatgccgccacctactactgccagcagtacagcggctaccccatcacatttggagccggcaccaaggtggaagtgaagagactcgaggacctgaagaacgtgttcccacctgaggtggccgtgttcgagcctagcgaggccgagatcagccacacccagaaagccaccctcgtgtgcctggctaccggcttctaccccgaccatgtggaactgtcttggtgggtcaacggcaaagaggtgcacagcggcgtgtgtaccgacccccagccactgaaagaacagcccgccctgaacgacagccggtactgcctgagcagcagactgagagtgtccgccaccttctggcagaacccccggaaccacttcagatgccaggtgcagttctacggcctgagcgagaacgacgagtggacccaggacagagccaagcccgtgacccagatcgtgtctgccgaagcctggggcagagccgattgcggctttaccagcgagagctaccagcagggcgtgctgagcgccaccatcctgtacgagatcctgctgggcaaggccaccctgtacgccgtgctggtgtctgccctggtgctgatggctatggtcaagcggaaggacagccggggaagggccaagcgatctggatctggagcaacaaacttctcactactcaaacaagcaggtgacgtggaggagaatcccgggcctactagtaccatggactggatttggcgcatccttttccttgtcggcgctgctaccggcgcccattccgggccccaggtgcagctccaagaaagcggacccggactggttaagccctctcagaccctgtctctgacctgcacagttagcggagccagcattaccacaggcgagtattattggaattggtttcggcagccaccaggcaaggggcttgagtggatgggtgctattgctgcctctggcagcaccacctactctcccagctttgagagcagaacctccatcagccgggacacctccaaaaaccagttctctctgaagctgtcctccgtgaccgctgctgacaccgccgtctattattgtggccggtctttcggcgtggcagctgtgaccacaggacagaacagaggccagggaacacttgtgaccgtgtcctctggatccggcggcggaggatctggcggaggcggatctgggggcggaggctctttcgaacaggttcagctcaaagaatctggccccgtgctggtggccccaagccagacactgtctatcacctgtaccgtgtccggcttcagcctggcctcctacaacatccactgggtccgacagcctccaggcaaaggactggaatggctgggagtgatttgggctggcggcagcaccaactacaacagcgcactgatgagccggctgagcatcagcaaggacaacagcaagagccaggtgttcctccagatgaactccctccagaccgacgacaccgccatgtactactgcgccaagagaagcgacgactacagttggttcgcctactggggccagggcacactggttactgtgtctgcttctacgcgtatccagaaccctgatcctgccgtgtaccagctgcgggatagcaagagcagcgacaagagcgtgtgtctgttcaccgacttcgacagccagaccaacgtgtcccagagcaaggactccgacgtgtacatcaccgataagtgcgtgctggacatgcggagcatggacttcaagagcaactccgccgtggcctggtccaacaagtccgatttcgcctgcgccaacgccttcaacaacagcattatccccgaggacacattcttcccaagccccgagagcagctgcgacgtgaagctggtggaaaagagcttcgagacagacaccaacctgaacttccagaacctgagcgtgatcggcttcagaatcctgctgctgaaagtggccggctttaacctgctgatgaccctgcggctgtggtccagc

SEQ ID NO: 35894 - DNA, 2712 bp, synthetic construct
  source 1..2712: mol_type = other DNA
atggccttaccagtgaccgccttgctcctgccgctggccttgctgctccacgccgccaggccgcaggttcagctgcaagagtctggccctggcctggtcaagcctagccaaacactgagcctgacctgtaccgtgtctggcggctctatcaccaccggcgagttctactggaactggttcagacagcctcctggcaaaggactggaatggatgggagccattgccgccagcggcagcacaacatacagccctagcttcgagagccggaccagcatcagcagagacaccagcaagaatcagttcagcctgaagctgagcagcgtgacagccgccgatacagccgtgtattactgcggcagatcctttggagtggccgccgtgacaaccggccagaatagaggacagggcaccctggtcacagtgtctagcggtaccggcggaggcggatctggcggcggaggtagcggtggcggaggatctgaattcgagaacgtgctgacacagagccctgccatcatgagtgcctctccaggcgagaaagtgaccatgacctgtagagccagcagcagcgtgtccagcagctacctgcactggtatcagcagaagtccggcgcaagccccaaagtgtggatctacagcaccagcaatctggcctctggcgtgccaggcagattttctggctctggcagcggcacaagctacagcctgacaatcagctccgtggaagccgaagatgccgccacctactactgccagcagtacagcggctaccccatcacatttggagccggcaccaaggtggaagtgaagagactcgagatccagaaccctgatcctgccgtgtaccagctgcgggatagcaagagcagcgacaagagcgtgtgtctgttcaccgacttcgacagccagaccaacgtgtcccagagcaaggactccgacgtgtacatcaccgataagtgcgtgctggacatgcggagcatggacttcaagagcaactccgccgtggcctggtccaacaagtccgatttcgcctgcgccaacgccttcaacaacagcattatccccgaggacacattcttcccaagcagcgacgtgccctgcgacgtgaagctggtggaaaagagcttcgagacagacaccaacctgaacttccagaacctgagcgtgatcggcttcagaatcctgctgctgaaagtggccggctttaacctgctgatgaccctgcggctgtggtccagccgcgccaagagaagcggatctggcgtgaagcagaccctgaatttcgacctgctgaagctggctggcgacgtggaatccaacccaggccctactagtaccatggactggatttggcgcatccttttccttgtcggcgctgctaccggcgcccattccgggcccgaagtgcaactggttgaatccggtggcggcctggtgcaacccggcggatctctcagacttagctgtgccgcctccggcagaaccttcacaatgggatggtacaggcaggctccagggaaagagagagagttcgtcgccgccatctctctgtctcccacactggcctactacgccgactctgtgaaaggccggttcaccatctccagagataatagcaagaacaccgtggtgctgcaaatgaactctctgagagccgaggatacagccctgtactattgtgccgctgaccggaagtccgtgatgagcatcagacccgattactggggacagggcacactggtcacagtgtctagtggatccggcggcggaggatctggcggaggcggatctgggggcggaggctctttcgaacaggttcagctcaaagaatctggccccgtgctggtggccccaagccagacactgtctatcacctgtaccgtgtccggcttcagcctggcctcctacaacatccactgggtccgacagcctccaggcaaaggactggaatggctgggagtgatttgggctggcggcagcaccaactacaacagcgcactgatgagccggctgagcatcagcaaggacaacagcaagagccaggtgttcctccagatgaactccctccagaccgacgacaccgccatgtactactgcgccaagagaagcgacgactacagttggttcgcctactggggccagggcacactggttactgtgtctgcttctacgcgtgaggacctgaagaacgtgttcccacctgaggtggccgtgttcgagcctagcaaggccgagatcgcccacacccagaaagccaccctcgtgtgcctggctaccggcttctaccccgaccatgtggaactgtcttggtgggtcaacggcaaagaggtgcacagcggcgtgtgtaccgacccccagccactgaaagaacagcccgccctgaacgacagccggtactgcctgagcagcagactgagagtgtccgccaccttctggcagaacccccggaaccacttcagatgccaggtgcagttctacggcctgagcgagaacgacgagtggacccaggacagagccaagcccgtgacccagatcgtgtctgccgaagcctggggcagagccgattgcggcatcaccagcgccagctaccaccagggcgtgctgagcgccaccatcctgtacgagatcctgctgggcaaggccaccctgtacgccgtgctggtgtctgccctggtgctgatggctatggtcaagcggaaggacagccgggga

SEQ ID NO: 35895 - DNA, 2301 bp, synthetic construct
  source 1..2301: mol_type = other DNA
atggccttaccagtgaccgccttgctcctgccgctggccttgctgctccacgccgccaggccgcaggttcagctgcaagagtctggccctggcctggtcaagcctagccaaacactgagcctgacctgtaccgtgtctggcggctctatcaccaccggcgagttctactggaactggttcagacagcctcctggcaaaggactggaatggatgggagccattgccgccagcggcagcacaacatacagccctagcttcgagagccggaccagcatcagcagagacaccagcaagaatcagttcagcctgaagctgagcagcgtgacagccgccgatacagccgtgtattactgcggcagatcctttggagtggccgccgtgacaaccggccagaatagaggacagggcaccctggtcacagtgtctagcggtaccggcggaggcggatctggcggcggaggtagcggtggcggaggatctgaattcgagaacgtgctgacacagagccctgccatcatgagtgcctctccaggcgagaaagtgaccatgacctgtagagccagcagcagcgtgtccagcagctacctgcactggtatcagcagaagtccggcgcaagccccaaagtgtggatctacagcaccagcaatctggcctctggcgtgccaggcagattttctggctctggcagcggcacaagctacagcctgacaatcagctccgtggaagccgaagatgccgccacctactactgccagcagtacagcggctaccccatcacatttggagccggcaccaaggtggaagtgaagagactcgagatccagaaccctgatcctgccgtgtaccagctgcgggatagcaagagcagcgacaagagcgtgtgtctgttcaccgacttcgacagccagaccaacgtgtcccagagcaaggactccgacgtgtacatcaccgataagtgcgtgctggacatgcggagcatggacttcaagagcaactccgccgtggcctggtccaacaagtccgatttcgcctgcgccaacgccttcaacaacagcattatccccgaggacacattcttcccaagcagcgacgtgccctgcgacgtgaagctggtggaaaagagcttcgagacagacaccaacctgaacttccagaacctgagcgtgatcggcttcagaatcctgctgctgaaagtggccggctttaacctgctgatgaccctgcggctgtggtccagccgcgccaagagaagcggatctggcgtgaagcagaccctgaatttcgacctgctgaagctggctggcgacgtggaatccaacccaggccctactagtaccatggactggatttggcgcatccttttccttgtcggcgctgctaccggcgcccattccttcgaacaggttcagctcaaagaatctggccccgtgctggtggccccaagccagacactgtctatcacctgtaccgtgtccggcttcagcctggcctcctacaacatccactgggtccgacagcctccaggcaaaggactggaatggctgggagtgatttgggctggcggcagcaccaactacaacagcgcactgatgagccggctgagcatcagcaaggacaacagcaagagccaggtgttcctccagatgaactccctccagaccgacgacaccgccatgtactactgcgccaagagaagcgacgactacagttggttcgcctactggggccagggcacactggttactgtgtctgcttctacgcgtgaggacctgaagaacgtgttcccacctgaggtggccgtgttcgagcctagcaaggccgagatcgcccacacccagaaagccaccctcgtgtgcctggctaccggcttctaccccgaccatgtggaactgtcttggtgggtcaacggcaaagaggtgcacagcggcgtgtgtaccgacccccagccactgaaagaacagcccgccctgaacgacagccggtactgcctgagcagcagactgagagtgtccgccaccttctggcagaacccccggaaccacttcagatgccaggtgcagttctacggcctgagcgagaacgacgagtggacccaggacagagccaagcccgtgacccagatcgtgtctgccgaagcctggggcagagccgattgcggcatcaccagcgccagctaccaccagggcgtgctgagcgccaccatcctgtacgagatcctgctgggcaaggccaccctgtacgccgtgctggtgtctgccctggtgctgatggctatggtcaagcggaaggacagccgggga

SEQ ID NO: 35896 - DNA, 2700 bp, synthetic construct
  source 1..2700: mol_type = other DNA
atggccttaccagtgaccgccttgctcctgccgctggccttgctgctccacgccgccaggccggaagtgcagctggttgaatctggcggaggactggttcaggctggcggatctctgagactgtcttgtgccgccagcggcagaacctttagcatgggctggtttagacaggcccctggcaaagagagagagttcgtcgccgccatcacatactctggcggcagcccttactacgccgactctgtgaagggcagattcaccatcagccgggacaacgccaagaacaccgtgtacctccagatgaacagcctgaagcctgaggacaccgccgtgtactactgcgccgccaatccaacatacggcagcgactggaacgccgagaattggggccagggaacccaagtgacagtgtctagcggtaccggcggaggcggatctggcggcggaggtagcggtggcggaggatctgaattcgagaacgtgctgacacagagccctgccatcatgagtgcctctccaggcgagaaagtgaccatgacctgtagagccagcagcagcgtgtccagcagctacctgcactggtatcagcagaagtccggcgcaagccccaaagtgtggatctacagcaccagcaatctggcctctggcgtgccaggcagattttctggctctggcagcggcacaagctacagcctgacaatcagctccgtggaagccgaagatgccgccacctactactgccagcagtacagcggctaccccatcacatttggagccggcaccaaggtggaagtgaagagactcgaggacctgaagaacgtgttcccacctgaggtggccgtgttcgagcctagcgaggccgagatcagccacacccagaaagccaccctcgtgtgcctggctaccggcttctaccccgaccatgtggaactgtcttggtgggtcaacggcaaagaggtgcacagcggcgtgtgtaccgacccccagccactgaaagaacagcccgccctgaacgacagccggtactgcctgagcagcagactgagagtgtccgccaccttctggcagaacccccggaaccacttcagatgccaggtgcagttctacggcctgagcgagaacgacgagtggacccaggacagagccaagcccgtgacccagatcgtgtctgccgaagcctggggcagagccgattgcggctttaccagcgagagctaccagcagggcgtgctgagcgccaccatcctgtacgagatcctgctgggcaaggccaccctgtacgccgtgctggtgtctgccctggtgctgatggctatggtcaagcggaaggacagccggggaagggccaagcgatctggatctggagcaacaaacttctcactactcaaacaagcaggtgacgtggaggagaatcccgggcctactagtaccatggactggatttggcgcatccttttccttgtcggcgctgctaccggcgcccattccgggccccaggtgcagctccaagaaagcggacccggactggttaagccctctcagaccctgtctctgacctgcacagttagcggagccagcattaccacaggcgagtattattggaattggtttcggcagccaccaggcaaggggcttgagtggatgggtgctattgctgcctctggcagcaccacctactctcccagctttgagagcagaacctccatcagccgggacacctccaaaaaccagttctctctgaagctgtcctccgtgaccgctgctgacaccgccgtctattattgtggccggtctttcggcgtggcagctgtgaccacaggacagaacagaggccagggaacacttgtgaccgtgtcctctggatccggcggcggaggatctggcggaggcggatctgggggcggaggctctttcgaacaggttcagctcaaagaatctggccccgtgctggtggccccaagccagacactgtctatcacctgtaccgtgtccggcttcagcctggcctcctacaacatccactgggtccgacagcctccaggcaaaggactggaatggctgggagtgatttgggctggcggcagcaccaactacaacagcgcactgatgagccggctgagcatcagcaaggacaacagcaagagccaggtgttcctccagatgaactccctccagaccgacgacaccgccatgtactactgcgccaagagaagcgacgactacagttggttcgcctactggggccagggcacactggttactgtgtctgcttctacgcgtatccagaaccctgatcctgccgtgtaccagctgcgggatagcaagagcagcgacaagagcgtgtgtctgttcaccgacttcgacagccagaccaacgtgtcccagagcaaggactccgacgtgtacatcaccgataagtgcgtgctggacatgcggagcatggacttcaagagcaactccgccgtggcctggtccaacaagtccgatttcgcctgcgccaacgccttcaacaacagcattatccccgaggacacattcttcccaagccccgagagcagctgcgacgtgaagctggtggaaaagagcttcgagacagacaccaacctgaacttccagaacctgagcgtgatcggcttcagaatcctgctgctgaaagtggccggctttaacctgctgatgaccctgcggctgtggtccagc

SEQ ID NO: 35897 - DNA, 2721 bp, synthetic construct
  source 1..2721: mol_type = other DNA
atggccttaccagtgaccgccttgctcctgccgctggccttgctgctccacgccgccaggccggaagtgcagctggttgaatctggcggaggactggttcaggctggcggatctctgagactgtcttgtgccgccagcggcagaacctttagcatgggctggtttagacaggcccctggcaaagagagagagttcgtcgccgccatcacatactctggcggcagcccttactacgccgactctgtgaagggcagattcaccatcagccgggacaacgccaagaacaccgtgtacctccagatgaacagcctgaagcctgaggacaccgccgtgtactactgcgccgccaatccaacatacggcagcgactggaacgccgagaattggggccagggaacccaagtgacagtgtctagcggtaccggcggaggcggatctggcggcggaggtagcggtggcggaggatctgaattcgagaacgtgctgacacagagccctgccatcatgagtgcctctccaggcgagaaagtgaccatgacctgtagagccagcagcagcgtgtccagcagctacctgcactggtatcagcagaagtccggcgcaagccccaaagtgtggatctacagcaccagcaatctggcctctggcgtgccaggcagattttctggctctggcagcggcacaagctacagcctgacaatcagctccgtggaagccgaagatgccgccacctactactgccagcagtacagcggctaccccatcacatttggagccggcaccaaggtggaagtgaagagactcgagatccagaaccctgatcctgccgtgtaccagctgcgggatagcaagagcagcgacaagagcgtgtgtctgttcaccgacttcgacagccagaccaacgtgtcccagagcaaggactccgacgtgtacatcaccgataagtgcgtgctggacatgcggagcatggacttcaagagcaactccgccgtggcctggtccaacaagtccgatttcgcctgcgccaacgccttcaacaacagcattatccccgaggacacattcttcccaagcagcgacgtgccctgcgacgtgaagctggtggaaaagagcttcgagacagacaccaacctgaacttccagaacctgagcgtgatcggcttcagaatcctgctgctgaaagtggccggctttaacctgctgatgaccctgcggctgtggtccagccgcgccaagagaagcggatctggcgtgaagcagaccctgaatttcgacctgctgaagctggctggcgacgtggaatccaacccaggccctactagtaccatggactggatttggcgcatccttttccttgtcggcgctgctaccggcgcccattccgggccccaggtgcagctggttgaatctggcggaggactggttcagcctggcggatctctgagactgtcttgtgccgccagcggcaacatcaacagcagaaactgcatgggctggttcagacaggcccctggcaagggaagagaaggcgtggcagctatcggccaagtgaccggcagaacctactacgtggacagcgtgaagggcagattcaccatcagcctggacaacagcaagaacaccctgtacctccagatgaacagcctgagagccgaggacaccgccgtgtactattgtgctgctgcccctggctgtctgctgtctgcacttagaagcgccgactacagaaactggggccagggcacactggtcaccgtttcttctggatccggcggcggaggatctggcggaggcggatctgggggcggaggctctttcgaacaggttcagctcaaagaatctggccccgtgctggtggccccaagccagacactgtctatcacctgtaccgtgtccggcttcagcctggcctcctacaacatccactgggtccgacagcctccaggcaaaggactggaatggctgggagtgatttgggctggcggcagcaccaactacaacagcgcactgatgagccggctgagcatcagcaaggacaacagcaagagccaggtgttcctccagatgaactccctccagaccgacgacaccgccatgtactactgcgccaagagaagcgacgactacagttggttcgcctactggggccagggcacactggttactgtgtctgcttctacgcgtgaggacctgaagaacgtgttcccacctgaggtggccgtgttcgagcctagcaaggccgagatcgcccacacccagaaagccaccctcgtgtgcctggctaccggcttctaccccgaccatgtggaactgtcttggtgggtcaacggcaaagaggtgcacagcggcgtgtgtaccgacccccagccactgaaagaacagcccgccctgaacgacagccggtactgcctgagcagcagactgagagtgtccgccaccttctggcagaacccccggaaccacttcagatgccaggtgcagttctacggcctgagcgagaacgacgagtggacccaggacagagccaagcccgtgacccagatcgtgtctgccgaagcctggggcagagccgattgcggcatcaccagcgccagctaccaccagggcgtgctgagcgccaccatcctgtacgagatcctgctgggcaaggccaccctgtacgccgtgctggtgtctgccctggtgctgatggctatggtcaagcggaaggacagccgggga

SEQ ID NO: 35898 - DNA, 2709 bp, synthetic construct
  source 1..2709: mol_type = other DNA
atggccttaccagtgaccgccttgctcctgccgctggccttgctgctccacgccgccaggccggaagtgcagctggttgaatctggcggaggactggttcaggctggcggatctctgagactgtcttgtgccgccagcggcagaacctttagcatgggctggtttagacaggcccctggcaaagagagagagttcgtcgccgccatcacatactctggcggcagcccttactacgccgactctgtgaagggcagattcaccatcagccgggacaacgccaagaacaccgtgtacctccagatgaacagcctgaagcctgaggacaccgccgtgtactactgcgccgccaatccaacatacggcagcgactggaacgccgagaattggggccagggaacccaagtgacagtgtctagcggtaccggcggaggcggatctggcggcggaggtagcggtggcggaggatctgaattcgagaacgtgctgacacagagccctgccatcatgagtgcctctccaggcgagaaagtgaccatgacctgtagagccagcagcagcgtgtccagcagctacctgcactggtatcagcagaagtccggcgcaagccccaaagtgtggatctacagcaccagcaatctggcctctggcgtgccaggcagattttctggctctggcagcggcacaagctacagcctgacaatcagctccgtggaagccgaagatgccgccacctactactgccagcagtacagcggctaccccatcacatttggagccggcaccaaggtggaagtgaagagactcgaggacctgaagaacgtgttcccacctgaggtggccgtgttcgagcctagcgaggccgagatcagccacacccagaaagccaccctcgtgtgcctggctaccggcttctaccccgaccatgtggaactgtcttggtgggtcaacggcaaagaggtgcacagcggcgtgtgtaccgacccccagccactgaaagaacagcccgccctgaacgacagccggtactgcctgagcagcagactgagagtgtccgccaccttctggcagaacccccggaaccacttcagatgccaggtgcagttctacggcctgagcgagaacgacgagtggacccaggacagagccaagcccgtgacccagatcgtgtctgccgaagcctggggcagagccgattgcggctttaccagcgagagctaccagcagggcgtgctgagcgccaccatcctgtacgagatcctgctgggcaaggccaccctgtacgccgtgctggtgtctgccctggtgctgatggctatggtcaagcggaaggacagccggggaagggccaagcgatctggatctggagcaacaaacttctcactactcaaacaagcaggtgacgtggaggagaatcccgggcctactagtaccatggactggatttggcgcatccttttccttgtcggcgctgctaccggcgcccattccgggccccaggtgcagctggttgaatctggcggaggactggttcagcctggcggatctctgagactgtcttgtgccgccagcggcaacatcaacagcagaaactgcatgggctggttcagacaggcccctggcaagggaagagaaggcgtggcagctatcggccaagtgaccggcagaacctactacgtggacagcgtgaagggcagattcaccatcagcctggacaacagcaagaacaccctgtacctccagatgaacagcctgagagccgaggacaccgccgtgtactattgtgctgctgcccctggctgtctgctgtctgcacttagaagcgccgactacagaaactggggccagggcacactggtcaccgtttcttctggatccggcggcggaggatctggcggaggcggatctgggggcggaggctctttcgaacaggttcagctcaaagaatctggccccgtgctggtggccccaagccagacactgtctatcacctgtaccgtgtccggcttcagcctggcctcctacaacatccactgggtccgacagcctccaggcaaaggactggaatggctgggagtgatttgggctggcggcagcaccaactacaacagcgcactgatgagccggctgagcatcagcaaggacaacagcaagagccaggtgttcctccagatgaactccctccagaccgacgacaccgccatgtactactgcgccaagagaagcgacgactacagttggttcgcctactggggccagggcacactggttactgtgtctgcttctacgcgtatccagaaccctgatcctgccgtgtaccagctgcgggatagcaagagcagcgacaagagcgtgtgtctgttcaccgacttcgacagccagaccaacgtgtcccagagcaaggactccgacgtgtacatcaccgataagtgcgtgctggacatgcggagcatggacttcaagagcaactccgccgtggcctggtccaacaagtccgatttcgcctgcgccaacgccttcaacaacagcattatccccgaggacacattcttcccaagccccgagagcagctgcgacgtgaagctggtggaaaagagcttcgagacagacaccaacctgaacttccagaacctgagcgtgatcggcttcagaatcctgctgctgaaagtggccggctttaacctgctgatgaccctgcggctgtggtccagc

SEQ ID NO: 35899 - DNA, 2709 bp, synthetic construct
  source 1..2709: mol_type = other DNA
atggccttaccagtgaccgccttgctcctgccgctggccttgctgctccacgccgccaggccggaagtgcaactggttgaatccggtggcggcctggtgcaagcaggcggatctctcagacttagctgtgccgcctccggcagaaccttcacaatgggatggtttaggcaggctccagggaaagagagagagttcgtcgccgccatctctctgtctcccacactggcctactacgccgactctgtgaaaggccggttcaccatctccagagataatgccaagaacaccgtggtgctgcaaatgaactctctgaaacccgaggatacagccctgtactattgtgccgctgaccggaagtccgtgatgagcatcagacccgattactggggacagggcacacaagtcacagtgtcctctggtaccggcggaggcggatctggcggcggaggtagcggtggcggaggatctgaattcgagaacgtgctgacacagagccctgccatcatgagtgcctctccaggcgagaaagtgaccatgacctgtagagccagcagcagcgtgtccagcagctacctgcactggtatcagcagaagtccggcgcaagccccaaagtgtggatctacagcaccagcaatctggcctctggcgtgccaggcagattttctggctctggcagcggcacaagctacagcctgacaatcagctccgtggaagccgaagatgccgccacctactactgccagcagtacagcggctaccccatcacatttggagccggcaccaaggtggaagtgaagagactcgaggacctgaagaacgtgttcccacctgaggtggccgtgttcgagcctagcgaggccgagatcagccacacccagaaagccaccctcgtgtgcctggctaccggcttctaccccgaccatgtggaactgtcttggtgggtcaacggcaaagaggtgcacagcggcgtgtgtaccgacccccagccactgaaagaacagcccgccctgaacgacagccggtactgcctgagcagcagactgagagtgtccgccaccttctggcagaacccccggaaccacttcagatgccaggtgcagttctacggcctgagcgagaacgacgagtggacccaggacagagccaagcccgtgacccagatcgtgtctgccgaagcctggggcagagccgattgcggctttaccagcgagagctaccagcagggcgtgctgagcgccaccatcctgtacgagatcctgctgggcaaggccaccctgtacgccgtgctggtgtctgccctggtgctgatggctatggtcaagcggaaggacagccggggaagggccaagcgatctggatctggagcaacaaacttctcactactcaaacaagcaggtgacgtggaggagaatcccgggcctactagtaccatggactggatttggcgcatccttttccttgtcggcgctgctaccggcgcccattccgggccccaggtgcagctggttgaatctggcggaggactggttcagcctggcggatctctgagactgtcttgtgccgccagcggcaacatcaacagcagaaactgcatgggctggttcagacaggcccctggcaagggaagagaaggcgtggcagctatcggccaagtgaccggcagaacctactacgtggacagcgtgaagggcagattcaccatcagcctggacaacagcaagaacaccctgtacctccagatgaacagcctgagagccgaggacaccgccgtgtactattgtgctgctgcccctggctgtctgctgtctgcacttagaagcgccgactacagaaactggggccagggcacactggtcaccgtttcttctggatccggcggcggaggatctggcggaggcggatctgggggcggaggctctttcgaacaggttcagctcaaagaatctggccccgtgctggtggccccaagccagacactgtctatcacctgtaccgtgtccggcttcagcctggcctcctacaacatccactgggtccgacagcctccaggcaaaggactggaatggctgggagtgatttgggctggcggcagcaccaactacaacagcgcactgatgagccggctgagcatcagcaaggacaacagcaagagccaggtgttcctccagatgaactccctccagaccgacgacaccgccatgtactactgcgccaagagaagcgacgactacagttggttcgcctactggggccagggcacactggttactgtgtctgcttctacgcgtatccagaaccctgatcctgccgtgtaccagctgcgggatagcaagagcagcgacaagagcgtgtgtctgttcaccgacttcgacagccagaccaacgtgtcccagagcaaggactccgacgtgtacatcaccgataagtgcgtgctggacatgcggagcatggacttcaagagcaactccgccgtggcctggtccaacaagtccgatttcgcctgcgccaacgccttcaacaacagcattatccccgaggacacattcttcccaagccccgagagcagctgcgacgtgaagctggtggaaaagagcttcgagacagacaccaacctgaacttccagaacctgagcgtgatcggcttcagaatcctgctgctgaaagtggccggctttaacctgctgatgaccctgcggctgtggtccagc

SEQ ID NO: 35900 - DNA, 2721 bp, synthetic construct
  source 1..2721: mol_type = other DNA
atggccttaccagtgaccgccttgctcctgccgctggccttgctgctccacgccgccaggccgcaggttcagctgcaagagtctggccctggcctggtcaagcctagccaaacactgagcctgacctgtaccgtgtctggcggctctatcaccaccggcgagttctactggaactggttcagacagcctcctggcaaaggactggaatggatgggagccattgccgccagcggcagcacaacatacagccctagcttcgagagccggaccagcatcagcagagacaccagcaagaatcagttcagcctgaagctgagcagcgtgacagccgccgatacagccgtgtattactgcggcagatcctttggagtggccgccgtgacaaccggccagaatagaggacagggcaccctggtcacagtgtctagcggtaccggcggaggcggatctggcggcggaggtagcggtggcggaggatctgaattcgagaacgtgctgacacagagccctgccatcatgagtgcctctccaggcgagaaagtgaccatgacctgtagagccagcagcagcgtgtccagcagctacctgcactggtatcagcagaagtccggcgcaagccccaaagtgtggatctacagcaccagcaatctggcctctggcgtgccaggcagattttctggctctggcagcggcacaagctacagcctgacaatcagctccgtggaagccgaagatgccgccacctactactgccagcagtacagcggctaccccatcacatttggagccggcaccaaggtggaagtgaagagactcgaggacctgaagaacgtgttcccacctgaggtggccgtgttcgagcctagcgaggccgagatcagccacacccagaaagccaccctcgtgtgcctggctaccggcttctaccccgaccatgtggaactgtcttggtgggtcaacggcaaagaggtgcacagcggcgtgtgtaccgacccccagccactgaaagaacagcccgccctgaacgacagccggtactgcctgagcagcagactgagagtgtccgccaccttctggcagaacccccggaaccacttcagatgccaggtgcagttctacggcctgagcgagaacgacgagtggacccaggacagagccaagcccgtgacccagatcgtgtctgccgaagcctggggcagagccgattgcggctttaccagcgagagctaccagcagggcgtgctgagcgccaccatcctgtacgagatcctgctgggcaaggccaccctgtacgccgtgctggtgtctgccctggtgctgatggctatggtcaagcggaaggacagccggggaagggccaagcgatctggatctggagcaacaaacttctcactactcaaacaagcaggtgacgtggaggagaatcccgggcctactagtaccatggactggatttggcgcatccttttccttgtcggcgctgctaccggcgcccattccgggccccaggtgcagctggttgaatctggcggaggactggttcagcctggcggatctctgagactgtcttgtgccgccagcggcaacatcaacagcagaaactgcatgggctggttcagacaggcccctggcaagggaagagaaggcgtggcagctatcggccaagtgaccggcagaacctactacgtggacagcgtgaagggcagattcaccatcagcctggacaacagcaagaacaccctgtacctccagatgaacagcctgagagccgaggacaccgccgtgtactattgtgctgctgcccctggctgtctgctgtctgcacttagaagcgccgactacagaaactggggccagggcacactggtcaccgtttcttctggatccggcggcggaggatctggcggaggcggatctgggggcggaggctctttcgaacaggttcagctcaaagaatctggccccgtgctggtggccccaagccagacactgtctatcacctgtaccgtgtccggcttcagcctggcctcctacaacatccactgggtccgacagcctccaggcaaaggactggaatggctgggagtgatttgggctggcggcagcaccaactacaacagcgcactgatgagccggctgagcatcagcaaggacaacagcaagagccaggtgttcctccagatgaactccctccagaccgacgacaccgccatgtactactgcgccaagagaagcgacgactacagttggttcgcctactggggccagggcacactggttactgtgtctgcttctacgcgtatccagaaccctgatcctgccgtgtaccagctgcgggatagcaagagcagcgacaagagcgtgtgtctgttcaccgacttcgacagccagaccaacgtgtcccagagcaaggactccgacgtgtacatcaccgataagtgcgtgctggacatgcggagcatggacttcaagagcaactccgccgtggcctggtccaacaagtccgatttcgcctgcgccaacgccttcaacaacagcattatccccgaggacacattcttcccaagccccgagagcagctgcgacgtgaagctggtggaaaagagcttcgagacagacaccaacctgaacttccagaacctgagcgtgatcggcttcagaatcctgctgctgaaagtggccggctttaacctgctgatgaccctgcggctgtggtccagc

SEQ ID NO: 35901 - DNA, 1470 bp, synthetic construct
  source 1..1470: mol_type = other DNA
atggccttaccagtgaccgccttgctcctgccgctggccttgctgctccacgccgccaggccggagatcgtgctgacacagtctcccgccacactgtcactgtctccaggcgaaagagccacactgagctgtagagccagccagagcgtgtcctcttacctggcctggtatcagcagaagcctggacaggctccccggctgctgatctacgatgccagcaatagagccacaggcatccccgccagattttctggctctggcagcggcaccgatttcaccctgaccataagcagcctggaacctgaggacttcgccgtgtactactgccagcagagaagcaactggcctcctacattcggccagggcaccaaggtggaaatcaaaggcggaggcggaagtggaggcggaggatctggcggcggaggctctcaactccagctgcaagagtctggccccggactggtcaagcctagcgaaacactgagcctgacctgtaccgtgtctggcggcagcatcagcagcagctcttattggtggggctggaccagacagcctcctggcagaggactggaatggatcggcaccatgtactacagcggcaacatctactacaaccccagcctccagagccgggccaccatctctgtggacaccagcaagaaccagttcagcctgaagctgagcagcgtgacagccgccgataccgccgtgtattattgcgccagacatgtgggctacagctacggcagacggttctggtacttcgacctgtggggcagaggcaccctggtcacagtttcttctacgcgtaaaattgaagttatgtatcctcctccttacctagacaatgagaagagcaatggaaccattatccatgtgaaagggaaacacctttgtccaagtcccctatttcccggaccttctaagcccttttgggtgctggtggtggttgggggagtcctggcttgctatagcttgctagtaacagtggcctttattattttctgggtgaggagtaagaggagcaggctcctgcacagtgactacatgaacatgactccacgccgccccggacccacccgcaagcattaccagccctatgccccaccacgcgacttcgcagcctatcgctccagagtgaagttcagcaggagcgcagacgcccccgcgtaccagcagggccagaaccagctctataacgagctcaatctaggacgaagagaggagtacgatgttttggacaagagacgtggccgggaccctgagatggggggaaagccgagaaggaagaaccctcaggaaggcctgtacaatgaactgcagaaagataagatggcggaggcctacagtgagattgggatgaaaggcgagcgccggaggggcaaggggcacgatggcctttaccagggtctcagtacagccaccaaggacacctacgacgcccttcacatgcaggccctgccccctcgc

SEQ ID NO: 35902 - DNA, 1488 bp, synthetic construct
  source 1..1488: mol_type = other DNA
atggccttaccagtgaccgccttgctcctgccgctggccttgctgctccacgccgccaggccggagatcgtgctgacacagtctcccgccacactgtcactgtctccaggcgaaagagccacactgagctgtagagccagccagagcgtgtcctcttacctggcctggtatcagcagaagcctggacaggctccccggctgctgatctacgatgccagcaatagagccacaggcatccccgccagattttctggctctggcagcggcaccgatttcaccctgaccataagcagcctggaacctgaggacttcgccgtgtactactgccagcagagaagcaactggcctcctacattcggccagggcaccaaggtggaaatcaaaggcggaggcggaagtggaggcggaggatctggcggcggaggctctcaactccagctgcaagagtctggccccggactggtcaagcctagcgaaacactgagcctgacctgtaccgtgtctggcggcagcatcagcagcagctcttattggtggggctggaccagacagcctcctggcagaggactggaatggatcggcaccatgtactacagcggcaacatctactacaaccccagcctccagagccgggccaccatctctgtggacaccagcaagaaccagttcagcctgaagctgagcagcgtgacagccgccgataccgccgtgtattattgcgccagacatgtgggctacagctacggcagacggttctggtacttcgacctgtggggcagaggcaccctggtcacagtttcttctacgcgtgcgaagcccaccacgacgccagcgccgcgaccaccaacaccggcgcccaccatcgcgtcgcagcccctgtccctgcgcccagaggcgtgccggccagcggcggggggcgcagtgcacacgagggggctggacttcgcctgtgacatctacatctgggcgcccttggccgggacttgtggggtccttctcctgtcactggttatcaccctttactgcaaacggggcagaaagaaactcctgtatatattcaaacaaccatttatgagaccagtacaaactactcaagaggaagatggctgtagctgccgatttccagaagaagaagaaggaggatgtgaactgagagtgaagttcagcaggagcgcagacgcccccgcgtaccagcagggccagaaccagctctataacgagctgaatctaggacgaagagaggagtacgatgttttggacaagagacgtggccgggaccctgagatggggggaaagccgagaaggaagaaccctcaggaaggcctgtacaatgaactgcagaaagataagatggcggaggcctacagtgagattgggatgaaaggcgagcgccggaggggcaaggggcacgatggcctttaccagggtctcagtacagccaccaaggacacctacgacgcccttcacatgcaggccctgccccctcgc

SEQ ID NO: 35903 - DNA, 1488 bp, synthetic construct
  source 1..1488: mol_type = other DNA
atggccttaccagtgaccgccttgctcctgccgctggccttgctgctccacgccgccaggccgcaactccagctgcaagagtctggccccggactggtcaagcctagcgaaacactgagcctgacctgtaccgtgtctggcggcagcatcagcagcagctcttattggtggggctggaccagacagcctcctggcagaggactggaatggatcggcaccatgtactacagcggcaacatctactacaaccccagcctccagagccgggccaccatctctgtggacaccagcaagaaccagttcagcctgaagctgagcagcgtgacagccgccgataccgccgtgtattattgcgccagacatgtgggctacagctacggcagacggttctggtacttcgacctgtggggcagaggcaccctggtcacagtttcttctggcggaggcggaagtggaggcggaggatctggcggcggaggctctgagatcgtgctgacacagtctcccgccacactgtcactgtctccaggcgaaagagccacactgagctgtagagccagccagagcgtgtcctcttacctggcctggtatcagcagaagcctggacaggctccccggctgctgatctacgatgccagcaatagagccacaggcatccccgccagattttctggctctggcagcggcaccgatttcaccctgaccataagcagcctggaacctgaggacttcgccgtgtactactgccagcagagaagcaactggcctcctacattcggccagggcaccaaggtggaaatcaaaacgcgtgcgaagcccaccacgacgccagcgccgcgaccaccaacaccggcgcccaccatcgcgtcgcagcccctgtccctgcgcccagaggcgtgccggccagcggcggggggcgcagtgcacacgagggggctggacttcgcctgtgacatctacatctgggcgcccttggccgggacttgtggggtccttctcctgtcactggttatcaccctttactgcaaacggggcagaaagaaactcctgtatatattcaaacaaccatttatgagaccagtacaaactactcaagaggaagatggctgtagctgccgatttccagaagaagaagaaggaggatgtgaactgagagtgaagttcagcaggagcgcagacgcccccgcgtaccagcagggccagaaccagctctataacgagctgaatctaggacgaagagaggagtacgatgttttggacaagagacgtggccgggaccctgagatggggggaaagccgagaaggaagaaccctcaggaaggcctgtacaatgaactgcagaaagataagatggcggaggcctacagtgagattgggatgaaaggcgagcgccggaggggcaaggggcacgatggcctttaccagggtctcagtacagccaccaaggacacctacgacgcccttcacatgcaggccctgccccctcgc

SEQ ID NO: 35904 - DNA, 1887 bp, synthetic construct
  source 1..1887: mol_type = other DNA
atggccttaccagtgaccgccttgctcctgccgctggccttgctgctccacgccgccaggccggagatcgtgctgacacagtctcccgccacactgtcactgtctccaggcgaaagagccacactgagctgtagagccagccagagcgtgtcctcttacctggcctggtatcagcagaagcctggacaggctccccggctgctgatctacgatgccagcaatagagccacaggcatccccgccagattttctggctctggcagcggcaccgatttcaccctgaccataagcagcctggaacctgaggacttcgccgtgtactactgccagcagagaagcaactggcctcctacattcggccagggcaccaaggtggaaatcaaactcgagatccagaaccctgatcctgccgtgtaccagctgcgggatagcaagagcagcgacaagagcgtgtgtctgttcaccgacttcgacagccagaccaacgtgtcccagagcaaggactccgacgtgtacatcaccgataagtgcgtgctggacatgcggagcatggacttcaagagcaactccgccgtggcctggtccaacaagtccgatttcgcctgcgccaacgccttcaacaacagcattatccccgaggacacattcttcccaagcagcgacgtgccctgcgacgtgaagctggtggaaaagagcttcgagacagacaccaacctgaacttccagaacctgagcgtgatcggcttcagaatcctgctgctgaaagtggccggctttaacctgctgatgaccctgcggctgtggtccagccgcgccaagagaagcggatctggcgtgaagcagaccctgaatttcgacctgctgaagctggctggcgacgtggaatccaacccaggccctactagtatggactggatttggcgcatccttttccttgtcggcgctgctaccggcgcgcattccttcgaacaactccagctgcaagagtctggccccggactggtcaagcctagcgaaacactgagcctgacctgtaccgtgtctggcggcagcatcagcagcagctcttattggtggggctggaccagacagcctcctggcagaggactggaatggatcggcaccatgtactacagcggcaacatctactacaaccccagcctccagagccgggccaccatctctgtggacaccagcaagaaccagttcagcctgaagctgagcagcgtgacagccgccgataccgccgtgtattattgcgccagacatgtgggctacagctacggcagacggttctggtacttcgacctgtggggcagaggcaccctggtcacagtttcttctacgcgtgaggacctgaagaacgtgttcccacctgaggtggccgtgttcgagcctagcaaggccgagatcgcccacacccagaaagccaccctcgtgtgcctggctaccggcttctaccccgaccatgtggaactgtcttggtgggtcaacggcaaagaggtgcacagcggcgtgtgtaccgacccccagccactgaaagaacagcccgccctgaacgacagccggtactgcctgagcagcagactgagagtgtccgccaccttctggcagaacccccggaaccacttcagatgccaggtgcagttctacggcctgagcgagaacgacgagtggacccaggacagagccaagcccgtgacccagatcgtgtctgccgaagcctggggcagagccgattgcggcatcaccagcgccagctaccaccagggcgtgctgagcgccaccatcctgtacgagatcctgctgggcaaggccaccctgtacgccgtgctggtgtctgccctggtgctgatggctatggtcaagcggaaggacagccgggga

SEQ ID NO: 35905 - DNA, 1875 bp, synthetic construct
  source 1..1875: mol_type = other DNA
atggccttaccagtgaccgccttgctcctgccgctggccttgctgctccacgccgccaggccggagatcgtgctgacacagtctcccgccacactgtcactgtctccaggcgaaagagccacactgagctgtagagccagccagagcgtgtcctcttacctggcctggtatcagcagaagcctggacaggctccccggctgctgatctacgatgccagcaatagagccacaggcatccccgccagattttctggctctggcagcggcaccgatttcaccctgaccataagcagcctggaacctgaggacttcgccgtgtactactgccagcagagaagcaactggcctcctacattcggccagggcaccaaggtggaaatcaaactcgaggacctgaagaacgtgttcccacctgaggtggccgtgttcgagcctagcaaggccgagatcgcccacacccagaaagccaccctcgtgtgcctggctaccggcttctaccccgaccatgtggaactgtcttggtgggtcaacggcaaagaggtgcacagcggcgtgtgtaccgacccccagccactgaaagaacagcccgccctgaacgacagccggtactgcctgagcagcagactgagagtgtccgccaccttctggcagaacccccggaaccacttcagatgccaggtgcagttctacggcctgagcgagaacgacgagtggacccaggacagagccaagcccgtgacccagatcgtgtctgccgaagcctggggcagagccgattgcggcatcaccagcgccagctaccaccagggcgtgctgagcgccaccatcctgtacgagatcctgctgggcaaggccaccctgtacgccgtgctggtgtctgccctggtgctgatggctatggtcaagcggaaggacagccggggaagggccaagcgatctggatctggagcaacaaacttctcactactcaaacaagcaggtgacgtggaggagaatcccgggcctactagtatggactggatttggcgcatccttttccttgtcggcgctgctaccggcgcgcattccttcgaacaactccagctgcaagagtctggccccggactggtcaagcctagcgaaacactgagcctgacctgtaccgtgtctggcggcagcatcagcagcagctcttattggtggggctggaccagacagcctcctggcagaggactggaatggatcggcaccatgtactacagcggcaacatctactacaaccccagcctccagagccgggccaccatctctgtggacaccagcaagaaccagttcagcctgaagctgagcagcgtgacagccgccgataccgccgtgtattattgcgccagacatgtgggctacagctacggcagacggttctggtacttcgacctgtggggcagaggcaccctggtcacagtttcttctacgcgtatccagaaccctgatcctgccgtgtaccagctgcgggatagcaagagcagcgacaagagcgtgtgtctgttcaccgacttcgacagccagaccaacgtgtcccagagcaaggactccgacgtgtacatcaccgataagtgcgtgctggacatgcggagcatggacttcaagagcaactccgccgtggcctggtccaacaagtccgatttcgcctgcgccaacgccttcaacaacagcattatccccgaggacacattcttcccaagcagcgacgtgccctgcgacgtgaagctggtggaaaagagcttcgagacagacaccaacctgaacttccagaacctgagcgtgatcggcttcagaatcctgctgctgaaagtggccggctttaacctgctgatgaccctgcggctgtggtccagc

SEQ ID NO: 35906 - DNA, 1875 bp, synthetic construct
  source 1..1875: mol_type = other DNA
atggccttaccagtgaccgccttgctcctgccgctggccttgctgctccacgccgccaggccggagatcgtgctgacacagtctcccgccacactgtcactgtctccaggcgaaagagccacactgagctgtagagccagccagagcgtgtcctcttacctggcctggtatcagcagaagcctggacaggctccccggctgctgatctacgatgccagcaatagagccacaggcatccccgccagattttctggctctggcagcggcaccgatttcaccctgaccataagcagcctggaacctgaggacttcgccgtgtactactgccagcagagaagcaactggcctcctacattcggccagggcaccaaggtggaaatcaaactcgaggacctgaagaacgtgttcccacctgaggtggccgtgttcgagcctagcgaggccgagatcagccacacccagaaagccaccctcgtgtgcctggctaccggcttctaccccgaccatgtggaactgtcttggtgggtcaacggcaaagaggtgcacagcggcgtgtgtaccgacccccagccactgaaagaacagcccgccctgaacgacagccggtactgcctgagcagcagactgagagtgtccgccaccttctggcagaacccccggaaccacttcagatgccaggtgcagttctacggcctgagcgagaacgacgagtggacccaggacagagccaagcccgtgacccagatcgtgtctgccgaagcctggggcagagccgattgcggctttaccagcgagagctaccagcagggcgtgctgagcgccaccatcctgtacgagatcctgctgggcaaggccaccctgtacgccgtgctggtgtctgccctggtgctgatggctatggtcaagcggaaggacagccggggaagggccaagcgatctggatctggagcaacaaacttctcactactcaaacaagcaggtgacgtggaggagaatcccgggcctactagtatggactggatttggcgcatccttttccttgtcggcgctgctaccggcgcgcattccttcgaacaactccagctgcaagagtctggccccggactggtcaagcctagcgaaacactgagcctgacctgtaccgtgtctggcggcagcatcagcagcagctcttattggtggggctggaccagacagcctcctggcagaggactggaatggatcggcaccatgtactacagcggcaacatctactacaaccccagcctccagagccgggccaccatctctgtggacaccagcaagaaccagttcagcctgaagctgagcagcgtgacagccgccgataccgccgtgtattattgcgccagacatgtgggctacagctacggcagacggttctggtacttcgacctgtggggcagaggcaccctggtcacagtttcttctacgcgtatccagaaccctgatcctgccgtgtaccagctgcgggatagcaagagcagcgacaagagcgtgtgtctgttcaccgacttcgacagccagaccaacgtgtcccagagcaaggactccgacgtgtacatcaccgataagtgcgtgctggacatgcggagcatggacttcaagagcaactccgccgtggcctggtccaacaagtccgatttcgcctgcgccaacgccttcaacaacagcattatccccgaggacacattcttcccaagccccgagagcagctgcgacgtgaagctggtggaaaagagcttcgagacagacaccaacctgaacttccagaacctgagcgtgatcggcttcagaatcctgctgctgaaagtggccggctttaacctgctgatgaccctgcggctgtggtccagc

SEQ ID NO: 35907 - DNA, 1887 bp, synthetic construct
  source 1..1887: mol_type = other DNA
atggccttaccagtgaccgccttgctcctgccgctggccttgctgctccacgccgccaggccggagatcgtgctgacacagtctcccgccacactgtcactgtctccaggcgaaagagccacactgagctgtagagccagccagagcgtgtcctcttacctggcctggtatcagcagaagcctggacaggctccccggctgctgatctacgatgccagcaatagagccacaggcatccccgccagattttctggctctggcagcggcaccgatttcaccctgaccataagcagcctggaacctgaggacttcgccgtgtactactgccagcagagaagcaactggcctcctacattcggccagggcaccaaggtggaaatcaaactcgagatccagaaccctgatcctgccgtgtaccagctgcgggatagcaagagcagcgacaagagcgtgtgtctgttcaccgacttcgacagccagaccaacgtgtcccagagcaaggactccgacgtgtacatcaccgataagtgcgtgctggacatgcggagcatggacttcaagagcaactccgccgtggcctggtccaacaagtccgatttcgcctgcgccaacgccttcaacaacagcattatccccgaggacacattcttcccaagccccgagagcagctgcgacgtgaagctggtggaaaagagcttcgagacagacaccaacctgaacttccagaacctgagcgtgatcggcttcagaatcctgctgctgaaagtggccggctttaacctgctgatgaccctgcggctgtggtccagccgcgccaagagaagcggatctggcgtgaagcagaccctgaatttcgacctgctgaagctggctggcgacgtggaatccaacccaggccctactagtatggactggatttggcgcatccttttccttgtcggcgctgctaccggcgcgcattccttcgaacaactccagctgcaagagtctggccccggactggtcaagcctagcgaaacactgagcctgacctgtaccgtgtctggcggcagcatcagcagcagctcttattggtggggctggaccagacagcctcctggcagaggactggaatggatcggcaccatgtactacagcggcaacatctactacaaccccagcctccagagccgggccaccatctctgtggacaccagcaagaaccagttcagcctgaagctgagcagcgtgacagccgccgataccgccgtgtattattgcgccagacatgtgggctacagctacggcagacggttctggtacttcgacctgtggggcagaggcaccctggtcacagtttcttctacgcgtgaggacctgaagaacgtgttcccacctgaggtggccgtgttcgagcctagcgaggccgagatcagccacacccagaaagccaccctcgtgtgcctggctaccggcttctaccccgaccatgtggaactgtcttggtgggtcaacggcaaagaggtgcacagcggcgtgtgtaccgacccccagccactgaaagaacagcccgccctgaacgacagccggtactgcctgagcagcagactgagagtgtccgccaccttctggcagaacccccggaaccacttcagatgccaggtgcagttctacggcctgagcgagaacgacgagtggacccaggacagagccaagcccgtgacccagatcgtgtctgccgaagcctggggcagagccgattgcggctttaccagcgagagctaccagcagggcgtgctgagcgccaccatcctgtacgagatcctgctgggcaaggccaccctgtacgccgtgctggtgtctgccctggtgctgatggctatggtcaagcggaaggacagccgggga

SEQ ID NO: 35908 - DNA, 1923 bp, synthetic construct
  source 1..1923: mol_type = other DNA
atggccttaccagtgaccgccttgctcctgccgctggccttgctgctccacgccgccaggccgctcgaggaggacctgaagaacgtgttcccacctgaggtggccgtgttcgagcctagcaaggccgagatcgcccacacccagaaagccaccctcgtgtgcctggctaccggcttctaccccgaccatgtggaactgtcttggtgggtcaacggcaaagaggtgcacagcggcgtgtgtaccgacccccagccactgaaagaacagcccgccctgaacgacagccggtactgcctgagcagcagactgagagtgtccgccaccttctggcagaacccccggaaccacttcagatgccaggtgcagttctacggcctgagcgagaacgacgagtggacccaggacagagccaagcccgtgacccagatcgtgtctgccgaagcctggggcagagccgattgcggcatcaccagcgccagctaccaccagggcgtgctgagcgccaccatcctgtacgagatcctgctgggcaaggccaccctgtacgccgtgctggtgtctgccctggtgctgatggctatggtcaagcggaaggacagccggggaagggccaagcgatctggatctggagcaacaaacttctcactactcaaacaagcaggtgacgtggaggagaatcccgggcctactagcatggccttaccagtgaccgccttgctcctgccgctggccttgctgctccacgccgccaggccggagatcgtgctgacacagtctcccgccacactgtcactgtctccaggcgaaagagccacactgagctgtagagccagccagagcgtgtcctcttacctggcctggtatcagcagaagcctggacaggctccccggctgctgatctacgatgccagcaatagagccacaggcatccccgccagattttctggctctggcagcggcaccgatttcaccctgaccataagcagcctggaacctgaggacttcgccgtgtactactgccagcagagaagcaactggcctcctacattcggccagggcaccaaggtggaaatcaaaggcggaggcggaagtggaggcggaggatctggcggcggaggctctcaactccagctgcaagagtctggccccggactggtcaagcctagcgaaacactgagcctgacctgtaccgtgtctggcggcagcatcagcagcagctcttattggtggggctggaccagacagcctcctggcagaggactggaatggatcggcaccatgtactacagcggcaacatctactacaaccccagcctccagagccgggccaccatctctgtggacaccagcaagaaccagttcagcctgaagctgagcagcgtgacagccgccgataccgccgtgtattattgcgccagacatgtgggctacagctacggcagacggttctggtacttcgacctgtggggcagaggcaccctggtcacagtttcttctacgcgtatccagaaccctgatcctgccgtgtaccagctgcgggatagcaagagcagcgacaagagcgtgtgtctgttcaccgacttcgacagccagaccaacgtgtcccagagcaaggactccgacgtgtacatcaccgataagtgcgtgctggacatgcggagcatggacttcaagagcaactccgccgtggcctggtccaacaagtccgatttcgcctgcgccaacgccttcaacaacagcattatccccgaggacacattcttcccaagcagcgacgtgccctgcgacgtgaagctggtggaaaagagcttcgagacagacaccaacctgaacttccagaacctgagcgtgatcggcttcagaatcctgctgctgaaagtggccggctttaacctgctgatgaccctgcggctgtggtccagc

SEQ ID NO: 35909 - DNA, 1944 bp, synthetic construct
  source 1..1944: mol_type = other DNA
atggccttaccagtgaccgccttgctcctgccgctggccttgctgctccacgccgccaggccgctcgagggctccggcgatcgccctgatcctgccgtgtaccagctgcgggatagcaagagcagcgacaagagcgtgtgtctgttcaccgacttcgacagccagaccaacgtgtcccagagcaaggactccgacgtgtacatcaccgataagtgcgtgctggacatgcggagcatggacttcaagagcaactccgccgtggcctggtccaacaagtccgatttcgcctgcgccaacgccttcaacaacagcattatccccgaggacacattcttcccaagccccgagagcagctgcgacgtgaagctggtggaaaagagcttcgagacagacaccaacctgaacttccagaacctgagcgtgatcggcttcagaatcctgctgctgaaagtggccggctttaacctgctgatgaccctgcggctgtggtccagctctagtcgcgccaagagaagcggatctggcgtgaagcagaccctgaatttcgacctgctgaagctggctggcgacgtggaatccaacccaggccccactagcatggccttaccagtgaccgccttgctcctgccgctggccttgctgctccacgccgccaggccggagatcgtgctgacacagtctcccgccacactgtcactgtctccaggcgaaagagccacactgagctgtagagccagccagagcgtgtcctcttacctggcctggtatcagcagaagcctggacaggctccccggctgctgatctacgatgccagcaatagagccacaggcatccccgccagattttctggctctggcagcggcaccgatttcaccctgaccataagcagcctggaacctgaggacttcgccgtgtactactgccagcagagaagcaactggcctcctacattcggccagggcaccaaggtggaaatcaaaggcggaggcggaagtggaggcggaggatctggcggcggaggctctcaactccagctgcaagagtctggccccggactggtcaagcctagcgaaacactgagcctgacctgtaccgtgtctggcggcagcatcagcagcagctcttattggtggggctggaccagacagcctcctggcagaggactggaatggatcggcaccatgtactacagcggcaacatctactacaaccccagcctccagagccgggccaccatctctgtggacaccagcaagaaccagttcagcctgaagctgagcagcgtgacagccgccgataccgccgtgtattattgcgccagacatgtgggctacagctacggcagacggttctggtacttcgacctgtggggcagaggcaccctggtcacagtttcttctacgcgtgaggacctgaagaacgtgttcccacctgaggtggccgtgttcgagcctagcgaggccgagatcagccacacccagaaagccaccctcgtgtgcctggctaccggcttctaccccgaccatgtggaactgtcttggtgggtcaacggcaaagaggtgcacagcggcgtgtgtaccgacccccagccactgaaagaacagcccgccctgaacgacagccggtactgcctgagcagcagactgagagtgtccgccaccttctggcagaacccccggaaccacttcagatgccaggtgcagttctacggcctgagcgagaacgacgagtggacccaggacagagccaagcccgtgacccagatcgtgtctgccgaagcctggggcagagccgattgcggctttaccagcgagagctaccagcagggcgtgctgagcgccaccatcctgtacgagatcctgctgggcaaggccaccctgtacgccgtgctggtgtctgccctggtgctgatggctatggtcaagcggaaggacagccgggga

SEQ ID NO: 35910 - DNA, 1875 bp, synthetic construct
  source 1..1875: mol_type = other DNA
atggccttaccagtgaccgccttgctcctgccgctggccttgctgctccacgccgccaggccggagatcgtgctgacacagtctcccgccacactgtcactgtctccaggcgaaagagccacactgagctgtagagccagccagagcgtgtcctcttacctggcctggtatcagcagaagcctggacaggctccccggctgctgatctacgatgccagcaatagagccacaggcatccccgccagattttctggctctggcagcggcaccgatttcaccctgaccataagcagcctggaacctgaggacttcgccgtgtactactgccagcagagaagcaactggcctcctacattcggccagggcaccaaggtggaaatcaaactcgaggacctgaagaacgtgttcccacctgaggtggccgtgttcgagcctagcgaggccgagatcagccacacccagaaagccaccctcgtgtgcctggctaccggcttctaccccgaccatgtggaactgtcttggtgggtcaacggcaaagaggtgcacagcggcgtgtctaccgacccccagccactgaaagaacagcccgccctgaacgacagccggtactgcctgagcagcagactgagagtgtccgccaccttctggcagaacccccggaaccacttcagatgccaggtgcagttctacggcctgagcgagaacgacgagtggacccaggacagagccaagcccgtgacccagatcgtgtctgccgaagcctggggcagagccgattgcggctttaccagcgagagctaccagcagggcgtgctgagcgccaccatcctgtacgagatcctgctgggcaaggccaccctgtacgccgtgctggtgtctgccctggtgctgatggctatggtcaagcggaaggacagccggggaagggccaagcgatctggatctggagcaacaaacttctcactactcaaacaagcaggtgacgtggaggagaatcccgggcctactagtatggactggatttggcgcatccttttccttgtcggcgctgctaccggcgcgcattccttcgaacaactccagctgcaagagtctggccccggactggtcaagcctagcgaaacactgagcctgacctgtaccgtgtctggcggcagcatcagcagcagctcttattggtggggctggaccagacagcctcctggcagaggactggaatggatcggcaccatgtactacagcggcaacatctactacaaccccagcctccagagccgggccaccatctctgtggacaccagcaagaaccagttcagcctgaagctgagcagcgtgacagccgccgataccgccgtgtattattgcgccagacatgtgggctacagctacggcagacggttctggtacttcgacctgtggggcagaggcaccctggtcacagtttcttctacgcgtatccagaaccctgatcctgccgtgtaccagctgcgggatagcaagagcagcgacaagagcgtgtgtctgttcaccgacttcgacagccagaccaacgtgtcccagagcaaggactccgacgtgtacatcaccgataagaccgtgctggacatgcggagcatggacttcaagagcaactccgccgtggcctggtccaacaagtccgatttcgcctgcgccaacgccttcaacaacagcattatccccgaggacacattcttcccaagccccgagagcagctgcgacgtgaagctggtggaaaagagcttcgagacagacaccaacctgaacttccagaacctgagcgtgatcggcttcagaatcctgctgctgaaagtggccggctttaacctgctgatgaccctgcggctgtggtccagc

SEQ ID NO: 35911 - DNA, 1899 bp, synthetic construct
  source 1..1899: mol_type = other DNA
atggccttaccagtgaccgccttgctcctgccgctggccttgctgctccacgccgccaggccggagatcgtgctgacacagtctcccgccacactgtcactgtctccaggcgaaagagccacactgagctgtagagccagccagagcgtgtcctcttacctggcctggtatcagcagaagcctggacaggctccccggctgctgatctacgatgccagcaatagagccacaggcatccccgccagattttctggctctggcagcggcaccgatttcaccctgaccataagcagcctggaacctgaggacttcgccgtgtactactgccagcagagaagcaactggcctcctacattcggccagggcaccaaggtggaaatcaaactcgaggacaagcagctggacgccgacgtgtcccccaagcctaccatcttcctgccctctatcgccgagacaaagctccagaaggccggcacctacctgtgcctgctggaaaagttcttcccagatgtgattaagatccactggcaggaaaagaagtccaacaccatcctgggcagccaggaaggcaacaccatgaagaccaacgacacctacatgaagttcagctggctgaccgtgcccgagaagtccctggacaaagaacacagatgcatcgtgcggcacgaaaacaacaagaacggcgtggaccaggaaatcatcttcccacccatcaagaccgatgtgattacaatggaccccaaggacaactgctccaaggacgccaacgataccctgctgctccagctgaccaacaccagcgcctactacatgtacttgttgctgctgctgaagtccgtggtgtacttcgccatcatcacatgctgcctgctgcggagaaccgccttctgctgcaacggcgagaagtctagggccaagcgatctggatctggagcaacaaacttctcactactcaaacaagcaggtgacgtggaggagaatcccgggcctactagtatggactggatttggcgcatccttttccttgtcggcgctgctaccggcgcgcattccttcgaacaactccagctgcaagagtctggccccggactggtcaagcctagcgaaacactgagcctgacctgtaccgtgtctggcggcagcatcagcagcagctcttattggtggggctggaccagacagcctcctggcagaggactggaatggatcggcaccatgtactacagcggcaacatctactacaaccccagcctccagagccgggccaccatctctgtggacaccagcaagaaccagttcagcctgaagctgagcagcgtgacagccgccgataccgccgtgtattattgcgccagacatgtgggctacagctacggcagacggttctggtacttcgacctgtggggcagaggcaccctggtcacagtttcttctacgcgtagccagcctcacaccaagcccagcgtgttcgtgatgaagaacggcaccaacgtggcctgcctcgtgaaagagttctaccccaaggacatcaggatcaacctggtgtccagcaagaagatcaccgagttcgaccccgccatcgtgatctcccccagcggcaagtacaacgccgtgaagctggggaagtacgaggacagcaacagcgtgacctgctccgtgcagcacgacaacaagaccgtgcacagcaccgactttgaagtgaaaaccgactccaccgaccacgtgaagcccaaagagacagagaacaccaagcagcccagcaagagctgccacaagcccaaggccatcgtgcacaccgagaaagtgaacatgatgagcctgaccgtgctgggcctgcggatgctgttcgccaaaaccgtggccgtgaacttcctgctgaccgccaagctgttcttcctc

SEQ ID NO: 35912 - DNA, 1899 bp, synthetic construct
  source 1..1899: mol_type = other DNA
atggccttaccagtgaccgccttgctcctgccgctggccttgctgctccacgccgccaggccggagatcgtgctgacacagtctcccgccacactgtcactgtctccaggcgaaagagccacactgagctgtagagccagccagagcgtgtcctcttacctggcctggtatcagcagaagcctggacaggctccccggctgctgatctacgatgccagcaatagagccacaggcatccccgccagattttctggctctggcagcggcaccgatttcaccctgaccataagcagcctggaacctgaggacttcgccgtgtactactgccagcagagaagcaactggcctcctacattcggccagggcaccaaggtggaaatcaaactcgagagccagcctcacaccaagcccagcgtgttcgtgatgaagaacggcaccaacgtggcctgcctcgtgaaagagttctaccccaaggacatcaggatcaacctggtgtccagcaagaagatcaccgagttcgaccccgccatcgtgatctcccccagcggcaagtacaacgccgtgaagctggggaagtacgaggacagcaacagcgtgacctgctccgtgcagcacgacaacaagaccgtgcacagcaccgactttgaagtgaaaaccgactccaccgaccacgtgaagcccaaagagacagagaacaccaagcagcccagcaagagctgccacaagcccaaggccatcgtgcacaccgagaaagtgaacatgatgagcctgaccgtgctgggcctgcggatgctgttcgccaaaaccgtggccgtgaacttcctgctgaccgccaagctgttcttcctcagggccaagcgatctggatctggagcaacaaacttctcactactcaaacaagcaggtgacgtggaggagaatcccgggcctactagtatggactggatttggcgcatccttttccttgtcggcgctgctaccggcgcgcattccttcgaacaactccagctgcaagagtctggccccggactggtcaagcctagcgaaacactgagcctgacctgtaccgtgtctggcggcagcatcagcagcagctcttattggtggggctggaccagacagcctcctggcagaggactggaatggatcggcaccatgtactacagcggcaacatctactacaaccccagcctccagagccgggccaccatctctgtggacaccagcaagaaccagttcagcctgaagctgagcagcgtgacagccgccgataccgccgtgtattattgcgccagacatgtgggctacagctacggcagacggttctggtacttcgacctgtggggcagaggcaccctggtcacagtttcttctacgcgtgacaagcagctggacgccgacgtgtcccccaagcctaccatcttcctgccctctatcgccgagacaaagctccagaaggccggcacctacctgtgcctgctggaaaagttcttcccagatgtgattaagatccactggcaggaaaagaagtccaacaccatcctgggcagccaggaaggcaacaccatgaagaccaacgacacctacatgaagttcagctggctgaccgtgcccgagaagtccctggacaaagaacacagatgcatcgtgcggcacgaaaacaacaagaacggcgtggaccaggaaatcatcttcccacccatcaagaccgatgtgattacaatggaccccaaggacaactgctccaaggacgccaacgataccctgctgctccagctgaccaacaccagcgcctactacatgtacttgttgctgctgctgaagtccgtggtgtacttcgccatcatcacatgctgcctgctgcggagaaccgccttctgctgcaacggcgagaagtct

SEQ ID NO: 35913 - DNA, 1944 bp, synthetic construct
  source 1..1944: mol_type = other DNA
atggccttaccagtgaccgccttgctcctgccgctggccttgctgctccacgccgccaggccgctcgaggacaagcagctggacgccgacgtgtcccccaagcctaccatcttcctgccctctatcgccgagacaaagctccagaaggccggcacctacctgtgcctgctggaaaagttcttcccagatgtgattaagatccactggcaggaaaagaagtccaacaccatcctgggcagccaggaaggcaacaccatgaagaccaacgacacctacatgaagttcagctggctgaccgtgcccgagaagtccctggacaaagaacacagatgcatcgtgcggcacgaaaacaacaagaacggcgtggaccaggaaatcatcttcccacccatcaagaccgatgtgattacaatggaccccaaggacaactgctccaaggacgccaacgataccctgctgctccagctgaccaacaccagcgcctactacatgtacttgttgctgctgctgaagtccgtggtgtacttcgccatcatcacatgctgcctgctgcggagaaccgccttctgctgcaacggcgagaagtctagggccaagcgatctggatctggagcaacaaacttctcactactcaaacaagcaggtgacgtggaggagaatcccgggcctactagcatggccttaccagtgaccgccttgctcctgccgctggccttgctgctccacgccgccaggccggagatcgtgctgacacagtctcccgccacactgtcactgtctccaggcgaaagagccacactgagctgtagagccagccagagcgtgtcctcttacctggcctggtatcagcagaagcctggacaggctccccggctgctgatctacgatgccagcaatagagccacaggcatccccgccagattttctggctctggcagcggcaccgatttcaccctgaccataagcagcctggaacctgaggacttcgccgtgtactactgccagcagagaagcaactggcctcctacattcggccagggcaccaaggtggaaatcaaaggcggaggcggaagtggaggcggaggatctggcggcggaggctctcaactccagctgcaagagtctggccccggactggtcaagcctagcgaaacactgagcctgacctgtaccgtgtctggcggcagcatcagcagcagctcttattggtggggctggaccagacagcctcctggcagaggactggaatggatcggcaccatgtactacagcggcaacatctactacaaccccagcctccagagccgggccaccatctctgtggacaccagcaagaaccagttcagcctgaagctgagcagcgtgacagccgccgataccgccgtgtattattgcgccagacatgtgggctacagctacggcagacggttctggtacttcgacctgtggggcagaggcaccctggtcacagtttcttctacgcgtagccagcctcacaccaagcccagcgtgttcgtgatgaagaacggcaccaacgtggcctgcctcgtgaaagagttctaccccaaggacatcaggatcaacctggtgtccagcaagaagatcaccgagttcgaccccgccatcgtgatctcccccagcggcaagtacaacgccgtgaagctggggaagtacgaggacagcaacagcgtgacctgctccgtgcagcacgacaacaagaccgtgcacagcaccgactttgaagtgaaaaccgactccaccgaccacgtgaagcccaaagagacagagaacaccaagcagcccagcaagagctgccacaagcccaaggccatcgtgcacaccgagaaagtgaacatgatgagcctgaccgtgctgggcctgcggatgctgttcgccaaaaccgtggccgtgaacttcctgctgaccgccaagctgttcttcctc

SEQ ID NO: 35914 - DNA, 2406 bp, synthetic construct
  source 1..2406: mol_type = other DNA
atggccttaccagtgaccgccttgctcctgccgctggccttgctgctccacgccgccaggccggagatcgtgctgacacagtctcccgccacactgtcactgtctccaggcgaaagagccacactgagctgtagagccagccagagcgtgtcctcttacctggcctggtatcagcagaagcctggacaggctccccggctgctgatctacgatgccagcaatagagccacaggcatccccgccagattttctggctctggcagcggcaccgatttcaccctgaccataagcagcctggaacctgaggacttcgccgtgtactactgccagcagagaagcaactggcctcctacattcggccagggcaccaaggtggaaatcaaaggacagcctaaggccaatcctaccgtgacactgttccctccaagcagcgaagaactccaggccaacaaggccacacttgtgtgcctgatctccgacttctaccctggggctgtgacagtggcttggaaggccgatggatctcctgtgaaagccggcgtggaaaccaccaagccatccaagcagagcaacaacaaatacgccgccagctcctacctgagcctgacacctgagcagtggaagtcccacagatcctacagctgccaagtgacccacgaaggcagcaccgtggaaaagacagtggcccctacagagtgcagcggatcccagagcttcggcctgctggaccccaagctgtgctacctgctggatggcatcctgttcatctacggcgtgatcctgaccgccctgttcctgagagtgaagttcagcagaagcgccgacgcccctgcctaccagcagggacagaaccaactgtacaacgagctgaacctgggcagacgggaagagtacgacgtgctggacaagcggagaggcagggaccctgagatgggcggaaagccccagcggagaaagaacccccaggaaggactgtataacgaactccagaaagacaagatggccgaagcctacagcgagatcggcatgaagggcgagcggagaagaggcaagggccacgatggcctgtaccagggcctgagcaccgccaccaaggacacctatgacgccctgcacatgcaggccctgcctccaagaagggccaagcgatctggatctggagcaacaaacttctcactactcaaacaagcaggtgacgtggaggagaatcccgggcctactagtatggactggatttggcgcatccttttccttgtcggcgctgctaccggcgcgcattccttcgaacaactccagctgcaagagtctggccccggactggtcaagcctagcgaaacactgagcctgacctgtaccgtgtctggcggcagcatcagcagcagctcttattggtggggctggaccagacagcctcctggcagaggactggaatggatcggcaccatgtactacagcggcaacatctactacaaccccagcctccagagccgggccaccatctctgtggacaccagcaagaaccagttcagcctgaagctgagcagcgtgacagccgccgataccgccgtgtattattgcgccagacatgtgggctacagctacggcagacggttctggtacttcgacctgtggggcagaggcaccctggtcacagtttcttctgcctctacaaagggaccctccgtgtttcctctggctcccagcagcaagtctacaagcggaggaacagccgctctgggctgcctggtcaaggattactttcccgagcctgtgaccgtgtcctggaatagcggagcactgacaagcggcgtgcacacctttccagccgtgctgcaaagcagcggcctgtactctctgagcagcgtggtcacagtgcctagctctagcctgggcacccagacctacatctgcaatgtgaaccacaagcctagcaacaccaaggtggacaagagagtggaacccaagagctgtggtacccagagttttgggttgttggaccctaaattgtgctatctgttggacggaatcctgttcatttacggagtgatcctgaccgcattgttcctgcgggttaagttttccagatccgcagacgcacccgcttaccaacaagggcagaaccaactctacaatgaacttaatttggggcggagggaagagtacgacgttctggacaaaaggaggggacgagatcccgagatgggcggaaagcctcagcgaaggaagaatccgcaagaggggctttataacgaactccagaaagataaaatggcagaagcctatagtgagattgggatgaagggagaaaggaggaggggtaaaggtcacgatgggttgtaccaaggattgagcacagccactaaagatacctatgatgcgctccacatgcaggccctgccgccaaga

SEQ ID NO: 35915 - DNA, 2463 bp, synthetic construct
  source 1..2463: mol_type = other DNA
atggccttaccagtgaccgccttgctcctgccgctggccttgctgctccacgccgccaggccggagatcgtgctgacacagtctcccgccacactgtcactgtctccaggcgaaagagccacactgagctgtagagccagccagagcgtgtcctcttacctggcctggtatcagcagaagcctggacaggctccccggctgctgatctacgatgccagcaatagagccacaggcatccccgccagattttctggctctggcagcggcaccgatttcaccctgaccataagcagcctggaacctgaggacttcgccgtgtactactgccagcagagaagcaactggcctcctacattcggccagggcaccaaggtggaaatcaaactcgaggacctgaagaacgtgttcccacctgaggtggccgtgttcgagcctagcgaggccgagatcagccacacccagaaagccaccctcgtgtgcctggctaccggcttctaccccgaccatgtggaactgtcttggtgggtcaacggcaaagaggtgcacagcggcgtgtctaccgacccccagccactgaaagaacagcccgccctgaacgacagccggtactgcctgagcagcagactgagagtgtccgccaccttctggcagaacccccggaaccacttcagatgccaggtgcagttctacggcctgagcgagaacgacgagtggacccaggacagagccaagcccgtgacccagatcgtgtctgccgaagcctggggcagagccgattgcggatcccagagcttcggcctgctggaccccaagctgtgctacctgctggatggcatcctgttcatctacggcgtgatcctgaccgccctgttcctgagagtgaagttcagcagaagcgccgacgcccctgcctaccagcagggacagaaccaactgtacaacgagctgaacctgggcagacgggaagagtacgacgtgctggacaagcggagaggcagggaccctgagatgggcggaaagccccagcggagaaagaacccccaggaaggactgtataacgaactccagaaagacaagatggccgaagcctacagcgagatcggcatgaagggcgagcggagaagaggcaagggccacgatggcctgtaccagggcctgagcaccgccaccaaggacacctatgacgccctgcacatgcaggccctgcctccaagaagggccaagcgatctggatctggagcaacaaacttctcactactcaaacaagcaggtgacgtggaggagaatcccgggcctactagtatggactggatttggcgcatccttttccttgtcggcgctgctaccggcgcgcattccttcgaacaactccagctgcaagagtctggccccggactggtcaagcctagcgaaacactgagcctgacctgtaccgtgtctggcggcagcatcagcagcagctcttattggtggggctggaccagacagcctcctggcagaggactggaatggatcggcaccatgtactacagcggcaacatctactacaaccccagcctccagagccgggccaccatctctgtggacaccagcaagaaccagttcagcctgaagctgagcagcgtgacagccgccgataccgccgtgtattattgcgccagacatgtgggctacagctacggcagacggttctggtacttcgacctgtggggcagaggcaccctggtcacagtttcttctacgcgtatccagaaccctgatcctgccgtgtaccagctgcgggatagcaagagcagcgacaagagcgtgtgtctgttcaccgacttcgacagccagaccaacgtgtcccagagcaaggactccgacgtgtacatcaccgataagaccgtgctggacatgcggagcatggacttcaagagcaactccgccgtggcctggtccaacaagtccgatttcgcctgcgccaacgccttcaacaacagcattatccccgaggacacattcttcccaagccccgagagcagctgcggtacccagagttttgggttgttggaccctaaattgtgctatctgttggacggaatcctgttcatttacggagtgatcctgaccgcattgttcctgcgggttaagttttccagatccgcagacgcacccgcttaccaacaagggcagaaccaactctacaatgaacttaatttggggcggagggaagagtacgacgttctggacaaaaggaggggacgagatcccgagatgggcggaaagcctcagcgaaggaagaatccgcaagaggggctttataacgaactccagaaagataaaatggcagaagcctatagtgagattgggatgaagggagaaaggaggaggggtaaaggtcacgatgggttgtaccaaggattgagcacagccactaaagatacctatgatgcgctccacatgcaggccctgccgccaaga

SEQ ID NO: 35916 - DNA, 2589 bp, synthetic construct
  source 1..2589: mol_type = other DNA
atggccttaccagtgaccgccttgctcctgccgctggccttgctgctccacgccgccaggccggagatcgtgctgacacagtctcccgccacactgtcactgtctccaggcgaaagagccacactgagctgtagagccagccagagcgtgtcctcttacctggcctggtatcagcagaagcctggacaggctccccggctgctgatctacgatgccagcaatagagccacaggcatccccgccagattttctggctctggcagcggcaccgatttcaccctgaccataagcagcctggaacctgaggacttcgccgtgtactactgccagcagagaagcaactggcctcctacattcggccagggcaccaaggtggaaatcaaactcgaggaggacctgaagaacgtgttcccacctgaggtggccgtgttcgagcctagcgaggccgagatcagccacacccagaaagccaccctcgtgtgcctggctaccggcttctaccccgaccatgtggaactgtcttggtgggtcaacggcaaagaggtgcacagcggcgtgtctaccgacccccagccactgaaagaacagcccgccctgaacgacagccggtactgcctgagcagcagactgagagtgtccgccaccttctggcagaacccccggaaccacttcagatgccaggtgcagttctacggcctgagcgagaacgacgagtggacccaggacagagccaagcccgtgacccagatcgtgtctgccgaagcctggggcagagccgattgcggatcccagagcttcggcctgctggaccccaagctgtgctacctgctggatggcatcctgttcatctacggcgtgatcctgaccgccctgttcctgagagtgaagttcagcagaagcgccgacgcccctgcctaccagcagggacagaaccaactgtacaacgagctgaacctgggcagacgggaagagtacgacgtgctggacaagcggagaggcagggaccctgagatgggcggaaagccccagcggagaaagaacccccaggaaggactgtataacgaactccagaaagacaagatggccgaagcctacagcgagatcggcatgaagggcgagcggagaagaggcaagggccacgatggcctgtaccagggcctgagcaccgccaccaaggacacctatgacgccctgcacatgcaggccctgcctccaagaagggccaagcgatctggatctggagcaacaaacttctcactactcaaacaagcaggtgacgtggaggagaatcccgggcctactagtatggactggatttggcgcatccttttccttgtcggcgctgctaccggcgcgcattccttcgaacaactccagctgcaagagtctggccccggactggtcaagcctagcgaaacactgagcctgacctgtaccgtgtctggcggcagcatcagcagcagctcttattggtggggctggaccagacagcctcctggcagaggactggaatggatcggcaccatgtactacagcggcaacatctactacaaccccagcctccagagccgggccaccatctctgtggacaccagcaagaaccagttcagcctgaagctgagcagcgtgacagccgccgataccgccgtgtattattgcgccagacatgtgggctacagctacggcagacggttctggtacttcgacctgtggggcagaggcaccctggtcacagtttcttctacgcgtatccagaaccctgatcctgccgtgtaccagctgcgggatagcaagagcagcgacaagagcgtgtgtctgttcaccgacttcgacagccagaccaacgtgtcccagagcaaggactccgacgtgtacatcaccgataagaccgtgctggacatgcggagcatggacttcaagagcaactccgccgtggcctggtccaacaagtccgatttcgcctgcgccaacgccttcaacaacagcattatccccgaggacacattcttcccaagccccgagagcagctgcggtacccagagttttgggttgttggaccctaaattgtgctatctgttggacggaatcctgttcatttacggagtgatcctgaccgcattgttcctgaggagcaagcggtcacggctgctccacagcgattacatgaatatgacaccacgaagaccgggtcctactcgcaaacactaccaaccctacgcacctccccgcgactttgcagcgtaccgatctcgggttaagttttccagatccgcagacgcacccgcttaccaacaagggcagaaccaactctacaatgaacttaatttggggcggagggaagagtacgacgttctggacaaaaggaggggacgagatcccgagatgggcggaaagcctcagcgaaggaagaatccgcaagaggggctttataacgaactccagaaagataaaatggcagaagcctatagtgagattgggatgaagggagaaaggaggaggggtaaaggtcacgatgggttgtaccaaggattgagcacagccactaaagatacctatgatgcgctccacatgcaggccctgccgccaaga

SEQ ID NO: 35917 - DNA, 2718 bp, synthetic construct
  source 1..2718: mol_type = other DNA
atggccttaccagtgaccgccttgctcctgccgctggccttgctgctccacgccgccaggccggagatcgtgctgacacagtctcccgccacactgtcactgtctccaggcgaaagagccacactgagctgtagagccagccagagcgtgtcctcttacctggcctggtatcagcagaagcctggacaggctccccggctgctgatctacgatgccagcaatagagccacaggcatccccgccagattttctggctctggcagcggcaccgatttcaccctgaccataagcagcctggaacctgaggacttcgccgtgtactactgccagcagagaagcaactggcctcctacattcggccagggcaccaaggtggaaatcaaactcgaggaggacctgaagaacgtgttcccacctgaggtggccgtgttcgagcctagcgaggccgagatcagccacacccagaaagccaccctcgtgtgcctggctaccggcttctaccccgaccatgtggaactgtcttggtgggtcaacggcaaagaggtgcacagcggcgtgtctaccgacccccagccactgaaagaacagcccgccctgaacgacagccggtactgcctgagcagcagactgagagtgtccgccaccttctggcagaacccccggaaccacttcagatgccaggtgcagttctacggcctgagcgagaacgacgagtggacccaggacagagccaagcccgtgacccagatcgtgtctgccgaagcctggggcagagccgattgcggatcccagagcttcggcctgctggaccccaagctgtgctacctgctggatggcatcctgttcatctacggcgtgatcctgaccgccctgttcctgaaacggggcagaaagaaactcctgtatatattcaaacaaccatttatgagaccagtacaaactactcaagaggaagatggctgtagctgccgatttccagaagaagaagaaggaggatgtgaactgagagtgaagttcagcagaagcgccgacgcccctgcctaccagcagggacagaaccaactgtacaacgagctgaacctgggcagacgggaagagtacgacgtgctggacaagcggagaggcagggaccctgagatgggcggaaagccccagcggagaaagaacccccaggaaggactgtataacgaactccagaaagacaagatggccgaagcctacagcgagatcggcatgaagggcgagcggagaagaggcaagggccacgatggcctgtaccagggcctgagcaccgccaccaaggacacctatgacgccctgcacatgcaggccctgcctccaagaagggccaagcgatctggatctggagcaacaaacttctcactactcaaacaagcaggtgacgtggaggagaatcccgggcctactagtatggactggatttggcgcatccttttccttgtcggcgctgctaccggcgcgcattccttcgaacaactccagctgcaagagtctggccccggactggtcaagcctagcgaaacactgagcctgacctgtaccgtgtctggcggcagcatcagcagcagctcttattggtggggctggaccagacagcctcctggcagaggactggaatggatcggcaccatgtactacagcggcaacatctactacaaccccagcctccagagccgggccaccatctctgtggacaccagcaagaaccagttcagcctgaagctgagcagcgtgacagccgccgataccgccgtgtattattgcgccagacatgtgggctacagctacggcagacggttctggtacttcgacctgtggggcagaggcaccctggtcacagtttcttctacgcgtatccagaaccctgatcctgccgtgtaccagctgcgggatagcaagagcagcgacaagagcgtgtgtctgttcaccgacttcgacagccagaccaacgtgtcccagagcaaggactccgacgtgtacatcaccgataagaccgtgctggacatgcggagcatggacttcaagagcaactccgccgtggcctggtccaacaagtccgatttcgcctgcgccaacgccttcaacaacagcattatccccgaggacacattcttcccaagccccgagagcagctgcggtacccagagttttgggttgttggaccctaaattgtgctatctgttggacggaatcctgttcatttacggagtgatcctgaccgcattgttcctgaagagaggccggaagaagctgctgtacatcttcaagcagcctttcatgcggcccgtgcagaccacccaggaagaggacggctgctcctgccggttccccgaggaagaagaaggcggctgcgagctgcgggttaagttttccagatccgcagacgcacccgcttaccaacaagggcagaaccaactctacaatgaacttaatttggggcggagggaagagtacgacgttctggacaaaaggaggggacgagatcccgagatgggcggaaagcctcagcgaaggaagaatccgcaagaggggctttataacgaactccagaaagataaaatggcagaagcctatagtgagattgggatgaagggagaaaggaggaggggtaaaggtcacgatgggttgtaccaaggattgagcacagccactaaagatacctatgatgcgctccacatgcaggccctgccgccaaga

SEQ ID NO: 35918 - DNA, 1779 bp, synthetic construct
  source 1..1779: mol_type = other DNA
atggccttaccagtgaccgccttgctcctgccgctggccttgctgctccacgccgccaggccggagatcgtgctgacacagtctcccgccacactgtcactgtctccaggcgaaagagccacactgagctgtagagccagccagagcgtgtcctcttacctggcctggtatcagcagaagcctggacaggctccccggctgctgatctacgatgccagcaatagagccacaggcatccccgccagattttctggctctggcagcggcaccgatttcaccctgaccataagcagcctggaacctgaggacttcgccgtgtactactgccagcagagaagcaactggcctcctacattcggccagggcaccaaggtggaaatcaaactcgagcagagcttcggcctgctggaccccaagctgtgctacctgctggatggcatcctgttcatctacggcgtgatcctgaccgccctgttcctgagagtgaagttcagcagaagcgccgacgcccctgcctaccagcagggacagaaccaactgtacaacgagctgaacctgggcagacgggaagagtacgacgtgctggacaagcggagaggcagggaccctgagatgggcggaaagccccagcggagaaagaacccccaggaaggactgtataacgaactccagaaagacaagatggccgaagcctacagcgagatcggcatgaagggcgagcggagaagaggcaagggccacgatggcctgtaccagggcctgagcaccgccaccaaggacacctatgacgccctgcacatgcaggccctgcctccaagaagggccaagcgatctggatctggagcaacaaacttctcactactcaaacaagcaggtgacgtggaggagaatcccgggcctactagtatggactggatttggcgcatccttttccttgtcggcgctgctaccggcgcgcattccttcgaacaactccagctgcaagagtctggccccggactggtcaagcctagcgaaacactgagcctgacctgtaccgtgtctggcggcagcatcagcagcagctcttattggtggggctggaccagacagcctcctggcagaggactggaatggatcggcaccatgtactacagcggcaacatctactacaaccccagcctccagagccgggccaccatctctgtggacaccagcaagaaccagttcagcctgaagctgagcagcgtgacagccgccgataccgccgtgtattattgcgccagacatgtgggctacagctacggcagacggttctggtacttcgacctgtggggcagaggcaccctggtcacagtttcttctacgcgtcagagttttgggttgttggaccctaaattgtgctatctgttggacggaatcctgttcatttacggagtgatcctgaccgcattgttcctgcgggttaagttttccagatccgcagacgcacccgcttaccaacaagggcagaaccaactctacaatgaacttaatttggggcggagggaagagtacgacgttctggacaaaaggaggggacgagatcccgagatgggcggaaagcctcagcgaaggaagaatccgcaagaggggctttataacgaactccagaaagataaaatggcagaagcctatagtgagattgggatgaagggagaaaggaggaggggtaaaggtcacgatgggttgtaccaaggattgagcacagccactaaagatacctatgatgcgctccacatgcaggccctgccgccaaga

SEQ ID NO: 35919 - DNA, 1953 bp, synthetic construct
  source 1..1953: mol_type = other DNA
atggccttaccagtgaccgccttgctcctgccgctggccttgctgctccacgccgccaggccggagatcgtgctgacacagtctcccgccacactgtcactgtctccaggcgaaagagccacactgagctgtagagccagccagagcgtgtcctcttacctggcctggtatcagcagaagcctggacaggctccccggctgctgatctacgatgccagcaatagagccacaggcatccccgccagattttctggctctggcagcggcaccgatttcaccctgaccataagcagcctggaacctgaggacttcgccgtgtactactgccagcagagaagcaactggcctcctacattcggccagggcaccaaggtggaaatcaaactcgagggacagcctaaggccaatcctaccgtgacactgttccctccaagcagcgaagaactccaggccaacaaggccacacttgtgtgcctgatctccgacttctaccctggggctgtgacagtggcttggaaggccgatggatctcctgtgaaagccggcgtggaaaccaccaagccatccaagcagagcaacaacaaatacgccgccagctcctacctgagcctgacacctgagcagtggaagtcccacagatcctacagctgccaagtgacccacgaaggcagcaccgtggaaaagacagtggcccctacagagtgcagccccatcaagaccgatgtgattacaatggaccccaaggacaactgctccaaggacgccaacgataccctgctgctccagctgaccaacaccagcgcctactacatgtacttgttgctgctgctgaagtccgtggtgtacttcgccatcatcacatgctgcctgctgcggagaaccgccttctgctgcaacggcgagaagtctagggccaagcgatctggatctggagcaacaaacttctcactactcaaacaagcaggtgacgtggaggagaatcccgggcctactagtatggactggatttggcgcatccttttccttgtcggcgctgctaccggcgcgcattccttcgaacaactccagctgcaagagtctggccccggactggtcaagcctagcgaaacactgagcctgacctgtaccgtgtctggcggcagcatcagcagcagctcttattggtggggctggaccagacagcctcctggcagaggactggaatggatcggcaccatgtactacagcggcaacatctactacaaccccagcctccagagccgggccaccatctctgtggacaccagcaagaaccagttcagcctgaagctgagcagcgtgacagccgccgataccgccgtgtattattgcgccagacatgtgggctacagctacggcagacggttctggtacttcgacctgtggggcagaggcaccctggtcacagtttcttctacgcgtgcctctacaaagggaccctccgtgtttcctctggctcccagcagcaagtctacaagcggaggaacagccgctctgggctgcctggtcaaggattactttcccgagcctgtgaccgtgtcctggaatagcggagcactgacaagcggcgtgcacacctttccagccgtgctgcaaagcagcggcctgtactctctgagcagcgtggtcacagtgcctagctctagcctgggcacccagacctacatctgcaatgtgaaccacaagcctagcaacaccaaggtggacaagagagtggaacccaagagctgtgaagtgaaaaccgactccaccgaccacgtgaagcccaaagagacagagaacaccaagcagcccagcaagagctgccacaagcccaaggccatcgtgcacaccgagaaagtgaacatgatgagcctgaccgtgctgggcctgcggatgctgttcgccaaaaccgtggccgtgaacttcctgctgaccgccaagctgttcttcctc

SEQ ID NO: 35920 - DNA, 1887 bp, synthetic construct
  source 1..1887: mol_type = other DNA
atggccttaccagtgaccgccttgctcctgccgctggccttgctgctccacgccgccaggccggagatcgtgctgacacagtctcccgccacactgtcactgtctccaggcgaaagagccacactgagctgtagagccagccagagcgtgtcctcttacctggcctggtatcagcagaagcctggacaggctccccggctgctgatctacgatgccagcaatagagccacaggcatccccgccagattttctggctctggcagcggcaccgatttcaccctgaccataagcagcctggaacctgaggacttcgccgtgtactactgccagcagagaagcaactggcctcctacattcggccagggcaccaaggtggaaatcaaactcgagggacagcctaaggccaatcctaccgtgacactgttccctccaagcagcgaagaactccaggccaacaaggccacacttgtgtgcctgatctccgacttctaccctggggctgtgacagtggcttggaaggccgatggatctcctgtgaaagccggcgtggaaaccaccaagccatccaagcagagcaacaacaaatacgccgccagctcctacctgagcctgacacctgagcagtggaagtcccacagatcctacagctgccaagtgacccacgaaggcagcaccgtggaaaagacagtggcccctacagagtgcagcggcagagccgattgcggcatcaccagcgccagctaccaccagggcgtgctgagcgccaccatcctgtacgagatcctgctgggcaaggccaccctgtacgccgtgctggtgtctgccctggtgctgatggctatggtcaagcggaaggacagccggggaagggccaagcgatctggatctggagcaacaaacttctcactactcaaacaagcaggtgacgtggaggagaatcccgggcctactagtatggactggatttggcgcatccttttccttgtcggcgctgctaccggcgcgcattccttcgaacaactccagctgcaagagtctggccccggactggtcaagcctagcgaaacactgagcctgacctgtaccgtgtctggcggcagcatcagcagcagctcttattggtggggctggaccagacagcctcctggcagaggactggaatggatcggcaccatgtactacagcggcaacatctactacaaccccagcctccagagccgggccaccatctctgtggacaccagcaagaaccagttcagcctgaagctgagcagcgtgacagccgccgataccgccgtgtattattgcgccagacatgtgggctacagctacggcagacggttctggtacttcgacctgtggggcagaggcaccctggtcacagtttcttctacgcgtgcctctacaaagggaccctccgtgtttcctctggctcccagcagcaagtctacaagcggaggaacagccgctctgggctgcctggtcaaggattactttcccgagcctgtgaccgtgtcctggaatagcggagcactgacaagcggcgtgcacacctttccagccgtgctgcaaagcagcggcctgtactctctgagcagcgtggtcacagtgcctagctctagcctgggcacccagacctacatctgcaatgtgaaccacaagcctagcaacaccaaggtggacaagagagtggaacccaagagctgtatccccgaggacacattcttcccaagcagcgacgtgccctgcgacgtgaagctggtggaaaagagcttcgagacagacaccaacctgaacttccagaacctgagcgtgatcggcttcagaatcctgctgctgaaagtggccggctttaacctgctgatgaccctgcggctgtggtccagc

SEQ ID NO: 35921 - DNA, 1887 bp, synthetic construct
  source 1..1887: mol_type = other DNA
atggccttaccagtgaccgccttgctcctgccgctggccttgctgctccacgccgccaggccggagatcgtgctgacacagtctcccgccacactgtcactgtctccaggcgaaagagccacactgagctgtagagccagccagagcgtgtcctcttacctggcctggtatcagcagaagcctggacaggctccccggctgctgatctacgatgccagcaatagagccacaggcatccccgccagattttctggctctggcagcggcaccgatttcaccctgaccataagcagcctggaacctgaggacttcgccgtgtactactgccagcagagaagcaactggcctcctacattcggccagggcaccaaggtggaaatcaaactcgagggacagcctaaggccaatcctaccgtgacactgttccctccaagcagcgaagaactccaggccaacaaggccacacttgtgtgcctgatctccgacttctaccctggggctgtgacagtggcttggaaggccgatggatctcctgtgaaagccggcgtggaaaccaccaagccatccaagcagagcaacaacaaatacgccgccagctcctacctgagcctgacacctgagcagtggaagtcccacagatcctacagctgccaagtgacccacgaaggcagcaccgtggaaaagacagtggcccctacagagtgcagcggcagagccgattgcggctttaccagcgagagctaccagcagggcgtgctgagcgccaccatcctgtacgagatcctgctgggcaaggccaccctgtacgccgtgctggtgtctgccctggtgctgatggctatggtcaagcggaaggacagccggggaagggccaagcgatctggatctggagcaacaaacttctcactactcaaacaagcaggtgacgtggaggagaatcccgggcctactagtatggactggatttggcgcatccttttccttgtcggcgctgctaccggcgcgcattccttcgaacaactccagctgcaagagtctggccccggactggtcaagcctagcgaaacactgagcctgacctgtaccgtgtctggcggcagcatcagcagcagctcttattggtggggctggaccagacagcctcctggcagaggactggaatggatcggcaccatgtactacagcggcaacatctactacaaccccagcctccagagccgggccaccatctctgtggacaccagcaagaaccagttcagcctgaagctgagcagcgtgacagccgccgataccgccgtgtattattgcgccagacatgtgggctacagctacggcagacggttctggtacttcgacctgtggggcagaggcaccctggtcacagtttcttctacgcgtgcctctacaaagggaccctccgtgtttcctctggctcccagcagcaagtctacaagcggaggaacagccgctctgggctgcctggtcaaggattactttcccgagcctgtgaccgtgtcctggaatagcggagcactgacaagcggcgtgcacacctttccagccgtgctgcaaagcagcggcctgtactctctgagcagcgtggtcacagtgcctagctctagcctgggcacccagacctacatctgcaatgtgaaccacaagcctagcaacaccaaggtggacaagagagtggaacccaagagctgtatccccgaggacacattcttcccaagccccgagagcagctgcgacgtgaagctggtggaaaagagcttcgagacagacaccaacctgaacttccagaacctgagcgtgatcggcttcagaatcctgctgctgaaagtggccggctttaacctgctgatgaccctgcggctgtggtccagc

SEQ ID NO: 35922 - DNA, 1365 bp, synthetic construct
  source 1..1365: mol_type = other DNA
atggccttaccagtgaccgccttgctcctgccgctggccttgctgctccacgccgccaggccggagatcgtgctgacacagtctcccgccacactgtcactgtctccaggcgaaagagccacactgagctgtagagccagccagagcgtgtcctcttacctggcctggtatcagcagaagcctggacaggctccccggctgctgatctacgatgccagcaatagagccacaggcatccccgccagattttctggctctggcagcggcaccgatttcaccctgaccataagcagcctggaacctgaggacttcgccgtgtactactgccagcagagaagcaactggcctcctacattcggccagggcaccaaggtggaaatcaaaggcggaggcggaagtggaggcggaggatctggcggcggaggctctcaactccagctgcaagagtctggccccggactggtcaagcctagcgaaacactgagcctgacctgtaccgtgtctggcggcagcatcagcagcagctcttattggtggggctggaccagacagcctcctggcagaggactggaatggatcggcaccatgtactacagcggcaacatctactacaaccccagcctccagagccgggccaccatctctgtggacaccagcaagaaccagttcagcctgaagctgagcagcgtgacagccgccgataccgccgtgtattattgcgccagacatgtgggctacagctacggcagacggttctggtacttcgacctgtggggcagaggcaccctggtcacagtttcttctacgcgtgacggtaacgaggagatgggaggaatcactcaaaccccttacaaagtctcaatttcaggaacaactgttatccttacatgtccccagtatcctggcagcgagatcctttggcagcataacgacaagaatatagggggagatgaagacgataagaatatcggatctgacgaggatcacttgagcctgaaagagttctccgagcttgaacaaagcggatattatgtgtgctatccgcgcgggtcaaagccggaagacgctaacttttacctttatctccgagccagagtgtgcgaaaattgcatggaaatggacgttatgtccgttgctacaatagttatcgtagatatatgcatcacgggtggactgcttctgctggtttattattggtccaagaatagaaaggccaaagctaaacccgtgaccagaggcgctggcgcaggcggaaggcaaaggggacaaaacaaagaacggccaccaccagtgccaaatccagattatgagcctattcggaaaggacagagggacctgtactctggcctgaatcagagaagaatc

SEQ ID NO: 35923 - DNA, 1260 bp, synthetic construct
  source 1..1260: mol_type = other DNA
atggccttaccagtgaccgccttgctcctgccgctggccttgctgctccacgccgccaggccggagatcgtgctgacacagtctcccgccacactgtcactgtctccaggcgaaagagccacactgagctgtagagccagccagagcgtgtcctcttacctggcctggtatcagcagaagcctggacaggctccccggctgctgatctacgatgccagcaatagagccacaggcatccccgccagattttctggctctggcagcggcaccgatttcaccctgaccataagcagcctggaacctgaggacttcgccgtgtactactgccagcagagaagcaactggcctcctacattcggccagggcaccaaggtggaaatcaaaggcggaggcggaagtggaggcggaggatctggcggcggaggctctcaactccagctgcaagagtctggccccggactggtcaagcctagcgaaacactgagcctgacctgtaccgtgtctggcggcagcatcagcagcagctcttattggtggggctggaccagacagcctcctggcagaggactggaatggatcggcaccatgtactacagcggcaacatctactacaaccccagcctccagagccgggccaccatctctgtggacaccagcaagaaccagttcagcctgaagctgagcagcgtgacagccgccgataccgccgtgtattattgcgccagacatgtgggctacagctacggcagacggttctggtacttcgacctgtggggcagaggcaccctggtcacagtttcttctacgcgtttcaagatccccatcgaggaactggaagatcgggtgttcgtgaactgcaacacctctatcacctgggtggaaggcaccgtgggaacactgctgagcgacatcaccagactggacctcggcaagcggattctggaccctcggggcatctacagatgcaacggcaccgacatctacaaggacaaagaaagcaccgtgcaggtccactacagaatgtgccagtcctgcgtggaactggaccctgctacagtggccggcatcatcgtgaccgatgtgatcgctactctgctgctggctctgggagtgttctgcttcgccggacacgaaacaggcagactgtctggcgctgccgatacacaggccctgctgagaaacgaccaagtgtatcagcccctgcgcgacagagatgatgcccagtattctcacctcggcggcaactgggctagaaacaag

SEQ ID NO: 35924 - DNA, 1290 bp, synthetic construct
  source 1..1290: mol_type = other DNA
atggccttaccagtgaccgccttgctcctgccgctggccttgctgctccacgccgccaggccggagatcgtgctgacacagtctcccgccacactgtcactgtctccaggcgaaagagccacactgagctgtagagccagccagagcgtgtcctcttacctggcctggtatcagcagaagcctggacaggctccccggctgctgatctacgatgccagcaatagagccacaggcatccccgccagattttctggctctggcagcggcaccgatttcaccctgaccataagcagcctggaacctgaggacttcgccgtgtactactgccagcagagaagcaactggcctcctacattcggccagggcaccaaggtggaaatcaaaggcggaggcggaagtggaggcggaggatctggcggcggaggctctcaactccagctgcaagagtctggccccggactggtcaagcctagcgaaacactgagcctgacctgtaccgtgtctggcggcagcatcagcagcagctcttattggtggggctggaccagacagcctcctggcagaggactggaatggatcggcaccatgtactacagcggcaacatctactacaaccccagcctccagagccgggccaccatctctgtggacaccagcaagaaccagttcagcctgaagctgagcagcgtgacagccgccgataccgccgtgtattattgcgccagacatgtgggctacagctacggcagacggttctggtacttcgacctgtggggcagaggcaccctggtcacagtttcttctacgcgtcagagcatcaagggcaaccacctggtcaaggtgtacgactaccaagaggacggcagcgtgctgctgacatgtgatgccgaggccaagaacatcacctggtttaaggacggcaagatgatcggcttcctgaccgaggacaagaagaagtggaacctgggcagcaacgctaaggaccccagaggcatgtatcagtgcaagggcagccagaacaagagcaagcccctccaggtgtactaccggatgtgccagaactgcatcgagctgaacgccgctaccatcagcggctttctgttcgccgagatcgtgtccatcttcgtgctggccgtgggcgtgtactttatcgctggacaggatggcgtgcggcagagcagagcttccgataagcaaaccctgctgcctaacgaccagctgtaccagcctctgaaggacagagaggacgaccagtacagccacctccagggcaatcagctgagaagaaac

SEQ ID NO: 35925 - DNA, 1239 bp, synthetic construct
  source 1..1239: mol_type = other DNA
atggccttaccagtgaccgccttgctcctgccgctggccttgctgctccacgccgccaggccggagatcgtgctgacacagtctcccgccacactgtcactgtctccaggcgaaagagccacactgagctgtagagccagccagagcgtgtcctcttacctggcctggtatcagcagaagcctggacaggctccccggctgctgatctacgatgccagcaatagagccacaggcatccccgccagattttctggctctggcagcggcaccgatttcaccctgaccataagcagcctggaacctgaggacttcgccgtgtactactgccagcagagaagcaactggcctcctacattcggccagggcaccaaggtggaaatcaaaggcggaggcggaagtggaggcggaggatctggcggcggaggctctcaactccagctgcaagagtctggccccggactggtcaagcctagcgaaacactgagcctgacctgtaccgtgtctggcggcagcatcagcagcagctcttattggtggggctggaccagacagcctcctggcagaggactggaatggatcggcaccatgtactacagcggcaacatctactacaaccccagcctccagagccgggccaccatctctgtggacaccagcaagaaccagttcagcctgaagctgagcagcgtgacagccgccgataccgccgtgtattattgcgccagacatgtgggctacagctacggcagacggttctggtacttcgacctgtggggcagaggcaccctggtcacagtttcttctacgcgtcagagttttgggttgttggaccctaaattgtgctatctgttggacggaatcctgttcatttacggagtgatcctgaccgcattgttcctgcgggttaagttttccagatccgcagacgcacccgcttaccaacaagggcagaaccaactctacaatgaacttaatttggggcggagggaagagtacgacgttctggacaaaaggaggggacgagatcccgagatgggcggaaagcctcagcgaaggaagaatccgcaagaggggctttataacgaactccagaaagataaaatggcagaagcctatagtgagattgggatgaagggagaaaggaggaggggtaaaggtcacgatgggttgtaccaaggattgagcacagccactaaagatacctatgatgcgctccacatgcaggccctgccgccaaga

SEQ ID NO: 35926 - DNA, 1524 bp, synthetic construct
  source 1..1524: mol_type = other DNA
atggccttaccagtgaccgccttgctcctgccgctggccttgctgctccacgccgccaggccggagatcgtgctgacacagtctcccgccacactgtcactgtctccaggcgaaagagccacactgagctgtagagccagccagagcgtgtcctcttacctggcctggtatcagcagaagcctggacaggctccccggctgctgatctacgatgccagcaatagagccacaggcatccccgccagattttctggctctggcagcggcaccgatttcaccctgaccataagcagcctggaacctgaggacttcgccgtgtactactgccagcagagaagcaactggcctcctacattcggccagggcaccaaggtggaaatcaaaggcggaggcggaagtggaggcggaggatctggcggcggaggctctcaactccagctgcaagagtctggccccggactggtcaagcctagcgaaacactgagcctgacctgtaccgtgtctggcggcagcatcagcagcagctcttattggtggggctggaccagacagcctcctggcagaggactggaatggatcggcaccatgtactacagcggcaacatctactacaaccccagcctccagagccgggccaccatctctgtggacaccagcaagaaccagttcagcctgaagctgagcagcgtgacagccgccgataccgccgtgtattattgcgccagacatgtgggctacagctacggcagacggttctggtacttcgacctgtggggcagaggcaccctggtcacagtttcttctacgcgtggaatgaggactgaggatcttcccaaagctgtcgtctttctcgaaccccaatggtatcgggtgctcgaaaaagactctgtgacactgaaatgccaaggggcctactctcccgaggacaactccacacagtggtttcataatgagtccctcatcagctctcaggccagctcttatttcattgatgccgctacagtggacgactccggcgagtatcggtgtcagaccaatctgtctacactgtctgaccccgtgcagcttgaggtccacattggatggttgctcttgcaagccccacgctgggttttcaaagaggaagatccaatccatctgcggtgccacagctggaaaaacaccgctctccacaaagtcacatacctgcaaaatggcaaaggacgcaaatacttccatcacaattccgatttttacattccgaaggctaccctgaaagacagcggcagctatttctgccggggactcgtcggctccaagaatgtgtcctccgaaaccgtgaatatcacgattacccaaggactggctgtgcctacaatctctagcttctttccgcctggataccaagtctccttctgtcttgtgatggtcctcctgtttgctgtggacacaggactgtacttttccgtgaaaacgaacatccgcagctccacacgcgattggaaagatcacaagtttaaatggcgcaaagatccccaggacaag

SEQ ID NO: 35927 - DNA, 1449 bp, synthetic construct
  source 1..1449: mol_type = other DNA
atggccttaccagtgaccgccttgctcctgccgctggccttgctgctccacgccgccaggccggagatcgtgctgacacagtctcccgccacactgtcactgtctccaggcgaaagagccacactgagctgtagagccagccagagcgtgtcctcttacctggcctggtatcagcagaagcctggacaggctccccggctgctgatctacgatgccagcaatagagccacaggcatccccgccagattttctggctctggcagcggcaccgatttcaccctgaccataagcagcctggaacctgaggacttcgccgtgtactactgccagcagagaagcaactggcctcctacattcggccagggcaccaaggtggaaatcaaaggcggaggcggaagtggaggcggaggatctggcggcggaggctctcaactccagctgcaagagtctggccccggactggtcaagcctagcgaaacactgagcctgacctgtaccgtgtctggcggcagcatcagcagcagctcttattggtggggctggaccagacagcctcctggcagaggactggaatggatcggcaccatgtactacagcggcaacatctactacaaccccagcctccagagccgggccaccatctctgtggacaccagcaagaaccagttcagcctgaagctgagcagcgtgacagccgccgataccgccgtgtattattgcgccagacatgtgggctacagctacggcagacggttctggtacttcgacctgtggggcagaggcaccctggtcacagtttcttctacgcgtggaatgaggactgaggatcttcccaaagctgtcgtctttctcgaaccccaatggtatcgggtgctcgaaaaagactctgtgacactgaaatgccaaggggcctactctcccgaggacaactccacacagtggtttcataatgagtccctcatcagctctcaggccagctcttatttcattgatgccgctacagtggacgactccggcgagtatcggtgtcagaccaatctgtctacactgtctgaccccgtgcagcttgaggtccacattggatggttgctcttgcaagccccacgctgggttttcaaagaggaagatccaatccatctgcggtgccacagctggaaaaacaccgctctccacaaagtcacatacctgcaaaatggcaaaggacgcaaatacttccatcacaattccgatttttacattccgaaggctaccctgaaagacagcggcagctatttctgccggggactcgtcggctccaagaatgtgtcctccgaaaccgtgaatatcacgattacccaaggactggctgtgcctacaatctctagcttctttccgcctggataccaagtctccttctgtcttgtgatggtcctcctgtttgctgtggacacaggactgtacttttccgtg

SEQ ID NO: 35928 - DNA, 1452 bp, synthetic construct
  source 1..1452: mol_type = other DNA
atggccttaccagtgaccgccttgctcctgccgctggccttgctgctccacgccgccaggccggagatcgtgctgacacagtctcccgccacactgtcactgtctccaggcgaaagagccacactgagctgtagagccagccagagcgtgtcctcttacctggcctggtatcagcagaagcctggacaggctccccggctgctgatctacgatgccagcaatagagccacaggcatccccgccagattttctggctctggcagcggcaccgatttcaccctgaccataagcagcctggaacctgaggacttcgccgtgtactactgccagcagagaagcaactggcctcctacattcggccagggcaccaaggtggaaatcaaaggcggaggcggaagtggaggcggaggatctggcggcggaggctctcaactccagctgcaagagtctggccccggactggtcaagcctagcgaaacactgagcctgacctgtaccgtgtctggcggcagcatcagcagcagctcttattggtggggctggaccagacagcctcctggcagaggactggaatggatcggcaccatgtactacagcggcaacatctactacaaccccagcctccagagccgggccaccatctctgtggacaccagcaagaaccagttcagcctgaagctgagcagcgtgacagccgccgataccgccgtgtattattgcgccagacatgtgggctacagctacggcagacggttctggtacttcgacctgtggggcagaggcaccctggtcacagtttcttctacgcgtggaatgaggactgaggatcttcccaaagctgtcgtctttctcgaaccccaatggtatcgggtgctcgaaaaagactctgtgacactgaaatgccaaggggcctactctcccgaggacaactccacacagtggtttcataatgagtccctcatcagctctcaggccagctcttatttcattgatgccgctacagtggacgactccggcgagtatcggtgtcagaccaatctgtctacactgtctgaccccgtgcagcttgaggtccacattggatggttgctcttgcaagccccacgctgggttttcaaagaggaagatccaatccatctgcggtgccacagctggaaaaacaccgctctccacaaagtcacatacctgcaaaatggcaaaggacgcaaatacttccatcacaattccgatttttacattccgaaggctaccctgaaagacagcggcagctatttctgccggggactcgtcggctccaagaatgtgtcctccgaaaccgtgaatatcacgattacccaaggactggctgtgcctacaatctctagcttctttccgcctggataccaagtctccttctgtcttgtgatggtcctcctgtttgctgtggacacaggactgtacttttccgtgaaa

SEQ ID NO: 35929 - DNA, 2184 bp, synthetic construct
  source 1..2184: mol_type = other DNA
atggccttaccagtgaccgccttgctcctgccgctggccttgctgctccacgccgccaggccggagatcgtgctgacacagtctcccgccacactgtcactgtctccaggcgaaagagccacactgagctgtagagccagccagagcgtgtcctcttacctggcctggtatcagcagaagcctggacaggctccccggctgctgatctacgatgccagcaatagagccacaggcatccccgccagattttctggctctggcagcggcaccgatttcaccctgaccataagcagcctggaacctgaggacttcgccgtgtactactgccagcagagaagcaactggcctcctacattcggccagggcaccaaggtggaaatcaaactcgagggacagcctaaggccaatcctaccgtgacactgttccctccaagcagcgaagaactccaggccaacaaggccacacttgtgtgcctgatctccgacttctaccctggggctgtgacagtggcttggaaggccgatggatctcctgtgaaagccggcgtggaaaccaccaagccatccaagcagagcaacaacaaatacgccgccagctcctacctgagcctgacacctgagcagtggaagtcccacagatcctacagctgccaagtgacccacgaaggcagcaccgtggaaaagacagtggcccctacagagtgcagcggatcccagagcttcggcctgctggaccccaagctgtgctacctgctggatggcatcctgttcatctacggcgtgatcctgaccgccctgttcctgagagtgaagttcagcagaagcgccgacgcccctgcctaccagcagggacagaaccaactgtacaacgagctgaacctgggcagacgggaagagtacgacgtgctggacaagcggagaggcagggaccctgagatgggcggaaagccccagcggagaaagaacccccaggaaggactgtataacgaactccagaaagacaagatggccgaagcctacagcgagatcggcatgaagggcgagcggagaagaggcaagggccacgatggcctgtaccagggcctgagcaccgccaccaaggacacctatgacgccctgcacatgcaggccctgcctccaagaagggccaagcgatctggatctggagcaacaaacttctcactactcaaacaagcaggtgacgtggaggagaatcccgggcctactagtatggactggatttggcgcatccttttccttgtcggcgctgctaccggcgcgcattccttcgaacaactccagctgcaagagtctggccccggactggtcaagcctagcgaaacactgagcctgacctgtaccgtgtctggcggcagcatcagcagcagctcttattggtggggctggaccagacagcctcctggcagaggactggaatggatcggcaccatgtactacagcggcaacatctactacaaccccagcctccagagccgggccaccatctctgtggacaccagcaagaaccagttcagcctgaagctgagcagcgtgacagccgccgataccgccgtgtattattgcgccagacatgtgggctacagctacggcagacggttctggtacttcgacctgtggggcagaggcaccctggtcacagtttcttctacgcgtgcctctacaaagggaccctccgtgtttcctctggctcccagcagcaagtctacaagcggaggaacagccgctctgggctgcctggtcaaggattactttcccgagcctgtgaccgtgtcctggaatagcggagcactgacaagcggcgtgcacacctttccagccgtgctgcaaagcagcggcctgtactctctgagcagcgtggtcacagtgcctagctctagcctgggcacccagacctacatctgcaatgtgaaccacaagcctagcaacaccaaggtggacaagagagtggaacccaagagctgtggtaccatcactcaaggtttggcagtgtcaaccatctcatcattctttccacctggctaccaagtgtccttctgcctggtcatggtgctgctgttcgccgtggataccggcctgtacttcagcgtcaagaccaacatccggtccagcaccagagactggaaggaccacaagttcaagtggcggaaggaccctcaggacaag

SEQ ID NO: 35930 - DNA, 2229 bp, synthetic construct
  source 1..2229: mol_type = other DNA
atggccttaccagtgaccgccttgctcctgccgctggccttgctgctccacgccgccaggccggagatcgtgctgacacagtctcccgccacactgtcactgtctccaggcgaaagagccacactgagctgtagagccagccagagcgtgtcctcttacctggcctggtatcagcagaagcctggacaggctccccggctgctgatctacgatgccagcaatagagccacaggcatccccgccagattttctggctctggcagcggcaccgatttcaccctgaccataagcagcctggaacctgaggacttcgccgtgtactactgccagcagagaagcaactggcctcctacattcggccagggcaccaaggtggaaatcaaactcgaggacctgaagaacgtgttcccacctgaggtggccgtgttcgagcctagcgaggccgagatcagccacacccagaaagccaccctcgtgtgcctggctaccggcttctaccccgaccatgtggaactgtcttggtgggtcaacggcaaagaggtgcacagcggcgtgtctaccgacccccagccactgaaagaacagcccgccctgaacgacagccggtactgcctgagcagcagactgagagtgtccgccaccttctggcagaacccccggaaccacttcagatgccaggtgcagttctacggcctgagcgagaacgacgagtggacccaggacagagccaagcccgtgacccagatcgtgtctgccgaagcctggggcagagccgattgcggatcccagagcttcggcctgctggaccccaagctgtgctacctgctggatggcatcctgttcatctacggcgtgatcctgaccgccctgttcctgagagtgaagttcagcagaagcgccgacgcccctgcctaccagcagggacagaaccaactgtacaacgagctgaacctgggcagacgggaagagtacgacgtgctggacaagcggagaggcagggaccctgagatgggcggaaagccccagcggagaaagaacccccaggaaggactgtataacgaactccagaaagacaagatggccgaagcctacagcgagatcggcatgaagggcgagcggagaagaggcaagggccacgatggcctgtaccagggcctgagcaccgccaccaaggacacctatgacgccctgcacatgcaggccctgcctccaagaagggccaagcgatctggatctggagcaacaaacttctcactactcaaacaagcaggtgacgtggaggagaatcccgggcctactagtatggactggatttggcgcatccttttccttgtcggcgctgctaccggcgcgcattccttcgaacaactccagctgcaagagtctggccccggactggtcaagcctagcgaaacactgagcctgacctgtaccgtgtctggcggcagcatcagcagcagctcttattggtggggctggaccagacagcctcctggcagaggactggaatggatcggcaccatgtactacagcggcaacatctactacaaccccagcctccagagccgggccaccatctctgtggacaccagcaagaaccagttcagcctgaagctgagcagcgtgacagccgccgataccgccgtgtattattgcgccagacatgtgggctacagctacggcagacggttctggtacttcgacctgtggggcagaggcaccctggtcacagtttcttctacgcgtatccagaaccctgatcctgccgtgtaccagctgcgggatagcaagagcagcgacaagagcgtgtgtctgttcaccgacttcgacagccagaccaacgtgtcccagagcaaggactccgacgtgtacatcaccgataagaccgtgctggacatgcggagcatggacttcaagagcaactccgccgtggcctggtccaacaagtccgatttcgcctgcgccaacgccttcaacaacagcattatccccgaggacacattcttcccaagccccgagagcagctgcggtaccatcactcaaggtttggcagtgtcaaccatctcatcattctttccacctggctaccaagtgtccttctgcctggtcatggtgctgctgttcgccgtggataccggcctgtacttcagcgtcaagaccaacatccggtccagcaccagagactggaaggaccacaagttcaagtggcggaaggaccctcaggacaag

SEQ ID NO: 35931 - DNA, 2154 bp, synthetic construct
  source 1..2154: mol_type = other DNA
atggccttaccagtgaccgccttgctcctgccgctggccttgctgctccacgccgccaggccggagatcgtgctgacacagtctcccgccacactgtcactgtctccaggcgaaagagccacactgagctgtagagccagccagagcgtgtcctcttacctggcctggtatcagcagaagcctggacaggctccccggctgctgatctacgatgccagcaatagagccacaggcatccccgccagattttctggctctggcagcggcaccgatttcaccctgaccataagcagcctggaacctgaggacttcgccgtgtactactgccagcagagaagcaactggcctcctacattcggccagggcaccaaggtggaaatcaaactcgaggacctgaagaacgtgttcccacctgaggtggccgtgttcgagcctagcgaggccgagatcagccacacccagaaagccaccctcgtgtgcctggctaccggcttctaccccgaccatgtggaactgtcttggtgggtcaacggcaaagaggtgcacagcggcgtgtctaccgacccccagccactgaaagaacagcccgccctgaacgacagccggtactgcctgagcagcagactgagagtgtccgccaccttctggcagaacccccggaaccacttcagatgccaggtgcagttctacggcctgagcgagaacgacgagtggacccaggacagagccaagcccgtgacccagatcgtgtctgccgaagcctggggcagagccgattgcggatcccagagcttcggcctgctggaccccaagctgtgctacctgctggatggcatcctgttcatctacggcgtgatcctgaccgccctgttcctgagagtgaagttcagcagaagcgccgacgcccctgcctaccagcagggacagaaccaactgtacaacgagctgaacctgggcagacgggaagagtacgacgtgctggacaagcggagaggcagggaccctgagatgggcggaaagccccagcggagaaagaacccccaggaaggactgtataacgaactccagaaagacaagatggccgaagcctacagcgagatcggcatgaagggcgagcggagaagaggcaagggccacgatggcctgtaccagggcctgagcaccgccaccaaggacacctatgacgccctgcacatgcaggccctgcctccaagaagggccaagcgatctggatctggagcaacaaacttctcactactcaaacaagcaggtgacgtggaggagaatcccgggcctactagtatggactggatttggcgcatccttttccttgtcggcgctgctaccggcgcgcattccttcgaacaactccagctgcaagagtctggccccggactggtcaagcctagcgaaacactgagcctgacctgtaccgtgtctggcggcagcatcagcagcagctcttattggtggggctggaccagacagcctcctggcagaggactggaatggatcggcaccatgtactacagcggcaacatctactacaaccccagcctccagagccgggccaccatctctgtggacaccagcaagaaccagttcagcctgaagctgagcagcgtgacagccgccgataccgccgtgtattattgcgccagacatgtgggctacagctacggcagacggttctggtacttcgacctgtggggcagaggcaccctggtcacagtttcttctacgcgtatccagaaccctgatcctgccgtgtaccagctgcgggatagcaagagcagcgacaagagcgtgtgtctgttcaccgacttcgacagccagaccaacgtgtcccagagcaaggactccgacgtgtacatcaccgataagaccgtgctggacatgcggagcatggacttcaagagcaactccgccgtggcctggtccaacaagtccgatttcgcctgcgccaacgccttcaacaacagcattatccccgaggacacattcttcccaagccccgagagcagctgcggtaccatcactcaaggtttggcagtgtcaaccatctcatcattctttccacctggctaccaagtgtccttctgcctggtcatggtgctgctgttcgccgtggataccggcctgtacttcagcgtc

SEQ ID NO: 35932 - DNA, 2157 bp, synthetic construct
  source 1..2157: mol_type = other DNA
atggccttaccagtgaccgccttgctcctgccgctggccttgctgctccacgccgccaggccggagatcgtgctgacacagtctcccgccacactgtcactgtctccaggcgaaagagccacactgagctgtagagccagccagagcgtgtcctcttacctggcctggtatcagcagaagcctggacaggctccccggctgctgatctacgatgccagcaatagagccacaggcatccccgccagattttctggctctggcagcggcaccgatttcaccctgaccataagcagcctggaacctgaggacttcgccgtgtactactgccagcagagaagcaactggcctcctacattcggccagggcaccaaggtggaaatcaaactcgaggacctgaagaacgtgttcccacctgaggtggccgtgttcgagcctagcgaggccgagatcagccacacccagaaagccaccctcgtgtgcctggctaccggcttctaccccgaccatgtggaactgtcttggtgggtcaacggcaaagaggtgcacagcggcgtgtctaccgacccccagccactgaaagaacagcccgccctgaacgacagccggtactgcctgagcagcagactgagagtgtccgccaccttctggcagaacccccggaaccacttcagatgccaggtgcagttctacggcctgagcgagaacgacgagtggacccaggacagagccaagcccgtgacccagatcgtgtctgccgaagcctggggcagagccgattgcggatcccagagcttcggcctgctggaccccaagctgtgctacctgctggatggcatcctgttcatctacggcgtgatcctgaccgccctgttcctgagagtgaagttcagcagaagcgccgacgcccctgcctaccagcagggacagaaccaactgtacaacgagctgaacctgggcagacgggaagagtacgacgtgctggacaagcggagaggcagggaccctgagatgggcggaaagccccagcggagaaagaacccccaggaaggactgtataacgaactccagaaagacaagatggccgaagcctacagcgagatcggcatgaagggcgagcggagaagaggcaagggccacgatggcctgtaccagggcctgagcaccgccaccaaggacacctatgacgccctgcacatgcaggccctgcctccaagaagggccaagcgatctggatctggagcaacaaacttctcactactcaaacaagcaggtgacgtggaggagaatcccgggcctactagtatggactggatttggcgcatccttttccttgtcggcgctgctaccggcgcgcattccttcgaacaactccagctgcaagagtctggccccggactggtcaagcctagcgaaacactgagcctgacctgtaccgtgtctggcggcagcatcagcagcagctcttattggtggggctggaccagacagcctcctggcagaggactggaatggatcggcaccatgtactacagcggcaacatctactacaaccccagcctccagagccgggccaccatctctgtggacaccagcaagaaccagttcagcctgaagctgagcagcgtgacagccgccgataccgccgtgtattattgcgccagacatgtgggctacagctacggcagacggttctggtacttcgacctgtggggcagaggcaccctggtcacagtttcttctacgcgtatccagaaccctgatcctgccgtgtaccagctgcgggatagcaagagcagcgacaagagcgtgtgtctgttcaccgacttcgacagccagaccaacgtgtcccagagcaaggactccgacgtgtacatcaccgataagaccgtgctggacatgcggagcatggacttcaagagcaactccgccgtggcctggtccaacaagtccgatttcgcctgcgccaacgccttcaacaacagcattatccccgaggacacattcttcccaagccccgagagcagctgcggtaccatcactcaaggtttggcagtgtcaaccatctcatcattctttccacctggctaccaagtgtccttctgcctggtcatggtgctgctgttcgccgtggataccggcctgtacttcagcgtcaag

SEQ ID NO: 35933 - DNA, 2160 bp, synthetic construct
  source 1..2160: mol_type = other DNA
atggccttaccagtgaccgccttgctcctgccgctggccttgctgctccacgccgccaggccggagatcgtgctgacacagtctcccgccacactgtcactgtctccaggcgaaagagccacactgagctgtagagccagccagagcgtgtcctcttacctggcctggtatcagcagaagcctggacaggctccccggctgctgatctacgatgccagcaatagagccacaggcatccccgccagattttctggctctggcagcggcaccgatttcaccctgaccataagcagcctggaacctgaggacttcgccgtgtactactgccagcagagaagcaactggcctcctacattcggccagggcaccaaggtggaaatcaaactcgaggacctgaagaacgtgttcccacctgaggtggccgtgttcgagcctagcgaggccgagatcagccacacccagaaagccaccctcgtgtgcctggctaccggcttctaccccgaccatgtggaactgtcttggtgggtcaacggcaaagaggtgcacagcggcgtgtctaccgacccccagccactgaaagaacagcccgccctgaacgacagccggtactgcctgagcagcagactgagagtgtccgccaccttctggcagaacccccggaaccacttcagatgccaggtgcagttctacggcctgagcgagaacgacgagtggacccaggacagagccaagcccgtgacccagatcgtgtctgccgaagcctggggcagagccgattgcggatcccagagcttcggcctgctggaccccaagctgtgctacctgctggatggcatcctgttcatctacggcgtgatcctgaccgccctgttcctgagagtgaagttcagcagaagcgccgacgcccctgcctaccagcagggacagaaccaactgtacaacgagctgaacctgggcagacgggaagagtacgacgtgctggacaagcggagaggcagggaccctgagatgggcggaaagccccagcggagaaagaacccccaggaaggactgtataacgaactccagaaagacaagatggccgaagcctacagcgagatcggcatgaagggcgagcggagaagaggcaagggccacgatggcctgtaccagggcctgagcaccgccaccaaggacacctatgacgccctgcacatgcaggccctgcctccaagaagggccaagcgatctggatctggagcaacaaacttctcactactcaaacaagcaggtgacgtggaggagaatcccgggcctactagtatggactggatttggcgcatccttttccttgtcggcgctgctaccggcgcgcattccttcgaacaactccagctgcaagagtctggccccggactggtcaagcctagcgaaacactgagcctgacctgtaccgtgtctggcggcagcatcagcagcagctcttattggtggggctggaccagacagcctcctggcagaggactggaatggatcggcaccatgtactacagcggcaacatctactacaaccccagcctccagagccgggccaccatctctgtggacaccagcaagaaccagttcagcctgaagctgagcagcgtgacagccgccgataccgccgtgtattattgcgccagacatgtgggctacagctacggcagacggttctggtacttcgacctgtggggcagaggcaccctggtcacagtttcttctacgcgtatccagaaccctgatcctgccgtgtaccagctgcgggatagcaagagcagcgacaagagcgtgtgtctgttcaccgacttcgacagccagaccaacgtgtcccagagcaaggactccgacgtgtacatcaccgataagaccgtgctggacatgcggagcatggacttcaagagcaactccgccgtggcctggtccaacaagtccgatttcgcctgcgccaacgccttcaacaacagcattatccccgaggacacattcttcccaagccccgagagcagctgcggtaccatcactcaaggtttggcagtgtcaaccatctcatcattctttccacctggctaccaagtgtccttctgcctggtcatggtgctgctgttcgccgtggataccggcctgtacttcagcgtcaagacc

SEQ ID NO: 35934 - DNA, 1971 bp, synthetic construct
  source 1..1971: mol_type = other DNA
atggccttaccagtgaccgccttgctcctgccgctggccttgctgctccacgccgccaggccggagatcgtgctgacacagtctcccgccacactgtcactgtctccaggcgaaagagccacactgagctgtagagccagccagagcgtgtcctcttacctggcctggtatcagcagaagcctggacaggctccccggctgctgatctacgatgccagcaatagagccacaggcatccccgccagattttctggctctggcagcggcaccgatttcaccctgaccataagcagcctggaacctgaggacttcgccgtgtactactgccagcagagaagcaactggcctcctacattcggccagggcaccaaggtggaaatcaaactcgagggacagcctaaggccaatcctaccgtgacactgttccctccaagcagcgaagaactccaggccaacaaggccacacttgtgtgcctgatctccgacttctaccctggggctgtgacagtggcttggaaggccgatggatctcctgtgaaagccggcgtggaaaccaccaagccatccaagcagagcaacaacaaatacgccgccagctcctacctgagcctgacacctgagcagtggaagtcccacagatcctacagctgccaagtgacccacgaaggcagcaccgtggaaaagacagtggcccctacagagtgcagcggatccctgggagagcctcagctgtgctatatcctggacgccatcctgtttctgtacggcatcgtgctgaccctgctgtactgccggctgaagatccaagtgcggaaggccgccatcaccagctacgagaaatccgacggcgtgtacaccggcctgagcaccagaaatcaagagacatacgagacactgaagcacgaaaagcctccacaaagggccaagcgatctggatctggagcaacaaacttctcactactcaaacaagcaggtgacgtggaggagaatcccgggcctactagtatggactggatttggcgcatccttttccttgtcggcgctgctaccggcgcgcattccttcgaacaactccagctgcaagagtctggccccggactggtcaagcctagcgaaacactgagcctgacctgtaccgtgtctggcggcagcatcagcagcagctcttattggtggggctggaccagacagcctcctggcagaggactggaatggatcggcaccatgtactacagcggcaacatctactacaaccccagcctccagagccgggccaccatctctgtggacaccagcaagaaccagttcagcctgaagctgagcagcgtgacagccgccgataccgccgtgtattattgcgccagacatgtgggctacagctacggcagacggttctggtacttcgacctgtggggcagaggcaccctggtcacagtttcttctacgcgtgcctctacaaagggaccctccgtgtttcctctggctcccagcagcaagtctacaagcggaggaacagccgctctgggctgcctggtcaaggattactttcccgagcctgtgaccgtgtcctggaatagcggagcactgacaagcggcgtgcacacctttccagccgtgctgcaaagcagcggcctgtactctctgagcagcgtggtcacagtgcctagctctagcctgggcacccagacctacatctgcaatgtgaaccacaagcctagcaacaccaaggtggacaagagagtggaacccaagagctgtggtaccctcggagaaccacagctctgttacattctggatgctatcctgttcctctatgggatcgtcctgacactcctgtattgcagactcaaaattcaagttcgcaaagccgccattacctcttacgagaagagtgatggggtgtacacaggactgtctacccggaatcaagaaacctacgaaaccctcaaacatgagaagccacctcagtaa

SEQ ID NO: 35935 - DNA, 1878 bp, synthetic construct
  source 1..1878: mol_type = other DNA
atggccttaccagtgaccgccttgctcctgccgctggccttgctgctccacgccgccaggccggagatcgtgctgacacagtctcccgccacactgtcactgtctccaggcgaaagagccacactgagctgtagagccagccagagcgtgtcctcttacctggcctggtatcagcagaagcctggacaggctccccggctgctgatctacgatgccagcaatagagccacaggcatccccgccagattttctggctctggcagcggcaccgatttcaccctgaccataagcagcctggaacctgaggacttcgccgtgtactactgccagcagagaagcaactggcctcctacattcggccagggcaccaaggtggaaatcaaactcgaggacctgaagaacgtgttcccacctgaggtggccgtgttcgagcctagcgaggccgagatcagccacacccagaaagccaccctcgtgtgcctggctaccggcttctaccccgaccatgtggaactgtcttggtgggtcaacggcaaagaggtgcacagcggcgtgtgtaccgacccccagccactgaaagaacagcccgccctgaacgacagccggtactgcctgagcagcagactgagagtgtccgccaccttctggcagaacccccggaaccacttcagatgccaggtgcagttctacggcctgagcgagaacgacgagtggacccaggacagagccaagcccgtgacccagatcgtgtctgccgaagcctggggcagagccgattgcggctttaccagcgagagctaccagcagggcgtgctgagcgcctactacatgtacttgttgctgctgctgaagtccgtggtgtacttcgccatcatcacatgctgcctgctgcggagaaccgccttctgctgcaacggcgagaagtctagggccaagcgatctggatctggagcaacaaacttctcactactcaaacaagcaggtgacgtggaggagaatcccgggcctactagtatggactggatttggcgcatccttttccttgtcggcgctgctaccggcgcgcattccttcgaacaactccagctgcaagagtctggccccggactggtcaagcctagcgaaacactgagcctgacctgtaccgtgtctggcggcagcatcagcagcagctcttattggtggggctggaccagacagcctcctggcagaggactggaatggatcggcaccatgtactacagcggcaacatctactacaaccccagcctccagagccgggccaccatctctgtggacaccagcaagaaccagttcagcctgaagctgagcagcgtgacagccgccgataccgccgtgtattattgcgccagacatgtgggctacagctacggcagacggttctggtacttcgacctgtggggcagaggcaccctggtcacagtttcttctacgcgtatccagaaccctgatcctgccgtgtaccagctgcgggatagcaagagcagcgacaagagcgtgtgtctgttcaccgacttcgacagccagaccaacgtgtcccagagcaaggactccgacgtgtacatcaccgataagtgcgtgctggacatgcggagcatggacttcaagagcaactccgccgtggcctggtccaacaagtccgatttcgcctgcgccaacgccttcaacaacagcattatccccgaggacacattcttcccaagccccgagagcagctgcgacgtgaagctggtggaaaagagcttcgagacagacaccaacctgaacttccagaacctgagcgtgatcggcttcagaatcctgctgctgaaagtggccggctttaacctgctgatgaccctgcggctgtggtccagc

SEQ ID NO: 35936 - DNA, 1899 bp, synthetic construct
  source 1..1899: mol_type = other DNA
atggccttaccagtgaccgccttgctcctgccgctggccttgctgctccacgccgccaggccggagatcgtgctgacacagtctcccgccacactgtcactgtctccaggcgaaagagccacactgagctgtagagccagccagagcgtgtcctcttacctggcctggtatcagcagaagcctggacaggctccccggctgctgatctacgatgccagcaatagagccacaggcatccccgccagattttctggctctggcagcggcaccgatttcaccctgaccataagcagcctggaacctgaggacttcgccgtgtactactgccagcagagaagcaactggcctcctacattcggccagggcaccaaggtggaaatcaaactcgaggacaagcagctggacgccgacgtgtcccccaagcctaccatcttcctgccctctatcgccgagacaaagctccagaaggccggcacctacctgtgcctgctggaaaagttcttcccagatgtgattaagatccactggcaggaaaagaagtccaacaccatcctgggcagccaggaaggcaacaccatgaagaccaacgacacctacatgaagttcagctggctgaccgtgcccgagaagtccctggacaaagaacacagatgcatcgtgcggcacgaaaacaacaagaacggcgtggaccaggaaatcatcttcccacccatcaagaccgatgtgattacaatggaccccaaggacaactgctccaaggacgccaacgataccctgctgctccagctgaccaacaccagcgcctactacatgtacgagatcctgctgggcaaggccaccctgtacgccgtgctggtgtctgccctggtgctgatggctatggtcaagcggaaggacagccggggaagggccaagcgatctggatctggagcaacaaacttctcactactcaaacaagcaggtgacgtggaggagaatcccgggcctactagtatggactggatttggcgcatccttttccttgtcggcgctgctaccggcgcgcattccttcgaacaactccagctgcaagagtctggccccggactggtcaagcctagcgaaacactgagcctgacctgtaccgtgtctggcggcagcatcagcagcagctcttattggtggggctggaccagacagcctcctggcagaggactggaatggatcggcaccatgtactacagcggcaacatctactacaaccccagcctccagagccgggccaccatctctgtggacaccagcaagaaccagttcagcctgaagctgagcagcgtgacagccgccgataccgccgtgtattattgcgccagacatgtgggctacagctacggcagacggttctggtacttcgacctgtggggcagaggcaccctggtcacagtttcttctacgcgtagccagcctcacaccaagcccagcgtgttcgtgatgaagaacggcaccaacgtggcctgcctcgtgaaagagttctaccccaaggacatcaggatcaacctggtgtccagcaagaagatcaccgagttcgaccccgccatcgtgatctcccccagcggcaagtacaacgccgtgaagctggggaagtatgaggacagcaacagcgtgacctgctccgtgcagcacgacaacaagaccgtgcacagcaccgactttgaagtgaaaaccgactccaccgaccacgtgaagcccaaagagacagagaacaccaagcagcccagcaagagctgccacaagcccaaggccatcgtgcacaccgagaaagtgaacatgatgagcctgaccgtgatcggcttcagaatcctgctgctgaaagtggccggctttaacctgctgatgaccctgcggctgtggtccagctaa

SEQ ID NO: 35937 - DNA, 1899 bp, synthetic construct
  source 1..1899: mol_type = other DNA
atggccttaccagtgaccgccttgctcctgccgctggccttgctgctccacgccgccaggccggagatcgtgctgacacagtctcccgccacactgtcactgtctccaggcgaaagagccacactgagctgtagagccagccagagcgtgtcctcttacctggcctggtatcagcagaagcctggacaggctccccggctgctgatctacgatgccagcaatagagccacaggcatccccgccagattttctggctctggcagcggcaccgatttcaccctgaccataagcagcctggaacctgaggacttcgccgtgtactactgccagcagagaagcaactggcctcctacattcggccagggcaccaaggtggaaatcaaactcgaggacaagcagctggacgccgacgtgtcccccaagcctaccatcttcctgccctctatcgccgagacaaagctccagaaggccggcacctacctgtgcctgctggaaaagttcttcccagatgtgattaagatccactggcaggaaaagaagtccaacaccatcctgggcagccaggaaggcaacaccatgaagaccaacgacacctacatgaagttcagctggctgaccgtgcccgagaagtccctggacaaagaacacagatgcatcgtgcggcacgaaaacaacaagaacggcgtggaccaggaaatcatcttcccacccatcaagaccgatgtgattacaatggaccccaaggacaactgctccaaggacgccaacgataccctgctgctccagctgaccaacaccagcgccaccatcctgtacgagatcctgctgggcaaggccaccctgtacgccgtgctggtgtctgccctggtgctgatggctatggtcaagcggaaggacagccggggaagggccaagcgatctggatctggagcaacaaacttctcactactcaaacaagcaggtgacgtggaggagaatcccgggcctactagtatggactggatttggcgcatccttttccttgtcggcgctgctaccggcgcgcattccttcgaacaactccagctgcaagagtctggccccggactggtcaagcctagcgaaacactgagcctgacctgtaccgtgtctggcggcagcatcagcagcagctcttattggtggggctggaccagacagcctcctggcagaggactggaatggatcggcaccatgtactacagcggcaacatctactacaaccccagcctccagagccgggccaccatctctgtggacaccagcaagaaccagttcagcctgaagctgagcagcgtgacagccgccgataccgccgtgtattattgcgccagacatgtgggctacagctacggcagacggttctggtacttcgacctgtggggcagaggcaccctggtcacagtttcttctacgcgtagccagcctcacaccaagcccagcgtgttcgtgatgaagaacggcaccaacgtggcctgcctcgtgaaagagttctaccccaaggacatcaggatcaacctggtgtccagcaagaagatcaccgagttcgaccccgccatcgtgatctcccccagcggcaagtacaacgccgtgaagctggggaagtatgaggacagcaacagcgtgacctgctccgtgcagcacgacaacaagaccgtgcacagcaccgactttgaagtgaaaaccgactccaccgaccacgtgaagcccaaagagacagagaacaccaagcagcccagcaagagctgccacaagcccaaggccatcgtgcacaccgagaaagtgaacatgatgagcctgaccgtgatcggcttcagaatcctgctgctgaaagtggccggctttaacctgctgatgaccctgcggctgtggtccagctaa

SEQ ID NO: 35938 - DNA, 1899 bp, synthetic construct
  source 1..1899: mol_type = other DNA
atggccttaccagtgaccgccttgctcctgccgctggccttgctgctccacgccgccaggccggagatcgtgctgacacagtctcccgccacactgtcactgtctccaggcgaaagagccacactgagctgtagagccagccagagcgtgtcctcttacctggcctggtatcagcagaagcctggacaggctccccggctgctgatctacgatgccagcaatagagccacaggcatccccgccagattttctggctctggcagcggcaccgatttcaccctgaccataagcagcctggaacctgaggacttcgccgtgtactactgccagcagagaagcaactggcctcctacattcggccagggcaccaaggtggaaatcaaactcgaggacaagcagctggacgccgacgtgtcccccaagcctaccatcttcctgccctctatcgccgagacaaagctccagaaggccggcacctacctgtgcctgctggaaaagttcttcccagatgtgattaagatccactggcaggaaaagaagtccaacaccatcctgggcagccaggaaggcaacaccatgaagaccaacgacacctacatgaagttcagctggctgaccgtgcccgagaagtccctggacaaagaacacagatgcatcgtgcggcacgaaaacaacaagaacggcgtggaccaggaaatcatcttcccacccatcaagaccgatgtgattacaatggaccccaaggacaactgctccaaggacgccaacgataccctgctgctccagctgaccaacaccagcgcctactacatgtacgagatcctgctgggcaaggccaccctgtacgccgtgctggtgtctgccctggtgctgatggctatggtcaagcggaaggacagccggggaagggccaagcgatctggatctggagcaacaaacttctcactactcaaacaagcaggtgacgtggaggagaatcccgggcctactagtatggactggatttggcgcatccttttccttgtcggcgctgctaccggcgcgcattccttcgaacaactccagctgcaagagtctggccccggactggtcaagcctagcgaaacactgagcctgacctgtaccgtgtctggcggcagcatcagcagcagctcttattggtggggctggaccagacagcctcctggcagaggactggaatggatcggcaccatgtactacagcggcaacatctactacaaccccagcctccagagccgggccaccatctctgtggacaccagcaagaaccagttcagcctgaagctgagcagcgtgacagccgccgataccgccgtgtattattgcgccagacatgtgggctacagctacggcagacggttctggtacttcgacctgtggggcagaggcaccctggtcacagtttcttctacgcgtagccagcctcacaccaagcccagcgtgttcgtgatgaagaacggcaccaacgtggcctgcctcgtgaaagagttctaccccaaggacatcaggatcaacctggtgtccagcaagaagatcaccgagttcgaccccgccatcgtgatctcccccagcggcaagtacaacgccgtgaagctggggaagtacgaggacagcaacagcgtgacctgctccgtgcagcacgacaacaagaccgtgcacagcaccgactttgaagtgaaaaccgactccaccgaccacgtgaagcccaaagagacagagaacaccaagcagcccagcaagagctgccacaagcccaaggccatcgtgcacaccgagaaagtgaacatgatgagcctgaccgtgctgggcttcagaatcctgctgctgaaagtggccggctttaacctgctgatgaccctgcggctgtggtccagctaa

SEQ ID NO: 35939 - DNA, 1899 bp, synthetic construct
  source 1..1899: mol_type = other DNA
atggccttaccagtgaccgccttgctcctgccgctggccttgctgctccacgccgccaggccggagatcgtgctgacacagtctcccgccacactgtcactgtctccaggcgaaagagccacactgagctgtagagccagccagagcgtgtcctcttacctggcctggtatcagcagaagcctggacaggctccccggctgctgatctacgatgccagcaatagagccacaggcatccccgccagattttctggctctggcagcggcaccgatttcaccctgaccataagcagcctggaacctgaggacttcgccgtgtactactgccagcagagaagcaactggcctcctacattcggccagggcaccaaggtggaaatcaaactcgaggacaagcagctggacgccgacgtgtcccccaagcctaccatcttcctgccctctatcgccgagacaaagctccagaaggccggcacctacctgtgcctgctggaaaagttcttcccagatgtgattaagatccactggcaggaaaagaagtccaacaccatcctgggcagccaggaaggcaacaccatgaagaccaacgacacctacatgaagttcagctggctgaccgtgcccgagaagtccctggacaaagaacacagatgcatcgtgcggcacgaaaacaacaagaacggcgtggaccaggaaatcatcttcccacccatcaagaccgatgtgattacaatggaccccaaggacaactgctccaaggacgccaacgataccctgctgctccagctgaccaacaccagcgccaccatcctgtacgagatcctgctgggcaaggccaccctgtacgccgtgctggtgtctgccctggtgctgatggctatggtcaagcggaaggacagccggggaagggccaagcgatctggatctggagcaacaaacttctcactactcaaacaagcaggtgacgtggaggagaatcccgggcctactagtatggactggatttggcgcatccttttccttgtcggcgctgctaccggcgcgcattccttcgaacaactccagctgcaagagtctggccccggactggtcaagcctagcgaaacactgagcctgacctgtaccgtgtctggcggcagcatcagcagcagctcttattggtggggctggaccagacagcctcctggcagaggactggaatggatcggcaccatgtactacagcggcaacatctactacaaccccagcctccagagccgggccaccatctctgtggacaccagcaagaaccagttcagcctgaagctgagcagcgtgacagccgccgataccgccgtgtattattgcgccagacatgtgggctacagctacggcagacggttctggtacttcgacctgtggggcagaggcaccctggtcacagtttcttctacgcgtagccagcctcacaccaagcccagcgtgttcgtgatgaagaacggcaccaacgtggcctgcctcgtgaaagagttctaccccaaggacatcaggatcaacctggtgtccagcaagaagatcaccgagttcgaccccgccatcgtgatctcccccagcggcaagtacaacgccgtgaagctggggaagtacgaggacagcaacagcgtgacctgctccgtgcagcacgacaacaagaccgtgcacagcaccgactttgaagtgaaaaccgactccaccgaccacgtgaagcccaaagagacagagaacaccaagcagcccagcaagagctgccacaagcccaaggccatcgtgcacaccgagaaagtgaacatgatgagcctgaccgtgctgggcttcagaatcctgctgctgaaagtggccggctttaacctgctgatgaccctgcggctgtggtccagctaa

SEQ ID NO: 35940 - DNA, 1881 bp, synthetic construct
  source 1..1881: mol_type = other DNA
atggccttaccagtgaccgccttgctcctgccgctggccttgctgctccacgccgccaggccggagatcgtgctgacacagtctcccgccacactgtcactgtctccaggcgaaagagccacactgagctgtagagccagccagagcgtgtcctcttacctggcctggtatcagcagaagcctggacaggctccccggctgctgatctacgatgccagcaatagagccacaggcatccccgccagattttctggctctggcagcggcaccgatttcaccctgaccataagcagcctggaacctgaggacttcgccgtgtactactgccagcagagaagcaactggcctcctacattcggccagggcaccaaggtggaaatcaaactcgaggacctgaagaacgtgttcccacctgaggtggccgtgttcgagcctagcgaggccgagatcagccacacccagaaagccaccctcgtgtgcctggctaccggcttctaccccgaccatgtggaactgtcttggtgggtcaacggcaaagaggtgcacagcggcgtgtgtaccgacccccagccactgaaagaacagcccgccctgaacgacagccggtactgcctgagcagcagactgagagtgtccgccaccttctggcagaacccccggaaccacttcagatgccaggtgcagttctacggcctgagcgagaacgacgagtggacccaggacagagccaagcccgtgacccagatcgtgtctgccgaagcctggggcagagccgattgcggctttaccagcgagagctaccagcagggcgtgctgagcgccaccatcctgtacttgttgctgctgctgaagtccgtggtgtacttcgccatcatcacatgctgcctgctgcggagaaccgccttctgctgcaacggcgagaagtctagggccaagcgatctggatctggagcaacaaacttctcactactcaaacaagcaggtgacgtggaggagaatcccgggcctactagtatggactggatttggcgcatccttttccttgtcggcgctgctaccggcgcgcattccttcgaacaactccagctgcaagagtctggccccggactggtcaagcctagcgaaacactgagcctgacctgtaccgtgtctggcggcagcatcagcagcagctcttattggtggggctggaccagacagcctcctggcagaggactggaatggatcggcaccatgtactacagcggcaacatctactacaaccccagcctccagagccgggccaccatctctgtggacaccagcaagaaccagttcagcctgaagctgagcagcgtgacagccgccgataccgccgtgtattattgcgccagacatgtgggctacagctacggcagacggttctggtacttcgacctgtggggcagaggcaccctggtcacagtttcttctacgcgtatccagaaccctgatcctgccgtgtaccagctgcgggatagcaagagcagcgacaagagcgtgtgtctgttcaccgacttcgacagccagaccaacgtgtcccagagcaaggactccgacgtgtacatcaccgataagtgcgtgctggacatgcggagcatggacttcaagagcaactccgccgtggcctggtccaacaagtccgatttcgcctgcgccaacgccttcaacaacagcattatccccgaggacacattcttcccaagccccgagagcagctgcgacgtgaagctggtggaaaagagcttcgagacagacaccaacctgaacttccagaacctgagcgtgatcggcctgcggatgctgttcgccaaaaccgtggccgtgaacttcctgctgaccgccaagctgttcttcctctaa

SEQ ID NO: 35941 - DNA, 1968 bp, synthetic construct
  source 1..1968: mol_type = other DNA
atggccttaccagtgaccgccttgctcctgccgctggccttgctgctccacgccgccaggccggagatcgtgctgacacagtctcccgccacactgtcactgtctccaggcgaaagagccacactgagctgtagagccagccagagcgtgtcctcttacctggcctggtatcagcagaagcctggacaggctccccggctgctgatctacgatgccagcaatagagccacaggcatccccgccagattttctggctctggcagcggcaccgatttcaccctgaccataagcagcctggaacctgaggacttcgccgtgtactactgccagcagagaagcaactggcctcctacattcggccagggcaccaaggtggaaatcaaactcgaggacctgaagaacgtgttcccacctgaggtggccgtgttcgagcctagcgaggccgagatcagccacacccagaaagccaccctcgtgtgcctggctaccggcttctaccccgaccatgtggaactgtcttggtgggtcaacggcaaagaggtgcacagcggcgtgtctaccgacccccagccactgaaagaacagcccgccctgaacgacagccggtactgcctgagcagcagactgagagtgtccgccaccttctggcagaacccccggaaccacttcagatgccaggtgcagttctacggcctgagcgagaacgacgagtggacccaggacagagccaagcccgtgacccagatcgtgtctgccgaagcctggggcagagccgattgcggatcctccaaggacgccaacgataccctgctgctccagctgaccaacaccagcgcctactacatgtacttgttgctgctgctgaagtccgtggtgtacttcgccatcatcacatgctgcctgctgcggagaaccgccttctgctgcaacggcgagaagtctagggccaagcgatctggatctggagcaacaaacttctcactactcaaacaagcaggtgacgtggaggagaatcccgggcctactagtatggactggatttggcgcatccttttccttgtcggcgctgctaccggcgcgcattccttcgaacaactccagctgcaagagtctggccccggactggtcaagcctagcgaaacactgagcctgacctgtaccgtgtctggcggcagcatcagcagcagctcttattggtggggctggaccagacagcctcctggcagaggactggaatggatcggcaccatgtactacagcggcaacatctactacaaccccagcctccagagccgggccaccatctctgtggacaccagcaagaaccagttcagcctgaagctgagcagcgtgacagccgccgataccgccgtgtattattgcgccagacatgtgggctacagctacggcagacggttctggtacttcgacctgtggggcagaggcaccctggtcacagtttcttctacgcgtatccagaaccctgatcctgccgtgtaccagctgcgggatagcaagagcagcgacaagagcgtgtgtctgttcaccgacttcgacagccagaccaacgtgtcccagagcaaggactccgacgtgtacatcaccgataagaccgtgctggacatgcggagcatggacttcaagagcaactccgccgtggcctggtccaacaagtccgatttcgcctgcgccaacgccttcaacaacagcattatccccgaggacacattcttcccaagccccgagagcagctgcggtaccgaagtgaaaaccgactccaccgaccacgtgaagcccaaagagacagagaacaccaagcagcccagcaagagctgccacaagcccaaggccatcgtgcacaccgagaaagtgaacatgatgagcctgaccgtgctgggcctgcggatgctgttcgccaaaaccgtggccgtgaacttcctgctgaccgccaagctgttcttcctctaa

SEQ ID NO: 35942 - DNA, 1878 bp, synthetic construct
  source 1..1878: mol_type = other DNA
atggccttaccagtgaccgccttgctcctgccgctggccttgctgctccacgccgccaggccggagatcgtgctgacacagtctcccgccacactgtcactgtctccaggcgaaagagccacactgagctgtagagccagccagagcgtgtcctcttacctggcctggtatcagcagaagcctggacaggctccccggctgctgatctacgatgccagcaatagagccacaggcatccccgccagattttctggctctggcagcggcaccgatttcaccctgaccataagcagcctggaacctgaggacttcgccgtgtactactgccagcagagaagcaactggcctcctacattcggccagggcaccaaggtggaaatcaaactcgaggacctgaagaacgtgttcccacctgaggtggccgtgttcgagcctagcgaggccgagatcagccacacccagaaagccaccctcgtgtgcctggctaccggcttctaccccgaccatgtggaactgtcttggtgggtcaacggcaaagaggtgcacagcggcgtgtgtaccgacccccagccactgaaagaacagcccgccctgaacgacagccggtactgcctgagcagcagactgagagtgtccgccaccttctggcagaacccccggaaccacttcagatgccaggtgcagttctacggcctgagcgagaacgacgagtggacccaggacagagccaagcccgtgacccagatcgtgtctgccgaagcctggggcagagccgattgcgacgtgaagctggtggaaaagagcttcgagacagacaccaacctgaacttccagaacctgagcgtgatcggcttcagaatcctgctgctgaaagtggccggctttaacctgctgatgaccctgcggctgtggtccagcagggccaagcgatctggatctggagcaacaaacttctcactactcaaacaagcaggtgacgtggaggagaatcccgggcctactagtatggactggatttggcgcatccttttccttgtcggcgctgctaccggcgcgcattccttcgaacaactccagctgcaagagtctggccccggactggtcaagcctagcgaaacactgagcctgacctgtaccgtgtctggcggcagcatcagcagcagctcttattggtggggctggaccagacagcctcctggcagaggactggaatggatcggcaccatgtactacagcggcaacatctactacaaccccagcctccagagccgggccaccatctctgtggacaccagcaagaaccagttcagcctgaagctgagcagcgtgacagccgccgataccgccgtgtattattgcgccagacatgtgggctacagctacggcagacggttctggtacttcgacctgtggggcagaggcaccctggtcacagtttcttctacgcgtatccagaaccctgatcctgccgtgtaccagctgcgggatagcaagagcagcgacaagagcgtgtgtctgttcaccgacttcgacagccagaccaacgtgtcccagagcaaggactccgacgtgtacatcaccgataagtgcgtgctggacatgcggagcatggacttcaagagcaactccgccgtggcctggtccaacaagtccgatttcgcctgcgccaacgccttcaacaacagcattatccccgaggacacattcttcccaagccccgagagcagctgcggctttaccagcgagagctaccagcagggcgtgctgagcgccaccatcctgtacgagatcctgctgggcaaggccaccctgtacgccgtgctggtgtctgccctggtgctgatggctatggtcaagcggaaggacagccggggataa

SEQ ID NO: 35943 - DNA, 1878 bp, synthetic construct
  source 1..1878: mol_type = other DNA
atggccttaccagtgaccgccttgctcctgccgctggccttgctgctccacgccgccaggccggagatcgtgctgacacagtctcccgccacactgtcactgtctccaggcgaaagagccacactgagctgtagagccagccagagcgtgtcctcttacctggcctggtatcagcagaagcctggacaggctccccggctgctgatctacgatgccagcaatagagccacaggcatccccgccagattttctggctctggcagcggcaccgatttcaccctgaccataagcagcctggaacctgaggacttcgccgtgtactactgccagcagagaagcaactggcctcctacattcggccagggcaccaaggtggaaatcaaactcgaggacctgaagaacgtgttcccacctgaggtggccgtgttcgagcctagcgaggccgagatcagccacacccagaaagccaccctcgtgtgcctggctaccggcttctaccccgaccatgtggaactgtcttggtgggtcaacggcaaagaggtgcacagcggcgtgtgtaccgacccccagccactgaaagaacagcccgccctgaacgacagccggtactgcctgagcagcagactgagagtgtccgccaccttctggcagaacccccggaaccacttcagatgccaggtgcagttctacggcctgagcgagaacgacgagtggacccaggacagagccaagcccgtgacccagatcgtgtctgccgaagcctggggcagagccgattgcggctttaccagcgagagctaccagcagggcgtgctgagcgccaccaacctgagcgtgatcggcttcagaatcctgctgctgaaagtggccggctttaacctgctgatgaccctgcggctgtggtccagcagggccaagcgatctggatctggagcaacaaacttctcactactcaaacaagcaggtgacgtggaggagaatcccgggcctactagtatggactggatttggcgcatccttttccttgtcggcgctgctaccggcgcgcattccttcgaacaactccagctgcaagagtctggccccggactggtcaagcctagcgaaacactgagcctgacctgtaccgtgtctggcggcagcatcagcagcagctcttattggtggggctggaccagacagcctcctggcagaggactggaatggatcggcaccatgtactacagcggcaacatctactacaaccccagcctccagagccgggccaccatctctgtggacaccagcaagaaccagttcagcctgaagctgagcagcgtgacagccgccgataccgccgtgtattattgcgccagacatgtgggctacagctacggcagacggttctggtacttcgacctgtggggcagaggcaccctggtcacagtttcttctacgcgtatccagaaccctgatcctgccgtgtaccagctgcgggatagcaagagcagcgacaagagcgtgtgtctgttcaccgacttcgacagccagaccaacgtgtcccagagcaaggactccgacgtgtacatcaccgataagtgcgtgctggacatgcggagcatggacttcaagagcaactccgccgtggcctggtccaacaagtccgatttcgcctgcgccaacgccttcaacaacagcattatccccgaggacacattcttcccaagccccgagagcagctgcgacgtgaagctggtggaaaagagcttcgagacagacaccaacctgaacttccagatcctgtacgagatcctgctgggcaaggccaccctgtacgccgtgctggtgtctgccctggtgctgatggctatggtcaagcggaaggacagccggggataa

SEQ ID NO: 35944 - DNA, 1878 bp, synthetic construct; identical to SEQ ID NO: 35942
  source 1..1878: mol_type = other DNA

SEQ ID NO: 35945 - DNA, 1878 bp, synthetic construct; identical to SEQ ID NO: 35943
  source 1..1878: mol_type = other DNA

SEQ ID NO: 35946 - DNA, 1875 bp, synthetic construct
  source 1..1875: mol_type = other DNA
atggccttaccagtgaccgccttgctcctgccgctggccttgctgctccacgccgccaggccggagatcgtgctgacacagtctcccgccacactgtcactgtctccaggcgaaagagccacactgagctgtagagccagccagagcgtgtcctcttacctggcctggtatcagcagaagcctggacaggctccccggctgctgatctacgatgccagcaatagagccacaggcatccccgccagattttctggctctggcagcggcaccgatttcaccctgaccataagcagcctggaacctgaggacttcgccgtgtactactgccagcagagaagcaactggcctcctacattcggccagggcaccaaggtggaaatcaaactcgaggacctgaagaacgtgttcccacctgaggtggccgtgttcgagcctagcgaggccgagatcagccacacccagaaagccaccctcgtgtgcctggctaccggcttctaccccgaccatgtggaactgtcttggtgggtcaacggcaaagaggtgcacagcggcgtgtgtaccgacccccagccactgaaagaacagcccgccctgaacgacagccggtactgcctgagcagcagactgagagtgtccgccaccttctggcagaacccccggaaccacttcagatgccaggtgcagttctacggcctgagcgagaacgacgagtggacccaggacagagccaagcccgtgacccagatcgtgtctgccgaagcctggggcagagccgattgcgacgtgaagctggtggaaaagagcttcgagacagacaccaacctgaacttccagaacctgagcgtgatcggcttcagaatcctgctgctgaaagtggccggctttaacctgctgatgaccctgcggctgtggtccagcagggccaagcgatctggatctggagcaacaaacttctcactactcaaacaagcaggtgacgtggaggagaatcccgggcctactagtatggactggatttggcgcatccttttccttgtcggcgctgctaccggcgcgcattccttcgaacaactccagctgcaagagtctggccccggactggtcaagcctagcgaaacactgagcctgacctgtaccgtgtctggcggcagcatcagcagcagctcttattggtggggctggaccagacagcctcctggcagaggactggaatggatcggcaccatgtactacagcggcaacatctactacaaccccagcctccagagccgggccaccatctctgtggacaccagcaagaaccagttcagcctgaagctgagcagcgtgacagccgccgataccgccgtgtattattgcgccagacatgtgggctacagctacggcagacggttctggtacttcgacctgtggggcagaggcaccctggtcacagtttcttctacgcgtatccagaaccctgatcctgccgtgtaccagctgcgggatagcaagagcagcgacaagagcgtgtgtctgttcaccgacttcgacagccagaccaacgtgtcccagagcaaggactccgacgtgtacatcaccgataagtgcgtgctggacatgcggagcatggacttcaagagcaactccgccgtggcctggtccaacaagtccgatttcgcctgcgccaacgccttcaacaacagcattatccccgaggacacattcttcccaagccccgagagcagctgcggctttaccagcgagagctaccagcagggcgtgctgagcgccaccatcctgtacgagatcctgctgggcaaggccaccctgtacgccgtgctggtgtctgccctggtgctgatggctatggtcaagcggaaggacagccgggga

SEQ ID NO: 35947 - DNA, 1887 bp, synthetic construct
  source 1..1887: mol_type = other DNA
atggccttaccagtgaccgccttgctcctgccgctggccttgctgctccacgccgccaggccggagatcgtgctgacacagtctcccgccacactgtcactgtctccaggcgaaagagccacactgagctgtagagccagccagagcgtgtcctcttacctggcctggtatcagcagaagcctggacaggctccccggctgctgatctacgatgccagcaatagagccacaggcatccccgccagattttctggctctggcagcggcaccgatttcaccctgaccataagcagcctggaacctgaggacttcgccgtgtactactgccagcagagaagcaactggcctcctacattcggccagggcaccaaggtggaaatcaaactcgaggccgacgtgtcccccaagcctaccatcttcctgccctctatcgccgagacaaagctccagaaggccggcacctacctgtgcctgctggaaaagttcttcccagatgtgattaagatccactggcaggaaaagaagtccaacaccatcctgggcagccaggaaggcaacaccatgaagaccaacgacacctacatgaagttcagctggctgaccgtgcccgagaagtccctggacaaagaacacagatgcatcgtgcggcacgaaaacaacaagaacggcgtggaccaggaaatcatcttcccacccatcaagaccgatgtgattacaatggaccccaaggacaactgctccaaggacgccaacgataccctgctgctccagctgaccaacaccagcgcctactacatgtacttgttgctgctgctgaagtccgtggtgtacttcgccatcatcacatgctgcctgctgcggagaaccgccttctgctgcaacggcgagaagtctagggccaagcgatctggatctggagcaacaaacttctcactactcaaacaagcaggtgacgtggaggagaatcccgggcctactagtatggactggatttggcgcatccttttccttgtcggcgctgctaccggcgcgcattccttcgaacaactccagctgcaagagtctggccccggactggtcaagcctagcgaaacactgagcctgacctgtaccgtgtctggcggcagcatcagcagcagctcttattggtggggctggaccagacagcctcctggcagaggactggaatggatcggcaccatgtactacagcggcaacatctactacaaccccagcctccagagccgggccaccatctctgtggacaccagcaagaaccagttcagcctgaagctgagcagcgtgacagccgccgataccgccgtgtattattgcgccagacatgtgggctacagctacggcagacggttctggtacttcgacctgtggggcagaggcaccctggtcacagtttcttctacgcgtagccagcctcacaccaagcccagcgtgttcgtgatgaagaacggcaccaacgtggcctgcctcgtgaaagagttctaccccaaggacatcaggatcaacctggtgtccagcaagaagatcaccgagttcgaccccgccatcgtgatctcccccagcggcaagtacaacgccgtgaagctggggaagtatgaggacagcaacagcgtgacctgctccgtgcagcacgacaacaagaccgtgcacagcaccgactttgaagtgaaaaccgactccaccgaccacgtgaagcccaaagagacagagaacaccaagcagcccagcaagagctgccacaagcccaaggccatcgtgcacaccgagaaagtgaacatgatgagcctgaccgtgatcggcttcagaatcctgctgctgaaagtggccggctttaacctgctgatgaccctgcggctgtggtccagctaa

SEQ ID NO: 35948 - DNA, 1887 bp, synthetic construct
  source 1..1887: mol_type = other DNA
atggccttaccagtgaccgccttgctcctgccgctggccttgctgctccacgccgccaggccggagatcgtgctgacacagtctcccgccacactgtcactgtctccaggcgaaagagccacactgagctgtagagccagccagagcgtgtcctcttacctggcctggtatcagcagaagcctggacaggctccccggctgctgatctacgatgccagcaatagagccacaggcatccccgccagattttctggctctggcagcggcaccgatttcaccctgaccataagcagcctggaacctgaggacttcgccgtgtactactgccagcagagaagcaactggcctcctacattcggccagggcaccaaggtggaaatcaaactcgaggccgacgtgtcccccaagcctaccatcttcctgccctctatcgccgagacaaagctccagaaggccggcacctacctgtgcctgctggaaaagttcttcccagatgtgattaagatccactggcaggaaaagaagtccaacaccatcctgggcagccaggaaggcaacaccatgaagaccaacgacacctacatgaagttcagctggctgaccgtgcccgagaagtccctggacaaagaacacagatgcatcgtgcggcacgaaaacaacaagaacggcgtggaccaggaaatcatcttcccacccatcaagaccgatgtgattacaatggaccccaaggacaactgctccaaggacgccaacgataccctgctgctccagctgaccaacaccagcgcctactacatgtacttgttgctgctgctgaagtccgtggtgtacttcgccatcatcacatgctgcctgctgcggagaaccgccttctgctgcaacggcgagaagtctagggccaagcgatctggatctggagcaacaaacttctcactactcaaacaagcaggtgacgtggaggagaatcccgggcctactagtatggactggatttggcgcatccttttccttgtcggcgctgctaccggcgcgcattccttcgaacaactccagctgcaagagtctggccccggactggtcaagcctagcgaaacactgagcctgacctgtaccgtgtctggcggcagcatcagcagcagctcttattggtggggctggaccagacagcctcctggcagaggactggaatggatcggcaccatgtactacagcggcaacatctactacaaccccagcctccagagccgggccaccatctctgtggacaccagcaagaaccagttcagcctgaagctgagcagcgtgacagccgccgataccgccgtgtattattgcgccagacatgtgggctacagctacggcagacggttctggtacttcgacctgtggggcagaggcaccctggtcacagtttcttctacgcgtagccagcctcacaccaagcccagcgtgttcgtgatgaagaacggcaccaacgtggcctgcctcgtgaaagagttctaccccaaggacatcaggatcaacctggtgtccagcaagaagatcaccgagttcgaccccgccatcgtgatctcccccagcggcaagtacaacgccgtgaagctggggaagtacgaggacagcaacagcgtgacctgctccgtgcagcacgacaacaagaccgtgcacagcaccgactttgaagtgaaaaccgactccaccgaccacgtgaagcccaaagagacagagaacaccaagcagcccagcaagagctgccacaagcccaaggccatcgtgcacaccgagaaagtgaacatgatgagcctgaccgtgctgggcttcagaatcctgctgctgaaagtggccggctttaacctgctgatgaccctgcggctgtggtccagctaa

SEQ ID NO: 35949 - DNA, 1875 bp, synthetic construct; identical to SEQ ID NO: 35946
  source 1..1875: mol_type = other DNA

SEQ ID NO: 35950 - DNA, 1887 bp, synthetic construct
  source 1..1887: mol_type = other DNA
atggccttaccagtgaccgccttgctcctgccgctggccttgctgctccacgccgccaggccggagatcgtgctgacacagtctcccgccacactgtcactgtctccaggcgaaagagccacactgagctgtagagccagccagagcgtgtcctcttacctggcctggtatcagcagaagcctggacaggctccccggctgctgatctacgatgccagcaatagagccacaggcatccccgccagattttctggctctggcagcggcaccgatttcaccctgaccataagcagcctggaacctgaggacttcgccgtgtactactgccagcagagaagcaactggcctcctacattcggccagggcaccaaggtggaaatcaaactcgagatccagaaccctgatcctgccgtgtaccagctgcgggatagcaagagcagcgacaagagcgtgtgtctgttcaccgacttcgacagccagaccaacgtgtcccagagcaaggactccgacgtgtacatcaccgataagtgcgtgctggacatgcggagcatggacttcaagagcaactccgccgtggcctggtccaacaagtccgatttcgcctgcgccaacgccttcaacaacagcattatccccgaggacacattcttcccaagccccgagagcagctgcggctttaccagcgagagctaccagcagggcgtgctgagcgccaccatcctgtacgagatcctgctgggcaaggccaccctgtacgccgtgctggtgtctgccctggtgctgatggctatggtcaagcggaaggacagccggggacgcgccaagagaagcggatctggcgtgaagcagaccctgaatttcgacctgctgaagctggctggcgacgtggaatccaacccaggccctactagtatggactggatttggcgcatccttttccttgtcggcgctgctaccggcgcgcattccttcgaacaactccagctgcaagagtctggccccggactggtcaagcctagcgaaacactgagcctgacctgtaccgtgtctggcggcagcatcagcagcagctcttattggtggggctggaccagacagcctcctggcagaggactggaatggatcggcaccatgtactacagcggcaacatctactacaaccccagcctccagagccgggccaccatctctgtggacaccagcaagaaccagttcagcctgaagctgagcagcgtgacagccgccgataccgccgtgtattattgcgccagacatgtgggctacagctacggcagacggttctggtacttcgacctgtggggcagaggcaccctggtcacagtttcttctacgcgtgaggacctgaagaacgtgttcccacctgaggtggccgtgttcgagcctagcgaggccgagatcagccacacccagaaagccaccctcgtgtgcctggctaccggcttctaccccgaccatgtggaactgtcttggtgggtcaacggcaaagaggtgcacagcggcgtgtgtaccgacccccagccactgaaagaacagcccgccctgaacgacagccggtactgcctgagcagcagactgagagtgtccgccaccttctggcagaacccccggaaccacttcagatgccaggtgcagttctacggcctgagcgagaacgacgagtggacccaggacagagccaagcccgtgacccagatcgtgtctgccgaagcctggggcagagccgattgcgacgtgaagctggtggaaaagagcttcgagacagacaccaacctgaacttccagaacctgagcgtgatcggcttcagaatcctgctgctgaaagtggccggctttaacctgctgatgaccctgcggctgtggtccagc

SEQ ID NO: 35951 - DNA, 2280 bp, synthetic construct
  source 1..2280: mol_type = other DNA
atggccttaccagtgaccgccttgctcctgccgctggccttgctgctccacgccgccaggccggaagtgcagctggttgaatctggcggaggactggttcagcctggcggatctctgagactgtcttgtgccgccagcggcttcagcttcagcgacttttggatgagctgggtccgacaggcccctggcaaaggacttgaatgggtcgccacaatcagccaggccggcagcgagaaggactacgtggactctgtgaagggcagattcaccatcagccgggacaacgccaagaagtccctgtacctccagatgaacagcctgagagccgaggacaccgccgtgtactattgtgcctctggcgtgtacagcttcgactacagaggccagggcaccctggtcacagtctcttctggtaccggcggaggcggatctggcggcggaggtagcggtggcggaggatctgaattcgagatcgtgctgacacagtctcccgccacactgtcactgtctccaggcgaaagagccacactgagctgtagagccagccagagcgtgtcctcttacctggcctggtatcagcagaagcctggacaggctccccggctgctgatctacgatgccagcaatagagccacaggcatccccgccagattttctggctctggcagcggcaccgatttcaccctgaccataagcagcctggaacctgaggacttcgccgtgtactactgccagcagagaagcaactggcctcctacattcggccagggcaccaaggtggaaatcaaactcgaggacctgaagaacgtgttcccacctgaggtggccgtgttcgagcctagcgaggccgagatcagccacacccagaaagccaccctcgtgtgcctggctaccggcttctaccccgaccatgtggaactgtcttggtgggtcaacggcaaagaggtgcacagcggcgtgtgtaccgacccccagccactgaaagaacagcccgccctgaacgacagccggtactgcctgagcagcagactgagagtgtccgccaccttctggcagaacccccggaaccacttcagatgccaggtgcagttctacggcctgagcgagaacgacgagtggacccaggacagagccaagcccgtgacccagatcgtgtctgccgaagcctggggcagagccgattgcgacgtgaagctggtggaaaagagcttcgagacagacaccaacctgaacttccagaacctgagcgtgatcggcttcagaatcctgctgctgaaagtggccggctttaacctgctgatgaccctgcggctgtggtccagcagggccaagcgatctggatctggagcaacaaacttctcactactcaaacaagcaggtgacgtggaggagaatcccgggcctactagtatggactggatttggcgcatccttttccttgtcggcgctgctaccggcgcgcattccttcgaacaactccagctgcaagagtctggccccggactggtcaagcctagcgaaacactgagcctgacctgtaccgtgtctggcggcagcatcagcagcagctcttattggtggggctggaccagacagcctcctggcagaggactggaatggatcggcaccatgtactacagcggcaacatctactacaaccccagcctccagagccgggccaccatctctgtggacaccagcaagaaccagttcagcctgaagctgagcagcgtgacagccgccgataccgccgtgtattattgcgccagacatgtgggctacagctacggcagacggttctggtacttcgacctgtggggcagaggcaccctggtcacagtttcttctacgcgtatccagaaccctgatcctgccgtgtaccagctgcgggatagcaagagcagcgacaagagcgtgtgtctgttcaccgacttcgacagccagaccaacgtgtcccagagcaaggactccgacgtgtacatcaccgataagtgcgtgctggacatgcggagcatggacttcaagagcaactccgccgtggcctggtccaacaagtccgatttcgcctgcgccaacgccttcaacaacagcattatccccgaggacacattcttcccaagccccgagagcagctgcggctttaccagcgagagctaccagcagggcgtgctgagcgccaccatcctgtacgagatcctgctgggcaaggccaccctgtacgccgtgctggtgtctgccctggtgctgatggctatggtcaagcggaaggacagccgggga

SEQ ID NO: 35952 - DNA, 2292 bp, synthetic construct
  source 1..2292: mol_type = other DNA
atggccttaccagtgaccgccttgctcctgccgctggccttgctgctccacgccgccaggccggaagtgcagctggttgaatctggcggaggactggttcagcctggcggatctctgagactgtcttgtgccgccagcggcttcagcttcagcgacttttggatgagctgggtccgacaggcccctggcaaaggacttgaatgggtcgccacaatcagccaggccggcagcgagaaggactacgtggactctgtgaagggcagattcaccatcagccgggacaacgccaagaagtccctgtacctccagatgaacagcctgagagccgaggacaccgccgtgtactattgtgcctctggcgtgtacagcttcgactacagaggccagggcaccctggtcacagtctcttctggtaccggcggaggcggatctggcggcggaggtagcggtggcggaggatctgaattcgagatcgtgctgacacagtctcccgccacactgtcactgtctccaggcgaaagagccacactgagctgtagagccagccagagcgtgtcctcttacctggcctggtatcagcagaagcctggacaggctccccggctgctgatctacgatgccagcaatagagccacaggcatccccgccagattttctggctctggcagcggcaccgatttcaccctgaccataagcagcctggaacctgaggacttcgccgtgtactactgccagcagagaagcaactggcctcctacattcggccagggcaccaaggtggaaatcaaactcgagatccagaaccctgatcctgccgtgtaccagctgcgggatagcaagagcagcgacaagagcgtgtgtctgttcaccgacttcgacagccagaccaacgtgtcccagagcaaggactccgacgtgtacatcaccgataagtgcgtgctggacatgcggagcatggacttcaagagcaactccgccgtggcctggtccaacaagtccgatttcgcctgcgccaacgccttcaacaacagcattatccccgaggacacattcttcccaagccccgagagcagctgcggctttaccagcgagagctaccagcagggcgtgctgagcgccaccatcctgtacgagatcctgctgggcaaggccaccctgtacgccgtgctggtgtctgccctggtgctgatggctatggtcaagcggaaggacagccggggacgcgccaagagaagcggatctggcgtgaagcagaccctgaatttcgacctgctgaagctggctggcgacgtggaatccaacccaggccctactagtatggactggatttggcgcatccttttccttgtcggcgctgctaccggcgcgcattccttcgaacaactccagctgcaagagtctggccccggactggtcaagcctagcgaaacactgagcctgacctgtaccgtgtctggcggcagcatcagcagcagctcttattggtggggctggaccagacagcctcctggcagaggactggaatggatcggcaccatgtactacagcggcaacatctactacaaccccagcctccagagccgggccaccatctctgtggacaccagcaagaaccagttcagcctgaagctgagcagcgtgacagccgccgataccgccgtgtattattgcgccagacatgtgggctacagctacggcagacggttctggtacttcgacctgtggggcagaggcaccctggtcacagtttcttctacgcgtgaggacctgaagaacgtgttcccacctgaggtggccgtgttcgagcctagcgaggccgagatcagccacacccagaaagccaccctcgtgtgcctggctaccggcttctaccccgaccatgtggaactgtcttggtgggtcaacggcaaagaggtgcacagcggcgtgtgtaccgacccccagccactgaaagaacagcccgccctgaacgacagccggtactgcctgagcagcagactgagagtgtccgccaccttctggcagaacccccggaaccacttcagatgccaggtgcagttctacggcctgagcgagaacgacgagtggacccaggacagagccaagcccgtgacccagatcgtgtctgccgaagcctggggcagagccgattgcgacgtgaagctggtggaaaagagcttcgagacagacaccaacctgaacttccagaacctgagcgtgatcggcttcagaatcctgctgctgaaagtggccggctttaacctgctgatgaccctgcggctgtggtccagc

SEQ ID NO: 35953 - DNA, 2691 bp, synthetic construct
  source 1..2691: mol_type = other DNA
atggccttaccagtgaccgccttgctcctgccgctggccttgctgctccacgccgccaggccggaagtgcagctggttgaatctggcggaggactggttcagcctggcggatctctgagactgtcttgtgccgccagcggcttcagcttcagcgacttttggatgagctgggtccgacaggcccctggcaaaggacttgaatgggtcgccacaatcagccaggccggcagcgagaaggactacgtggactctgtgaagggcagattcaccatcagccgggacaacgccaagaagtccctgtacctccagatgaacagcctgagagccgaggacaccgccgtgtactattgtgcctctggcgtgtacagcttcgactacagaggccagggcaccctggtcacagtctcttctggtaccggcggaggcggatctggcggcggaggtagcggtggcggaggatctgaattcgagatcgtgctgacacagtctcccgccacactgtcactgtctccaggcgaaagagccacactgagctgtagagccagccagagcgtgtcctcttacctggcctggtatcagcagaagcctggacaggctccccggctgctgatctacgatgccagcaatagagccacaggcatccccgccagattttctggctctggcagcggcaccgatttcaccctgaccataagcagcctggaacctgaggacttcgccgtgtactactgccagcagagaagcaactggcctcctacattcggccagggcaccaaggtggaaatcaaactcgaggacctgaagaacgtgttcccacctgaggtggccgtgttcgagcctagcgaggccgagatcagccacacccagaaagccaccctcgtgtgcctggctaccggcttctaccccgaccatgtggaactgtcttggtgggtcaacggcaaagaggtgcacagcggcgtgtgtaccgacccccagccactgaaagaacagcccgccctgaacgacagccggtactgcctgagcagcagactgagagtgtccgccaccttctggcagaacccccggaaccacttcagatgccaggtgcagttctacggcctgagcgagaacgacgagtggacccaggacagagccaagcccgtgacccagatcgtgtctgccgaagcctggggcagagccgattgcgacgtgaagctggtggaaaagagcttcgagacagacaccaacctgaacttccagaacctgagcgtgatcggcttcagaatcctgctgctgaaagtggccggctttaacctgctgatgaccctgcggctgtggtccagcagggccaagcgatctggatctggagcaacaaacttctcactactcaaacaagcaggtgacgtggaggagaatcccgggcctactagtatggactggatttggcgcatccttttccttgtcggcgctgctaccggcgcgcattccgggccccagctccagctgcaagagtctggacctggcctggtcaagcctagcgagacactgagcctgacctgtaccgtgtccggcgatagcatcagcagcggcgattactactggggctggatcagacagcctcctggcaaaggactggaatggatcggccacatctactacagcggcgtgacctactacaaccccagcctgaagtccagagtgaccatcagcgtggacaccagccggaaccagttctccctgaagctgtctagcgtgacagccgccgataccgccgtgtactactgcaccagagaggacagcagcaactggcggagtagaggccagggaacactggtcacagttagctctggatccggcggaggcggaagtggaggcggaggatctggcggcggaggctctttcgaacaactccagctgcaagagtctggccccggactggtcaagcctagcgaaacactgagcctgacctgtaccgtgtctggcggcagcatcagcagcagctcttattggtggggctggaccagacagcctcctggcagaggactggaatggatcggcaccatgtactacagcggcaacatctactacaaccccagcctccagagccgggccaccatctctgtggacaccagcaagaaccagttcagcctgaagctgagcagcgtgacagccgccgataccgccgtgtattattgcgccagacatgtgggctacagctacggcagacggttctggtacttcgacctgtggggcagaggcaccctggtcacagtttcttctacgcgtatccagaaccctgatcctgccgtgtaccagctgcgggatagcaagagcagcgacaagagcgtgtgtctgttcaccgacttcgacagccagaccaacgtgtcccagagcaaggactccgacgtgtacatcaccgataagtgcgtgctggacatgcggagcatggacttcaagagcaactccgccgtggcctggtccaacaagtccgatttcgcctgcgccaacgccttcaacaacagcattatccccgaggacacattcttcccaagccccgagagcagctgcggctttaccagcgagagctaccagcagggcgtgctgagcgccaccatcctgtacgagatcctgctgggcaaggccaccctgtacgccgtgctggtgtctgccctggtgctgatggctatggtcaagcggaaggacagccgggga

SEQ ID NO: 35954 - DNA, 2703 bp, synthetic construct
  source 1..2703: mol_type = other DNA
atggccttaccagtgaccgccttgctcctgccgctggccttgctgctccacgccgccaggccggaagtgcagctggttgaatctggcggaggactggttcagcctggcggatctctgagactgtcttgtgccgccagcggcttcagcttcagcgacttttggatgagctgggtccgacaggcccctggcaaaggacttgaatgggtcgccacaatcagccaggccggcagcgagaaggactacgtggactctgtgaagggcagattcaccatcagccgggacaacgccaagaagtccctgtacctccagatgaacagcctgagagccgaggacaccgccgtgtactattgtgcctctggcgtgtacagcttcgactacagaggccagggcaccctggtcacagtctcttctggtaccggcggaggcggatctggcggcggaggtagcggtggcggaggatctgaattcgagatcgtgctgacacagtctcccgccacactgtcactgtctccaggcgaaagagccacactgagctgtagagccagccagagcgtgtcctcttacctggcctggtatcagcagaagcctggacaggctccccggctgctgatctacgatgccagcaatagagccacaggcatccccgccagattttctggctctggcagcggcaccgatttcaccctgaccataagcagcctggaacctgaggacttcgccgtgtactactgccagcagagaagcaactggcctcctacattcggccagggcaccaaggtggaaatcaaactcgagatccagaaccctgatcctgccgtgtaccagctgcgggatagcaagagcagcgacaagagcgtgtgtctgttcaccgacttcgacagccagaccaacgtgtcccagagcaaggactccgacgtgtacatcaccgataagtgcgtgctggacatgcggagcatggacttcaagagcaactccgccgtggcctggtccaacaagtccgatttcgcctgcgccaacgccttcaacaacagcattatccccgaggacacattcttcccaagccccgagagcagctgcggctttaccagcgagagctaccagcagggcgtgctgagcgccaccatcctgtacgagatcctgctgggcaaggccaccctgtacgccgtgctggtgtctgccctggtgctgatggctatggtcaagcggaaggacagccggggacgcgccaagagaagcggatctggcgtgaagcagaccctgaatttcgacctgctgaagctggctggcgacgtggaatccaacccaggccctactagtatggactggatttggcgcatccttttccttgtcggcgctgctaccggcgcgcattccgggccccagctccagctgcaagagtctggacctggcctggtcaagcctagcgagacactgagcctgacctgtaccgtgtccggcgatagcatcagcagcggcgattactactggggctggatcagacagcctcctggcaaaggactggaatggatcggccacatctactacagcggcgtgacctactacaaccccagcctgaagtccagagtgaccatcagcgtggacaccagccggaaccagttctccctgaagctgtctagcgtgacagccgccgataccgccgtgtactactgcaccagagaggacagcagcaactggcggagtagaggccagggaacactggtcacagttagctctggatccggcggaggcggaagtggaggcggaggatctggcggcggaggctctttcgaacaactccagctgcaagagtctggccccggactggtcaagcctagcgaaacactgagcctgacctgtaccgtgtctggcggcagcatcagcagcagctcttattggtggggctggaccagacagcctcctggcagaggactggaatggatcggcaccatgtactacagcggcaacatctactacaaccccagcctccagagccgggccaccatctctgtggacaccagcaagaaccagttcagcctgaagctgagcagcgtgacagccgccgataccgccgtgtattattgcgccagacatgtgggctacagctacggcagacggttctggtacttcgacctgtggggcagaggcaccctggtcacagtttcttctacgcgtgaggacctgaagaacgtgttcccacctgaggtggccgtgttcgagcctagcgaggccgagatcagccacacccagaaagccaccctcgtgtgcctggctaccggcttctaccccgaccatgtggaactgtcttggtgggtcaacggcaaagaggtgcacagcggcgtgtgtaccgacccccagccactgaaagaacagcccgccctgaacgacagccggtactgcctgagcagcagactgagagtgtccgccaccttctggcagaacccccggaaccacttcagatgccaggtgcagttctacggcctgagcgagaacgacgagtggacccaggacagagccaagcccgtgacccagatcgtgtctgccgaagcctggggcagagccgattgcgacgtgaagctggtggaaaagagcttcgagacagacaccaacctgaacttccagaacctgagcgtgatcggcttcagaatcctgctgctgaaagtggccggctttaacctgctgatgaccctgcggctgtggtccagc

SEQ ID NO: 35955 - DNA, 2085 bp, synthetic construct
  source 1..2085: mol_type = other DNA
atggccttaccagtgaccgccttgctcctgccgctggccttgctgctccacgccgccaggccggagatcgtgctgacacagtctcccgccacactgtcactgtctccaggcgaaagagccacactgagctgtagagccagccagagcgtgtcctcttacctggcctggtatcagcagaagcctggacaggctccccggctgctgatctacgatgccagcaatagagccacaggcatccccgccagattttctggctctggcagcggcaccgatttcaccctgaccataagcagcctggaacctgaggacttcgccgtgtactactgccagcagagaagcaactggcctcctacattcggccagggcaccaaggtggaaatcaaactcgaggacctgaagaacgtgttcccacctgaggtggccgtgttcgagcctagcgaggccgagatcagccacacccagaaagccaccctcgtgtgcctggctaccggcttctaccccgaccatgtggaactgtcttggtgggtcaacggcaaagaggtgcacagcggcgtgtgtaccgacccccagccactgaaagaacagcccgccctgaacgacagccggtactgcctgagcagcagactgagagtgtccgccaccttctggcagaacccccggaaccacttcagatgccaggtgcagttctacggcctgagcgagaacgacgagtggacccaggacagagccaagcccgtgacccagatcgtgtctgccgaagcctggggcagagccgattgcgacgtgaagctggtggaaaagagcttcgagacagacaccaacctgaacttccagaacctgagcgtgatcggcttcagaatcctgctgctgaaagtggccggctttaacctgctgatgaccctgcggctgtggtccagcagggccaagcgatctggatctggagcaacaaacttctcactactcaaacaagcaggtgacgtggaggagaatcccgggcctactagtatggactggatttggcgcatccttttccttgtcggcgctgctaccggcgcccattccgggcccatggaccccgacctggaaatcagagccgccttcctgcggcagagaaacacagccctgagaacagaggtggccgagctggaacaagaggtgcagcggctggaaaacgaggtgtcccagtacgagacaagatacggccctctcggaggcggaaaaggatccggcggcggaggatctggcggaggcggatctgggggcggaggctctttcgaacaactccagctgcaagagtctggccccggactggtcaagcctagcgaaacactgagcctgacctgtaccgtgtctggcggcagcatcagcagcagctcttattggtggggctggaccagacagcctcctggcagaggactggaatggatcggcaccatgtactacagcggcaacatctactacaaccccagcctccagagccgggccaccatctctgtggacaccagcaagaaccagttcagcctgaagctgagcagcgtgacagccgccgataccgccgtgtattattgcgccagacatgtgggctacagctacggcagacggttctggtacttcgacctgtggggcagaggcaccctggtcacagtttcttctacgcgtatccagaaccctgatcctgccgtgtaccagctgcgggatagcaagagcagcgacaagagcgtgtgtctgttcaccgacttcgacagccagaccaacgtgtcccagagcaaggactccgacgtgtacatcaccgataagtgcgtgctggacatgcggagcatggacttcaagagcaactccgccgtggcctggtccaacaagtccgatttcgcctgcgccaacgccttcaacaacagcattatccccgaggacacattcttcccaagccccgagagcagctgcggctttaccagcgagagctaccagcagggcgtgctgagcgccaccatcctgtacgagatcctgctgggcaaggccaccctgtacgccgtgctggtgtctgccctggtgctgatggctatggtcaagcggaaggacagccgggga

SEQ ID NO: 35956 - DNA, 2097 bp, synthetic construct
  source 1..2097: mol_type = other DNA
atggccttaccagtgaccgccttgctcctgccgctggccttgctgctccacgccgccaggccggagatcgtgctgacacagtctcccgccacactgtcactgtctccaggcgaaagagccacactgagctgtagagccagccagagcgtgtcctcttacctggcctggtatcagcagaagcctggacaggctccccggctgctgatctacgatgccagcaatagagccacaggcatccccgccagattttctggctctggcagcggcaccgatttcaccctgaccataagcagcctggaacctgaggacttcgccgtgtactactgccagcagagaagcaactggcctcctacattcggccagggcaccaaggtggaaatcaaactcgagatccagaaccctgatcctgccgtgtaccagctgcgggatagcaagagcagcgacaagagcgtgtgtctgttcaccgacttcgacagccagaccaacgtgtcccagagcaaggactccgacgtgtacatcaccgataagtgcgtgctggacatgcggagcatggacttcaagagcaactccgccgtggcctggtccaacaagtccgatttcgcctgcgccaacgccttcaacaacagcattatccccgaggacacattcttcccaagccccgagagcagctgcggctttaccagcgagagctaccagcagggcgtgctgagcgccaccatcctgtacgagatcctgctgggcaaggccaccctgtacgccgtgctggtgtctgccctggtgctgatggctatggtcaagcggaaggacagccggggacgcgccaagagaagcggatctggcgtgaagcagaccctgaatttcgacctgctgaagctggctggcgacgtggaatccaacccaggccctactagtatggactggatttggcgcatccttttccttgtcggcgctgctaccggcgcccattccgggcccatggaccccgacctggaaatcagagccgccttcctgcggcagagaaacacagccctgagaacagaggtggccgagctggaacaagaggtgcagcggctggaaaacgaggtgtcccagtacgagacaagatacggccctctcggaggcggaaaaggatccggcggcggaggatctggcggaggcggatctgggggcggaggctctttcgaacaactccagctgcaagagtctggccccggactggtcaagcctagcgaaacactgagcctgacctgtaccgtgtctggcggcagcatcagcagcagctcttattggtggggctggaccagacagcctcctggcagaggactggaatggatcggcaccatgtactacagcggcaacatctactacaaccccagcctccagagccgggccaccatctctgtggacaccagcaagaaccagttcagcctgaagctgagcagcgtgacagccgccgataccgccgtgtattattgcgccagacatgtgggctacagctacggcagacggttctggtacttcgacctgtggggcagaggcaccctggtcacagtttcttctacgcgtgaggacctgaagaacgtgttcccacctgaggtggccgtgttcgagcctagcgaggccgagatcagccacacccagaaagccaccctcgtgtgcctggctaccggcttctaccccgaccatgtggaactgtcttggtgggtcaacggcaaagaggtgcacagcggcgtgtgtaccgacccccagccactgaaagaacagcccgccctgaacgacagccggtactgcctgagcagcagactgagagtgtccgccaccttctggcagaacccccggaaccacttcagatgccaggtgcagttctacggcctgagcgagaacgacgagtggacccaggacagagccaagcccgtgacccagatcgtgtctgccgaagcctggggcagagccgattgcgacgtgaagctggtggaaaagagcttcgagacagacaccaacctgaacttccagaacctgagcgtgatcggcttcagaatcctgctgctgaaagtggccggctttaacctgctgatgaccctgcggctgtggtccagc

SEQ ID NO: 35957 - DNA, 2016 bp, synthetic construct
  source 1..2016: mol_type = other DNA
atggccttaccagtgaccgccttgctcctgccgctggccttgctgctccacgccgccaggccggagatcgtgctgacacagtctcccgccacactgtcactgtctccaggcgaaagagccacactgagctgtagagccagccagagcgtgtcctcttacctggcctggtatcagcagaagcctggacaggctccccggctgctgatctacgatgccagcaatagagccacaggcatccccgccagattttctggctctggcagcggcaccgatttcaccctgaccataagcagcctggaacctgaggacttcgccgtgtactactgccagcagagaagcaactggcctcctacattcggccagggcaccaaggtggaaatcaaactcgaggacctgaagaacgtgttcccacctgaggtggccgtgttcgagcctagcgaggccgagatcagccacacccagaaagccaccctcgtgtgcctggctaccggcttctaccccgaccatgtggaactgtcttggtgggtcaacggcaaagaggtgcacagcggcgtgtgtaccgacccccagccactgaaagaacagcccgccctgaacgacagccggtactgcctgagcagcagactgagagtgtccgccaccttctggcagaacccccggaaccacttcagatgccaggtgcagttctacggcctgagcgagaacgacgagtggacccaggacagagccaagcccgtgacccagatcgtgtctgccgaagcctggggcagagccgattgcgacgtgaagctggtggaaaagagcttcgagacagacaccaacctgaacttccagaacctgagcgtgatcggcttcagaatcctgctgctgaaagtggccggctttaacctgctgatgaccctgcggctgtggtccagcagggccaagcgatctggatctggagcaacaaacttctcactactcaaacaagcaggtgacgtggaggagaatcccgggcctactagtatggactggatttggcgcatccttttccttgtcggcgctgctaccggcgcccattccgggcccgaagttgctgccctcgagaaggaggtagcagctttggaaaaagaagtcgcagcccttgagaaagaagttgcggctctggagaagggatccggcggcggaggatctggcggaggcggatctgggggcggaggctctttcgaacaactccagctgcaagagtctggccccggactggtcaagcctagcgaaacactgagcctgacctgtaccgtgtctggcggcagcatcagcagcagctcttattggtggggctggaccagacagcctcctggcagaggactggaatggatcggcaccatgtactacagcggcaacatctactacaaccccagcctccagagccgggccaccatctctgtggacaccagcaagaaccagttcagcctgaagctgagcagcgtgacagccgccgataccgccgtgtattattgcgccagacatgtgggctacagctacggcagacggttctggtacttcgacctgtggggcagaggcaccctggtcacagtttcttctacgcgtatccagaaccctgatcctgccgtgtaccagctgcgggatagcaagagcagcgacaagagcgtgtgtctgttcaccgacttcgacagccagaccaacgtgtcccagagcaaggactccgacgtgtacatcaccgataagtgcgtgctggacatgcggagcatggacttcaagagcaactccgccgtggcctggtccaacaagtccgatttcgcctgcgccaacgccttcaacaacagcattatccccgaggacacattcttcccaagccccgagagcagctgcggctttaccagcgagagctaccagcagggcgtgctgagcgccaccatcctgtacgagatcctgctgggcaaggccaccctgtacgccgtgctggtgtctgccctggtgctgatggctatggtcaagcggaaggacagccgggga

SEQ ID NO: 35958 - DNA, 2028 bp, synthetic construct
  source 1..2028: mol_type = other DNA
atggccttaccagtgaccgccttgctcctgccgctggccttgctgctccacgccgccaggccggagatcgtgctgacacagtctcccgccacactgtcactgtctccaggcgaaagagccacactgagctgtagagccagccagagcgtgtcctcttacctggcctggtatcagcagaagcctggacaggctccccggctgctgatctacgatgccagcaatagagccacaggcatccccgccagattttctggctctggcagcggcaccgatttcaccctgaccataagcagcctggaacctgaggacttcgccgtgtactactgccagcagagaagcaactggcctcctacattcggccagggcaccaaggtggaaatcaaactcgagatccagaaccctgatcctgccgtgtaccagctgcgggatagcaagagcagcgacaagagcgtgtgtctgttcaccgacttcgacagccagaccaacgtgtcccagagcaaggactccgacgtgtacatcaccgataagtgcgtgctggacatgcggagcatggacttcaagagcaactccgccgtggcctggtccaacaagtccgatttcgcctgcgccaacgccttcaacaacagcattatccccgaggacacattcttcccaagccccgagagcagctgcggctttaccagcgagagctaccagcagggcgtgctgagcgccaccatcctgtacgagatcctgctgggcaaggccaccctgtacgccgtgctggtgtctgccctggtgctgatggctatggtcaagcggaaggacagccggggacgcgccaagagaagcggatctggcgtgaagcagaccctgaatttcgacctgctgaagctggctggcgacgtggaatccaacccaggccctactagtatggactggatttggcgcatccttttccttgtcggcgctgctaccggcgcccattccgggcccgaagttgctgccctcgagaaggaggtagcagctttggaaaaagaagtcgcagcccttgagaaagaagttgcggctctggagaagggatccggcggcggaggatctggcggaggcggatctgggggcggaggctctttcgaacaactccagctgcaagagtctggccccggactggtcaagcctagcgaaacactgagcctgacctgtaccgtgtctggcggcagcatcagcagcagctcttattggtggggctggaccagacagcctcctggcagaggactggaatggatcggcaccatgtactacagcggcaacatctactacaaccccagcctccagagccgggccaccatctctgtggacaccagcaagaaccagttcagcctgaagctgagcagcgtgacagccgccgataccgccgtgtattattgcgccagacatgtgggctacagctacggcagacggttctggtacttcgacctgtggggcagaggcaccctggtcacagtttcttctacgcgtgaggacctgaagaacgtgttcccacctgaggtggccgtgttcgagcctagcgaggccgagatcagccacacccagaaagccaccctcgtgtgcctggctaccggcttctaccccgaccatgtggaactgtcttggtgggtcaacggcaaagaggtgcacagcggcgtgtgtaccgacccccagccactgaaagaacagcccgccctgaacgacagccggtactgcctgagcagcagactgagagtgtccgccaccttctggcagaacccccggaaccacttcagatgccaggtgcagttctacggcctgagcgagaacgacgagtggacccaggacagagccaagcccgtgacccagatcgtgtctgccgaagcctggggcagagccgattgcgacgtgaagctggtggaaaagagcttcgagacagacaccaacctgaacttccagaacctgagcgtgatcggcttcagaatcctgctgctgaaagtggccggctttaacctgctgatgaccctgcggctgtggtccagc

SEQ ID NO: 35959 - DNA, 2286 bp, synthetic construct
  source 1..2286: mol_type = other DNA
atggccttaccagtgaccgccttgctcctgccgctggccttgctgctccacgccgccaggccggagatcgtgctgacacagtctcccgccacactgtcactgtctccaggcgaaagagccacactgagctgtagagccagccagagcgtgtcctcttacctggcctggtatcagcagaagcctggacaggctccccggctgctgatctacgatgccagcaatagagccacaggcatccccgccagattttctggctctggcagcggcaccgatttcaccctgaccataagcagcctggaacctgaggacttcgccgtgtactactgccagcagagaagcaactggcctcctacattcggccagggcaccaaggtggaaatcaaactcgaggacctgaagaacgtgttcccacctgaggtggccgtgttcgagcctagcgaggccgagatcagccacacccagaaagccaccctcgtgtgcctggctaccggcttctaccccgaccatgtggaactgtcttggtgggtcaacggcaaagaggtgcacagcggcgtgtgtaccgacccccagccactgaaagaacagcccgccctgaacgacagccggtactgcctgagcagcagactgagagtgtccgccaccttctggcagaacccccggaaccacttcagatgccaggtgcagttctacggcctgagcgagaacgacgagtggacccaggacagagccaagcccgtgacccagatcgtgtctgccgaagcctggggcagagccgattgcgacgtgaagctggtggaaaagagcttcgagacagacaccaacctgaacttccagaacctgagcgtgatcggcttcagaatcctgctgctgaaagtggccggctttaacctgctgatgaccctgcggctgtggtccagcagggccaagcgatctggatctggagcaacaaacttctcactactcaaacaagcaggtgacgtggaggagaatcccgggcctactagtatggactggatttggcgcatccttttccttgtcggcgctgctaccggcgcccattccgggccccaggttcagctgcaagagtctggcggaggacttgctcaagctggcggaagcctgagactgtcttgtgccgcctctggcagaaccttcagcatgggctggtttagacaggcccctggcaaagagagagagttcgtcgccgccatcacatacagcggcggcagcccttactacgcctcttctgtcagaggccggttcaccatcagccgggacaacgccaagaacaccgtgtacctccagatgaacagcctgaagccagaggacaccgccgtgtactactgtgccgccaatccaacctacggcagcgactggaatgccgagaattggggccagggcacccaagtgacagtgtctagtggatccggcggcggaggatctggcggaggcggatctgggggcggaggctctttcgaacaactccagctgcaagagtctggccccggactggtcaagcctagcgaaacactgagcctgacctgtaccgtgtctggcggcagcatcagcagcagctcttattggtggggctggaccagacagcctcctggcagaggactggaatggatcggcaccatgtactacagcggcaacatctactacaaccccagcctccagagccgggccaccatctctgtggacaccagcaagaaccagttcagcctgaagctgagcagcgtgacagccgccgataccgccgtgtattattgcgccagacatgtgggctacagctacggcagacggttctggtacttcgacctgtggggcagaggcaccctggtcacagtttcttctacgcgtatccagaaccctgatcctgccgtgtaccagctgcgggatagcaagagcagcgacaagagcgtgtgtctgttcaccgacttcgacagccagaccaacgtgtcccagagcaaggactccgacgtgtacatcaccgataagtgcgtgctggacatgcggagcatggacttcaagagcaactccgccgtggcctggtccaacaagtccgatttcgcctgcgccaacgccttcaacaacagcattatccccgaggacacattcttcccaagccccgagagcagctgcggctttaccagcgagagctaccagcagggcgtgctgagcgccaccatcctgtacgagatcctgctgggcaaggccaccctgtacgccgtgctggtgtctgccctggtgctgatggctatggtcaagcggaaggacagccgggga

SEQ ID NO: 35960 - DNA, 2298 bp, synthetic construct
  source 1..2298: mol_type = other DNA
atggccttaccagtgaccgccttgctcctgccgctggccttgctgctccacgccgccaggccggagatcgtgctgacacagtctcccgccacactgtcactgtctccaggcgaaagagccacactgagctgtagagccagccagagcgtgtcctcttacctggcctggtatcagcagaagcctggacaggctccccggctgctgatctacgatgccagcaatagagccacaggcatccccgccagattttctggctctggcagcggcaccgatttcaccctgaccataagcagcctggaacctgaggacttcgccgtgtactactgccagcagagaagcaactggcctcctacattcggccagggcaccaaggtggaaatcaaactcgagatccagaaccctgatcctgccgtgtaccagctgcgggatagcaagagcagcgacaagagcgtgtgtctgttcaccgacttcgacagccagaccaacgtgtcccagagcaaggactccgacgtgtacatcaccgataagtgcgtgctggacatgcggagcatggacttcaagagcaactccgccgtggcctggtccaacaagtccgatttcgcctgcgccaacgccttcaacaacagcattatccccgaggacacattcttcccaagccccgagagcagctgcggctttaccagcgagagctaccagcagggcgtgctgagcgccaccatcctgtacgagatcctgctgggcaaggccaccctgtacgccgtgctggtgtctgccctggtgctgatggctatggtcaagcggaaggacagccggggacgcgccaagagaagcggatctggcgtgaagcagaccctgaatttcgacctgctgaagctggctggcgacgtggaatccaacccaggccctactagtatggactggatttggcgcatccttttccttgtcggcgctgctaccggcgcccattccgggccccaggttcagctgcaagagtctggcggaggacttgctcaagctggcggaagcctgagactgtcttgtgccgcctctggcagaaccttcagcatgggctggtttagacaggcccctggcaaagagagagagttcgtcgccgccatcacatacagcggcggcagcccttactacgcctcttctgtcagaggccggttcaccatcagccgggacaacgccaagaacaccgtgtacctccagatgaacagcctgaagccagaggacaccgccgtgtactactgtgccgccaatccaacctacggcagcgactggaatgccgagaattggggccagggcacccaagtgacagtgtctagtggatccggcggcggaggatctggcggaggcggatctgggggcggaggctctttcgaacaactccagctgcaagagtctggccccggactggtcaagcctagcgaaacactgagcctgacctgtaccgtgtctggcggcagcatcagcagcagctcttattggtggggctggaccagacagcctcctggcagaggactggaatggatcggcaccatgtactacagcggcaacatctactacaaccccagcctccagagccgggccaccatctctgtggacaccagcaagaaccagttcagcctgaagctgagcagcgtgacagccgccgataccgccgtgtattattgcgccagacatgtgggctacagctacggcagacggttctggtacttcgacctgtggggcagaggcaccctggtcacagtttcttctacgcgtgaggacctgaagaacgtgttcccacctgaggtggccgtgttcgagcctagcgaggccgagatcagccacacccagaaagccaccctcgtgtgcctggctaccggcttctaccccgaccatgtggaactgtcttggtgggtcaacggcaaagaggtgcacagcggcgtgtgtaccgacccccagccactgaaagaacagcccgccctgaacgacagccggtactgcctgagcagcagactgagagtgtccgccaccttctggcagaacccccggaaccacttcagatgccaggtgcagttctacggcctgagcgagaacgacgagtggacccaggacagagccaagcccgtgacccagatcgtgtctgccgaagcctggggcagagccgattgcgacgtgaagctggtggaaaagagcttcgagacagacaccaacctgaacttccagaacctgagcgtgatcggcttcagaatcctgctgctgaaagtggccggctttaacctgctgatgaccctgcggctgtggtccagc

SEQ ID NO: 35961 - DNA, 2304 bp, synthetic construct
  source 1..2304: mol_type = other DNA
atggccttaccagtgaccgccttgctcctgccgctggccttgctgctccacgccgccaggccggaagtgcaactggtggaatctggaggctctctggtgcagccagggggaagcctgagactgtcttgtgccgcttccggcttcaccttcgacgactacgccatgagctgggtgcgccaggtgccaggcaaaggcctggaatgggtgtccagcatcaactggagcggcacccacaccgattacgccgactccgtgaaaggcagattcacaatcagcagaaacaacgccaacaataccctgtacctgcagatgaactccctgaagtctgaggatacagcagtgtattattgcgccaagaactggcgggacgccggcaccacttggtttgagaaaagcggctctgccggacagggaacccaagtgacagtgtcctccggtaccggcggaggcggatctggcggcggaggtagcggtggcggaggatctgaattcgagatcgtgctgacacagtctcccgccacactgtcactgtctccaggcgaaagagccacactgagctgtagagccagccagagcgtgtcctcttacctggcctggtatcagcagaagcctggacaggctccccggctgctgatctacgatgccagcaatagagccacaggcatccccgccagattttctggctctggcagcggcaccgatttcaccctgaccataagcagcctggaacctgaggacttcgccgtgtactactgccagcagagaagcaactggcctcctacattcggccagggcaccaaggtggaaatcaaactcgaggacctgaagaacgtgttcccacctgaggtggccgtgttcgagcctagcgaggccgagatcagccacacccagaaagccaccctcgtgtgcctggctaccggcttctaccccgaccatgtggaactgtcttggtgggtcaacggcaaagaggtgcacagcggcgtgtgtaccgacccccagccactgaaagaacagcccgccctgaacgacagccggtactgcctgagcagcagactgagagtgtccgccaccttctggcagaacccccggaaccacttcagatgccaggtgcagttctacggcctgagcgagaacgacgagtggacccaggacagagccaagcccgtgacccagatcgtgtctgccgaagcctggggcagagccgattgcgacgtgaagctggtggaaaagagcttcgagacagacaccaacctgaacttccagaacctgagcgtgatcggcttcagaatcctgctgctgaaagtggccggctttaacctgctgatgaccctgcggctgtggtccagcagggccaagcgatctggatctggagcaacaaacttctcactactcaaacaagcaggtgacgtggaggagaatcccgggcctactagtatggactggatttggcgcatccttttccttgtcggcgctgctaccggcgcgcattccttcgaacaactccagctgcaagagtctggccccggactggtcaagcctagcgaaacactgagcctgacctgtaccgtgtctggcggcagcatcagcagcagctcttattggtggggctggaccagacagcctcctggcagaggactggaatggatcggcaccatgtactacagcggcaacatctactacaaccccagcctccagagccgggccaccatctctgtggacaccagcaagaaccagttcagcctgaagctgagcagcgtgacagccgccgataccgccgtgtattattgcgccagacatgtgggctacagctacggcagacggttctggtacttcgacctgtggggcagaggcaccctggtcacagtttcttctacgcgtatccagaaccctgatcctgccgtgtaccagctgcgggatagcaagagcagcgacaagagcgtgtgtctgttcaccgacttcgacagccagaccaacgtgtcccagagcaaggactccgacgtgtacatcaccgataagtgcgtgctggacatgcggagcatggacttcaagagcaactccgccgtggcctggtccaacaagtccgatttcgcctgcgccaacgccttcaacaacagcattatccccgaggacacattcttcccaagccccgagagcagctgcggctttaccagcgagagctaccagcagggcgtgctgagcgccaccatcctgtacgagatcctgctgggcaaggccaccctgtacgccgtgctggtgtctgccctggtgctgatggctatggtcaagcggaaggacagccgggga

SEQ ID NO: 35962 - DNA, 2316 bp, synthetic construct
  source 1..2316: mol_type = other DNA
atggccttaccagtgaccgccttgctcctgccgctggccttgctgctccacgccgccaggccggaagtgcaactggtggaatctggaggctctctggtgcagccagggggaagcctgagactgtcttgtgccgcttccggcttcaccttcgacgactacgccatgagctgggtgcgccaggtgccaggcaaaggcctggaatgggtgtccagcatcaactggagcggcacccacaccgattacgccgactccgtgaaaggcagattcacaatcagcagaaacaacgccaacaataccctgtacctgcagatgaactccctgaagtctgaggatacagcagtgtattattgcgccaagaactggcgggacgccggcaccacttggtttgagaaaagcggctctgccggacagggaacccaagtgacagtgtcctccggtaccggcggaggcggatctggcggcggaggtagcggtggcggaggatctgaattcgagatcgtgctgacacagtctcccgccacactgtcactgtctccaggcgaaagagccacactgagctgtagagccagccagagcgtgtcctcttacctggcctggtatcagcagaagcctggacaggctccccggctgctgatctacgatgccagcaatagagccacaggcatccccgccagattttctggctctggcagcggcaccgatttcaccctgaccataagcagcctggaacctgaggacttcgccgtgtactactgccagcagagaagcaactggcctcctacattcggccagggcaccaaggtggaaatcaaactcgagatccagaaccctgatcctgccgtgtaccagctgcgggatagcaagagcagcgacaagagcgtgtgtctgttcaccgacttcgacagccagaccaacgtgtcccagagcaaggactccgacgtgtacatcaccgataagtgcgtgctggacatgcggagcatggacttcaagagcaactccgccgtggcctggtccaacaagtccgatttcgcctgcgccaacgccttcaacaacagcattatccccgaggacacattcttcccaagccccgagagcagctgcggctttaccagcgagagctaccagcagggcgtgctgagcgccaccatcctgtacgagatcctgctgggcaaggccaccctgtacgccgtgctggtgtctgccctggtgctgatggctatggtcaagcggaaggacagccggggacgcgccaagagaagcggatctggcgtgaagcagaccctgaatttcgacctgctgaagctggctggcgacgtggaatccaacccaggccctactagtatggactggatttggcgcatccttttccttgtcggcgctgctaccggcgcgcattccttcgaacaactccagctgcaagagtctggccccggactggtcaagcctagcgaaacactgagcctgacctgtaccgtgtctggcggcagcatcagcagcagctcttattggtggggctggaccagacagcctcctggcagaggactggaatggatcggcaccatgtactacagcggcaacatctactacaaccccagcctccagagccgggccaccatctctgtggacaccagcaagaaccagttcagcctgaagctgagcagcgtgacagccgccgataccgccgtgtattattgcgccagacatgtgggctacagctacggcagacggttctggtacttcgacctgtggggcagaggcaccctggtcacagtttcttctacgcgtgaggacctgaagaacgtgttcccacctgaggtggccgtgttcgagcctagcgaggccgagatcagccacacccagaaagccaccctcgtgtgcctggctaccggcttctaccccgaccatgtggaactgtcttggtgggtcaacggcaaagaggtgcacagcggcgtgtgtaccgacccccagccactgaaagaacagcccgccctgaacgacagccggtactgcctgagcagcagactgagagtgtccgccaccttctggcagaacccccggaaccacttcagatgccaggtgcagttctacggcctgagcgagaacgacgagtggacccaggacagagccaagcccgtgacccagatcgtgtctgccgaagcctggggcagagccgattgcgacgtgaagctggtggaaaagagcttcgagacagacaccaacctgaacttccagaacctgagcgtgatcggcttcagaatcctgctgctgaaagtggccggctttaacctgctgatgaccctgcggctgtggtccagc

SEQ ID NO: 35963 - DNA, 2298 bp, synthetic construct
  source 1..2298: mol_type = other DNA
atggccttaccagtgaccgccttgctcctgccgctggccttgctgctccacgccgccaggccggaagttcagctgcttgagtctggcggaggactggttcaacctggcggaagcctgagactgtcttgtgccgccagcggcttcatcttcagcagctacgccatgagctgggtccgacaggctcctggaaagggccaagaatgggtttccggcgttagcggcacaggcgtgaacacctactacgccgatagcgtgaagggcagattcaccatcagccgggacaacagcaagaacaccctgtacctccagatgaacagcctgagagccgaggacaccgccgtgtactattgtgcctctggcaaaggctgggacagcggctcttggtacgaggactatagaggccagggcaccctggtcacagtttcttcaggtaccggcggaggcggatctggcggcggaggtagcggtggcggaggatctgaattcgagatcgtgctgacacagtctcccgccacactgtcactgtctccaggcgaaagagccacactgagctgtagagccagccagagcgtgtcctcttacctggcctggtatcagcagaagcctggacaggctccccggctgctgatctacgatgccagcaatagagccacaggcatccccgccagattttctggctctggcagcggcaccgatttcaccctgaccataagcagcctggaacctgaggacttcgccgtgtactactgccagcagagaagcaactggcctcctacattcggccagggcaccaaggtggaaatcaaactcgaggacctgaagaacgtgttcccacctgaggtggccgtgttcgagcctagcgaggccgagatcagccacacccagaaagccaccctcgtgtgcctggctaccggcttctaccccgaccatgtggaactgtcttggtgggtcaacggcaaagaggtgcacagcggcgtgtgtaccgacccccagccactgaaagaacagcccgccctgaacgacagccggtactgcctgagcagcagactgagagtgtccgccaccttctggcagaacccccggaaccacttcagatgccaggtgcagttctacggcctgagcgagaacgacgagtggacccaggacagagccaagcccgtgacccagatcgtgtctgccgaagcctggggcagagccgattgcgacgtgaagctggtggaaaagagcttcgagacagacaccaacctgaacttccagaacctgagcgtgatcggcttcagaatcctgctgctgaaagtggccggctttaacctgctgatgaccctgcggctgtggtccagcagggccaagcgatctggatctggagcaacaaacttctcactactcaaacaagcaggtgacgtggaggagaatcccgggcctactagtatggactggatttggcgcatccttttccttgtcggcgctgctaccggcgcgcattccttcgaacaactccagctgcaagagtctggccccggactggtcaagcctagcgaaacactgagcctgacctgtaccgtgtctggcggcagcatcagcagcagctcttattggtggggctggaccagacagcctcctggcagaggactggaatggatcggcaccatgtactacagcggcaacatctactacaaccccagcctccagagccgggccaccatctctgtggacaccagcaagaaccagttcagcctgaagctgagcagcgtgacagccgccgataccgccgtgtattattgcgccagacatgtgggctacagctacggcagacggttctggtacttcgacctgtggggcagaggcaccctggtcacagtttcttctacgcgtatccagaaccctgatcctgccgtgtaccagctgcgggatagcaagagcagcgacaagagcgtgtgtctgttcaccgacttcgacagccagaccaacgtgtcccagagcaaggactccgacgtgtacatcaccgataagtgcgtgctggacatgcggagcatggacttcaagagcaactccgccgtggcctggtccaacaagtccgatttcgcctgcgccaacgccttcaacaacagcattatccccgaggacacattcttcccaagccccgagagcagctgcggctttaccagcgagagctaccagcagggcgtgctgagcgccaccatcctgtacgagatcctgctgggcaaggccaccctgtacgccgtgctggtgtctgccctggtgctgatggctatggtcaagcggaaggacagccgggga

SEQ ID NO: 35964 - DNA, 2310 bp, synthetic construct
  source 1..2310: mol_type = other DNA
atggccttaccagtgaccgccttgctcctgccgctggccttgctgctccacgccgccaggccggaagttcagctgcttgagtctggcggaggactggttcaacctggcggaagcctgagactgtcttgtgccgccagcggcttcatcttcagcagctacgccatgagctgggtccgacaggctcctggaaagggccaagaatgggtttccggcgttagcggcacaggcgtgaacacctactacgccgatagcgtgaagggcagattcaccatcagccgggacaacagcaagaacaccctgtacctccagatgaacagcctgagagccgaggacaccgccgtgtactattgtgcctctggcaaaggctgggacagcggctcttggtacgaggactatagaggccagggcaccctggtcacagtttcttcaggtaccggcggaggcggatctggcggcggaggtagcggtggcggaggatctgaattcgagatcgtgctgacacagtctcccgccacactgtcactgtctccaggcgaaagagccacactgagctgtagagccagccagagcgtgtcctcttacctggcctggtatcagcagaagcctggacaggctccccggctgctgatctacgatgccagcaatagagccacaggcatccccgccagattttctggctctggcagcggcaccgatttcaccctgaccataagcagcctggaacctgaggacttcgccgtgtactactgccagcagagaagcaactggcctcctacattcggccagggcaccaaggtggaaatcaaactcgagatccagaaccctgatcctgccgtgtaccagctgcgggatagcaagagcagcgacaagagcgtgtgtctgttcaccgacttcgacagccagaccaacgtgtcccagagcaaggactccgacgtgtacatcaccgataagtgcgtgctggacatgcggagcatggacttcaagagcaactccgccgtggcctggtccaacaagtccgatttcgcctgcgccaacgccttcaacaacagcattatccccgaggacacattcttcccaagccccgagagcagctgcggctttaccagcgagagctaccagcagggcgtgctgagcgccaccatcctgtacgagatcctgctgggcaaggccaccctgtacgccgtgctggtgtctgccctggtgctgatggctatggtcaagcggaaggacagccggggacgcgccaagagaagcggatctggcgtgaagcagaccctgaatttcgacctgctgaagctggctggcgacgtggaatccaacccaggccctactagtatggactggatttggcgcatccttttccttgtcggcgctgctaccggcgcgcattccttcgaacaactccagctgcaagagtctggccccggactggtcaagcctagcgaaacactgagcctgacctgtaccgtgtctggcggcagcatcagcagcagctcttattggtggggctggaccagacagcctcctggcagaggactggaatggatcggcaccatgtactacagcggcaacatctactacaaccccagcctccagagccgggccaccatctctgtggacaccagcaagaaccagttcagcctgaagctgagcagcgtgacagccgccgataccgccgtgtattattgcgccagacatgtgggctacagctacggcagacggttctggtacttcgacctgtggggcagaggcaccctggtcacagtttcttctacgcgtgaggacctgaagaacgtgttcccacctgaggtggccgtgttcgagcctagcgaggccgagatcagccacacccagaaagccaccctcgtgtgcctggctaccggcttctaccccgaccatgtggaactgtcttggtgggtcaacggcaaagaggtgcacagcggcgtgtgtaccgacccccagccactgaaagaacagcccgccctgaacgacagccggtactgcctgagcagcagactgagagtgtccgccaccttctggcagaacccccggaaccacttcagatgccaggtgcagttctacggcctgagcgagaacgacgagtggacccaggacagagccaagcccgtgacccagatcgtgtctgccgaagcctggggcagagccgattgcgacgtgaagctggtggaaaagagcttcgagacagacaccaacctgaacttccagaacctgagcgtgatcggcttcagaatcctgctgctgaaagtggccggctttaacctgctgatgaccctgcggctgtggtccagc

SEQ ID NO: 35965 - DNA, 2202 bp, synthetic construct
  source 1..2202: mol_type = other DNA
atggccttaccagtgaccgccttgctcctgccgctggccttgctgctccacgccgccaggccgatgctgcccgctcctaagaatctggtggtgtccagaatcaccgaggacagcgccagactgtcttggacagctcctgatgccgccttcgacagcttccccatccggtacatcgagacactgatctggggcgaagccatctggctggatgtgcctggaagcgagagaagctacgacctgaccggactgaagcctggcacagagtatgccgtggtcatcaccggcgtgaaaggcggcagattctctagccctctggtggcctctttcaccaccggtaccggcggaggcggatctggcggcggaggtagcggtggcggaggatctgaattcgagatcgtgctgacacagtctcccgccacactgtcactgtctccaggcgaaagagccacactgagctgtagagccagccagagcgtgtcctcttacctggcctggtatcagcagaagcctggacaggctccccggctgctgatctacgatgccagcaatagagccacaggcatccccgccagattttctggctctggcagcggcaccgatttcaccctgaccataagcagcctggaacctgaggacttcgccgtgtactactgccagcagagaagcaactggcctcctacattcggccagggcaccaaggtggaaatcaaactcgaggacctgaagaacgtgttcccacctgaggtggccgtgttcgagcctagcgaggccgagatcagccacacccagaaagccaccctcgtgtgcctggctaccggcttctaccccgaccatgtggaactgtcttggtgggtcaacggcaaagaggtgcacagcggcgtgtgtaccgacccccagccactgaaagaacagcccgccctgaacgacagccggtactgcctgagcagcagactgagagtgtccgccaccttctggcagaacccccggaaccacttcagatgccaggtgcagttctacggcctgagcgagaacgacgagtggacccaggacagagccaagcccgtgacccagatcgtgtctgccgaagcctggggcagagccgattgcgacgtgaagctggtggaaaagagcttcgagacagacaccaacctgaacttccagaacctgagcgtgatcggcttcagaatcctgctgctgaaagtggccggctttaacctgctgatgaccctgcggctgtggtccagcagggccaagcgatctggatctggagcaacaaacttctcactactcaaacaagcaggtgacgtggaggagaatcccgggcctactagtatggactggatttggcgcatccttttccttgtcggcgctgctaccggcgcgcattccttcgaacaactccagctgcaagagtctggccccggactggtcaagcctagcgaaacactgagcctgacctgtaccgtgtctggcggcagcatcagcagcagctcttattggtggggctggaccagacagcctcctggcagaggactggaatggatcggcaccatgtactacagcggcaacatctactacaaccccagcctccagagccgggccaccatctctgtggacaccagcaagaaccagttcagcctgaagctgagcagcgtgacagccgccgataccgccgtgtattattgcgccagacatgtgggctacagctacggcagacggttctggtacttcgacctgtggggcagaggcaccctggtcacagtttcttctacgcgtatccagaaccctgatcctgccgtgtaccagctgcgggatagcaagagcagcgacaagagcgtgtgtctgttcaccgacttcgacagccagaccaacgtgtcccagagcaaggactccgacgtgtacatcaccgataagtgcgtgctggacatgcggagcatggacttcaagagcaactccgccgtggcctggtccaacaagtccgatttcgcctgcgccaacgccttcaacaacagcattatccccgaggacacattcttcccaagccccgagagcagctgcggctttaccagcgagagctaccagcagggcgtgctgagcgccaccatcctgtacgagatcctgctgggcaaggccaccctgtacgccgtgctggtgtctgccctggtgctgatggctatggtcaagcggaaggacagccgggga

SEQ ID NO: 35966 - DNA, 2214 bp, synthetic construct
  source 1..2214: mol_type = other DNA
atggccttaccagtgaccgccttgctcctgccgctggccttgctgctccacgccgccaggccgatgctgcccgctcctaagaatctggtggtgtccagaatcaccgaggacagcgccagactgtcttggacagctcctgatgccgccttcgacagcttccccatccggtacatcgagacactgatctggggcgaagccatctggctggatgtgcctggaagcgagagaagctacgacctgaccggactgaagcctggcacagagtatgccgtggtcatcaccggcgtgaaaggcggcagattctctagccctctggtggcctctttcaccaccggtaccggcggaggcggatctggcggcggaggtagcggtggcggaggatctgaattcgagatcgtgctgacacagtctcccgccacactgtcactgtctccaggcgaaagagccacactgagctgtagagccagccagagcgtgtcctcttacctggcctggtatcagcagaagcctggacaggctccccggctgctgatctacgatgccagcaatagagccacaggcatccccgccagattttctggctctggcagcggcaccgatttcaccctgaccataagcagcctggaacctgaggacttcgccgtgtactactgccagcagagaagcaactggcctcctacattcggccagggcaccaaggtggaaatcaaactcgagatccagaaccctgatcctgccgtgtaccagctgcgggatagcaagagcagcgacaagagcgtgtgtctgttcaccgacttcgacagccagaccaacgtgtcccagagcaaggactccgacgtgtacatcaccgataagtgcgtgctggacatgcggagcatggacttcaagagcaactccgccgtggcctggtccaacaagtccgatttcgcctgcgccaacgccttcaacaacagcattatccccgaggacacattcttcccaagccccgagagcagctgcggctttaccagcgagagctaccagcagggcgtgctgagcgccaccatcctgtacgagatcctgctgggcaaggccaccctgtacgccgtgctggtgtctgccctggtgctgatggctatggtcaagcggaaggacagccggggacgcgccaagagaagcggatctggcgtgaagcagaccctgaatttcgacctgctgaagctggctggcgacgtggaatccaacccaggccctactagtatggactggatttggcgcatccttttccttgtcggcgctgctaccggcgcgcattccttcgaacaactccagctgcaagagtctggccccggactggtcaagcctagcgaaacactgagcctgacctgtaccgtgtctggcggcagcatcagcagcagctcttattggtggggctggaccagacagcctcctggcagaggactggaatggatcggcaccatgtactacagcggcaacatctactacaaccccagcctccagagccgggccaccatctctgtggacaccagcaagaaccagttcagcctgaagctgagcagcgtgacagccgccgataccgccgtgtattattgcgccagacatgtgggctacagctacggcagacggttctggtacttcgacctgtggggcagaggcaccctggtcacagtttcttctacgcgtgaggacctgaagaacgtgttcccacctgaggtggccgtgttcgagcctagcgaggccgagatcagccacacccagaaagccaccctcgtgtgcctggctaccggcttctaccccgaccatgtggaactgtcttggtgggtcaacggcaaagaggtgcacagcggcgtgtgtaccgacccccagccactgaaagaacagcccgccctgaacgacagccggtactgcctgagcagcagactgagagtgtccgccaccttctggcagaacccccggaaccacttcagatgccaggtgcagttctacggcctgagcgagaacgacgagtggacccaggacagagccaagcccgtgacccagatcgtgtctgccgaagcctggggcagagccgattgcgacgtgaagctggtggaaaagagcttcgagacagacaccaacctgaacttccagaacctgagcgtgatcggcttcagaatcctgctgctgaaagtggccggctttaacctgctgatgaccctgcggctgtggtccagc

SEQ ID NO: 35967 - DNA, 2289 bp, synthetic construct
  source 1..2289: mol_type = other DNA
atggccttaccagtgaccgccttgctcctgccgctggccttgctgctccacgccgccaggccggaggtgcagctggttgaatctggcggaggactggttcagcctggcggatctctgagactgtcttgtgccgccagcggcttcaacatcaaggatacctgtatcggctgggttcgcagagcccctggcaaagaggaagaactggtcgccaaaatctgcaagtacagcggccacaccagatacgccgacagcgtgaagggcagattcaccatcagcgccgacaccagcaagaacaccgcctacctccagatgaacagcctgagagccgaggacaccgccgtgtactattgtgccgctgtgtccgtcagagatgggcactacaattactggggccagggcaccaccgtgaccgtttcttcaggtaccggcggaggcggatctggcggcggaggtagcggtggcggaggatctgaattcgagatcgtgctgacacagtctcccgccacactgtcactgtctccaggcgaaagagccacactgagctgtagagccagccagagcgtgtcctcttacctggcctggtatcagcagaagcctggacaggctccccggctgctgatctacgatgccagcaatagagccacaggcatccccgccagattttctggctctggcagcggcaccgatttcaccctgaccataagcagcctggaacctgaggacttcgccgtgtactactgccagcagagaagcaactggcctcctacattcggccagggcaccaaggtggaaatcaaactcgaggacctgaagaacgtgttcccacctgaggtggccgtgttcgagcctagcgaggccgagatcagccacacccagaaagccaccctcgtgtgcctggctaccggcttctaccccgaccatgtggaactgtcttggtgggtcaacggcaaagaggtgcacagcggcgtgtgtaccgacccccagccactgaaagaacagcccgccctgaacgacagccggtactgcctgagcagcagactgagagtgtccgccaccttctggcagaacccccggaaccacttcagatgccaggtgcagttctacggcctgagcgagaacgacgagtggacccaggacagagccaagcccgtgacccagatcgtgtctgccgaagcctggggcagagccgattgcgacgtgaagctggtggaaaagagcttcgagacagacaccaacctgaacttccagaacctgagcgtgatcggcttcagaatcctgctgctgaaagtggccggctttaacctgctgatgaccctgcggctgtggtccagcagggccaagcgatctggatctggagcaacaaacttctcactactcaaacaagcaggtgacgtggaggagaatcccgggcctactagtatggactggatttggcgcatccttttccttgtcggcgctgctaccggcgcgcattccttcgaacaactccagctgcaagagtctggccccggactggtcaagcctagcgaaacactgagcctgacctgtaccgtgtctggcggcagcatcagcagcagctcttattggtggggctggaccagacagcctcctggcagaggactggaatggatcggcaccatgtactacagcggcaacatctactacaaccccagcctccagagccgggccaccatctctgtggacaccagcaagaaccagttcagcctgaagctgagcagcgtgacagccgccgataccgccgtgtattattgcgccagacatgtgggctacagctacggcagacggttctggtacttcgacctgtggggcagaggcaccctggtcacagtttcttctacgcgtatccagaaccctgatcctgccgtgtaccagctgcgggatagcaagagcagcgacaagagcgtgtgtctgttcaccgacttcgacagccagaccaacgtgtcccagagcaaggactccgacgtgtacatcaccgataagtgcgtgctggacatgcggagcatggacttcaagagcaactccgccgtggcctggtccaacaagtccgatttcgcctgcgccaacgccttcaacaacagcattatccccgaggacacattcttcccaagccccgagagcagctgcggctttaccagcgagagctaccagcagggcgtgctgagcgccaccatcctgtacgagatcctgctgggcaaggccaccctgtacgccgtgctggtgtctgccctggtgctgatggctatggtcaagcggaaggacagccgggga

SEQ ID NO: 35968 - DNA, 2301 bp, synthetic construct
  source 1..2301: mol_type = other DNA
atggccttaccagtgaccgccttgctcctgccgctggccttgctgctccacgccgccaggccggaggtgcagctggttgaatctggcggaggactggttcagcctggcggatctctgagactgtcttgtgccgccagcggcttcaacatcaaggatacctgtatcggctgggttcgcagagcccctggcaaagaggaagaactggtcgccaaaatctgcaagtacagcggccacaccagatacgccgacagcgtgaagggcagattcaccatcagcgccgacaccagcaagaacaccgcctacctccagatgaacagcctgagagccgaggacaccgccgtgtactattgtgccgctgtgtccgtcagagatgggcactacaattactggggccagggcaccaccgtgaccgtttcttcaggtaccggcggaggcggatctggcggcggaggtagcggtggcggaggatctgaattcgagatcgtgctgacacagtctcccgccacactgtcactgtctccaggcgaaagagccacactgagctgtagagccagccagagcgtgtcctcttacctggcctggtatcagcagaagcctggacaggctccccggctgctgatctacgatgccagcaatagagccacaggcatccccgccagattttctggctctggcagcggcaccgatttcaccctgaccataagcagcctggaacctgaggacttcgccgtgtactactgccagcagagaagcaactggcctcctacattcggccagggcaccaaggtggaaatcaaactcgagatccagaaccctgatcctgccgtgtaccagctgcgggatagcaagagcagcgacaagagcgtgtgtctgttcaccgacttcgacagccagaccaacgtgtcccagagcaaggactccgacgtgtacatcaccgataagtgcgtgctggacatgcggagcatggacttcaagagcaactccgccgtggcctggtccaacaagtccgatttcgcctgcgccaacgccttcaacaacagcattatccccgaggacacattcttcccaagccccgagagcagctgcggctttaccagcgagagctaccagcagggcgtgctgagcgccaccatcctgtacgagatcctgctgggcaaggccaccctgtacgccgtgctggtgtctgccctggtgctgatggctatggtcaagcggaaggacagccggggacgcgccaagagaagcggatctggcgtgaagcagaccctgaatttcgacctgctgaagctggctggcgacgtggaatccaacccaggccctactagtatggactggatttggcgcatccttttccttgtcggcgctgctaccggcgcgcattccttcgaacaactccagctgcaagagtctggccccggactggtcaagcctagcgaaacactgagcctgacctgtaccgtgtctggcggcagcatcagcagcagctcttattggtggggctggaccagacagcctcctggcagaggactggaatggatcggcaccatgtactacagcggcaacatctactacaaccccagcctccagagccgggccaccatctctgtggacaccagcaagaaccagttcagcctgaagctgagcagcgtgacagccgccgataccgccgtgtattattgcgccagacatgtgggctacagctacggcagacggttctggtacttcgacctgtggggcagaggcaccctggtcacagtttcttctacgcgtgaggacctgaagaacgtgttcccacctgaggtggccgtgttcgagcctagcgaggccgagatcagccacacccagaaagccaccctcgtgtgcctggctaccggcttctaccccgaccatgtggaactgtcttggtgggtcaacggcaaagaggtgcacagcggcgtgtgtaccgacccccagccactgaaagaacagcccgccctgaacgacagccggtactgcctgagcagcagactgagagtgtccgccaccttctggcagaacccccggaaccacttcagatgccaggtgcagttctacggcctgagcgagaacgacgagtggacccaggacagagccaagcccgtgacccagatcgtgtctgccgaagcctggggcagagccgattgcgacgtgaagctggtggaaaagagcttcgagacagacaccaacctgaacttccagaacctgagcgtgatcggcttcagaatcctgctgctgaaagtggccggctttaacctgctgatgaccctgcggctgtggtccagc

SEQ ID NO: 35969 - DNA, 3405 bp, synthetic construct
  source 1..3405: mol_type = other DNA
atggccttaccagtgaccgccttgctcctgccgctggccttgctgctccacgccgccaggccggaagtgcagctggttgaatctggcggaggactggttcaggctggcggatctctgagactgtcttgtgccgccagcggcagaacctttagcatgggctggtttagacaggcccctggcaaagagagagagttcgtcgccgccatcacatactctggcggcagcccttactacgccgactctgtgaagggcagattcaccatcagccgggacaacgccaagaacaccgtgtacctccagatgaacagcctgaagcctgaggacaccgccgtgtactactgcgccgccaatccaacatacggcagcgactggaacgccgagaattggggccagggaacccaagtgacagtgtctagcggtaccggcggaggcggatctggcggcggaggtagcggtggcggaggatctgaattcgagatcgtgctgacacagtctcccgccacactgtcactgtctccaggcgaaagagccacactgagctgtagagccagccagagcgtgtcctcttacctggcctggtatcagcagaagcctggacaggctccccggctgctgatctacgatgccagcaatagagccacaggcatccccgccagattttctggctctggcagcggcaccgatttcaccctgaccataagcagcctggaacctgaggacttcgccgtgtactactgccagcagagaagcaactggcctcctacattcggccagggcaccaaggtggaaatcaaactcgaggacctgaagaacgtgttcccacctgaggtggccgtgttcgagcctagcgaggccgagatcagccacacccagaaagccaccctcgtgtgcctggctaccggcttctaccccgaccatgtggaactgtcttggtgggtcaacggcaaagaggtgcacagcggcgtgtgtaccgacccccagccactgaaagaacagcccgccctgaacgacagccggtactgcctgagcagcagactgagagtgtccgccaccttctggcagaacccccggaaccacttcagatgccaggtgcagttctacggcctgagcgagaacgacgagtggacccaggacagagccaagcccgtgacccagatcgtgtctgccgaagcctggggcagagccgattgcgacgtgaagctggtggaaaagagcttcgagacagacaccaacctgaacttccagaacctgagcgtgatcggcttcagaatcctgctgctgaaagtggccggctttaacctgctgatgaccctgcggctgtggtccagcagggccaagcgatctggatctggagcaacaaacttctcactactcaaacaagcaggtgacgtggaggagaatcccgggcctactagtgccaccatggactggatttggcgcatccttttccttgtcggcgctgctaccggcgcccattccgggcccgaagtgcaactggttgaatccggtggcggcctggtgcaagcaggcggatctctcagacttagctgtgccgcctccggcagaaccttcacaatgggatggtttaggcaggctccagggaaagagagagagttcgtcgccgccatctctctgtctcccacactggcctactacgccgactctgtgaaaggccggttcaccatctccagagataatgccaagaacaccgtggtgctgcaaatgaactctctgaaacccgaggatacagccctgtactattgtgccgctgaccggaagtccgtgatgagcatcagacccgattactggggacagggcacacaagtcacagtgtcctctggatccggcggcggaggatctggcggaggcggatctgggggcggaggctctttcgaacaactccagctgcaagagtctggccccggactggtcaagcctagcgaaacactgagcctgacctgtaccgtgtctggcggcagcatcagcagcagctcttattggtggggctggaccagacagcctcctggcagaggactggaatggatcggcaccatgtactacagcggcaacatctactacaaccccagcctccagagccgggccaccatctctgtggacaccagcaagaaccagttcagcctgaagctgagcagcgtgacagccgccgataccgccgtgtattattgcgccagacatgtgggctacagctacggcagacggttctggtacttcgacctgtggggcagaggcaccctggtcacagtttcttctacgcgtatccagaaccctgatcctgccgtgtaccagctgcgggatagcaagagcagcgacaagagcgtgtgtctgttcaccgacttcgacagccagaccaacgtgtcccagagcaaggactccgacgtgtacatcaccgataagtgcgtgctggacatgcggagcatggacttcaagagcaactccgccgtggcctggtccaacaagtccgatttcgcctgcgccaacgccttcaacaacagcattatccccgaggacacattcttcccaagccccgagagcagctgcggctttaccagcgagagctaccagcagggcgtgctgagcgccaccatcctgtacgagatcctgctgggcaaggccaccctgtacgccgtgctggtgtctgccctggtgctgatggctatggtcaagcggaaggacagccggggacgcgccaagagaagcggatctggcgtgaagcagaccctgaatttcgacctgctgaagctggctggcgacgtggaatccaacccaggcccttctagaggccatatgaccgagtacaagcccacggtgcgcctcgccacccgcgacgacgtccccagggccgtacgcaccctcgccgccgcgttcgccgactaccccgccacgcgccacaccgtcgatccggaccgccacatcgagcgggtcaccgagctgcaagaactcttcctcacgcgcgtcgggctcgacatcggcaaggtgtgggtcgcggacgacggcgccgcggtggcggtctggaccacgccggagagcgtcgaagcgggggcggtgttcgccgagatcggcccgcgcatggccgagttgagcggttcccggctggccgcgcagcaacagatggaaggcctcctggcgccgcaccggcccaaggagcccgcgtggttcctggccaccgtcggcgtctcgcccgaccaccagggcaagggtctgggcagcgccgtcgtgctccccggagtggaggcggccgagcgcgccggggtgcccgccttcctggagacctccgcgccccgcaacctccccttctacgagcggctcggcttcaccgtcaccgccgacgtcgaggtgcccgaaggaccgcgcacctggtgcatgacccgcaagcccggtgcctga

SEQ ID NO: 35970 - DNA, 2319 bp, synthetic construct
  source 1..2319: mol_type = other DNA
atggccttaccagtgaccgccttgctcctgccgctggccttgctgctccacgccgccaggccggaagtgcagctggttgaatctggcggaggactggttcagcctggcggatctctgagactgtcttgtgccgcctctggcttcgccagcgactactatatcatcggctggttcagacaggcccctggcaaagagagagagggcgtcagctgtatcagcagcagatacgccaacaccaactacgccgacagcgtgaagggcagattcaccatcagccgggacaacgccaagaacaccgtgtacctccagatgaacagcctgaagcctgaggacaccgccgtgtactactgtgccgccgacaccagaagatacacctgtcctgacattgccaccatgcaccggaacttcgattcttggggccagggcacactggtcaccgtttcttctggtaccggcggaggcggatctggcggcggaggtagcggtggcggaggatctgaattcgagatcgtgctgacacagtctcccgccacactgtcactgtctccaggcgaaagagccacactgagctgtagagccagccagagcgtgtcctcttacctggcctggtatcagcagaagcctggacaggctccccggctgctgatctacgatgccagcaatagagccacaggcatccccgccagattttctggctctggcagcggcaccgatttcaccctgaccataagcagcctggaacctgaggacttcgccgtgtactactgccagcagagaagcaactggcctcctacattcggccagggcaccaaggtggaaatcaaactcgaggacctgaagaacgtgttcccacctgaggtggccgtgttcgagcctagcgaggccgagatcagccacacccagaaagccaccctcgtgtgcctggctaccggcttctaccccgaccatgtggaactgtcttggtgggtcaacggcaaagaggtgcacagcggcgtgtgtaccgacccccagccactgaaagaacagcccgccctgaacgacagccggtactgcctgagcagcagactgagagtgtccgccaccttctggcagaacccccggaaccacttcagatgccaggtgcagttctacggcctgagcgagaacgacgagtggacccaggacagagccaagcccgtgacccagatcgtgtctgccgaagcctggggcagagccgattgcgacgtgaagctggtggaaaagagcttcgagacagacaccaacctgaacttccagaacctgagcgtgatcggcttcagaatcctgctgctgaaagtggccggctttaacctgctgatgaccctgcggctgtggtccagcagggccaagcgatctggatctggagcaacaaacttctcactactcaaacaagcaggtgacgtggaggagaatcccgggcctactagtatggactggatttggcgcatccttttccttgtcggcgctgctaccggcgcgcattccttcgaacaactccagctgcaagagtctggccccggactggtcaagcctagcgaaacactgagcctgacctgtaccgtgtctggcggcagcatcagcagcagctcttattggtggggctggaccagacagcctcctggcagaggactggaatggatcggcaccatgtactacagcggcaacatctactacaaccccagcctccagagccgggccaccatctctgtggacaccagcaagaaccagttcagcctgaagctgagcagcgtgacagccgccgataccgccgtgtattattgcgccagacatgtgggctacagctacggcagacggttctggtacttcgacctgtggggcagaggcaccctggtcacagtttcttctacgcgtatccagaaccctgatcctgccgtgtaccagctgcgggatagcaagagcagcgacaagagcgtgtgtctgttcaccgacttcgacagccagaccaacgtgtcccagagcaaggactccgacgtgtacatcaccgataagtgcgtgctggacatgcggagcatggacttcaagagcaactccgccgtggcctggtccaacaagtccgatttcgcctgcgccaacgccttcaacaacagcattatccccgaggacacattcttcccaagccccgagagcagctgcggctttaccagcgagagctaccagcagggcgtgctgagcgccaccatcctgtacgagatcctgctgggcaaggccaccctgtacgccgtgctggtgtctgccctggtgctgatggctatggtcaagcggaaggacagccggggataa

SEQ ID NO: 35971 - DNA, 2319 bp, synthetic construct
  source 1..2319: mol_type = other DNA
atggccttaccagtgaccgccttgctcctgccgctggccttgctgctccacgccgccaggccggaagtgcagctggttgaatctggcggaggactggttcagcctggcggatctctgagactgagctgtgaagccagcggcttcgccagcgacgattacatcatcggctggttcagacaggcccctggcaaagagagagagggcgtcagctgcatcagctctaagtacgccaacaccgtgtacaccgacagcgtgaagggcagattcagactgagcagaggcaccgccaagaataccgtgtacctccagatgagcgccctgaagcctgaggataccgccgtgtactactgcgctatggacagccgcagagtgacatgccctgagatcagcaccatgcaccggaacttcgattcttggggccagggcacactggtcacagtgtcatctggtaccggcggaggcggatctggcggcggaggtagcggtggcggaggatctgaattcgagatcgtgctgacacagtctcccgccacactgtcactgtctccaggcgaaagagccacactgagctgtagagccagccagagcgtgtcctcttacctggcctggtatcagcagaagcctggacaggctccccggctgctgatctacgatgccagcaatagagccacaggcatccccgccagattttctggctctggcagcggcaccgatttcaccctgaccataagcagcctggaacctgaggacttcgccgtgtactactgccagcagagaagcaactggcctcctacattcggccagggcaccaaggtggaaatcaaactcgaggacctgaagaacgtgttcccacctgaggtggccgtgttcgagcctagcgaggccgagatcagccacacccagaaagccaccctcgtgtgcctggctaccggcttctaccccgaccatgtggaactgtcttggtgggtcaacggcaaagaggtgcacagcggcgtgtgtaccgacccccagccactgaaagaacagcccgccctgaacgacagccggtactgcctgagcagcagactgagagtgtccgccaccttctggcagaacccccggaaccacttcagatgccaggtgcagttctacggcctgagcgagaacgacgagtggacccaggacagagccaagcccgtgacccagatcgtgtctgccgaagcctggggcagagccgattgcgacgtgaagctggtggaaaagagcttcgagacagacaccaacctgaacttccagaacctgagcgtgatcggcttcagaatcctgctgctgaaagtggccggctttaacctgctgatgaccctgcggctgtggtccagcagggccaagcgatctggatctggagcaacaaacttctcactactcaaacaagcaggtgacgtggaggagaatcccgggcctactagtatggactggatttggcgcatccttttccttgtcggcgctgctaccggcgcgcattccttcgaacaactccagctgcaagagtctggccccggactggtcaagcctagcgaaacactgagcctgacctgtaccgtgtctggcggcagcatcagcagcagctcttattggtggggctggaccagacagcctcctggcagaggactggaatggatcggcaccatgtactacagcggcaacatctactacaaccccagcctccagagccgggccaccatctctgtggacaccagcaagaaccagttcagcctgaagctgagcagcgtgacagccgccgataccgccgtgtattattgcgccagacatgtgggctacagctacggcagacggttctggtacttcgacctgtggggcagaggcaccctggtcacagtttcttctacgcgtatccagaaccctgatcctgccgtgtaccagctgcgggatagcaagagcagcgacaagagcgtgtgtctgttcaccgacttcgacagccagaccaacgtgtcccagagcaaggactccgacgtgtacatcaccgataagtgcgtgctggacatgcggagcatggacttcaagagcaactccgccgtggcctggtccaacaagtccgatttcgcctgcgccaacgccttcaacaacagcattatccccgaggacacattcttcccaagccccgagagcagctgcggctttaccagcgagagctaccagcagggcgtgctgagcgccaccatcctgtacgagatcctgctgggcaaggccaccctgtacgccgtgctggtgtctgccctggtgctgatggctatggtcaagcggaaggacagccggggataa

SEQ ID NO: 35972 - DNA, 2316 bp, synthetic construct
  source 1..2316: mol_type = other DNA
atggccttaccagtgaccgccttgctcctgccgctggccttgctgctccacgccgccaggccggaagtgcagctggttgaatctggcggaggactggttcagcctggcggatctctgagactgtcttgtgccgcctctggcttcgccagcgactactatatcatcggctggttcagacaggcccctggcaaagagagagagggcgtcagctgtatcagcagcagatacgccaacaccaactacgccgacagcgtgaagggcagattcaccatcagccgggacaacgccaagaacaccgtgtacctccagatgaacagcctgaagcctgaggacaccgccgtgtactactgtgccgccgacaccagaagatacacctgtcctgacattgccaccatgcaccggaacttcgattcttggggccagggcacactggtcaccgtttcttctggtaccggcggaggcggatctggcggcggaggtagcggtggcggaggatctgaattcgagatcgtgctgacacagtctcccgccacactgtcactgtctccaggcgaaagagccacactgagctgtagagccagccagagcgtgtcctcttacctggcctggtatcagcagaagcctggacaggctccccggctgctgatctacgatgccagcaatagagccacaggcatccccgccagattttctggctctggcagcggcaccgatttcaccctgaccataagcagcctggaacctgaggacttcgccgtgtactactgccagcagagaagcaactggcctcctacattcggccagggcaccaaggtggaaatcaaactcgagatccagaaccctgatcctgccgtgtaccagctgcgggatagcaagagcagcgacaagagcgtgtgtctgttcaccgacttcgacagccagaccaacgtgtcccagagcaaggactccgacgtgtacatcaccgataagtgcgtgctggacatgcggagcatggacttcaagagcaactccgccgtggcctggtccaacaagtccgatttcgcctgcgccaacgccttcaacaacagcattatccccgaggacacattcttcccaagccccgagagcagctgcggctttaccagcgagagctaccagcagggcgtgctgagcgccaccatcctgtacgagatcctgctgggcaaggccaccctgtacgccgtgctggtgtctgccctggtgctgatggctatggtcaagcggaaggacagccggggaagggccaagcgatctggatctggagcaacaaacttctcactactcaaacaagcaggtgacgtggaggagaatcccgggcctactagtatggactggatttggcgcatccttttccttgtcggcgctgctaccggcgcgcattccttcgaacaactccagctgcaagagtctggccccggactggtcaagcctagcgaaacactgagcctgacctgtaccgtgtctggcggcagcatcagcagcagctcttattggtggggctggaccagacagcctcctggcagaggactggaatggatcggcaccatgtactacagcggcaacatctactacaaccccagcctccagagccgggccaccatctctgtggacaccagcaagaaccagttcagcctgaagctgagcagcgtgacagccgccgataccgccgtgtattattgcgccagacatgtgggctacagctacggcagacggttctggtacttcgacctgtggggcagaggcaccctggtcacagtttcttctacgcgtgacctgaagaacgtgttcccacctgaggtggccgtgttcgagcctagcgaggccgagatcagccacacccagaaagccaccctcgtgtgcctggctaccggcttctaccccgaccatgtggaactgtcttggtgggtcaacggcaaagaggtgcacagcggcgtgtgtaccgacccccagccactgaaagaacagcccgccctgaacgacagccggtactgcctgagcagcagactgagagtgtccgccaccttctggcagaacccccggaaccacttcagatgccaggtgcagttctacggcctgagcgagaacgacgagtggacccaggacagagccaagcccgtgacccagatcgtgtctgccgaagcctggggcagagccgattgcgacgtgaagctggtggaaaagagcttcgagacagacaccaacctgaacttccagaacctgagcgtgatcggcttcagaatcctgctgctgaaagtggccggctttaacctgctgatgaccctgcggctgtggtccagc

SEQ ID NO: 35973 - DNA, 2316 bp, synthetic construct
  source 1..2316: mol_type = other DNA
atggccttaccagtgaccgccttgctcctgccgctggccttgctgctccacgccgccaggccggaagtgcagctggttgaatctggcggaggactggttcagcctggcggatctctgagactgagctgtgaagccagcggcttcgccagcgacgattacatcatcggctggttcagacaggcccctggcaaagagagagagggcgtcagctgcatcagctctaagtacgccaacaccgtgtacaccgacagcgtgaagggcagattcagactgagcagaggcaccgccaagaataccgtgtacctccagatgagcgccctgaagcctgaggataccgccgtgtactactgcgctatggacagccgcagagtgacatgccctgagatcagcaccatgcaccggaacttcgattcttggggccagggcacactggtcacagtgtcatctggtaccggcggaggcggatctggcggcggaggtagcggtggcggaggatctgaattcgagatcgtgctgacacagtctcccgccacactgtcactgtctccaggcgaaagagccacactgagctgtagagccagccagagcgtgtcctcttacctggcctggtatcagcagaagcctggacaggctccccggctgctgatctacgatgccagcaatagagccacaggcatccccgccagattttctggctctggcagcggcaccgatttcaccctgaccataagcagcctggaacctgaggacttcgccgtgtactactgccagcagagaagcaactggcctcctacattcggccagggcaccaaggtggaaatcaaactcgagatccagaaccctgatcctgccgtgtaccagctgcgggatagcaagagcagcgacaagagcgtgtgtctgttcaccgacttcgacagccagaccaacgtgtcccagagcaaggactccgacgtgtacatcaccgataagtgcgtgctggacatgcggagcatggacttcaagagcaactccgccgtggcctggtccaacaagtccgatttcgcctgcgccaacgccttcaacaacagcattatccccgaggacacattcttcccaagccccgagagcagctgcggctttaccagcgagagctaccagcagggcgtgctgagcgccaccatcctgtacgagatcctgctgggcaaggccaccctgtacgccgtgctggtgtctgccctggtgctgatggctatggtcaagcggaaggacagccggggaagggccaagcgatctggatctggagcaacaaacttctcactactcaaacaagcaggtgacgtggaggagaatcccgggcctactagtatggactggatttggcgcatccttttccttgtcggcgctgctaccggcgcgcattccttcgaacaactccagctgcaagagtctggccccggactggtcaagcctagcgaaacactgagcctgacctgtaccgtgtctggcggcagcatcagcagcagctcttattggtggggctggaccagacagcctcctggcagaggactggaatggatcggcaccatgtactacagcggcaacatctactacaaccccagcctccagagccgggccaccatctctgtggacaccagcaagaaccagttcagcctgaagctgagcagcgtgacagccgccgataccgccgtgtattattgcgccagacatgtgggctacagctacggcagacggttctggtacttcgacctgtggggcagaggcaccctggtcacagtttcttctacgcgtgacctgaagaacgtgttcccacctgaggtggccgtgttcgagcctagcgaggccgagatcagccacacccagaaagccaccctcgtgtgcctggctaccggcttctaccccgaccatgtggaactgtcttggtgggtcaacggcaaagaggtgcacagcggcgtgtgtaccgacccccagccactgaaagaacagcccgccctgaacgacagccggtactgcctgagcagcagactgagagtgtccgccaccttctggcagaacccccggaaccacttcagatgccaggtgcagttctacggcctgagcgagaacgacgagtggacccaggacagagccaagcccgtgacccagatcgtgtctgccgaagcctggggcagagccgattgcgacgtgaagctggtggaaaagagcttcgagacagacaccaacctgaacttccagaacctgagcgtgatcggcttcagaatcctgctgctgaaagtggccggctttaacctgctgatgaccctgcggctgtggtccagc

SEQ ID NO: 35974 - DNA, 2289 bp, synthetic construct
  source 1..2289: mol_type = other DNA
atggccttaccagtgaccgccttgctcctgccgctggccttgctgctccacgccgccaggccgcaagtcaaactggaagaaagcggtggcggcctggtgcaacctggcgaatctctgagactgagctgtagcgccagcggctccatcttcaaggtgttcagagtgttcgccatgagctggtacaggcaaggccctggcaagcagagagagctggtcgcctctatcagcagcggcgagacaaccacatacgccgaatctgtgaaaggccggttcaccatcagccgggataatgccaagaataccgcctatctccagatggactccctgaagcctgaagatacagctgtgtactactgcaacgccgaccataccttcaccggcgatttttggggccagggaacccaagtgaccgtgtctagtggtaccggcggaggcggatctggcggcggaggtagcggtggcggaggatctgaattcgagatcgtgctgacacagtctcccgccacactgtcactgtctccaggcgaaagagccacactgagctgtagagccagccagagcgtgtcctcttacctggcctggtatcagcagaagcctggacaggctccccggctgctgatctacgatgccagcaatagagccacaggcatccccgccagattttctggctctggcagcggcaccgatttcaccctgaccataagcagcctggaacctgaggacttcgccgtgtactactgccagcagagaagcaactggcctcctacattcggccagggcaccaaggtggaaatcaaactcgagatccagaaccctgatcctgccgtgtaccagctgcgggatagcaagagcagcgacaagagcgtgtgtctgttcaccgacttcgacagccagaccaacgtgtcccagagcaaggactccgacgtgtacatcaccgataagtgcgtgctggacatgcggagcatggacttcaagagcaactccgccgtggcctggtccaacaagtccgatttcgcctgcgccaacgccttcaacaacagcattatccccgaggacacattcttcccaagccccgagagcagctgcggctttaccagcgagagctaccagcagggcgtgctgagcgccaccatcctgtacgagatcctgctgggcaaggccaccctgtacgccgtgctggtgtctgccctggtgctgatggctatggtcaagcggaaggacagccggggaagggccaagcgatctggatctggagcaacaaacttctcactactcaaacaagcaggtgacgtggaggagaatcccgggcctactagtatggactggatttggcgcatccttttccttgtcggcgctgctaccggcgcgcattccttcgaacaactccagctgcaagagtctggccccggactggtcaagcctagcgaaacactgagcctgacctgtaccgtgtctggcggcagcatcagcagcagctcttattggtggggctggaccagacagcctcctggcagaggactggaatggatcggcaccatgtactacagcggcaacatctactacaaccccagcctccagagccgggccaccatctctgtggacaccagcaagaaccagttcagcctgaagctgagcagcgtgacagccgccgataccgccgtgtattattgcgccagacatgtgggctacagctacggcagacggttctggtacttcgacctgtggggcagaggcaccctggtcacagtttcttctacgcgtgacctgaagaacgtgttcccacctgaggtggccgtgttcgagcctagcgaggccgagatcagccacacccagaaagccaccctcgtgtgcctggctaccggcttctaccccgaccatgtggaactgtcttggtgggtcaacggcaaagaggtgcacagcggcgtgtgtaccgacccccagccactgaaagaacagcccgccctgaacgacagccggtactgcctgagcagcagactgagagtgtccgccaccttctggcagaacccccggaaccacttcagatgccaggtgcagttctacggcctgagcgagaacgacgagtggacccaggacagagccaagcccgtgacccagatcgtgtctgccgaagcctggggcagagccgattgcgacgtgaagctggtggaaaagagcttcgagacagacaccaacctgaacttccagaacctgagcgtgatcggcttcagaatcctgctgctgaaagtggccggctttaacctgctgatgaccctgcggctgtggtccagc

SEQ ID NO: 35975 - DNA, 2295 bp, synthetic construct
  source 1..2295: mol_type = other DNA
atggccttaccagtgaccgccttgctcctgccgctggccttgctgctccacgccgccaggccggagatcgtgctgacacagtctcccgccacactgtcactgtctccaggcgaaagagccacactgagctgtagagccagccagagcgtgtcctcttacctggcctggtatcagcagaagcctggacaggctccccggctgctgatctacgatgccagcaatagagccacaggcatccccgccagattttctggctctggcagcggcaccgatttcaccctgaccataagcagcctggaacctgaggacttcgccgtgtactactgccagcagagaagcaactggcctcctacattcggccagggcaccaaggtggaaatcaaactcgaggacctgaagaacgtgttcccacctgaggtggccgtgttcgagcctagcgaggccgagatcagccacacccagaaagccaccctcgtgtgcctggctaccggcttctaccccgaccatgtggaactgtcttggtgggtcaacggcaaagaggtgcacagcggcgtgtgtaccgacccccagccactgaaagaacagcccgccctgaacgacagccggtactgcctgagcagcagactgagagtgtccgccaccttctggcagaacccccggaaccacttcagatgccaggtgcagttctacggcctgagcgagaacgacgagtggacccaggacagagccaagcccgtgacccagatcgtgtctgccgaagcctggggcagagccgattgcgacgtgaagctggtggaaaagagcttcgagacagacaccaacctgaacttccagaacctgagcgtgatcggcttcagaatcctgctgctgaaagtggccggctttaacctgctgatgaccctgcggctgtggtccagcagggccaagcgatctggatctggagcaacaaacttctcactactcaaacaagcaggtgacgtggaggagaatcccgggcctactagtgccaccatggactggatttggcgcatccttttccttgtcggcgctgctaccggcgcccattccgggcccgaagtgcagctggttgaatctggcggaggactggttcaggctggcggatctctgagactgtcttgtgccgccagcggcagaacctttagcatgggctggtttagacaggcccctggcaaagagagagagttcgtcgccgccatcacatactctggcggcagcccttactacgccgactctgtgaagggcagattcaccatcagccgggacaacgccaagaacaccgtgtacctccagatgaacagcctgaagcctgaggacaccgccgtgtactactgcgccgccaatccaacatacggcagcgactggaacgccgagaattggggccagggaacccaagtgacagtgtctagcggatccggcggcggaggatctggcggaggcggatctgggggcggaggctctttcgaacaactccagctgcaagagtctggccccggactggtcaagcctagcgaaacactgagcctgacctgtaccgtgtctggcggcagcatcagcagcagctcttattggtggggctggaccagacagcctcctggcagaggactggaatggatcggcaccatgtactacagcggcaacatctactacaaccccagcctccagagccgggccaccatctctgtggacaccagcaagaaccagttcagcctgaagctgagcagcgtgacagccgccgataccgccgtgtattattgcgccagacatgtgggctacagctacggcagacggttctggtacttcgacctgtggggcagaggcaccctggtcacagtttcttctacgcgtatccagaaccctgatcctgccgtgtaccagctgcgggatagcaagagcagcgacaagagcgtgtgtctgttcaccgacttcgacagccagaccaacgtgtcccagagcaaggactccgacgtgtacatcaccgataagtgcgtgctggacatgcggagcatggacttcaagagcaactccgccgtggcctggtccaacaagtccgatttcgcctgcgccaacgccttcaacaacagcattatccccgaggacacattcttcccaagccccgagagcagctgcggctttaccagcgagagctaccagcagggcgtgctgagcgccaccatcctgtacgagatcctgctgggcaaggccaccctgtacgccgtgctggtgtctgccctggtgctgatggctatggtcaagcggaaggacagccggggataa

SEQ ID NO: 35976 - DNA, 2298 bp, synthetic construct
  source 1..2298: mol_type = other DNA
atggccttaccagtgaccgccttgctcctgccgctggccttgctgctccacgccgccaggccggagatcgtgctgacacagtctcccgccacactgtcactgtctccaggcgaaagagccacactgagctgtagagccagccagagcgtgtcctcttacctggcctggtatcagcagaagcctggacaggctccccggctgctgatctacgatgccagcaatagagccacaggcatccccgccagattttctggctctggcagcggcaccgatttcaccctgaccataagcagcctggaacctgaggacttcgccgtgtactactgccagcagagaagcaactggcctcctacattcggccagggcaccaaggtggaaatcaaactcgaggacctgaagaacgtgttcccacctgaggtggccgtgttcgagcctagcgaggccgagatcagccacacccagaaagccaccctcgtgtgcctggctaccggcttctaccccgaccatgtggaactgtcttggtgggtcaacggcaaagaggtgcacagcggcgtgtgtaccgacccccagccactgaaagaacagcccgccctgaacgacagccggtactgcctgagcagcagactgagagtgtccgccaccttctggcagaacccccggaaccacttcagatgccaggtgcagttctacggcctgagcgagaacgacgagtggacccaggacagagccaagcccgtgacccagatcgtgtctgccgaagcctggggcagagccgattgcgacgtgaagctggtggaaaagagcttcgagacagacaccaacctgaacttccagaacctgagcgtgatcggcttcagaatcctgctgctgaaagtggccggctttaacctgctgatgaccctgcggctgtggtccagcagggccaagcgatctggatctggagcaacaaacttctcactactcaaacaagcaggtgacgtggaggagaatcccgggcctactagtgccaccatggactggatttggcgcatccttttccttgtcggcgctgctaccggcgcccattccgggcccgaagtgcaactggtggaatctgggggcggactggtgcagccaggcggaagtctgaggctgtcttgtgccgcctccggcagcatcttcggcttcaacgacatggcctggtatcggcaggctcccggaaaacagcgcgagctggtggctctgattagcagagtgggcgtgaccagcagcgccgactctgtgaagggcagattcacaatctccagagtgaacgccaaggatacagtgtacctccagatgaactctctgaaacctgaggatacagcagtgtactattgctacatggaccagcggctggacggcagcacactggcctactggggacagggaactcaagtgacagtgtctagcggatccggcggcggaggatctggcggaggcggatctgggggcggaggctctttcgaacaactccagctgcaagagtctggccccggactggtcaagcctagcgaaacactgagcctgacctgtaccgtgtctggcggcagcatcagcagcagctcttattggtggggctggaccagacagcctcctggcagaggactggaatggatcggcaccatgtactacagcggcaacatctactacaaccccagcctccagagccgggccaccatctctgtggacaccagcaagaaccagttcagcctgaagctgagcagcgtgacagccgccgataccgccgtgtattattgcgccagacatgtgggctacagctacggcagacggttctggtacttcgacctgtggggcagaggcaccctggtcacagtttcttctacgcgtatccagaaccctgatcctgccgtgtaccagctgcgggatagcaagagcagcgacaagagcgtgtgtctgttcaccgacttcgacagccagaccaacgtgtcccagagcaaggactccgacgtgtacatcaccgataagtgcgtgctggacatgcggagcatggacttcaagagcaactccgccgtggcctggtccaacaagtccgatttcgcctgcgccaacgccttcaacaacagcattatccccgaggacacattcttcccaagccccgagagcagctgcggctttaccagcgagagctaccagcagggcgtgctgagcgccaccatcctgtacgagatcctgctgggcaaggccaccctgtacgccgtgctggtgtctgccctggtgctgatggctatggtcaagcggaaggacagccggggataa

SEQ ID NO: 35977 - DNA, 2286 bp, synthetic construct
  source 1..2286: mol_type = other DNA
atggccttaccagtgaccgccttgctcctgccgctggccttgctgctccacgccgccaggccggagatcgtgctgacacagtctcccgccacactgtcactgtctccaggcgaaagagccacactgagctgtagagccagccagagcgtgtcctcttacctggcctggtatcagcagaagcctggacaggctccccggctgctgatctacgatgccagcaatagagccacaggcatccccgccagattttctggctctggcagcggcaccgatttcaccctgaccataagcagcctggaacctgaggacttcgccgtgtactactgccagcagagaagcaactggcctcctacattcggccagggcaccaaggtggaaatcaaactcgaggacctgaagaacgtgttcccacctgaggtggccgtgttcgagcctagcgaggccgagatcagccacacccagaaagccaccctcgtgtgcctggctaccggcttctaccccgaccatgtggaactgtcttggtgggtcaacggcaaagaggtgcacagcggcgtgtgtaccgacccccagccactgaaagaacagcccgccctgaacgacagccggtactgcctgagcagcagactgagagtgtccgccaccttctggcagaacccccggaaccacttcagatgccaggtgcagttctacggcctgagcgagaacgacgagtggacccaggacagagccaagcccgtgacccagatcgtgtctgccgaagcctggggcagagccgattgcgacgtgaagctggtggaaaagagcttcgagacagacaccaacctgaacttccagaacctgagcgtgatcggcttcagaatcctgctgctgaaagtggccggctttaacctgctgatgaccctgcggctgtggtccagcagggccaagcgatctggatctggagcaacaaacttctcactactcaaacaagcaggtgacgtggaggagaatcccgggcctactagtgccaccatggactggatttggcgcatccttttccttgtcggcgctgctaccggcgcccattccgggcccgaggtgcagctggttgaatctggcggaggactggttcaggctggcggatctctgagactgtcttgtgccgccagcggctctgtgttcagcggcaatgtgatgggctggtacagacaggcccctggcaaagaaagagagtgggttgccgccattgccagcggcggcagcatctactacagagactctgtgaagggcagattcaccatcagccgggacaacgccaagaacaccgtgtacctccagatgaacagcctgaagcctgaggacaccgccgtgtactactgcaactctcaccctcctacactgccctattggggcctgggaacccaagtgacagtgtcctctggatccggcggcggaggatctggcggaggcggatctgggggcggaggctctttcgaacaactccagctgcaagagtctggccccggactggtcaagcctagcgaaacactgagcctgacctgtaccgtgtctggcggcagcatcagcagcagctcttattggtggggctggaccagacagcctcctggcagaggactggaatggatcggcaccatgtactacagcggcaacatctactacaaccccagcctccagagccgggccaccatctctgtggacaccagcaagaaccagttcagcctgaagctgagcagcgtgacagccgccgataccgccgtgtattattgcgccagacatgtgggctacagctacggcagacggttctggtacttcgacctgtggggcagaggcaccctggtcacagtttcttctacgcgtatccagaaccctgatcctgccgtgtaccagctgcgggatagcaagagcagcgacaagagcgtgtgtctgttcaccgacttcgacagccagaccaacgtgtcccagagcaaggactccgacgtgtacatcaccgataagtgcgtgctggacatgcggagcatggacttcaagagcaactccgccgtggcctggtccaacaagtccgatttcgcctgcgccaacgccttcaacaacagcattatccccgaggacacattcttcccaagccccgagagcagctgcggctttaccagcgagagctaccagcagggcgtgctgagcgccaccatcctgtacgagatcctgctgggcaaggccaccctgtacgccgtgctggtgtctgccctggtgctgatggctatggtcaagcggaaggacagccggggataa

SEQ ID NO: 35978 - DNA, 2280 bp, synthetic construct
  source 1..2280: mol_type = other DNA
atggccttaccagtgaccgccttgctcctgccgctggccttgctgctccacgccgccaggccggagatcgtgctgacacagtctcccgccacactgtcactgtctccaggcgaaagagccacactgagctgtagagccagccagagcgtgtcctcttacctggcctggtatcagcagaagcctggacaggctccccggctgctgatctacgatgccagcaatagagccacaggcatccccgccagattttctggctctggcagcggcaccgatttcaccctgaccataagcagcctggaacctgaggacttcgccgtgtactactgccagcagagaagcaactggcctcctacattcggccagggcaccaaggtggaaatcaaactcgaggacctgaagaacgtgttcccacctgaggtggccgtgttcgagcctagcgaggccgagatcagccacacccagaaagccaccctcgtgtgcctggctaccggcttctaccccgaccatgtggaactgtcttggtgggtcaacggcaaagaggtgcacagcggcgtgtgtaccgacccccagccactgaaagaacagcccgccctgaacgacagccggtactgcctgagcagcagactgagagtgtccgccaccttctggcagaacccccggaaccacttcagatgccaggtgcagttctacggcctgagcgagaacgacgagtggacccaggacagagccaagcccgtgacccagatcgtgtctgccgaagcctggggcagagccgattgcgacgtgaagctggtggaaaagagcttcgagacagacaccaacctgaacttccagaacctgagcgtgatcggcttcagaatcctgctgctgaaagtggccggctttaacctgctgatgaccctgcggctgtggtccagcagggccaagcgatctggatctggagcaacaaacttctcactactcaaacaagcaggtgacgtggaggagaatcccgggcctactagtgccaccatggactggatttggcgcatccttttccttgtcggcgctgctaccggcgcccattccgggcccgaagttcagctgctggaatctggcggaggactcgttcaacctggcggctctctgagactgagctgtgccgcttctggcttcagcttctctagctacgccctgagctgggttcgacaagctcccggaaagggccttgaatgggtgtccagcatcggcgagaatgacggcaccacagactatgccgatgccgtgaaaggccggtttaccatcagcagagacaattccaagaacacgctctatctgcaaatgaactccctgcgcgtggaagatacagccgtgtattattgcgtgaaggacggcatccactggggacagggaaccctggttacagtgtctagcggatccggcggcggaggatctggcggaggcggatctgggggcggaggctctttcgaacaactccagctgcaagagtctggccccggactggtcaagcctagcgaaacactgagcctgacctgtaccgtgtctggcggcagcatcagcagcagctcttattggtggggctggaccagacagcctcctggcagaggactggaatggatcggcaccatgtactacagcggcaacatctactacaaccccagcctccagagccgggccaccatctctgtggacaccagcaagaaccagttcagcctgaagctgagcagcgtgacagccgccgataccgccgtgtattattgcgccagacatgtgggctacagctacggcagacggttctggtacttcgacctgtggggcagaggcaccctggtcacagtttcttctacgcgtatccagaaccctgatcctgccgtgtaccagctgcgggatagcaagagcagcgacaagagcgtgtgtctgttcaccgacttcgacagccagaccaacgtgtcccagagcaaggactccgacgtgtacatcaccgataagtgcgtgctggacatgcggagcatggacttcaagagcaactccgccgtggcctggtccaacaagtccgatttcgcctgcgccaacgccttcaacaacagcattatccccgaggacacattcttcccaagccccgagagcagctgcggctttaccagcgagagctaccagcagggcgtgctgagcgccaccatcctgtacgagatcctgctgggcaaggccaccctgtacgccgtgctggtgtctgccctggtgctgatggctatggtcaagcggaaggacagccggggataa

SEQ ID NO: 35979 - DNA, 3387 bp, synthetic construct
  source 1..3387: mol_type = other DNA
atgggacccagactgctgttttgggctctgctgtgtctgctcggcacaggacctgttgaagctggcgtgacacagagccccacacacctgattaagaccagaggccagcaggccacactgagatgcagccctatcagcggccacaccagcgtgtactggtatcagcaggctctcggactgggcctccagttcctgctttggtacgacgagggcgaagagagaaaccggggcaacttccctcctcggttttccggcagacagttccccaactacagcagcgagctgaacgtgaacgccctggaactggaagatagcgccctgtacctgtgtgcctcttctcttggtggacctcgcggactggctggactgagaggggatgagcagtttttcggccctggcaccagactgaccgtgctggaaggtaccggcggaggcggatctggcggcggagaattcgagatcgtgctgacacagtctcccgccacactgtcactgtctccaggcgaaagagccacactgagctgtagagccagccagagcgtgtcctcttacctggcctggtatcagcagaagcctggacaggctccccggctgctgatctacgatgccagcaatagagccacaggcatccccgccagattttctggctctggcagcggcaccgatttcaccctgaccataagcagcctggaacctgaggacttcgccgtgtactactgccagcagagaagcaactggcctcctacattcggccagggcaccaaggtggaaatcaaactcgaggacctgaagaacgtgttcccacctgaggtggccgtgttcgagcctagcgaggccgagatcagccacacccagaaagccaccctcgtgtgcctggctaccggcttctaccccgaccatgtggaactgtcttggtgggtcaacggcaaagaggtgcacagcggcgtgtgtaccgacccccagccactgaaagaacagcccgccctgaacgacagccggtactgcctgagcagcagactgagagtgtccgccaccttctggcagaacccccggaaccacttcagatgccaggtgcagttctacggcctgagcgagaacgacgagtggacccaggacagagccaagcccgtgacccagatcgtgtctgccgaagcctggggcagagccgattgcgacgtgaagctggtggaaaagagcttcgagacagacaccaacctgaacttccagaacctgagcgtgatcggcttcagaatcctgctgctgaaagtggccggctttaacctgctgatgaccctgcggctgtggtccagcagggccaagcgatctggatctggagcaacaaacttctcactactcaaacaagcaggtgacgtggaggagaatcccgggcctactagtgccaccatggactggatttggcgcatccttttccttgtcggcgctgctaccggcgcccattccgggcccgaagtgcagctggttgaatctggcggaggactggttcaggctggcggatctctgagactgtcttgtgccgccagcggcagaacctttagcatgggctggtttagacaggcccctggcaaagagagagagttcgtcgccgccatcacatactctggcggcagcccttactacgccgactctgtgaagggcagattcaccatcagccgggacaacgccaagaacaccgtgtacctccagatgaacagcctgaagcctgaggacaccgccgtgtactactgcgccgccaatccaacatacggcagcgactggaacgccgagaattggggccagggaacccaagtgacagtgtctagcggatccggcggcggaggatctggcggaggcggatctgggggcggaggctctttcgaacaactccagctgcaagagtctggccccggactggtcaagcctagcgaaacactgagcctgacctgtaccgtgtctggcggcagcatcagcagcagctcttattggtggggctggaccagacagcctcctggcagaggactggaatggatcggcaccatgtactacagcggcaacatctactacaaccccagcctccagagccgggccaccatctctgtggacaccagcaagaaccagttcagcctgaagctgagcagcgtgacagccgccgataccgccgtgtattattgcgccagacatgtgggctacagctacggcagacggttctggtacttcgacctgtggggcagaggcaccctggtcacagtttcttctacgcgtatccagaaccctgatcctgccgtgtaccagctgcgggatagcaagagcagcgacaagagcgtgtgtctgttcaccgacttcgacagccagaccaacgtgtcccagagcaaggactccgacgtgtacatcaccgataagtgcgtgctggacatgcggagcatggacttcaagagcaactccgccgtggcctggtccaacaagtccgatttcgcctgcgccaacgccttcaacaacagcattatccccgaggacacattcttcccaagccccgagagcagctgcggctttaccagcgagagctaccagcagggcgtgctgagcgccaccatcctgtacgagatcctgctgggcaaggccaccctgtacgccgtgctggtgtctgccctggtgctgatggctatggtcaagcggaaggacagccggggacgcgccaagagaagcggatctggcgtgaagcagaccctgaatttcgacctgctgaagctggctggcgacgtggaatccaacccaggcccttctagaggccatatgaccgagtacaagcccacggtgcgcctcgccacccgcgacgacgtccccagggccgtacgcaccctcgccgccgcgttcgccgactaccccgccacgcgccacaccgtcgatccggaccgccacatcgagcgggtcaccgagctgcaagaactcttcctcacgcgcgtcgggctcgacatcggcaaggtgtgggtcgcggacgacggcgccgcggtggcggtctggaccacgccggagagcgtcgaagcgggggcggtgttcgccgagatcggcccgcgcatggccgagttgagcggttcccggctggccgcgcagcaacagatggaaggcctcctggcgccgcaccggcccaaggagcccgcgtggttcctggccaccgtcggcgtctcgcccgaccaccagggcaagggtctgggcagcgccgtcgtgctccccggagtggaggcggccgagcgcgccggggtgcccgccttcctggagacctccgcgccccgcaacctccccttctacgagcggctcggcttcaccgtcaccgccgacgtcgaggtgcccgaaggaccgcgcacctggtgcatgacccgcaagcccggtgcctga

SEQ ID NO: 35980 - DNA, 3384 bp, synthetic construct
  source 1..3384: mol_type = other DNA
atgggacccagactgctgttttgggctctgctgtgtctgctcggcacaggacctgttgaagctggcgtgacacagagccccacacacctgattaagaccagaggccagcaggccacactgagatgcagccctatcagcggccacaccagcgtgtactggtatcagcaggctctcggactgggcctccagttcctgctttggtacgacgagggcgaagagagaaaccggggcaacttccctcctcggttttccggcagacagttccccaactacagcagcgagctgaacgtgaacgccctggaactggaagatagcgccctgtacctgtgtgccagctctctcggcggagatgaactgggagccgatggcaacgagcagttctttggccctggcaccagactgaccgtgctggaaggtaccggcggaggcggatctggcggcggaagcgaattcgagatcgtgctgacacagtctcccgccacactgtcactgtctccaggcgaaagagccacactgagctgtagagccagccagagcgtgtcctcttacctggcctggtatcagcagaagcctggacaggctccccggctgctgatctacgatgccagcaatagagccacaggcatccccgccagattttctggctctggcagcggcaccgatttcaccctgaccataagcagcctggaacctgaggacttcgccgtgtactactgccagcagagaagcaactggcctcctacattcggccagggcaccaaggtggaaatcaaactcgaggacctgaagaacgtgttcccacctgaggtggccgtgttcgagcctagcgaggccgagatcagccacacccagaaagccaccctcgtgtgcctggctaccggcttctaccccgaccatgtggaactgtcttggtgggtcaacggcaaagaggtgcacagcggcgtgtgtaccgacccccagccactgaaagaacagcccgccctgaacgacagccggtactgcctgagcagcagactgagagtgtccgccaccttctggcagaacccccggaaccacttcagatgccaggtgcagttctacggcctgagcgagaacgacgagtggacccaggacagagccaagcccgtgacccagatcgtgtctgccgaagcctggggcagagccgattgcgacgtgaagctggtggaaaagagcttcgagacagacaccaacctgaacttccagaacctgagcgtgatcggcttcagaatcctgctgctgaaagtggccggctttaacctgctgatgaccctgcggctgtggtccagcagggccaagcgatctggatctggagcaacaaacttctcactactcaaacaagcaggtgacgtggaggagaatcccgggcctactagtgccaccatggactggatttggcgcatccttttccttgtcggcgctgctaccggcgcccattccgggcccgaagtgcagctggttgaatctggcggaggactggttcaggctggcggatctctgagactgtcttgtgccgccagcggcagaacctttagcatgggctggtttagacaggcccctggcaaagagagagagttcgtcgccgccatcacatactctggcggcagcccttactacgccgactctgtgaagggcagattcaccatcagccgggacaacgccaagaacaccgtgtacctccagatgaacagcctgaagcctgaggacaccgccgtgtactactgcgccgccaatccaacatacggcagcgactggaacgccgagaattggggccagggaacccaagtgacagtgtctagcggatccggcggcggaggatctggcggaggcggatctgggggcggaggctctttcgaacaactccagctgcaagagtctggccccggactggtcaagcctagcgaaacactgagcctgacctgtaccgtgtctggcggcagcatcagcagcagctcttattggtggggctggaccagacagcctcctggcagaggactggaatggatcggcaccatgtactacagcggcaacatctactacaaccccagcctccagagccgggccaccatctctgtggacaccagcaagaaccagttcagcctgaagctgagcagcgtgacagccgccgataccgccgtgtattattgcgccagacatgtgggctacagctacggcagacggttctggtacttcgacctgtggggcagaggcaccctggtcacagtttcttctacgcgtatccagaaccctgatcctgccgtgtaccagctgcgggatagcaagagcagcgacaagagcgtgtgtctgttcaccgacttcgacagccagaccaacgtgtcccagagcaaggactccgacgtgtacatcaccgataagtgcgtgctggacatgcggagcatggacttcaagagcaactccgccgtggcctggtccaacaagtccgatttcgcctgcgccaacgccttcaacaacagcattatccccgaggacacattcttcccaagccccgagagcagctgcggctttaccagcgagagctaccagcagggcgtgctgagcgccaccatcctgtacgagatcctgctgggcaaggccaccctgtacgccgtgctggtgtctgccctggtgctgatggctatggtcaagcggaaggacagccggggacgcgccaagagaagcggatctggcgtgaagcagaccctgaatttcgacctgctgaagctggctggcgacgtggaatccaacccaggcccttctagaggccatatgaccgagtacaagcccacggtgcgcctcgccacccgcgacgacgtccccagggccgtacgcaccctcgccgccgcgttcgccgactaccccgccacgcgccacaccgtcgatccggaccgccacatcgagcgggtcaccgagctgcaagaactcttcctcacgcgcgtcgggctcgacatcggcaaggtgtgggtcgcggacgacggcgccgcggtggcggtctggaccacgccggagagcgtcgaagcgggggcggtgttcgccgagatcggcccgcgcatggccgagttgagcggttcccggctggccgcgcagcaacagatggaaggcctcctggcgccgcaccggcccaaggagcccgcgtggttcctggccaccgtcggcgtctcgcccgaccaccagggcaagggtctgggcagcgccgtcgtgctccccggagtggaggcggccgagcgcgccggggtgcccgccttcctggagacctccgcgccccgcaacctccccttctacgagcggctcggcttcaccgtcaccgccgacgtcgaggtgcccgaaggaccgcgcacctggtgcatgacccgcaagcccggtgcctga

SEQ ID NO: 35981 - DNA, 2859 bp, synthetic construct
  source 1..2859: mol_type = other DNA
atggccttaccagtgaccgccttgctcctgccgctggccttgctgctccacgccgccaggccggagatcgtgctgacacagtctcccgccacactgtcactgtctccaggcgaaagagccacactgagctgtagagccagccagagcgtgtcctcttacctggcctggtatcagcagaagcctggacaggctccccggctgctgatctacgatgccagcaatagagccacaggcatccccgccagattttctggctctggcagcggcaccgatttcaccctgaccataagcagcctggaacctgaggacttcgccgtgtactactgccagcagagaagcaactggcctcctacattcggccagggcaccaaggtggaaatcaaactcgaggacctgaagaacgtgttcccacctgaggtggccgtgttcgagcctagcgaggccgagatcagccacacccagaaagccaccctcgtgtgcctggctaccggcttctaccccgaccatgtggaactgtcttggtgggtcaacggcaaagaggtgcacagcggcgtgtgtaccgacccccagccactgaaagaacagcccgccctgaacgacagccggtactgcctgagcagcagactgagagtgtccgccaccttctggcagaacccccggaaccacttcagatgccaggtgcagttctacggcctgagcgagaacgacgagtggacccaggacagagccaagcccgtgacccagatcgtgtctgccgaagcctggggcagagccgattgcgacgtgaagctggtggaaaagagcttcgagacagacaccaacctgaacttccagaacctgagcgtgatcggcttcagaatcctgctgctgaaagtggccggctttaacctgctgatgaccctgcggctgtggtccagcagggccaagcgatctggatctggagcaacaaacttctcactactcaaacaagcaggtgacgtggaggagaatcccgggcctactagtgccaccatggactggatttggcgcatccttttccttgtcggcgctgctaccggcgcccattccgggcccatgggaagctggcttgagttctaccacagactcaacgccattgacagcaggctgtgggcacttggcggaagcgaagctgaactcgccgcttttgaaaaagaaattgccgctttcgagtccgagcttcaggcttacaaaggcaaagggaatcctgaggtcgagagcctgagagatcacgctgcccacattagagagtggttgcaggcataccggcacaatggatccggcggcggaggatctggcggaggcggatctgggggcggaggctctttcgaacaactccagctgcaagagtctggccccggactggtcaagcctagcgaaacactgagcctgacctgtaccgtgtctggcggcagcatcagcagcagctcttattggtggggctggaccagacagcctcctggcagaggactggaatggatcggcaccatgtactacagcggcaacatctactacaaccccagcctccagagccgggccaccatctctgtggacaccagcaagaaccagttcagcctgaagctgagcagcgtgacagccgccgataccgccgtgtattattgcgccagacatgtgggctacagctacggcagacggttctggtacttcgacctgtggggcagaggcaccctggtcacagtttcttctacgcgtatccagaaccctgatcctgccgtgtaccagctgcgggatagcaagagcagcgacaagagcgtgtgtctgttcaccgacttcgacagccagaccaacgtgtcccagagcaaggactccgacgtgtacatcaccgataagtgcgtgctggacatgcggagcatggacttcaagagcaactccgccgtggcctggtccaacaagtccgatttcgcctgcgccaacgccttcaacaacagcattatccccgaggacacattcttcccaagccccgagagcagctgcggctttaccagcgagagctaccagcagggcgtgctgagcgccaccatcctgtacgagatcctgctgggcaaggccaccctgtacgccgtgctggtgtctgccctggtgctgatggctatggtcaagcggaaggacagccggggacgcgccaagagaagcggatctggcgtgaagcagaccctgaatttcgacctgctgaagctggctggcgacgtggaatccaacccaggcccttctagaggccatatgaccgagtacaagcccacggtgcgcctcgccacccgcgacgacgtccccagggccgtacgcaccctcgccgccgcgttcgccgactaccccgccacgcgccacaccgtcgatccggaccgccacatcgagcgggtcaccgagctgcaagaactcttcctcacgcgcgtcgggctcgacatcggcaaggtgtgggtcgcggacgacggcgccgcggtggcggtctggaccacgccggagagcgtcgaagcgggggcggtgttcgccgagatcggcccgcgcatggccgagttgagcggttcccggctggccgcgcagcaacagatggaaggcctcctggcgccgcaccggcccaaggagcccgcgtggttcctggccaccgtcggcgtctcgcccgaccaccagggcaagggtctgggcagcgccgtcgtgctccccggagtggaggcggccgagcgcgccggggtgcccgccttcctggagacctccgcgccccgcaacctccccttctacgagcggctcggcttcaccgtcaccgccgacgtcgaggtgcccgaaggaccgcgcacctggtgcatgacccgcaagcccggtgcctga

SEQ ID NO: 35982 - DNA, 2859 bp, synthetic construct
  source 1..2859: mol_type = other DNA
atggccttaccagtgaccgccttgctcctgccgctggccttgctgctccacgccgccaggccggcatgcatgggcagttggttcgagttctacgaccggctgaatgccatcgacgccagactgtgggctctcggaggatctgaagctgagctggccgccttcgagaaagagatcgccgcctttgagagcgagctgcaagcctacaaaggcaagggcaaccccgaggtggaaaacctgagagtgcacgccgctgccatcagagaatggctccaggcttacagacacaacggtaccggcggaggcggatctggcggcggaggtagcggtggcggaggatctgaattcgagatcgtgctgacacagtctcccgccacactgtcactgtctccaggcgaaagagccacactgagctgtagagccagccagagcgtgtcctcttacctggcctggtatcagcagaagcctggacaggctccccggctgctgatctacgatgccagcaatagagccacaggcatccccgccagattttctggctctggcagcggcaccgatttcaccctgaccataagcagcctggaacctgaggacttcgccgtgtactactgccagcagagaagcaactggcctcctacattcggccagggcaccaaggtggaaatcaaactcgaggacctgaagaacgtgttcccacctgaggtggccgtgttcgagcctagcgaggccgagatcagccacacccagaaagccaccctcgtgtgcctggctaccggcttctaccccgaccatgtggaactgtcttggtgggtcaacggcaaagaggtgcacagcggcgtgtgtaccgacccccagccactgaaagaacagcccgccctgaacgacagccggtactgcctgagcagcagactgagagtgtccgccaccttctggcagaacccccggaaccacttcagatgccaggtgcagttctacggcctgagcgagaacgacgagtggacccaggacagagccaagcccgtgacccagatcgtgtctgccgaagcctggggcagagccgattgcgacgtgaagctggtggaaaagagcttcgagacagacaccaacctgaacttccagaacctgagcgtgatcggcttcagaatcctgctgctgaaagtggccggctttaacctgctgatgaccctgcggctgtggtccagcagggccaagcgatctggatctggagcaacaaacttctcactactcaaacaagcaggtgacgtggaggagaatcccgggcctactagtatggactggatttggcgcatccttttccttgtcggcgctgctaccggcgcgcattccttcgaacaactccagctgcaagagtctggccccggactggtcaagcctagcgaaacactgagcctgacctgtaccgtgtctggcggcagcatcagcagcagctcttattggtggggctggaccagacagcctcctggcagaggactggaatggatcggcaccatgtactacagcggcaacatctactacaaccccagcctccagagccgggccaccatctctgtggacaccagcaagaaccagttcagcctgaagctgagcagcgtgacagccgccgataccgccgtgtattattgcgccagacatgtgggctacagctacggcagacggttctggtacttcgacctgtggggcagaggcaccctggtcacagtttcttctacgcgtatccagaaccctgatcctgccgtgtaccagctgcgggatagcaagagcagcgacaagagcgtgtgtctgttcaccgacttcgacagccagaccaacgtgtcccagagcaaggactccgacgtgtacatcaccgataagtgcgtgctggacatgcggagcatggacttcaagagcaactccgccgtggcctggtccaacaagtccgatttcgcctgcgccaacgccttcaacaacagcattatccccgaggacacattcttcccaagccccgagagcagctgcggctttaccagcgagagctaccagcagggcgtgctgagcgccaccatcctgtacgagatcctgctgggcaaggccaccctgtacgccgtgctggtgtctgccctggtgctgatggctatggtcaagcggaaggacagccggggacgcgccaagagaagcggatctggcgtgaagcagaccctgaatttcgacctgctgaagctggctggcgacgtggaatccaacccaggcccttctagaggccatatgaccgagtacaagcccacggtgcgcctcgccacccgcgacgacgtccccagggccgtacgcaccctcgccgccgcgttcgccgactaccccgccacgcgccacaccgtcgatccggaccgccacatcgagcgggtcaccgagctgcaagaactcttcctcacgcgcgtcgggctcgacatcggcaaggtgtgggtcgcggacgacggcgccgcggtggcggtctggaccacgccggagagcgtcgaagcgggggcggtgttcgccgagatcggcccgcgcatggccgagttgagcggttcccggctggccgcgcagcaacagatggaaggcctcctggcgccgcaccggcccaaggagcccgcgtggttcctggccaccgtcggcgtctcgcccgaccaccagggcaagggtctgggcagcgccgtcgtgctccccggagtggaggcggccgagcgcgccggggtgcccgccttcctggagacctccgcgccccgcaacctccccttctacgagcggctcggcttcaccgtcaccgccgacgtcgaggtgcccgaaggaccgcgcacctggtgcatgacccgcaagcccggtgcctga

SEQ ID NO: 35983 - DNA, 3210 bp, synthetic construct
  source 1..3210: mol_type = other DNA
atggccttaccagtgaccgccttgctcctgccgctggccttgctgctccacgccgccaggccggcatgcatggaccccgacctggaaatcagagccgccttcctgcggcagagaaacacagccctgagaacagaggtggccgagctggaacaagaggtgcagcggctggaaaacgaggtgtcccagtacgagacaagatacggccctctcggaggcggaaaaggtaccggcggaggcggatctggcggcggaggtagcggtggcggaggatctgaattcgagatcgtgctgacacagtctcccgccacactgtcactgtctccaggcgaaagagccacactgagctgtagagccagccagagcgtgtcctcttacctggcctggtatcagcagaagcctggacaggctccccggctgctgatctacgatgccagcaatagagccacaggcatccccgccagattttctggctctggcagcggcaccgatttcaccctgaccataagcagcctggaacctgaggacttcgccgtgtactactgccagcagagaagcaactggcctcctacattcggccagggcaccaaggtggaaatcaaactcgaggacctgaagaacgtgttcccacctgaggtggccgtgttcgagcctagcgaggccgagatcagccacacccagaaagccaccctcgtgtgcctggctaccggcttctaccccgaccatgtggaactgtcttggtgggtcaacggcaaagaggtgcacagcggcgtgtgtaccgacccccagccactgaaagaacagcccgccctgaacgacagccggtactgcctgagcagcagactgagagtgtccgccaccttctggcagaacccccggaaccacttcagatgccaggtgcagttctacggcctgagcgagaacgacgagtggacccaggacagagccaagcccgtgacccagatcgtgtctgccgaagcctggggcagagccgattgcgacgtgaagctggtggaaaagagcttcgagacagacaccaacctgaacttccagaacctgagcgtgatcggcttcagaatcctgctgctgaaagtggccggctttaacctgctgatgaccctgcggctgtggtccagcagggccaagcgatctggatctggagcaacaaacttctcactactcaaacaagcaggtgacgtggaggagaatcccgggcctactagtgccaccatggactggatttggcgcatccttttccttgtcggcgctgctaccggcgcccattccgggcccgaagtgcagctggttgaatctggcggaggactggttcaggctggcggatctctgagactgtcttgtgccgccagcggcagaacctttagcatgggctggtttagacaggcccctggcaaagagagagagttcgtcgccgccatcacatactctggcggcagcccttactacgccgactctgtgaagggcagattcaccatcagccgggacaacgccaagaacaccgtgtacctccagatgaacagcctgaagcctgaggacaccgccgtgtactactgcgccgccaatccaacatacggcagcgactggaacgccgagaattggggccagggaacccaagtgacagtgtctagcggatccggcggcggaggatctggcggaggcggatctgggggcggaggctctttcgaacaactccagctgcaagagtctggccccggactggtcaagcctagcgaaacactgagcctgacctgtaccgtgtctggcggcagcatcagcagcagctcttattggtggggctggaccagacagcctcctggcagaggactggaatggatcggcaccatgtactacagcggcaacatctactacaaccccagcctccagagccgggccaccatctctgtggacaccagcaagaaccagttcagcctgaagctgagcagcgtgacagccgccgataccgccgtgtattattgcgccagacatgtgggctacagctacggcagacggttctggtacttcgacctgtggggcagaggcaccctggtcacagtttcttctacgcgtatccagaaccctgatcctgccgtgtaccagctgcgggatagcaagagcagcgacaagagcgtgtgtctgttcaccgacttcgacagccagaccaacgtgtcccagagcaaggactccgacgtgtacatcaccgataagtgcgtgctggacatgcggagcatggacttcaagagcaactccgccgtggcctggtccaacaagtccgatttcgcctgcgccaacgccttcaacaacagcattatccccgaggacacattcttcccaagccccgagagcagctgcggctttaccagcgagagctaccagcagggcgtgctgagcgccaccatcctgtacgagatcctgctgggcaaggccaccctgtacgccgtgctggtgtctgccctggtgctgatggctatggtcaagcggaaggacagccggggacgcgccaagagaagcggatctggcgtgaagcagaccctgaatttcgacctgctgaagctggctggcgacgtggaatccaacccaggcccttctagaggccatatgaccgagtacaagcccacggtgcgcctcgccacccgcgacgacgtccccagggccgtacgcaccctcgccgccgcgttcgccgactaccccgccacgcgccacaccgtcgatccggaccgccacatcgagcgggtcaccgagctgcaagaactcttcctcacgcgcgtcgggctcgacatcggcaaggtgtgggtcgcggacgacggcgccgcggtggcggtctggaccacgccggagagcgtcgaagcgggggcggtgttcgccgagatcggcccgcgcatggccgagttgagcggttcccggctggccgcgcagcaacagatggaaggcctcctggcgccgcaccggcccaaggagcccgcgtggttcctggccaccgtcggcgtctcgcccgaccaccagggcaagggtctgggcagcgccgtcgtgctccccggagtggaggcggccgagcgcgccggggtgcccgccttcctggagacctccgcgccccgcaacctccccttctacgagcggctcggcttcaccgtcaccgccgacgtcgaggtgcccgaaggaccgcgcacctggtgcatgacccgcaagcccggtgcctga

SEQ ID NO: 35984 - DNA, 2859 bp, synthetic construct
  source 1..2859: mol_type = other DNA
atggccttaccagtgaccgccttgctcctgccgctggccttgctgctccacgccgccaggccggagatcgtgctgacacagtctcccgccacactgtcactgtctccaggcgaaagagccacactgagctgtagagccagccagagcgtgtcctcttacctggcctggtatcagcagaagcctggacaggctccccggctgctgatctacgatgccagcaatagagccacaggcatccccgccagattttctggctctggcagcggcaccgatttcaccctgaccataagcagcctggaacctgaggacttcgccgtgtactactgccagcagagaagcaactggcctcctacattcggccagggcaccaaggtggaaatcaaactcgaggacctgaagaacgtgttcccacctgaggtggccgtgttcgagcctagcgaggccgagatcagccacacccagaaagccaccctcgtgtgcctggctaccggcttctaccccgaccatgtggaactgtcttggtgggtcaacggcaaagaggtgcacagcggcgtgtgtaccgacccccagccactgaaagaacagcccgccctgaacgacagccggtactgcctgagcagcagactgagagtgtccgccaccttctggcagaacccccggaaccacttcagatgccaggtgcagttctacggcctgagcgagaacgacgagtggacccaggacagagccaagcccgtgacccagatcgtgtctgccgaagcctggggcagagccgattgcgacgtgaagctggtggaaaagagcttcgagacagacaccaacctgaacttccagaacctgagcgtgatcggcttcagaatcctgctgctgaaagtggccggctttaacctgctgatgaccctgcggctgtggtccagcagggccaagcgatctggatctggagcaacaaacttctcactactcaaacaagcaggtgacgtggaggagaatcccgggcctactagtgccaccatggactggatttggcgcatccttttccttgtcggcgctgctaccggcgcccattccgggcccatgggatcttggagcgagttttacgatcggctgcacgccattcaccaccggctgtatgctctcggaggaagcgaagctgagctggccgcttttgaaaaagaaattgccgctttcgagtccgagcttcaggcttacaaaggcaaagggaatcctgaggtcgaggccctgagagataccgccgccttcatcagaacccggttgcaggcataccggcacaacggatccggcggcggaggatctggcggaggcggatctgggggcggaggctctttcgaacaactccagctgcaagagtctggccccggactggtcaagcctagcgaaacactgagcctgacctgtaccgtgtctggcggcagcatcagcagcagctcttattggtggggctggaccagacagcctcctggcagaggactggaatggatcggcaccatgtactacagcggcaacatctactacaaccccagcctccagagccgggccaccatctctgtggacaccagcaagaaccagttcagcctgaagctgagcagcgtgacagccgccgataccgccgtgtattattgcgccagacatgtgggctacagctacggcagacggttctggtacttcgacctgtggggcagaggcaccctggtcacagtttcttctacgcgtatccagaaccctgatcctgccgtgtaccagctgcgggatagcaagagcagcgacaagagcgtgtgtctgttcaccgacttcgacagccagaccaacgtgtcccagagcaaggactccgacgtgtacatcaccgataagtgcgtgctggacatgcggagcatggacttcaagagcaactccgccgtggcctggtccaacaagtccgatttcgcctgcgccaacgccttcaacaacagcattatccccgaggacacattcttcccaagccccgagagcagctgcggctttaccagcgagagctaccagcagggcgtgctgagcgccaccatcctgtacgagatcctgctgggcaaggccaccctgtacgccgtgctggtgtctgccctggtgctgatggctatggtcaagcggaaggacagccggggacgcgccaagagaagcggatctggcgtgaagcagaccctgaatttcgacctgctgaagctggctggcgacgtggaatccaacccaggcccttctagaggccatatgaccgagtacaagcccacggtgcgcctcgccacccgcgacgacgtccccagggccgtacgcaccctcgccgccgcgttcgccgactaccccgccacgcgccacaccgtcgatccggaccgccacatcgagcgggtcaccgagctgcaagaactcttcctcacgcgcgtcgggctcgacatcggcaaggtgtgggtcgcggacgacggcgccgcggtggcggtctggaccacgccggagagcgtcgaagcgggggcggtgttcgccgagatcggcccgcgcatggccgagttgagcggttcccggctggccgcgcagcaacagatggaaggcctcctggcgccgcaccggcccaaggagcccgcgtggttcctggccaccgtcggcgtctcgcccgaccaccagggcaagggtctgggcagcgccgtcgtgctccccggagtggaggcggccgagcgcgccggggtgcccgccttcctggagacctccgcgccccgcaacctccccttctacgagcggctcggcttcaccgtcaccgccgacgtcgaggtgcccgaaggaccgcgcacctggtgcatgacccgcaagcccggtgcctga

SEQ ID NO: 35985 - DNA, 3489 bp, synthetic construct
  source 1..3489: mol_type = other DNA
atggccttaccagtgaccgccttgctcctgccgctggccttgctgctccacgccgccaggccggagatcgtgctgacacagtctcccgccacactgtcactgtctccaggcgaaagagccacactgagctgtagagccagccagagcgtgtcctcttacctggcctggtatcagcagaagcctggacaggctccccggctgctgatctacgatgccagcaatagagccacaggcatccccgccagattttctggctctggcagcggcaccgatttcaccctgaccataagcagcctggaacctgaggacttcgccgtgtactactgccagcagagaagcaactggcctcctacattcggccagggcaccaaggtggaaatcaaactcgaggacctgaagaacgtgttcccacctgaggtggccgtgttcgagcctagcgaggccgagatcagccacacccagaaagccaccctcgtgtgcctggctaccggcttctaccccgaccatgtggaactgtcttggtgggtcaacggcaaagaggtgcacagcggcgtgtgtaccgacccccagccactgaaagaacagcccgccctgaacgacagccggtactgcctgagcagcagactgagagtgtccgccaccttctggcagaacccccggaaccacttcagatgccaggtgcagttctacggcctgagcgagaacgacgagtggacccaggacagagccaagcccgtgacccagatcgtgtctgccgaagcctggggcagagccgattgcgacgtgaagctggtggaaaagagcttcgagacagacaccaacctgaacttccagaacctgagcgtgatcggcttcagaatcctgctgctgaaagtggccggctttaacctgctgatgaccctgcggctgtggtccagcagggccaagcgatctggatctggagcaacaaacttctcactactcaaacaagcaggtgacgtggaggagaatcccgggcctactagtaccatggactggatttggcgcatccttttccttgtcggcgctgctaccggcgcccattccctgttcaatcaagaggtgcagatccctctgaccgagagctactgtggcccctgtcctaagaactggatctgctacaagaacaactgctaccagttcttcgacgagagcaagaattggtacgagagccaggccagctgcatgagccagaatgccagcctgctgaaggtgtacagcaaagaggaccaggacctgctgaaactggtcaagagcgcccactggatgggccttgtgcacatccccaccaatggctcttggcagtgggaggacggcagcattctgagccctaacctgctgaccatcatcgagatgcagaagggcgactgcgccctgtacgccagcagctttaagggctacatcgagaattgcagcaccccgaacacctacatctgtatgcagagaaccgtttctggcggaggcggctctggaggaggcggaagtggcggcggaggcgacctctttaatcaagaagtccagattccactcaccgaatcctactgcggaccttgtccaaaaaattggatttgttataagaacaactgttatcaattctttgatgagtctaaaaattggtatgagtcccaggcttcctgcatgtctcagaacgcttctctgctgaaagtctactctaaagaagatcaggatctcctgaagctcgtcaagtctgcccattggatggggctcgtccacattcctaccaacggaagctggcaatgggaagatggctccatcctgtctccaaatctgctcacgattattgaaatgcagaaaggggattgtgctctctacgccagctccttcaagggatatattgagaactgtagcacgcccaatacttatatctgtatgcaacggaccgtgggatccggcggcggaggatctggcggaggcggatctgggggcggaggctctttcgaacaactccagctgcaagagtctggccccggactggtcaagcctagcgaaacactgagcctgacctgtaccgtgtctggcggcagcatcagcagcagctcttattggtggggctggaccagacagcctcctggcagaggactggaatggatcggcaccatgtactacagcggcaacatctactacaaccccagcctccagagccgggccaccatctctgtggacaccagcaagaaccagttcagcctgaagctgagcagcgtgacagccgccgataccgccgtgtattattgcgccagacatgtgggctacagctacggcagacggttctggtacttcgacctgtggggcagaggcaccctggtcacagtttcttctacgcgtatccagaaccctgatcctgccgtgtaccagctgcgggatagcaagagcagcgacaagagcgtgtgtctgttcaccgacttcgacagccagaccaacgtgtcccagagcaaggactccgacgtgtacatcaccgataagtgcgtgctggacatgcggagcatggacttcaagagcaactccgccgtggcctggtccaacaagtccgatttcgcctgcgccaacgccttcaacaacagcattatccccgaggacacattcttcccaagccccgagagcagctgcggctttaccagcgagagctaccagcagggcgtgctgagcgccaccatcctgtacgagatcctgctgggcaaggccaccctgtacgccgtgctggtgtctgccctggtgctgatggctatggtcaagcggaaggacagccggggacgcgccaagagaagcggatctggcgtgaagcagaccctgaatttcgacctgctgaagctggctggcgacgtggaatccaacccaggcccttctagaggccatatgaccgagtacaagcccacggtgcgcctcgccacccgcgacgacgtccccagggccgtacgcaccctcgccgccgcgttcgccgactaccccgccacgcgccacaccgtcgatccggaccgccacatcgagcgggtcaccgagctgcaagaactcttcctcacgcgcgtcgggctcgacatcggcaaggtgtgggtcgcggacgacggcgccgcggtggcggtctggaccacgccggagagcgtcgaagcgggggcggtgttcgccgagatcggcccgcgcatggccgagttgagcggttcccggctggccgcgcagcaacagatggaaggcctcctggcgccgcaccggcccaaggagcccgcgtggttcctggccaccgtcggcgtctcgcccgaccaccagggcaagggtctgggcagcgccgtcgtgctccccggagtggaggcggccgagcgcgccggggtgcccgccttcctggagacctccgcgccccgcaacctccccttctacgagcggctcggcttcaccgtcaccgccgacgtcgaggtgcccgaaggaccgcgcacctggtgcatgacccgcaagcccggtgcctga

SEQ ID NO: 35986 - DNA, 1875 bp, synthetic construct
  source 1..1875: mol_type = other DNA
atggccttaccagtgaccgccttgctcctgccgctggccttgctgctccacgccgccaggccggagatcgtgctgacacagtctcccgccacactgtcactgtctccaggcgaaagagccacactgagctgtagagccagccagagcgtgtcctcttacctggcctggtatcagcagaagcctggacaggctccccggctgctgatctacgatgccagcaatagagccacaggcatccccgccagattttctggctctggcagcggcaccgatttcaccctgaccataagcagcctggaacctgaggacttcgccgtgtactactgccagcagagaagcaactggcctcctacattcggccagggcaccaaggtggaaatcaaactcgaggacctgaagaacgtgttcccacctgaggtggccgtgttcgagcctagcgaggccgagatcagccacacccagaaagccaccctcgtgtgcctggctaccggcttctaccccgaccatgtggaactgtcttggtgggtcaacggcaaagaggtgcacagcggcgtgtgtaccgacccccagccactgaaagaacagcccgccctgaacgacagccggtactgcctgagcagcagactgagagtgtccgccaccttctggcagaacccccggaaccacttcagatgccaggtgcagttctacggcctgagcgagaacgacgagtggacccaggacagagccaagcccgtgacccagatcgtgtctgccgaagcctggggcagagccgattgcggctttaccagcgagagctaccagcagggcgtgctgagcgccaccaacctgagcgtgatcggcttcagaatcctgctgctgaaagtggccggctttaacctgctgatgaccctgcggctgtggtccagcagggccaagcgatctggatctggagcaacaaacttctcactactcaaacaagcaggtgacgtggaggagaatcccgggcctactagtatggactggatttggcgcatccttttccttgtcggcgctgctaccggcgcgcattccttcgaacaactccagctgcaagagtctggccccggactggtcaagcctagcgaaacactgagcctgacctgtaccgtgtctggcggcagcatcagcagcagctcttattggtggggctggaccagacagcctcctggcagaggactggaatggatcggcaccatgtactacagcggcaacatctactacaaccccagcctccagagccgggccaccatctctgtggacaccagcaagaaccagttcagcctgaagctgagcagcgtgacagccgccgataccgccgtgtattattgcgccagacatgtgggctacagctacggcagacggttctggtacttcgacctgtggggcagaggcaccctggtcacagtttcttctacgcgtatccagaaccctgatcctgccgtgtaccagctgcgggatagcaagagcagcgacaagagcgtgtgtctgttcaccgacttcgacagccagaccaacgtgtcccagagcaaggactccgacgtgtacatcaccgataagtgcgtgctggacatgcggagcatggacttcaagagcaactccgccgtggcctggtccaacaagtccgatttcgcctgcgccaacgccttcaacaacagcattatccccgaggacacattcttcccaagccccgagagcagctgcgacgtgaagctggtggaaaagagcttcgagacagacaccaacctgaacttccagatcctgtacgagatcctgctgggcaaggccaccctgtacgccgtgctggtgtctgccctggtgctgatggctatggtcaagcggaaggacagccgggga

SEQ ID NO: 35987 - DNA, 1887 bp, synthetic construct
  source 1..1887: mol_type = other DNA
atggccttaccagtgaccgccttgctcctgccgctggccttgctgctccacgccgccaggccggagatcgtgctgacacagtctcccgccacactgtcactgtctccaggcgaaagagccacactgagctgtagagccagccagagcgtgtcctcttacctggcctggtatcagcagaagcctggacaggctccccggctgctgatctacgatgccagcaatagagccacaggcatccccgccagattttctggctctggcagcggcaccgatttcaccctgaccataagcagcctggaacctgaggacttcgccgtgtactactgccagcagagaagcaactggcctcctacattcggccagggcaccaaggtggaaatcaaactcgagatccagaaccctgatcctgccgtgtaccagctgcgggatagcaagagcagcgacaagagcgtgtgtctgttcaccgacttcgacagccagaccaacgtgtcccagagcaaggactccgacgtgtacatcaccgataagtgcgtgctggacatgcggagcatggacttcaagagcaactccgccgtggcctggtccaacaagtccgatttcgcctgcgccaacgccttcaacaacagcattatccccgaggacacattcttcccaagccccgagagcagctgcgacgtgaagctggtggaaaagagcttcgagacagacaccaacctgaacttccagatcctgtacgagatcctgctgggcaaggccaccctgtacgccgtgctggtgtctgccctggtgctgatggctatggtcaagcggaaggacagccggggacgcgccaagagaagcggatctggcgtgaagcagaccctgaatttcgacctgctgaagctggctggcgacgtggaatccaacccaggccctactagtatggactggatttggcgcatccttttccttgtcggcgctgctaccggcgcgcattccttcgaacaactccagctgcaagagtctggccccggactggtcaagcctagcgaaacactgagcctgacctgtaccgtgtctggcggcagcatcagcagcagctcttattggtggggctggaccagacagcctcctggcagaggactggaatggatcggcaccatgtactacagcggcaacatctactacaaccccagcctccagagccgggccaccatctctgtggacaccagcaagaaccagttcagcctgaagctgagcagcgtgacagccgccgataccgccgtgtattattgcgccagacatgtgggctacagctacggcagacggttctggtacttcgacctgtggggcagaggcaccctggtcacagtttcttctacgcgtgaggacctgaagaacgtgttcccacctgaggtggccgtgttcgagcctagcgaggccgagatcagccacacccagaaagccaccctcgtgtgcctggctaccggcttctaccccgaccatgtggaactgtcttggtgggtcaacggcaaagaggtgcacagcggcgtgtgtaccgacccccagccactgaaagaacagcccgccctgaacgacagccggtactgcctgagcagcagactgagagtgtccgccaccttctggcagaacccccggaaccacttcagatgccaggtgcagttctacggcctgagcgagaacgacgagtggacccaggacagagccaagcccgtgacccagatcgtgtctgccgaagcctggggcagagccgattgcggctttaccagcgagagctaccagcagggcgtgctgagcgccaccaacctgagcgtgatcggcttcagaatcctgctgctgaaagtggccggctttaacctgctgatgaccctgcggctgtggtccagc

SEQ ID NO: 35988 - DNA, 2280 bp, synthetic construct
  source 1..2280: mol_type = other DNA
atggccttaccagtgaccgccttgctcctgccgctggccttgctgctccacgccgccaggccggaagtgcagctggttgaatctggcggaggactggttcagcctggcggatctctgagactgtcttgtgccgccagcggcttcagcttcagcgacttttggatgagctgggtccgacaggcccctggcaaaggacttgaatgggtcgccacaatcagccaggccggcagcgagaaggactacgtggactctgtgaagggcagattcaccatcagccgggacaacgccaagaagtccctgtacctccagatgaacagcctgagagccgaggacaccgccgtgtactattgtgcctctggcgtgtacagcttcgactacagaggccagggcaccctggtcacagtctcttctggtaccggcggaggcggatctggcggcggaggtagcggtggcggaggatctgaattcgagatcgtgctgacacagtctcccgccacactgtcactgtctccaggcgaaagagccacactgagctgtagagccagccagagcgtgtcctcttacctggcctggtatcagcagaagcctggacaggctccccggctgctgatctacgatgccagcaatagagccacaggcatccccgccagattttctggctctggcagcggcaccgatttcaccctgaccataagcagcctggaacctgaggacttcgccgtgtactactgccagcagagaagcaactggcctcctacattcggccagggcaccaaggtggaaatcaaactcgaggacctgaagaacgtgttcccacctgaggtggccgtgttcgagcctagcgaggccgagatcagccacacccagaaagccaccctcgtgtgcctggctaccggcttctaccccgaccatgtggaactgtcttggtgggtcaacggcaaagaggtgcacagcggcgtgtgtaccgacccccagccactgaaagaacagcccgccctgaacgacagccggtactgcctgagcagcagactgagagtgtccgccaccttctggcagaacccccggaaccacttcagatgccaggtgcagttctacggcctgagcgagaacgacgagtggacccaggacagagccaagcccgtgacccagatcgtgtctgccgaagcctggggcagagccgattgcggctttaccagcgagagctaccagcagggcgtgctgagcgccaccaacctgagcgtgatcggcttcagaatcctgctgctgaaagtggccggctttaacctgctgatgaccctgcggctgtggtccagcagggccaagcgatctggatctggagcaacaaacttctcactactcaaacaagcaggtgacgtggaggagaatcccgggcctactagtatggactggatttggcgcatccttttccttgtcggcgctgctaccggcgcgcattccttcgaacaactccagctgcaagagtctggccccggactggtcaagcctagcgaaacactgagcctgacctgtaccgtgtctggcggcagcatcagcagcagctcttattggtggggctggaccagacagcctcctggcagaggactggaatggatcggcaccatgtactacagcggcaacatctactacaaccccagcctccagagccgggccaccatctctgtggacaccagcaagaaccagttcagcctgaagctgagcagcgtgacagccgccgataccgccgtgtattattgcgccagacatgtgggctacagctacggcagacggttctggtacttcgacctgtggggcagaggcaccctggtcacagtttcttctacgcgtatccagaaccctgatcctgccgtgtaccagctgcgggatagcaagagcagcgacaagagcgtgtgtctgttcaccgacttcgacagccagaccaacgtgtcccagagcaaggactccgacgtgtacatcaccgataagtgcgtgctggacatgcggagcatggacttcaagagcaactccgccgtggcctggtccaacaagtccgatttcgcctgcgccaacgccttcaacaacagcattatccccgaggacacattcttcccaagccccgagagcagctgcgacgtgaagctggtggaaaagagcttcgagacagacaccaacctgaacttccagatcctgtacgagatcctgctgggcaaggccaccctgtacgccgtgctggtgtctgccctggtgctgatggctatggtcaagcggaaggacagccgggga

SEQ ID NO: 35989 - DNA, 2292 bp, synthetic construct
  source 1..2292: mol_type = other DNA
atggccttaccagtgaccgccttgctcctgccgctggccttgctgctccacgccgccaggccggaagtgcagctggttgaatctggcggaggactggttcagcctggcggatctctgagactgtcttgtgccgccagcggcttcagcttcagcgacttttggatgagctgggtccgacaggcccctggcaaaggacttgaatgggtcgccacaatcagccaggccggcagcgagaaggactacgtggactctgtgaagggcagattcaccatcagccgggacaacgccaagaagtccctgtacctccagatgaacagcctgagagccgaggacaccgccgtgtactattgtgcctctggcgtgtacagcttcgactacagaggccagggcaccctggtcacagtctcttctggtaccggcggaggcggatctggcggcggaggtagcggtggcggaggatctgaattcgagatcgtgctgacacagtctcccgccacactgtcactgtctccaggcgaaagagccacactgagctgtagagccagccagagcgtgtcctcttacctggcctggtatcagcagaagcctggacaggctccccggctgctgatctacgatgccagcaatagagccacaggcatccccgccagattttctggctctggcagcggcaccgatttcaccctgaccataagcagcctggaacctgaggacttcgccgtgtactactgccagcagagaagcaactggcctcctacattcggccagggcaccaaggtggaaatcaaactcgagatccagaaccctgatcctgccgtgtaccagctgcgggatagcaagagcagcgacaagagcgtgtgtctgttcaccgacttcgacagccagaccaacgtgtcccagagcaaggactccgacgtgtacatcaccgataagtgcgtgctggacatgcggagcatggacttcaagagcaactccgccgtggcctggtccaacaagtccgatttcgcctgcgccaacgccttcaacaacagcattatccccgaggacacattcttcccaagccccgagagcagctgcgacgtgaagctggtggaaaagagcttcgagacagacaccaacctgaacttccagatcctgtacgagatcctgctgggcaaggccaccctgtacgccgtgctggtgtctgccctggtgctgatggctatggtcaagcggaaggacagccggggacgcgccaagagaagcggatctggcgtgaagcagaccctgaatttcgacctgctgaagctggctggcgacgtggaatccaacccaggccctactagtatggactggatttggcgcatccttttccttgtcggcgctgctaccggcgcgcattccttcgaacaactccagctgcaagagtctggccccggactggtcaagcctagcgaaacactgagcctgacctgtaccgtgtctggcggcagcatcagcagcagctcttattggtggggctggaccagacagcctcctggcagaggactggaatggatcggcaccatgtactacagcggcaacatctactacaaccccagcctccagagccgggccaccatctctgtggacaccagcaagaaccagttcagcctgaagctgagcagcgtgacagccgccgataccgccgtgtattattgcgccagacatgtgggctacagctacggcagacggttctggtacttcgacctgtggggcagaggcaccctggtcacagtttcttctacgcgtgaggacctgaagaacgtgttcccacctgaggtggccgtgttcgagcctagcgaggccgagatcagccacacccagaaagccaccctcgtgtgcctggctaccggcttctaccccgaccatgtggaactgtcttggtgggtcaacggcaaagaggtgcacagcggcgtgtgtaccgacccccagccactgaaagaacagcccgccctgaacgacagccggtactgcctgagcagcagactgagagtgtccgccaccttctggcagaacccccggaaccacttcagatgccaggtgcagttctacggcctgagcgagaacgacgagtggacccaggacagagccaagcccgtgacccagatcgtgtctgccgaagcctggggcagagccgattgcggctttaccagcgagagctaccagcagggcgtgctgagcgccaccaacctgagcgtgatcggcttcagaatcctgctgctgaaagtggccggctttaacctgctgatgaccctgcggctgtggtccagc

SEQ ID NO: 35990 - DNA, 2691 bp, synthetic construct
  source 1..2691: mol_type = other DNA
atggccttaccagtgaccgccttgctcctgccgctggccttgctgctccacgccgccaggccggaagtgcagctggttgaatctggcggaggactggttcagcctggcggatctctgagactgtcttgtgccgccagcggcttcagcttcagcgacttttggatgagctgggtccgacaggcccctggcaaaggacttgaatgggtcgccacaatcagccaggccggcagcgagaaggactacgtggactctgtgaagggcagattcaccatcagccgggacaacgccaagaagtccctgtacctccagatgaacagcctgagagccgaggacaccgccgtgtactattgtgcctctggcgtgtacagcttcgactacagaggccagggcaccctggtcacagtctcttctggtaccggcggaggcggatctggcggcggaggtagcggtggcggaggatctgaattcgagatcgtgctgacacagtctcccgccacactgtcactgtctccaggcgaaagagccacactgagctgtagagccagccagagcgtgtcctcttacctggcctggtatcagcagaagcctggacaggctccccggctgctgatctacgatgccagcaatagagccacaggcatccccgccagattttctggctctggcagcggcaccgatttcaccctgaccataagcagcctggaacctgaggacttcgccgtgtactactgccagcagagaagcaactggcctcctacattcggccagggcaccaaggtggaaatcaaactcgaggacctgaagaacgtgttcccacctgaggtggccgtgttcgagcctagcgaggccgagatcagccacacccagaaagccaccctcgtgtgcctggctaccggcttctaccccgaccatgtggaactgtcttggtgggtcaacggcaaagaggtgcacagcggcgtgtgtaccgacccccagccactgaaagaacagcccgccctgaacgacagccggtactgcctgagcagcagactgagagtgtccgccaccttctggcagaacccccggaaccacttcagatgccaggtgcagttctacggcctgagcgagaacgacgagtggacccaggacagagccaagcccgtgacccagatcgtgtctgccgaagcctggggcagagccgattgcggctttaccagcgagagctaccagcagggcgtgctgagcgccaccaacctgagcgtgatcggcttcagaatcctgctgctgaaagtggccggctttaacctgctgatgaccctgcggctgtggtccagcagggccaagcgatctggatctggagcaacaaacttctcactactcaaacaagcaggtgacgtggaggagaatcccgggcctactagtatggactggatttggcgcatccttttccttgtcggcgctgctaccggcgcgcattccgggccccagctccagctgcaagagtctggacctggcctggtcaagcctagcgagacactgagcctgacctgtaccgtgtccggcgatagcatcagcagcggcgattactactggggctggatcagacagcctcctggcaaaggactggaatggatcggccacatctactacagcggcgtgacctactacaaccccagcctgaagtccagagtgaccatcagcgtggacaccagccggaaccagttctccctgaagctgtctagcgtgacagccgccgataccgccgtgtactactgcaccagagaggacagcagcaactggcggagtagaggccagggaacactggtcacagttagctctggatccggcggaggcggaagtggaggcggaggatctggcggcggaggctctttcgaacaactccagctgcaagagtctggccccggactggtcaagcctagcgaaacactgagcctgacctgtaccgtgtctggcggcagcatcagcagcagctcttattggtggggctggaccagacagcctcctggcagaggactggaatggatcggcaccatgtactacagcggcaacatctactacaaccccagcctccagagccgggccaccatctctgtggacaccagcaagaaccagttcagcctgaagctgagcagcgtgacagccgccgataccgccgtgtattattgcgccagacatgtgggctacagctacggcagacggttctggtacttcgacctgtggggcagaggcaccctggtcacagtttcttctacgcgtatccagaaccctgatcctgccgtgtaccagctgcgggatagcaagagcagcgacaagagcgtgtgtctgttcaccgacttcgacagccagaccaacgtgtcccagagcaaggactccgacgtgtacatcaccgataagtgcgtgctggacatgcggagcatggacttcaagagcaactccgccgtggcctggtccaacaagtccgatttcgcctgcgccaacgccttcaacaacagcattatccccgaggacacattcttcccaagccccgagagcagctgcgacgtgaagctggtggaaaagagcttcgagacagacaccaacctgaacttccagatcctgtacgagatcctgctgggcaaggccaccctgtacgccgtgctggtgtctgccctggtgctgatggctatggtcaagcggaaggacagccgggga

SEQ ID NO: 35991 - DNA, 2703 bp, synthetic construct
  source 1..2703: mol_type = other DNA
atggccttaccagtgaccgccttgctcctgccgctggccttgctgctccacgccgccaggccggaagtgcagctggttgaatctggcggaggactggttcagcctggcggatctctgagactgtcttgtgccgccagcggcttcagcttcagcgacttttggatgagctgggtccgacaggcccctggcaaaggacttgaatgggtcgccacaatcagccaggccggcagcgagaaggactacgtggactctgtgaagggcagattcaccatcagccgggacaacgccaagaagtccctgtacctccagatgaacagcctgagagccgaggacaccgccgtgtactattgtgcctctggcgtgtacagcttcgactacagaggccagggcaccctggtcacagtctcttctggtaccggcggaggcggatctggcggcggaggtagcggtggcggaggatctgaattcgagatcgtgctgacacagtctcccgccacactgtcactgtctccaggcgaaagagccacactgagctgtagagccagccagagcgtgtcctcttacctggcctggtatcagcagaagcctggacaggctccccggctgctgatctacgatgccagcaatagagccacaggcatccccgccagattttctggctctggcagcggcaccgatttcaccctgaccataagcagcctggaacctgaggacttcgccgtgtactactgccagcagagaagcaactggcctcctacattcggccagggcaccaaggtggaaatcaaactcgagatccagaaccctgatcctgccgtgtaccagctgcgggatagcaagagcagcgacaagagcgtgtgtctgttcaccgacttcgacagccagaccaacgtgtcccagagcaaggactccgacgtgtacatcaccgataagtgcgtgctggacatgcggagcatggacttcaagagcaactccgccgtggcctggtccaacaagtccgatttcgcctgcgccaacgccttcaacaacagcattatccccgaggacacattcttcccaagccccgagagcagctgcgacgtgaagctggtggaaaagagcttcgagacagacaccaacctgaacttccagatcctgtacgagatcctgctgggcaaggccaccctgtacgccgtgctggtgtctgccctggtgctgatggctatggtcaagcggaaggacagccggggacgcgccaagagaagcggatctggcgtgaagcagaccctgaatttcgacctgctgaagctggctggcgacgtggaatccaacccaggccctactagtatggactggatttggcgcatccttttccttgtcggcgctgctaccggcgcgcattccgggccccagctccagctgcaagagtctggacctggcctggtcaagcctagcgagacactgagcctgacctgtaccgtgtccggcgatagcatcagcagcggcgattactactggggctggatcagacagcctcctggcaaaggactggaatggatcggccacatctactacagcggcgtgacctactacaaccccagcctgaagtccagagtgaccatcagcgtggacaccagccggaaccagttctccctgaagctgtctagcgtgacagccgccgataccgccgtgtactactgcaccagagaggacagcagcaactggcggagtagaggccagggaacactggtcacagttagctctggatccggcggaggcggaagtggaggcggaggatctggcggcggaggctctttcgaacaactccagctgcaagagtctggccccggactggtcaagcctagcgaaacactgagcctgacctgtaccgtgtctggcggcagcatcagcagcagctcttattggtggggctggaccagacagcctcctggcagaggactggaatggatcggcaccatgtactacagcggcaacatctactacaaccccagcctccagagccgggccaccatctctgtggacaccagcaagaaccagttcagcctgaagctgagcagcgtgacagccgccgataccgccgtgtattattgcgccagacatgtgggctacagctacggcagacggttctggtacttcgacctgtggggcagaggcaccctggtcacagtttcttctacgcgtgaggacctgaagaacgtgttcccacctgaggtggccgtgttcgagcctagcgaggccgagatcagccacacccagaaagccaccctcgtgtgcctggctaccggcttctaccccgaccatgtggaactgtcttggtgggtcaacggcaaagaggtgcacagcggcgtgtgtaccgacccccagccactgaaagaacagcccgccctgaacgacagccggtactgcctgagcagcagactgagagtgtccgccaccttctggcagaacccccggaaccacttcagatgccaggtgcagttctacggcctgagcgagaacgacgagtggacccaggacagagccaagcccgtgacccagatcgtgtctgccgaagcctggggcagagccgattgcggctttaccagcgagagctaccagcagggcgtgctgagcgccaccaacctgagcgtgatcggcttcagaatcctgctgctgaaagtggccggctttaacctgctgatgaccctgcggctgtggtccagc

SEQ ID NO: 35992 - DNA, 2187 bp, synthetic construct
  source 1..2187: mol_type = other DNA
atggccttaccagtgaccgccttgctcctgccgctggccttgctgctccacgccgccaggccggagatcgtgctgacacagtctcccgccacactgtcactgtctccaggcgaaagagccacactgagctgtagagccagccagagcgtgtcctcttacctggcctggtatcagcagaagcctggacaggctccccggctgctgatctacgatgccagcaatagagccacaggcatccccgccagattttctggctctggcagcggcaccgatttcaccctgaccataagcagcctggaacctgaggacttcgccgtgtactactgccagcagagaagcaactggcctcctacattcggccagggcaccaaggtggaaatcaaactcgaggacctgaagaacgtgttcccacctgaggtggccgtgttcgagcctagcgaggccgagatcagccacacccagaaagccaccctcgtgtgcctggctaccggcttctaccccgaccatgtggaactgtcttggtgggtcaacggcaaagaggtgcacagcggcgtgtgtaccgacccccagccactgaaagaacagcccgccctgaacgacagccggtactgcctgagcagcagactgagagtgtccgccaccttctggcagaacccccggaaccacttcagatgccaggtgcagttctacggcctgagcgagaacgacgagtggacccaggacagagccaagcccgtgacccagatcgtgtctgccgaagcctggggcagagccgatgatgtgattaagatccactggcaggaaaagaagtccaacaccatcctgggcagccaggaaggcaacaccatgaagaccaacgacacctacatgaagttcagctggctgaccgtgcccgagaagtccctggacaaagaacacagatgcatcgtgcggcacgaaaacaacaagaacggcgtggaccaggaaatcatcttcccacccatcaagaccgatgtgattacaatggaccccaaggacaactgctccaaggacgccaacgataccctgctgctccagctgaccaacaccagcgcctactacatgtacttgttgctgctgctgaagtccgtggtgtacttcgccatcatcacatgctgcctgctgatggctatggtcaagcggaaggacagccggggaagggccaagcgatctggatctggagcaacaaacttctcactactcaaacaagcaggtgacgtggaggagaatcccgggcctactagtatggactggatttggcgcatccttttccttgtcggcgctgctaccggcgcgcattccttcgaacaactccagctgcaagagtctggccccggactggtcaagcctagcgaaacactgagcctgacctgtaccgtgtctggcggcagcatcagcagcagctcttattggtggggctggaccagacagcctcctggcagaggactggaatggatcggcaccatgtactacagcggcaacatctactacaaccccagcctccagagccgggccaccatctctgtggacaccagcaagaaccagttcagcctgaagctgagcagcgtgacagccgccgataccgccgtgtattattgcgccagacatgtgggctacagctacggcagacggttctggtacttcgacctgtggggcagaggcaccctggtcacagtttcttctacgcgtatccagaaccctgatcctgccgtgtaccagctgcgggatagcaagagcagcgacaagagcgtgtgtctgttcaccgacttcgacagccagaccaacgtgtcccagagcaaggactccgacgtgtacatcaccgataagtgcgtgctggacatgcggagcatggacttcaagagcaactccgccgtggcctggtccaacaagtccgatttcgcctgcgccaacgccttcaacaacagcattatccccgaggacacattcttcccaagccccgagagcagcgactccaccgaccacgtgaagcccaaagagacagagaacaccaagcagcccagcaagagctgccacaagcccaaggccatcgtgcacaccgagaaagtgaacatgatgagcctgaccgtgctgggcctgcggatgctgttcgccaaaaccgtggccgtgaacttcctgctgaccgccaagctgttcttcctcctcaccgcc

SEQ ID NO: 35993 - DNA, 2199 bp, synthetic construct
  source 1..2199: mol_type = other DNA
atggccttaccagtgaccgccttgctcctgccgctggccttgctgctccacgccgccaggccggagatcgtgctgacacagtctcccgccacactgtcactgtctccaggcgaaagagccacactgagctgtagagccagccagagcgtgtcctcttacctggcctggtatcagcagaagcctggacaggctccccggctgctgatctacgatgccagcaatagagccacaggcatccccgccagattttctggctctggcagcggcaccgatttcaccctgaccataagcagcctggaacctgaggacttcgccgtgtactactgccagcagagaagcaactggcctcctacattcggccagggcaccaaggtggaaatcaaactcgagatccagaaccctgatcctgccgtgtaccagctgcgggatagcaagagcagcgacaagagcgtgtgtctgttcaccgacttcgacagccagaccaacgtgtcccagagcaaggactccgacgtgtacatcaccgataagtgcgtgctggacatgcggagcatggacttcaagagcaactccgccgtggcctggtccaacaagtccgatttcgcctgcgccaacgccttcaacaacagcattatccccgaggacacattcttcccaagccccgagagcagcgactccaccgaccacgtgaagcccaaagagacagagaacaccaagcagcccagcaagagctgccacaagcccaaggccatcgtgcacaccgagaaagtgaacatgatgagcctgaccgtgctgggcctgcggatgctgttcgccaaaaccgtggccgtgaacttcctgctgaccgccaagctgttcttcctcctcaccgcccgcgccaagagaagcggatctggcgtgaagcagaccctgaatttcgacctgctgaagctggctggcgacgtggaatccaacccaggccctactagtatggactggatttggcgcatccttttccttgtcggcgctgctaccggcgcgcattccttcgaacaactccagctgcaagagtctggccccggactggtcaagcctagcgaaacactgagcctgacctgtaccgtgtctggcggcagcatcagcagcagctcttattggtggggctggaccagacagcctcctggcagaggactggaatggatcggcaccatgtactacagcggcaacatctactacaaccccagcctccagagccgggccaccatctctgtggacaccagcaagaaccagttcagcctgaagctgagcagcgtgacagccgccgataccgccgtgtattattgcgccagacatgtgggctacagctacggcagacggttctggtacttcgacctgtggggcagaggcaccctggtcacagtttcttctacgcgtgaggacctgaagaacgtgttcccacctgaggtggccgtgttcgagcctagcgaggccgagatcagccacacccagaaagccaccctcgtgtgcctggctaccggcttctaccccgaccatgtggaactgtcttggtgggtcaacggcaaagaggtgcacagcggcgtgtgtaccgacccccagccactgaaagaacagcccgccctgaacgacagccggtactgcctgagcagcagactgagagtgtccgccaccttctggcagaacccccggaaccacttcagatgccaggtgcagttctacggcctgagcgagaacgacgagtggacccaggacagagccaagcccgtgacccagatcgtgtctgccgaagcctggggcagagccgatgatgtgattaagatccactggcaggaaaagaagtccaacaccatcctgggcagccaggaaggcaacaccatgaagaccaacgacacctacatgaagttcagctggctgaccgtgcccgagaagtccctggacaaagaacacagatgcatcgtgcggcacgaaaacaacaagaacggcgtggaccaggaaatcatcttcccacccatcaagaccgatgtgattacaatggaccccaaggacaactgctccaaggacgccaacgataccctgctgctccagctgaccaacaccagcgcctactacatgtacttgttgctgctgctgaagtccgtggtgtacttcgccatcatcacatgctgcctgctgatggctatggtcaagcggaaggacagccgggga

SEQ ID NO: 35994 - DNA, 2592 bp, synthetic construct
  source 1..2592: mol_type = other DNA
atggccttaccagtgaccgccttgctcctgccgctggccttgctgctccacgccgccaggccggaagtgcagctggttgaatctggcggaggactggttcagcctggcggatctctgagactgtcttgtgccgccagcggcttcagcttcagcgacttttggatgagctgggtccgacaggcccctggcaaaggacttgaatgggtcgccacaatcagccaggccggcagcgagaaggactacgtggactctgtgaagggcagattcaccatcagccgggacaacgccaagaagtccctgtacctccagatgaacagcctgagagccgaggacaccgccgtgtactattgtgcctctggcgtgtacagcttcgactacagaggccagggcaccctggtcacagtctcttctggtaccggcggaggcggatctggcggcggaggtagcggtggcggaggatctgaattcgagatcgtgctgacacagtctcccgccacactgtcactgtctccaggcgaaagagccacactgagctgtagagccagccagagcgtgtcctcttacctggcctggtatcagcagaagcctggacaggctccccggctgctgatctacgatgccagcaatagagccacaggcatccccgccagattttctggctctggcagcggcaccgatttcaccctgaccataagcagcctggaacctgaggacttcgccgtgtactactgccagcagagaagcaactggcctcctacattcggccagggcaccaaggtggaaatcaaactcgaggacctgaagaacgtgttcccacctgaggtggccgtgttcgagcctagcgaggccgagatcagccacacccagaaagccaccctcgtgtgcctggctaccggcttctaccccgaccatgtggaactgtcttggtgggtcaacggcaaagaggtgcacagcggcgtgtgtaccgacccccagccactgaaagaacagcccgccctgaacgacagccggtactgcctgagcagcagactgagagtgtccgccaccttctggcagaacccccggaaccacttcagatgccaggtgcagttctacggcctgagcgagaacgacgagtggacccaggacagagccaagcccgtgacccagatcgtgtctgccgaagcctggggcagagccgatgatgtgattaagatccactggcaggaaaagaagtccaacaccatcctgggcagccaggaaggcaacaccatgaagaccaacgacacctacatgaagttcagctggctgaccgtgcccgagaagtccctggacaaagaacacagatgcatcgtgcggcacgaaaacaacaagaacggcgtggaccaggaaatcatcttcccacccatcaagaccgatgtgattacaatggaccccaaggacaactgctccaaggacgccaacgataccctgctgctccagctgaccaacaccagcgcctactacatgtacttgttgctgctgctgaagtccgtggtgtacttcgccatcatcacatgctgcctgctgatggctatggtcaagcggaaggacagccggggaagggccaagcgatctggatctggagcaacaaacttctcactactcaaacaagcaggtgacgtggaggagaatcccgggcctactagtatggactggatttggcgcatccttttccttgtcggcgctgctaccggcgcgcattccttcgaacaactccagctgcaagagtctggccccggactggtcaagcctagcgaaacactgagcctgacctgtaccgtgtctggcggcagcatcagcagcagctcttattggtggggctggaccagacagcctcctggcagaggactggaatggatcggcaccatgtactacagcggcaacatctactacaaccccagcctccagagccgggccaccatctctgtggacaccagcaagaaccagttcagcctgaagctgagcagcgtgacagccgccgataccgccgtgtattattgcgccagacatgtgggctacagctacggcagacggttctggtacttcgacctgtggggcagaggcaccctggtcacagtttcttctacgcgtatccagaaccctgatcctgccgtgtaccagctgcgggatagcaagagcagcgacaagagcgtgtgtctgttcaccgacttcgacagccagaccaacgtgtcccagagcaaggactccgacgtgtacatcaccgataagtgcgtgctggacatgcggagcatggacttcaagagcaactccgccgtggcctggtccaacaagtccgatttcgcctgcgccaacgccttcaacaacagcattatccccgaggacacattcttcccaagccccgagagcagcgactccaccgaccacgtgaagcccaaagagacagagaacaccaagcagcccagcaagagctgccacaagcccaaggccatcgtgcacaccgagaaagtgaacatgatgagcctgaccgtgctgggcctgcggatgctgttcgccaaaaccgtggccgtgaacttcctgctgaccgccaagctgttcttcctcctcaccgcc

SEQ ID NO: 35995 - DNA, 2604 bp, synthetic construct
  source 1..2604: mol_type = other DNA
atggccttaccagtgaccgccttgctcctgccgctggccttgctgctccacgccgccaggccggaagtgcagctggttgaatctggcggaggactggttcagcctggcggatctctgagactgtcttgtgccgccagcggcttcagcttcagcgacttttggatgagctgggtccgacaggcccctggcaaaggacttgaatgggtcgccacaatcagccaggccggcagcgagaaggactacgtggactctgtgaagggcagattcaccatcagccgggacaacgccaagaagtccctgtacctccagatgaacagcctgagagccgaggacaccgccgtgtactattgtgcctctggcgtgtacagcttcgactacagaggccagggcaccctggtcacagtctcttctggtaccggcggaggcggatctggcggcggaggtagcggtggcggaggatctgaattcgagatcgtgctgacacagtctcccgccacactgtcactgtctccaggcgaaagagccacactgagctgtagagccagccagagcgtgtcctcttacctggcctggtatcagcagaagcctggacaggctccccggctgctgatctacgatgccagcaatagagccacaggcatccccgccagattttctggctctggcagcggcaccgatttcaccctgaccataagcagcctggaacctgaggacttcgccgtgtactactgccagcagagaagcaactggcctcctacattcggccagggcaccaaggtggaaatcaaactcgagatccagaaccctgatcctgccgtgtaccagctgcgggatagcaagagcagcgacaagagcgtgtgtctgttcaccgacttcgacagccagaccaacgtgtcccagagcaaggactccgacgtgtacatcaccgataagtgcgtgctggacatgcggagcatggacttcaagagcaactccgccgtggcctggtccaacaagtccgatttcgcctgcgccaacgccttcaacaacagcattatccccgaggacacattcttcccaagccccgagagcagcgactccaccgaccacgtgaagcccaaagagacagagaacaccaagcagcccagcaagagctgccacaagcccaaggccatcgtgcacaccgagaaagtgaacatgatgagcctgaccgtgctgggcctgcggatgctgttcgccaaaaccgtggccgtgaacttcctgctgaccgccaagctgttcttcctcctcaccgcccgcgccaagagaagcggatctggcgtgaagcagaccctgaatttcgacctgctgaagctggctggcgacgtggaatccaacccaggccctactagtatggactggatttggcgcatccttttccttgtcggcgctgctaccggcgcgcattccttcgaacaactccagctgcaagagtctggccccggactggtcaagcctagcgaaacactgagcctgacctgtaccgtgtctggcggcagcatcagcagcagctcttattggtggggctggaccagacagcctcctggcagaggactggaatggatcggcaccatgtactacagcggcaacatctactacaaccccagcctccagagccgggccaccatctctgtggacaccagcaagaaccagttcagcctgaagctgagcagcgtgacagccgccgataccgccgtgtattattgcgccagacatgtgggctacagctacggcagacggttctggtacttcgacctgtggggcagaggcaccctggtcacagtttcttctacgcgtgaggacctgaagaacgtgttcccacctgaggtggccgtgttcgagcctagcgaggccgagatcagccacacccagaaagccaccctcgtgtgcctggctaccggcttctaccccgaccatgtggaactgtcttggtgggtcaacggcaaagaggtgcacagcggcgtgtgtaccgacccccagccactgaaagaacagcccgccctgaacgacagccggtactgcctgagcagcagactgagagtgtccgccaccttctggcagaacccccggaaccacttcagatgccaggtgcagttctacggcctgagcgagaacgacgagtggacccaggacagagccaagcccgtgacccagatcgtgtctgccgaagcctggggcagagccgatgatgtgattaagatccactggcaggaaaagaagtccaacaccatcctgggcagccaggaaggcaacaccatgaagaccaacgacacctacatgaagttcagctggctgaccgtgcccgagaagtccctggacaaagaacacagatgcatcgtgcggcacgaaaacaacaagaacggcgtggaccaggaaatcatcttcccacccatcaagaccgatgtgattacaatggaccccaaggacaactgctccaaggacgccaacgataccctgctgctccagctgaccaacaccagcgcctactacatgtacttgttgctgctgctgaagtccgtggtgtacttcgccatcatcacatgctgcctgctgatggctatggtcaagcggaaggacagccgggga

SEQ ID NO: 35996 - DNA, 3003 bp, synthetic construct
  source 1..3003: mol_type = other DNA
atggccttaccagtgaccgccttgctcctgccgctggccttgctgctccacgccgccaggccggaagtgcagctggttgaatctggcggaggactggttcagcctggcggatctctgagactgtcttgtgccgccagcggcttcagcttcagcgacttttggatgagctgggtccgacaggcccctggcaaaggacttgaatgggtcgccacaatcagccaggccggcagcgagaaggactacgtggactctgtgaagggcagattcaccatcagccgggacaacgccaagaagtccctgtacctccagatgaacagcctgagagccgaggacaccgccgtgtactattgtgcctctggcgtgtacagcttcgactacagaggccagggcaccctggtcacagtctcttctggtaccggcggaggcggatctggcggcggaggtagcggtggcggaggatctgaattcgagatcgtgctgacacagtctcccgccacactgtcactgtctccaggcgaaagagccacactgagctgtagagccagccagagcgtgtcctcttacctggcctggtatcagcagaagcctggacaggctccccggctgctgatctacgatgccagcaatagagccacaggcatccccgccagattttctggctctggcagcggcaccgatttcaccctgaccataagcagcctggaacctgaggacttcgccgtgtactactgccagcagagaagcaactggcctcctacattcggccagggcaccaaggtggaaatcaaactcgaggacctgaagaacgtgttcccacctgaggtggccgtgttcgagcctagcgaggccgagatcagccacacccagaaagccaccctcgtgtgcctggctaccggcttctaccccgaccatgtggaactgtcttggtgggtcaacggcaaagaggtgcacagcggcgtgtgtaccgacccccagccactgaaagaacagcccgccctgaacgacagccggtactgcctgagcagcagactgagagtgtccgccaccttctggcagaacccccggaaccacttcagatgccaggtgcagttctacggcctgagcgagaacgacgagtggacccaggacagagccaagcccgtgacccagatcgtgtctgccgaagcctggggcagagccgatgatgtgattaagatccactggcaggaaaagaagtccaacaccatcctgggcagccaggaaggcaacaccatgaagaccaacgacacctacatgaagttcagctggctgaccgtgcccgagaagtccctggacaaagaacacagatgcatcgtgcggcacgaaaacaacaagaacggcgtggaccaggaaatcatcttcccacccatcaagaccgatgtgattacaatggaccccaaggacaactgctccaaggacgccaacgataccctgctgctccagctgaccaacaccagcgcctactacatgtacttgttgctgctgctgaagtccgtggtgtacttcgccatcatcacatgctgcctgctgatggctatggtcaagcggaaggacagccggggaagggccaagcgatctggatctggagcaacaaacttctcactactcaaacaagcaggtgacgtggaggagaatcccgggcctactagtatggactggatttggcgcatccttttccttgtcggcgctgctaccggcgcgcattccgggccccagctccagctgcaagagtctggacctggcctggtcaagcctagcgagacactgagcctgacctgtaccgtgtccggcgatagcatcagcagcggcgattactactggggctggatcagacagcctcctggcaaaggactggaatggatcggccacatctactacagcggcgtgacctactacaaccccagcctgaagtccagagtgaccatcagcgtggacaccagccggaaccagttctccctgaagctgtctagcgtgacagccgccgataccgccgtgtactactgcaccagagaggacagcagcaactggcggagtagaggccagggaacactggtcacagttagctctggatccggcggaggcggaagtggaggcggaggatctggcggcggaggctctttcgaacaactccagctgcaagagtctggccccggactggtcaagcctagcgaaacactgagcctgacctgtaccgtgtctggcggcagcatcagcagcagctcttattggtggggctggaccagacagcctcctggcagaggactggaatggatcggcaccatgtactacagcggcaacatctactacaaccccagcctccagagccgggccaccatctctgtggacaccagcaagaaccagttcagcctgaagctgagcagcgtgacagccgccgataccgccgtgtattattgcgccagacatgtgggctacagctacggcagacggttctggtacttcgacctgtggggcagaggcaccctggtcacagtttcttctacgcgtatccagaaccctgatcctgccgtgtaccagctgcgggatagcaagagcagcgacaagagcgtgtgtctgttcaccgacttcgacagccagaccaacgtgtcccagagcaaggactccgacgtgtacatcaccgataagtgcgtgctggacatgcggagcatggacttcaagagcaactccgccgtggcctggtccaacaagtccgatttcgcctgcgccaacgccttcaacaacagcattatccccgaggacacattcttcccaagccccgagagcagcgactccaccgaccacgtgaagcccaaagagacagagaacaccaagcagcccagcaagagctgccacaagcccaaggccatcgtgcacaccgagaaagtgaacatgatgagcctgaccgtgctgggcctgcggatgctgttcgccaaaaccgtggccgtgaacttcctgctgaccgccaagctgttcttcctcctcaccgcc

SEQ ID NO: 35997 - DNA, 3015 bp, synthetic construct
  source 1..3015: mol_type = other DNA
atggccttaccagtgaccgccttgctcctgccgctggccttgctgctccacgccgccaggccggaagtgcagctggttgaatctggcggaggactggttcagcctggcggatctctgagactgtcttgtgccgccagcggcttcagcttcagcgacttttggatgagctgggtccgacaggcccctggcaaaggacttgaatgggtcgccacaatcagccaggccggcagcgagaaggactacgtggactctgtgaagggcagattcaccatcagccgggacaacgccaagaagtccctgtacctccagatgaacagcctgagagccgaggacaccgccgtgtactattgtgcctctggcgtgtacagcttcgactacagaggccagggcaccctggtcacagtctcttctggtaccggcggaggcggatctggcggcggaggtagcggtggcggaggatctgaattcgagatcgtgctgacacagtctcccgccacactgtcactgtctccaggcgaaagagccacactgagctgtagagccagccagagcgtgtcctcttacctggcctggtatcagcagaagcctggacaggctccccggctgctgatctacgatgccagcaatagagccacaggcatccccgccagattttctggctctggcagcggcaccgatttcaccctgaccataagcagcctggaacctgaggacttcgccgtgtactactgccagcagagaagcaactggcctcctacattcggccagggcaccaaggtggaaatcaaactcgagatccagaaccctgatcctgccgtgtaccagctgcgggatagcaagagcagcgacaagagcgtgtgtctgttcaccgacttcgacagccagaccaacgtgtcccagagcaaggactccgacgtgtacatcaccgataagtgcgtgctggacatgcggagcatggacttcaagagcaactccgccgtggcctggtccaacaagtccgatttcgcctgcgccaacgccttcaacaacagcattatccccgaggacacattcttcccaagccccgagagcagcgactccaccgaccacgtgaagcccaaagagacagagaacaccaagcagcccagcaagagctgccacaagcccaaggccatcgtgcacaccgagaaagtgaacatgatgagcctgaccgtgctgggcctgcggatgctgttcgccaaaaccgtggccgtgaacttcctgctgaccgccaagctgttcttcctcctcaccgcccgcgccaagagaagcggatctggcgtgaagcagaccctgaatttcgacctgctgaagctggctggcgacgtggaatccaacccaggccctactagtatggactggatttggcgcatccttttccttgtcggcgctgctaccggcgcgcattccgggccccagctccagctgcaagagtctggacctggcctggtcaagcctagcgagacactgagcctgacctgtaccgtgtccggcgatagcatcagcagcggcgattactactggggctggatcagacagcctcctggcaaaggactggaatggatcggccacatctactacagcggcgtgacctactacaaccccagcctgaagtccagagtgaccatcagcgtggacaccagccggaaccagttctccctgaagctgtctagcgtgacagccgccgataccgccgtgtactactgcaccagagaggacagcagcaactggcggagtagaggccagggaacactggtcacagttagctctggatccggcggaggcggaagtggaggcggaggatctggcggcggaggctctttcgaacaactccagctgcaagagtctggccccggactggtcaagcctagcgaaacactgagcctgacctgtaccgtgtctggcggcagcatcagcagcagctcttattggtggggctggaccagacagcctcctggcagaggactggaatggatcggcaccatgtactacagcggcaacatctactacaaccccagcctccagagccgggccaccatctctgtggacaccagcaagaaccagttcagcctgaagctgagcagcgtgacagccgccgataccgccgtgtattattgcgccagacatgtgggctacagctacggcagacggttctggtacttcgacctgtggggcagaggcaccctggtcacagtttcttctacgcgtgaggacctgaagaacgtgttcccacctgaggtggccgtgttcgagcctagcgaggccgagatcagccacacccagaaagccaccctcgtgtgcctggctaccggcttctaccccgaccatgtggaactgtcttggtgggtcaacggcaaagaggtgcacagcggcgtgtgtaccgacccccagccactgaaagaacagcccgccctgaacgacagccggtactgcctgagcagcagactgagagtgtccgccaccttctggcagaacccccggaaccacttcagatgccaggtgcagttctacggcctgagcgagaacgacgagtggacccaggacagagccaagcccgtgacccagatcgtgtctgccgaagcctggggcagagccgatgatgtgattaagatccactggcaggaaaagaagtccaacaccatcctgggcagccaggaaggcaacaccatgaagaccaacgacacctacatgaagttcagctggctgaccgtgcccgagaagtccctggacaaagaacacagatgcatcgtgcggcacgaaaacaacaagaacggcgtggaccaggaaatcatcttcccacccatcaagaccgatgtgattacaatggaccccaaggacaactgctccaaggacgccaacgataccctgctgctccagctgaccaacaccagcgcctactacatgtacttgttgctgctgctgaagtccgtggtgtacttcgccatcatcacatgctgcctgctgatggctatggtcaagcggaaggacagccgggga

SEQ ID NO: 35998 - DNA, 2181 bp, synthetic construct
  source 1..2181: mol_type = other DNA
atggccttaccagtgaccgccttgctcctgccgctggccttgctgctccacgccgccaggccggagatcgtgctgacacagtctcccgccacactgtcactgtctccaggcgaaagagccacactgagctgtagagccagccagagcgtgtcctcttacctggcctggtatcagcagaagcctggacaggctccccggctgctgatctacgatgccagcaatagagccacaggcatccccgccagattttctggctctggcagcggcaccgatttcaccctgaccataagcagcctggaacctgaggacttcgccgtgtactactgccagcagagaagcaactggcctcctacattcggccagggcaccaaggtggaaatcaaactcgaggacctgaagaacgtgttcccacctgaggtggccgtgttcgagcctagcgaggccgagatcagccacacccagaaagccaccctcgtgtgcctggctaccggcttctaccccgaccatgtggaactgtcttggtgggtcaacggcaaagaggtgcacagcggcgtgtgtaccgacccccagccactgaaagaacagcccgccctgaacgacagccggtactgcctgagcagcagactgagagtgtccgccaccttctggcagaacccccggaaccacttcagatgccaggtgcagttctacggcctgagcgagaacgacgagtggacccaggacagagccaagcccgtgacccagatcgtgtctgccgaagcctggggcagagccgatgatgtgattaagatccactggcaggaaaagaagtccaacaccatcctgggcagccaggaaggcaacaccatgaagaccaacgacacctacatgaagttcagctggctgaccgtgcccgagaagtccctggacaaagaacacagatgcatcgtgcggcacgaaaacaacaagaacggcgtggaccaggaaatcatcttcccacccatcaagaccgatgtgattacaatggaccccaaggacaactgctccaaggacgccaacgataccctgctgctccagctgaccaacaccagcgcctactacatgtacttgttgctgctgctgaagtccgtggtgtacttcgccatcatcacatgctgcctgctgcggagaaccgccttctgctgcaacggcgagaagtctagggccaagcgatctggatctggagcaacaaacttctcactactcaaacaagcaggtgacgtggaggagaatcccgggcctactagtatggactggatttggcgcatccttttccttgtcggcgctgctaccggcgcgcattccttcgaacaactccagctgcaagagtctggccccggactggtcaagcctagcgaaacactgagcctgacctgtaccgtgtctggcggcagcatcagcagcagctcttattggtggggctggaccagacagcctcctggcagaggactggaatggatcggcaccatgtactacagcggcaacatctactacaaccccagcctccagagccgggccaccatctctgtggacaccagcaagaaccagttcagcctgaagctgagcagcgtgacagccgccgataccgccgtgtattattgcgccagacatgtgggctacagctacggcagacggttctggtacttcgacctgtggggcagaggcaccctggtcacagtttcttctacgcgtatccagaaccctgatcctgccgtgtaccagctgcgggatagcaagagcagcgacaagagcgtgtgtctgttcaccgacttcgacagccagaccaacgtgtcccagagcaaggactccgacgtgtacatcaccgataagtgcgtgctggacatgcggagcatggacttcaagagcaactccgccgtggcctggtccaacaagtccgatttcgcctgcgccaacgccttcaacaacagcattatccccgaggacacattcttcccaagccccgagagcagcgactccaccgaccacgtgaagcccaaagagacagagaacaccaagcagcccagcaagagctgccacaagcccaaggccatcgtgcacaccgagaaagtgaacatgatgagcctgaccgtgctgggcctgcggatgctgttcgccaaaaccgtggccgtgaacttcctgctgaccgccaagctgttcttcctc

SEQ ID NO: 35999 - DNA, 2193 bp, synthetic construct
  source 1..2193: mol_type = other DNA
atggccttaccagtgaccgccttgctcctgccgctggccttgctgctccacgccgccaggccggagatcgtgctgacacagtctcccgccacactgtcactgtctccaggcgaaagagccacactgagctgtagagccagccagagcgtgtcctcttacctggcctggtatcagcagaagcctggacaggctccccggctgctgatctacgatgccagcaatagagccacaggcatccccgccagattttctggctctggcagcggcaccgatttcaccctgaccataagcagcctggaacctgaggacttcgccgtgtactactgccagcagagaagcaactggcctcctacattcggccagggcaccaaggtggaaatcaaactcgagatccagaaccctgatcctgccgtgtaccagctgcgggatagcaagagcagcgacaagagcgtgtgtctgttcaccgacttcgacagccagaccaacgtgtcccagagcaaggactccgacgtgtacatcaccgataagtgcgtgctggacatgcggagcatggacttcaagagcaactccgccgtggcctggtccaacaagtccgatttcgcctgcgccaacgccttcaacaacagcattatccccgaggacacattcttcccaagccccgagagcagcgactccaccgaccacgtgaagcccaaagagacagagaacaccaagcagcccagcaagagctgccacaagcccaaggccatcgtgcacaccgagaaagtgaacatgatgagcctgaccgtgctgggcctgcggatgctgttcgccaaaaccgtggccgtgaacttcctgctgaccgccaagctgttcttcctccgcgccaagagaagcggatctggcgtgaagcagaccctgaatttcgacctgctgaagctggctggcgacgtggaatccaacccaggccctactagtatggactggatttggcgcatccttttccttgtcggcgctgctaccggcgcgcattccttcgaacaactccagctgcaagagtctggccccggactggtcaagcctagcgaaacactgagcctgacctgtaccgtgtctggcggcagcatcagcagcagctcttattggtggggctggaccagacagcctcctggcagaggactggaatggatcggcaccatgtactacagcggcaacatctactacaaccccagcctccagagccgggccaccatctctgtggacaccagcaagaaccagttcagcctgaagctgagcagcgtgacagccgccgataccgccgtgtattattgcgccagacatgtgggctacagctacggcagacggttctggtacttcgacctgtggggcagaggcaccctggtcacagtttcttctacgcgtgaggacctgaagaacgtgttcccacctgaggtggccgtgttcgagcctagcgaggccgagatcagccacacccagaaagccaccctcgtgtgcctggctaccggcttctaccccgaccatgtggaactgtcttggtgggtcaacggcaaagaggtgcacagcggcgtgtgtaccgacccccagccactgaaagaacagcccgccctgaacgacagccggtactgcctgagcagcagactgagagtgtccgccaccttctggcagaacccccggaaccacttcagatgccaggtgcagttctacggcctgagcgagaacgacgagtggacccaggacagagccaagcccgtgacccagatcgtgtctgccgaagcctggggcagagccgatgatgtgattaagatccactggcaggaaaagaagtccaacaccatcctgggcagccaggaaggcaacaccatgaagaccaacgacacctacatgaagttcagctggctgaccgtgcccgagaagtccctggacaaagaacacagatgcatcgtgcggcacgaaaacaacaagaacggcgtggaccaggaaatcatcttcccacccatcaagaccgatgtgattacaatggaccccaaggacaactgctccaaggacgccaacgataccctgctgctccagctgaccaacaccagcgcctactacatgtacttgttgctgctgctgaagtccgtggtgtacttcgccatcatcacatgctgcctgctgcggagaaccgccttctgctgcaacggcgagaagtct

SEQ ID NO: 36000 - DNA, 2586 bp, synthetic construct
  source 1..2586: mol_type = other DNA
atggccttaccagtgaccgccttgctcctgccgctggccttgctgctccacgccgccaggccggaagtgcagctggttgaatctggcggaggactggttcagcctggcggatctctgagactgtcttgtgccgccagcggcttcagcttcagcgacttttggatgagctgggtccgacaggcccctggcaaaggacttgaatgggtcgccacaatcagccaggccggcagcgagaaggactacgtggactctgtgaagggcagattcaccatcagccgggacaacgccaagaagtccctgtacctccagatgaacagcctgagagccgaggacaccgccgtgtactattgtgcctctggcgtgtacagcttcgactacagaggccagggcaccctggtcacagtctcttctggtaccggcggaggcggatctggcggcggaggtagcggtggcggaggatctgaattcgagatcgtgctgacacagtctcccgccacactgtcactgtctccaggcgaaagagccacactgagctgtagagccagccagagcgtgtcctcttacctggcctggtatcagcagaagcctggacaggctccccggctgctgatctacgatgccagcaatagagccacaggcatccccgccagattttctggctctggcagcggcaccgatttcaccctgaccataagcagcctggaacctgaggacttcgccgtgtactactgccagcagagaagcaactggcctcctacattcggccagggcaccaaggtggaaatcaaactcgaggacctgaagaacgtgttcccacctgaggtggccgtgttcgagcctagcgaggccgagatcagccacacccagaaagccaccctcgtgtgcctggctaccggcttctaccccgaccatgtggaactgtcttggtgggtcaacggcaaagaggtgcacagcggcgtgtgtaccgacccccagccactgaaagaacagcccgccctgaacgacagccggtactgcctgagcagcagactgagagtgtccgccaccttctggcagaacccccggaaccacttcagatgccaggtgcagttctacggcctgagcgagaacgacgagtggacccaggacagagccaagcccgtgacccagatcgtgtctgccgaagcctggggcagagccgatgatgtgattaagatccactggcaggaaaagaagtccaacaccatcctgggcagccaggaaggcaacaccatgaagaccaacgacacctacatgaagttcagctggctgaccgtgcccgagaagtccctggacaaagaacacagatgcatcgtgcggcacgaaaacaacaagaacggcgtggaccaggaaatcatcttcccacccatcaagaccgatgtgattacaatggaccccaaggacaactgctccaaggacgccaacgataccctgctgctccagctgaccaacaccagcgcctactacatgtacttgttgctgctgctgaagtccgtggtgtacttcgccatcatcacatgctgcctgctgcggagaaccgccttctgctgcaacggcgagaagtctagggccaagcgatctggatctggagcaacaaacttctcactactcaaacaagcaggtgacgtggaggagaatcccgggcctactagtatggactggatttggcgcatccttttccttgtcggcgctgctaccggcgcgcattccttcgaacaactccagctgcaagagtctggccccggactggtcaagcctagcgaaacactgagcctgacctgtaccgtgtctggcggcagcatcagcagcagctcttattggtggggctggaccagacagcctcctggcagaggactggaatggatcggcaccatgtactacagcggcaacatctactacaaccccagcctccagagccgggccaccatctctgtggacaccagcaagaaccagttcagcctgaagctgagcagcgtgacagccgccgataccgccgtgtattattgcgccagacatgtgggctacagctacggcagacggttctggtacttcgacctgtggggcagaggcaccctggtcacagtttcttctacgcgtatccagaaccctgatcctgccgtgtaccagctgcgggatagcaagagcagcgacaagagcgtgtgtctgttcaccgacttcgacagccagaccaacgtgtcccagagcaaggactccgacgtgtacatcaccgataagtgcgtgctggacatgcggagcatggacttcaagagcaactccgccgtggcctggtccaacaagtccgatttcgcctgcgccaacgccttcaacaacagcattatccccgaggacacattcttcccaagccccgagagcagcgactccaccgaccacgtgaagcccaaagagacagagaacaccaagcagcccagcaagagctgccacaagcccaaggccatcgtgcacaccgagaaagtgaacatgatgagcctgaccgtgctgggcctgcggatgctgttcgccaaaaccgtggccgtgaacttcctgctgaccgccaagctgttcttcctc

SEQ ID NO: 36001 - DNA, 2997 bp, synthetic construct
  source 1..2997: mol_type = other DNA
atggccttaccagtgaccgccttgctcctgccgctggccttgctgctccacgccgccaggccggaagtgcagctggttgaatctggcggaggactggttcagcctggcggatctctgagactgtcttgtgccgccagcggcttcagcttcagcgacttttggatgagctgggtccgacaggcccctggcaaaggacttgaatgggtcgccacaatcagccaggccggcagcgagaaggactacgtggactctgtgaagggcagattcaccatcagccgggacaacgccaagaagtccctgtacctccagatgaacagcctgagagccgaggacaccgccgtgtactattgtgcctctggcgtgtacagcttcgactacagaggccagggcaccctggtcacagtctcttctggtaccggcggaggcggatctggcggcggaggtagcggtggcggaggatctgaattcgagatcgtgctgacacagtctcccgccacactgtcactgtctccaggcgaaagagccacactgagctgtagagccagccagagcgtgtcctcttacctggcctggtatcagcagaagcctggacaggctccccggctgctgatctacgatgccagcaatagagccacaggcatccccgccagattttctggctctggcagcggcaccgatttcaccctgaccataagcagcctggaacctgaggacttcgccgtgtactactgccagcagagaagcaactggcctcctacattcggccagggcaccaaggtggaaatcaaactcgaggacctgaagaacgtgttcccacctgaggtggccgtgttcgagcctagcgaggccgagatcagccacacccagaaagccaccctcgtgtgcctggctaccggcttctaccccgaccatgtggaactgtcttggtgggtcaacggcaaagaggtgcacagcggcgtgtgtaccgacccccagccactgaaagaacagcccgccctgaacgacagccggtactgcctgagcagcagactgagagtgtccgccaccttctggcagaacccccggaaccacttcagatgccaggtgcagttctacggcctgagcgagaacgacgagtggacccaggacagagccaagcccgtgacccagatcgtgtctgccgaagcctggggcagagccgatgatgtgattaagatccactggcaggaaaagaagtccaacaccatcctgggcagccaggaaggcaacaccatgaagaccaacgacacctacatgaagttcagctggctgaccgtgcccgagaagtccctggacaaagaacacagatgcatcgtgcggcacgaaaacaacaagaacggcgtggaccaggaaatcatcttcccacccatcaagaccgatgtgattacaatggaccccaaggacaactgctccaaggacgccaacgataccctgctgctccagctgaccaacaccagcgcctactacatgtacttgttgctgctgctgaagtccgtggtgtacttcgccatcatcacatgctgcctgctgcggagaaccgccttctgctgcaacggcgagaagtctagggccaagcgatctggatctggagcaacaaacttctcactactcaaacaagcaggtgacgtggaggagaatcccgggcctactagtatggactggatttggcgcatccttttccttgtcggcgctgctaccggcgcgcattccgggccccagctccagctgcaagagtctggacctggcctggtcaagcctagcgagacactgagcctgacctgtaccgtgtccggcgatagcatcagcagcggcgattactactggggctggatcagacagcctcctggcaaaggactggaatggatcggccacatctactacagcggcgtgacctactacaaccccagcctgaagtccagagtgaccatcagcgtggacaccagccggaaccagttctccctgaagctgtctagcgtgacagccgccgataccgccgtgtactactgcaccagagaggacagcagcaactggcggagtagaggccagggaacactggtcacagttagctctggatccggcggaggcggaagtggaggcggaggatctggcggcggaggctctttcgaacaactccagctgcaagagtctggccccggactggtcaagcctagcgaaacactgagcctgacctgtaccgtgtctggcggcagcatcagcagcagctcttattggtggggctggaccagacagcctcctggcagaggactggaatggatcggcaccatgtactacagcggcaacatctactacaaccccagcctccagagccgggccaccatctctgtggacaccagcaagaaccagttcagcctgaagctgagcagcgtgacagccgccgataccgccgtgtattattgcgccagacatgtgggctacagctacggcagacggttctggtacttcgacctgtggggcagaggcaccctggtcacagtttcttctacgcgtatccagaaccctgatcctgccgtgtaccagctgcgggatagcaagagcagcgacaagagcgtgtgtctgttcaccgacttcgacagccagaccaacgtgtcccagagcaaggactccgacgtgtacatcaccgataagtgcgtgctggacatgcggagcatggacttcaagagcaactccgccgtggcctggtccaacaagtccgatttcgcctgcgccaacgccttcaacaacagcattatccccgaggacacattcttcccaagccccgagagcagcgactccaccgaccacgtgaagcccaaagagacagagaacaccaagcagcccagcaagagctgccacaagcccaaggccatcgtgcacaccgagaaagtgaacatgatgagcctgaccgtgctgggcctgcggatgctgttcgccaaaaccgtggccgtgaacttcctgctgaccgccaagctgttcttcctc

SEQ ID NO: 36002 - DNA, 1875 bp, synthetic construct
  source 1..1875: mol_type = other DNA
atggccttaccagtgaccgccttgctcctgccgctggccttgctgctccacgccgccaggccggagatcgtgctgacacagtctcccgccacactgtcactgtctccaggcgaaagagccacactgagctgtagagccagccagagcgtgtcctcttacctggcctggtatcagcagaagcctggacaggctccccggctgctgatctacgatgccagcaatagagccacaggcatccccgccagattttctggctctggcagcggcaccgatttcaccctgaccataagcagcctggaacctgaggacttcgccgtgtactactgccagcagagaagcaactggcctcctacattcggccagggcaccaaggtggaaatcaaactcgaggacctgaagaacgtgttcccacctgaggtggccgtgttcgagcctagcgaggccgagatcagccacacccagaaagccaccctcgtgtgcctggctaccggcttctaccccgaccatgtggaactgtcttggtgggtcaacggcaaagaggtgcacagcggcgtgtctaccgacccccagccactgaaagaacagcccgccctgaacgacagccggtactgcctgagcagcagactgagagtgtccgccaccttctggcagaacccccggaaccacttcagatgccaggtgcagttctacggcctgagcgagaacgacgagtggacccaggacagagccaagcccgtgacccagatcgtgtctgccgaagcctggggcagagccgattgcgacgtgaagctggtggaaaagagcttcgagacagacaccaacctgaacttccagaacctgagcgtgatcggcttcagaatcctgctgctgaaagtggccggctttaacctgctgatgaccctgcggctgtggtccagcagggccaagcgatctggatctggagcaacaaacttctcactactcaaacaagcaggtgacgtggaggagaatcccgggcctactagtatggactggatttggcgcatccttttccttgtcggcgctgctaccggcgcgcattccttcgaacaactccagctgcaagagtctggccccggactggtcaagcctagcgaaacactgagcctgacctgtaccgtgtctggcggcagcatcagcagcagctcttattggtggggctggaccagacagcctcctggcagaggactggaatggatcggcaccatgtactacagcggcaacatctactacaaccccagcctccagagccgggccaccatctctgtggacaccagcaagaaccagttcagcctgaagctgagcagcgtgacagccgccgataccgccgtgtattattgcgccagacatgtgggctacagctacggcagacggttctggtacttcgacctgtggggcagaggcaccctggtcacagtttcttctacgcgtatccagaaccctgatcctgccgtgtaccagctgcgggatagcaagagcagcgacaagagcgtgtgtctgttcaccgacttcgacagccagaccaacgtgtcccagagcaaggactccgacgtgtacatcaccgataagaccgtgctggacatgcggagcatggacttcaagagcaactccgccgtggcctggtccaacaagtccgatttcgcctgcgccaacgccttcaacaacagcattatccccgaggacacattcttcccaagccccgagagcagctgcggctttaccagcgagagctaccagcagggcgtgctgagcgccaccatcctgtacgagatcctgctgggcaaggccaccctgtacgccgtgctggtgtctgccctggtgctgatggctatggtcaagcggaaggacagccgggga

SEQ ID NO: 36003 - DNA, 1875 bp, synthetic construct
  source 1..1875: mol_type = other DNA
atggccttaccagtgaccgccttgctcctgccgctggccttgctgctccacgccgccaggccggagatcgtgctgacacagtctcccgccacactgtcactgtctccaggcgaaagagccacactgagctgtagagccagccagagcgtgtcctcttacctggcctggtatcagcagaagcctggacaggctccccggctgctgatctacgatgccagcaatagagccacaggcatccccgccagattttctggctctggcagcggcaccgatttcaccctgaccataagcagcctggaacctgaggacttcgccgtgtactactgccagcagagaagcaactggcctcctacattcggccagggcaccaaggtggaaatcaaactcgaggacctgaagaacgtgttcccacctgaggtggccgtgttcgagcctagcgaggccgagatcagccacacccagaaagccaccctcgtgtgcctggctaccggcttctaccccgaccatgtggaactgtcttggtgggtcaacggcaaagaggtgcacagcggcgtgtctaccgacccccagccactgaaagaacagcccgccctgaacgacagccggtactgcctgagcagcagactgagagtgtccgccaccttctggcagaacccccggaaccacttcagatgccaggtgcagttctacggcctgagcgagaacgacgagtggacccaggacagagccaagcccgtgacccagatcgtgtctgccgaagcctggggcagagccgattgcggctttaccagcgagagctaccagcagggcgtgctgagcgccaccaacctgagcgtgatcggcttcagaatcctgctgctgaaagtggccggctttaacctgctgatgaccctgcggctgtggtccagcagggccaagcgatctggatctggagcaacaaacttctcactactcaaacaagcaggtgacgtggaggagaatcccgggcctactagtatggactggatttggcgcatccttttccttgtcggcgctgctaccggcgcgcattccttcgaacaactccagctgcaagagtctggccccggactggtcaagcctagcgaaacactgagcctgacctgtaccgtgtctggcggcagcatcagcagcagctcttattggtggggctggaccagacagcctcctggcagaggactggaatggatcggcaccatgtactacagcggcaacatctactacaaccccagcctccagagccgggccaccatctctgtggacaccagcaagaaccagttcagcctgaagctgagcagcgtgacagccgccgataccgccgtgtattattgcgccagacatgtgggctacagctacggcagacggttctggtacttcgacctgtggggcagaggcaccctggtcacagtttcttctacgcgtatccagaaccctgatcctgccgtgtaccagctgcgggatagcaagagcagcgacaagagcgtgtgtctgttcaccgacttcgacagccagaccaacgtgtcccagagcaaggactccgacgtgtacatcaccgataagaccgtgctggacatgcggagcatggacttcaagagcaactccgccgtggcctggtccaacaagtccgatttcgcctgcgccaacgccttcaacaacagcattatccccgaggacacattcttcccaagccccgagagcagctgcgacgtgaagctggtggaaaagagcttcgagacagacaccaacctgaacttccagatcctgtacgagatcctgctgggcaaggccaccctgtacgccgtgctggtgtctgccctggtgctgatggctatggtcaagcggaaggacagccgggga

SEQ ID NO: 36004 - DNA, 2187 bp, synthetic construct
  source 1..2187: mol_type = other DNA
atggccttaccagtgaccgccttgctcctgccgctggccttgctgctccacgccgccaggccggagatcgtgctgacacagtctcccgccacactgtcactgtctccaggcgaaagagccacactgagctgtagagccagccagagcgtgtcctcttacctggcctggtatcagcagaagcctggacaggctccccggctgctgatctacgatgccagcaatagagccacaggcatccccgccagattttctggctctggcagcggcaccgatttcaccctgaccataagcagcctggaacctgaggacttcgccgtgtactactgccagcagagaagcaactggcctcctacattcggccagggcaccaaggtggaaatcaaactcgaggacctgaagaacgtgttcccacctgaggtggccgtgttcgagcctagcgaggccgagatcagccacacccagaaagccaccctcgtgtgcctggctaccggcttctaccccgaccatgtggaactgtcttggtgggtcaacggcaaagaggtgcacagcggcgtgtctaccgacccccagccactgaaagaacagcccgccctgaacgacagccggtactgcctgagcagcagactgagagtgtccgccaccttctggcagaacccccggaaccacttcagatgccaggtgcagttctacggcctgagcgagaacgacgagtggacccaggacagagccaagcccgtgacccagatcgtgtctgccgaagcctggggcagagccgatgatgtgattaagatccactggcaggaaaagaagtccaacaccatcctgggcagccaggaaggcaacaccatgaagaccaacgacacctacatgaagttcagctggctgaccgtgcccgagaagtccctggacaaagaacacagatgcatcgtgcggcacgaaaacaacaagaacggcgtggaccaggaaatcatcttcccacccatcaagaccgatgtgattacaatggaccccaaggacaactgctccaaggacgccaacgataccctgctgctccagctgaccaacaccagcgcctactacatgtacttgttgctgctgctgaagtccgtggtgtacttcgccatcatcacatgctgcctgctgatggctatggtcaagcggaaggacagccggggaagggccaagcgatctggatctggagcaacaaacttctcactactcaaacaagcaggtgacgtggaggagaatcccgggcctactagtatggactggatttggcgcatccttttccttgtcggcgctgctaccggcgcgcattccttcgaacaactccagctgcaagagtctggccccggactggtcaagcctagcgaaacactgagcctgacctgtaccgtgtctggcggcagcatcagcagcagctcttattggtggggctggaccagacagcctcctggcagaggactggaatggatcggcaccatgtactacagcggcaacatctactacaaccccagcctccagagccgggccaccatctctgtggacaccagcaagaaccagttcagcctgaagctgagcagcgtgacagccgccgataccgccgtgtattattgcgccagacatgtgggctacagctacggcagacggttctggtacttcgacctgtggggcagaggcaccctggtcacagtttcttctacgcgtatccagaaccctgatcctgccgtgtaccagctgcgggatagcaagagcagcgacaagagcgtgtgtctgttcaccgacttcgacagccagaccaacgtgtcccagagcaaggactccgacgtgtacatcaccgataagaccgtgctggacatgcggagcatggacttcaagagcaactccgccgtggcctggtccaacaagtccgatttcgcctgcgccaacgccttcaacaacagcattatccccgaggacacattcttcccaagccccgagagcagcgactccaccgaccacgtgaagcccaaagagacagagaacaccaagcagcccagcaagagctgccacaagcccaaggccatcgtgcacaccgagaaagtgaacatgatgagcctgaccgtgctgggcctgcggatgctgttcgccaaaaccgtggccgtgaacttcctgctgaccgccaagctgttcttcctcctcaccgcc

SEQ ID NO: 36005 - DNA, 2181 bp, synthetic construct
  source 1..2181: mol_type = other DNA
atggccttaccagtgaccgccttgctcctgccgctggccttgctgctccacgccgccaggccggagatcgtgctgacacagtctcccgccacactgtcactgtctccaggcgaaagagccacactgagctgtagagccagccagagcgtgtcctcttacctggcctggtatcagcagaagcctggacaggctccccggctgctgatctacgatgccagcaatagagccacaggcatccccgccagattttctggctctggcagcggcaccgatttcaccctgaccataagcagcctggaacctgaggacttcgccgtgtactactgccagcagagaagcaactggcctcctacattcggccagggcaccaaggtggaaatcaaactcgaggacctgaagaacgtgttcccacctgaggtggccgtgttcgagcctagcgaggccgagatcagccacacccagaaagccaccctcgtgtgcctggctaccggcttctaccccgaccatgtggaactgtcttggtgggtcaacggcaaagaggtgcacagcggcgtgtctaccgacccccagccactgaaagaacagcccgccctgaacgacagccggtactgcctgagcagcagactgagagtgtccgccaccttctggcagaacccccggaaccacttcagatgccaggtgcagttctacggcctgagcgagaacgacgagtggacccaggacagagccaagcccgtgacccagatcgtgtctgccgaagcctggggcagagccgatgatgtgattaagatccactggcaggaaaagaagtccaacaccatcctgggcagccaggaaggcaacaccatgaagaccaacgacacctacatgaagttcagctggctgaccgtgcccgagaagtccctggacaaagaacacagatgcatcgtgcggcacgaaaacaacaagaacggcgtggaccaggaaatcatcttcccacccatcaagaccgatgtgattacaatggaccccaaggacaactgctccaaggacgccaacgataccctgctgctccagctgaccaacaccagcgcctactacatgtacttgttgctgctgctgaagtccgtggtgtacttcgccatcatcacatgctgcctgctgcggagaaccgccttctgctgcaacggcgagaagtctagggccaagcgatctggatctggagcaacaaacttctcactactcaaacaagcaggtgacgtggaggagaatcccgggcctactagtatggactggatttggcgcatccttttccttgtcggcgctgctaccggcgcgcattccttcgaacaactccagctgcaagagtctggccccggactggtcaagcctagcgaaacactgagcctgacctgtaccgtgtctggcggcagcatcagcagcagctcttattggtggggctggaccagacagcctcctggcagaggactggaatggatcggcaccatgtactacagcggcaacatctactacaaccccagcctccagagccgggccaccatctctgtggacaccagcaagaaccagttcagcctgaagctgagcagcgtgacagccgccgataccgccgtgtattattgcgccagacatgtgggctacagctacggcagacggttctggtacttcgacctgtggggcagaggcaccctggtcacagtttcttctacgcgtatccagaaccctgatcctgccgtgtaccagctgcgggatagcaagagcagcgacaagagcgtgtgtctgttcaccgacttcgacagccagaccaacgtgtcccagagcaaggactccgacgtgtacatcaccgataagaccgtgctggacatgcggagcatggacttcaagagcaactccgccgtggcctggtccaacaagtccgatttcgcctgcgccaacgccttcaacaacagcattatccccgaggacacattcttcccaagccccgagagcagcgactccaccgaccacgtgaagcccaaagagacagagaacaccaagcagcccagcaagagctgccacaagcccaaggccatcgtgcacaccgagaaagtgaacatgatgagcctgaccgtgctgggcctgcggatgctgttcgccaaaaccgtggccgtgaacttcctgctgaccgccaagctgttcttcctc

SEQ ID NO: 36006 - DNA, 2613 bp, synthetic construct
  source 1..2613: mol_type = other DNA
atggccttaccagtgaccgccttgctcctgccgctggccttgctgctccacgccgccaggccgctcgaggaggacctgaagaacgtgttcccacctgaggtggccgtgttcgagcctagcgaggccgagatcagccacacccagaaagccaccctcgtgtgcctggctaccggcttctaccccgaccatgtggaactgtcttggtgggtcaacggcaaagaggtgcacagcggcgtgtgtaccgacccccagccactgaaagaacagcccgccctgaacgacagccggtactgcctgagcagcagactgagagtgtccgccaccttctggcagaacccccggaaccacttcagatgccaggtgcagttctacggcctgagcgagaacgacgagtggacccaggacagagccaagcccgtgacccagatcgtgtctgccgaagcctggggcagagccgattgcggctttaccagcgagagctaccagcagggcgtgctgagcgccaccaacctgagcgtgatcggcttcagaatcctgctgctgaaagtggccggctttaacctgctgatgaccctgcggctgtggtccagcagggccaagcgatctggatctggagcaacaaacttctcactactcaaacaagcaggtgacgtggaggagaatcccgggcctactagcatggccttaccagtgaccgccttgctcctgccgctggccttgctgctccacgccgccaggccggagatcgtgctgacacagtctcccgccacactgtcactgtctccaggcgaaagagccacactgagctgtagagccagccagagcgtgtcctcttacctggcctggtatcagcagaagcctggacaggctccccggctgctgatctacgatgccagcaatagagccacaggcatccccgccagattttctggctctggcagcggcaccgatttcaccctgaccataagcagcctggaacctgaggacttcgccgtgtactactgccagcagagaagcaactggcctcctacattcggccagggcaccaaggtggaaatcaaaggcggaggcggaagtggaggcggaggatctggcggcggaggctctcaactccagctgcaagagtctggccccggactggtcaagcctagcgaaacactgagcctgacctgtaccgtgtctggcggcagcatcagcagcagctcttattggtggggctggaccagacagcctcctggcagaggactggaatggatcggcaccatgtactacagcggcaacatctactacaaccccagcctccagagccgggccaccatctctgtggacaccagcaagaaccagttcagcctgaagctgagcagcgtgacagccgccgataccgccgtgtattattgcgccagacatgtgggctacagctacggcagacggttctggtacttcgacctgtggggcagaggcaccctggtcacagtttcttctacgcgtatccagaaccctgatcctgccgtgtaccagctgcgggatagcaagagcagcgacaagagcgtgtgtctgttcaccgacttcgacagccagaccaacgtgtcccagagcaaggactccgacgtgtacatcaccgataagtgcgtgctggacatgcggagcatggacttcaagagcaactccgccgtggcctggtccaacaagtccgatttcgcctgcgccaacgccttcaacaacagcattatccccgaggacacattcttcccaagccccgagagcagctgcgacgtgaagctggtggaaaagagcttcgagacagacaccaacctgaacttccagatcctgtacgaggtgatcggcttcagaatcctgctgctgaaagtggccggctttaacctgctgatgaccctgcggctgtggtccagccgcgccaagagaagcggatctggcgtgaagcagaccctgaatttcgacctgctgaagctggctggcgacgtggaatccaacccaggcccttctagaggccatatgaccgagtacaagcccacggtgcgcctcgccacccgcgacgacgtccccagggccgtacgcaccctcgccgccgcgttcgccgactaccccgccacgcgccacaccgtcgatccggaccgccacatcgagcgggtcaccgagctgcaagaactcttcctcacgcgcgtcgggctcgacatcggcaaggtgtgggtcgcggacgacggcgccgcggtggcggtctggaccacgccggagagcgtcgaagcgggggcggtgttcgccgagatcggcccgcgcatggccgagttgagcggttcccggctggccgcgcagcaacagatggaaggcctcctggcgccgcaccggcccaaggagcccgcgtggttcctggccaccgtcggcgtctcgcccgaccaccagggcaagggtctgggcagcgccgtcgtgctccccggagtggaggcggccgagcgcgccggggtgcccgccttcctggagacctccgcgccccgcaacctccccttctacgagcggctcggcttcaccgtcaccgccgacgtcgaggtgcccgaaggaccgcgcacctggtgcatgacccgcaagcccggtgcctga

SEQ ID NO: 36007 - DNA, 2613 bp, synthetic construct
  source 1..2613: mol_type = other DNA
atggccttaccagtgaccgccttgctcctgccgctggccttgctgctccacgccgccaggccgctcgagatccagaaccctgatcctgccgtgtaccagctgcgggatagcaagagcagcgacaagagcgtgtgtctgttcaccgacttcgacagccagaccaacgtgtcccagagcaaggactccgacgtgtacatcaccgataagtgcgtgctggacatgcggagcatggacttcaagagcaactccgccgtggcctggtccaacaagtccgatttcgcctgcgccaacgccttcaacaacagcattatccccgaggacacattcttcccaagccccgagagcagctgcgacgtgaagctggtggaaaagagcttcgagacagacaccaacctgaacttccagatcctgtacgaggtgatcggcttcagaatcctgctgctgaaagtggccggctttaacctgctgatgaccctgcggctgtggtccagcagggccaagcgatctggatctggagcaacaaacttctcactactcaaacaagcaggtgacgtggaggagaatcccgggcctactagcatggccttaccagtgaccgccttgctcctgccgctggccttgctgctccacgccgccaggccggagatcgtgctgacacagtctcccgccacactgtcactgtctccaggcgaaagagccacactgagctgtagagccagccagagcgtgtcctcttacctggcctggtatcagcagaagcctggacaggctccccggctgctgatctacgatgccagcaatagagccacaggcatccccgccagattttctggctctggcagcggcaccgatttcaccctgaccataagcagcctggaacctgaggacttcgccgtgtactactgccagcagagaagcaactggcctcctacattcggccagggcaccaaggtggaaatcaaaggcggaggcggaagtggaggcggaggatctggcggcggaggctctcaactccagctgcaagagtctggccccggactggtcaagcctagcgaaacactgagcctgacctgtaccgtgtctggcggcagcatcagcagcagctcttattggtggggctggaccagacagcctcctggcagaggactggaatggatcggcaccatgtactacagcggcaacatctactacaaccccagcctccagagccgggccaccatctctgtggacaccagcaagaaccagttcagcctgaagctgagcagcgtgacagccgccgataccgccgtgtattattgcgccagacatgtgggctacagctacggcagacggttctggtacttcgacctgtggggcagaggcaccctggtcacagtttcttctacgcgtgaggacctgaagaacgtgttcccacctgaggtggccgtgttcgagcctagcgaggccgagatcagccacacccagaaagccaccctcgtgtgcctggctaccggcttctaccccgaccatgtggaactgtcttggtgggtcaacggcaaagaggtgcacagcggcgtgtgtaccgacccccagccactgaaagaacagcccgccctgaacgacagccggtactgcctgagcagcagactgagagtgtccgccaccttctggcagaacccccggaaccacttcagatgccaggtgcagttctacggcctgagcgagaacgacgagtggacccaggacagagccaagcccgtgacccagatcgtgtctgccgaagcctggggcagagccgattgcggctttaccagcgagagctaccagcagggcgtgctgagcgccaccaacctgagcgtgatcggcttcagaatcctgctgctgaaagtggccggctttaacctgctgatgaccctgcggctgtggtccagccgcgccaagagaagcggatctggcgtgaagcagaccctgaatttcgacctgctgaagctggctggcgacgtggaatccaacccaggcccttctagaggccatatgaccgagtacaagcccacggtgcgcctcgccacccgcgacgacgtccccagggccgtacgcaccctcgccgccgcgttcgccgactaccccgccacgcgccacaccgtcgatccggaccgccacatcgagcgggtcaccgagctgcaagaactcttcctcacgcgcgtcgggctcgacatcggcaaggtgtgggtcgcggacgacggcgccgcggtggcggtctggaccacgccggagagcgtcgaagcgggggcggtgttcgccgagatcggcccgcgcatggccgagttgagcggttcccggctggccgcgcagcaacagatggaaggcctcctggcgccgcaccggcccaaggagcccgcgtggttcctggccaccgtcggcgtctcgcccgaccaccagggcaagggtctgggcagcgccgtcgtgctccccggagtggaggcggccgagcgcgccggggtgcccgccttcctggagacctccgcgccccgcaacctccccttctacgagcggctcggcttcaccgtcaccgccgacgtcgaggtgcccgaaggaccgcgcacctggtgcatgacccgcaagcccggtgcctga

SEQ ID NO: 36008 - DNA, 2613 bp, synthetic construct; identical to SEQ ID NO: 36006
  source 1..2613: mol_type = other DNA

SEQ ID NO: 36009 - DNA, 2937 bp, synthetic construct
  source 1..2937: mol_type = other DNA
atggccttaccagtgaccgccttgctcctgccgctggccttgctgctccacgccgccaggccgctcgaggaggacctgaagaacgtgttcccacctgaggtggccgtgttcgagcctagcgaggccgagatcagccacacccagaaagccaccctcgtgtgcctggctaccggcttctaccccgaccatgtggaactgtcttggtgggtcaacggcaaagaggtgcacagcggcgtgtctaccgacccccagccactgaaagaacagcccgccctgaacgacagccggtactgcctgagcagcagactgagagtgtccgccaccttctggcagaacccccggaaccacttcagatgccaggtgcagttctacggcctgagcgagaacgacgagtggacccaggacagagccaagcccgtgacccagatcgtgtctgccgaagcctggggcagagccgatgatgtgattaagatccactggcaggaaaagaagtccaacaccatcctgggcagccaggaaggcaacaccatgaagaccaacgacacctacatgaagttcagctggctgaccgtgcccgagaagtccctggacaaagaacacagatgcatcgtgcggcacgaaaacaacaagaacggcgtggaccaggaaatcatcttcccacccatcaagaccgatgtgattacaatggaccccaaggacaactgctccaaggacgccaacgataccctgctgctccagctgaccaacaccagcgcctactacatgtacttgttgctgctgctgaagtccgtggtgtacttcgccatcatcacatgctgcctgctgatggctatggtcaagcggaaggacagccggggaagggccaagcgatctggatctggagcaacaaacttctcactactcaaacaagcaggtgacgtggaggagaatcccgggcctactagcatggccttaccagtgaccgccttgctcctgccgctggccttgctgctccacgccgccaggccggagatcgtgctgacacagtctcccgccacactgtcactgtctccaggcgaaagagccacactgagctgtagagccagccagagcgtgtcctcttacctggcctggtatcagcagaagcctggacaggctccccggctgctgatctacgatgccagcaatagagccacaggcatccccgccagattttctggctctggcagcggcaccgatttcaccctgaccataagcagcctggaacctgaggacttcgccgtgtactactgccagcagagaagcaactggcctcctacattcggccagggcaccaaggtggaaatcaaaggcggaggcggaagtggaggcggaggatctggcggcggaggctctcaactccagctgcaagagtctggccccggactggtcaagcctagcgaaacactgagcctgacctgtaccgtgtctggcggcagcatcagcagcagctcttattggtggggctggaccagacagcctcctggcagaggactggaatggatcggcaccatgtactacagcggcaacatctactacaaccccagcctccagagccgggccaccatctctgtggacaccagcaagaaccagttcagcctgaagctgagcagcgtgacagccgccgataccgccgtgtattattgcgccagacatgtgggctacagctacggcagacggttctggtacttcgacctgtggggcagaggcaccctggtcacagtttcttctacgcgtatccagaaccctgatcctgccgtgtaccagctgcgggatagcaagagcagcgacaagagcgtgtgtctgttcaccgacttcgacagccagaccaacgtgtcccagagcaaggactccgacgtgtacatcaccgataagaccgtgctggacatgcggagcatggacttcaagagcaactccgccgtggcctggtccaacaagtccgatttcgcctgcgccaacgccttcaacaacagcattatccccgaggacacattcttcccaagccccgagagcagcgactccaccgaccacgtgaagcccaaagagacagagaacaccaagcagcccagcaagagctgccacaagcccaaggccatcgtgcacaccgagaaagtgaacatgatgagcctgaccgtgctgggcctgcggatgctgttcgccaaaaccgtggccgtgaacttcctgctgaccgccaagctgttcttcctcctcaccgcccgcgccaagagaagcggatctggcgtgaagcagaccctgaatttcgacctgctgaagctggctggcgacgtggaatccaacccaggcccttctagaggccatatgaccgagtacaagcccacggtgcgcctcgccacccgcgacgacgtccccagggccgtacgcaccctcgccgccgcgttcgccgactaccccgccacgcgccacaccgtcgatccggaccgccacatcgagcgggtcaccgagctgcaagaactcttcctcacgcgcgtcgggctcgacatcggcaaggtgtgggtcgcggacgacggcgccgcggtggcggtctggaccacgccggagagcgtcgaagcgggggcggtgttcgccgagatcggcccgcgcatggccgagttgagcggttcccggctggccgcgcagcaacagatggaaggcctcctggcgccgcaccggcccaaggagcccgcgtggttcctggccaccgtcggcgtctcgcccgaccaccagggcaagggtctgggcagcgccgtcgtgctccccggagtggaggcggccgagcgcgccggggtgcccgccttcctggagacctccgcgccccgcaacctccccttctacgagcggctcggcttcaccgtcaccgccgacgtcgaggtgcccgaaggaccgcgcacctggtgcatgacccgcaagcccggtgcctga

SEQ ID NO: 36010 - DNA, 2937 bp, synthetic construct
  source 1..2937: mol_type = other DNA
atggccttaccagtgaccgccttgctcctgccgctggccttgctgctccacgccgccaggccgctcgagatccagaaccctgatcctgccgtgtaccagctgcgggatagcaagagcagcgacaagagcgtgtgtctgttcaccgacttcgacagccagaccaacgtgtcccagagcaaggactccgacgtgtacatcaccgataagaccgtgctggacatgcggagcatggacttcaagagcaactccgccgtggcctggtccaacaagtccgatttcgcctgcgccaacgccttcaacaacagcattatccccgaggacacattcttcccaagccccgagagcagcgactccaccgaccacgtgaagcccaaagagacagagaacaccaagcagcccagcaagagctgccacaagcccaaggccatcgtgcacaccgagaaagtgaacatgatgagcctgaccgtgctgggcctgcggatgctgttcgccaaaaccgtggccgtgaacttcctgctgaccgccaagctgttcttcctcctcaccgccagggccaagcgatctggatctggagcaacaaacttctcactactcaaacaagcaggtgacgtggaggagaatcccgggcctactagcatggccttaccagtgaccgccttgctcctgccgctggccttgctgctccacgccgccaggccggagatcgtgctgacacagtctcccgccacactgtcactgtctccaggcgaaagagccacactgagctgtagagccagccagagcgtgtcctcttacctggcctggtatcagcagaagcctggacaggctccccggctgctgatctacgatgccagcaatagagccacaggcatccccgccagattttctggctctggcagcggcaccgatttcaccctgaccataagcagcctggaacctgaggacttcgccgtgtactactgccagcagagaagcaactggcctcctacattcggccagggcaccaaggtggaaatcaaaggcggaggcggaagtggaggcggaggatctggcggcggaggctctcaactccagctgcaagagtctggccccggactggtcaagcctagcgaaacactgagcctgacctgtaccgtgtctggcggcagcatcagcagcagctcttattggtggggctggaccagacagcctcctggcagaggactggaatggatcggcaccatgtactacagcggcaacatctactacaaccccagcctccagagccgggccaccatctctgtggacaccagcaagaaccagttcagcctgaagctgagcagcgtgacagccgccgataccgccgtgtattattgcgccagacatgtgggctacagctacggcagacggttctggtacttcgacctgtggggcagaggcaccctggtcacagtttcttctacgcgtgaggacctgaagaacgtgttcccacctgaggtggccgtgttcgagcctagcgaggccgagatcagccacacccagaaagccaccctcgtgtgcctggctaccggcttctaccccgaccatgtggaactgtcttggtgggtcaacggcaaagaggtgcacagcggcgtgtctaccgacccccagccactgaaagaacagcccgccctgaacgacagccggtactgcctgagcagcagactgagagtgtccgccaccttctggcagaacccccggaaccacttcagatgccaggtgcagttctacggcctgagcgagaacgacgagtggacccaggacagagccaagcccgtgacccagatcgtgtctgccgaagcctggggcagagccgatgatgtgattaagatccactggcaggaaaagaagtccaacaccatcctgggcagccaggaaggcaacaccatgaagaccaacgacacctacatgaagttcagctggctgaccgtgcccgagaagtccctggacaaagaacacagatgcatcgtgcggcacgaaaacaacaagaacggcgtggaccaggaaatcatcttcccacccatcaagaccgatgtgattacaatggaccccaaggacaactgctccaaggacgccaacgataccctgctgctccagctgaccaacaccagcgcctactacatgtacttgttgctgctgctgaagtccgtggtgtacttcgccatcatcacatgctgcctgctgatggctatggtcaagcggaaggacagccggggacgcgccaagagaagcggatctggcgtgaagcagaccctgaatttcgacctgctgaagctggctggcgacgtggaatccaacccaggcccttctagaggccatatgaccgagtacaagcccacggtgcgcctcgccacccgcgacgacgtccccagggccgtacgcaccctcgccgccgcgttcgccgactaccccgccacgcgccacaccgtcgatccggaccgccacatcgagcgggtcaccgagctgcaagaactcttcctcacgcgcgtcgggctcgacatcggcaaggtgtgggtcgcggacgacggcgccgcggtggcggtctggaccacgccggagagcgtcgaagcgggggcggtgttcgccgagatcggcccgcgcatggccgagttgagcggttcccggctggccgcgcagcaacagatggaaggcctcctggcgccgcaccggcccaaggagcccgcgtggttcctggccaccgtcggcgtctcgcccgaccaccagggcaagggtctgggcagcgccgtcgtgctccccggagtggaggcggccgagcgcgccggggtgcccgccttcctggagacctccgcgccccgcaacctccccttctacgagcggctcggcttcaccgtcaccgccgacgtcgaggtgcccgaaggaccgcgcacctggtgcatgacccgcaagcccggtgcctga

SEQ ID NO: 36011 - DNA, 2931 bp, synthetic construct
  source 1..2931: mol_type = other DNA
atggccttaccagtgaccgccttgctcctgccgctggccttgctgctccacgccgccaggccgctcgaggaggacctgaagaacgtgttcccacctgaggtggccgtgttcgagcctagcgaggccgagatcagccacacccagaaagccaccctcgtgtgcctggctaccggcttctaccccgaccatgtggaactgtcttggtgggtcaacggcaaagaggtgcacagcggcgtgtgtaccgacccccagccactgaaagaacagcccgccctgaacgacagccggtactgcctgagcagcagactgagagtgtccgccaccttctggcagaacccccggaaccacttcagatgccaggtgcagttctacggcctgagcgagaacgacgagtggacccaggacagagccaagcccgtgacccagatcgtgtctgccgaagcctggggcagagccgatgatgtgattaagatccactggcaggaaaagaagtccaacaccatcctgggcagccaggaaggcaacaccatgaagaccaacgacacctacatgaagttcagctggctgaccgtgcccgagaagtccctggacaaagaacacagatgcatcgtgcggcacgaaaacaacaagaacggcgtggaccaggaaatcatcttcccacccatcaagaccgatgtgattacaatggaccccaaggacaactgctccaaggacgccaacgataccctgctgctccagctgaccaacaccagcgcctactacatgtacttgttgctgctgctgaagtccgtggtgtacttcgccatcatcacatgctgcctgctgcggagaaccgccttctgctgcaacggcgagaagtctagggccaagcgatctggatctggagcaacaaacttctcactactcaaacaagcaggtgacgtggaggagaatcccgggcctactagcatggccttaccagtgaccgccttgctcctgccgctggccttgctgctccacgccgccaggccggagatcgtgctgacacagtctcccgccacactgtcactgtctccaggcgaaagagccacactgagctgtagagccagccagagcgtgtcctcttacctggcctggtatcagcagaagcctggacaggctccccggctgctgatctacgatgccagcaatagagccacaggcatccccgccagattttctggctctggcagcggcaccgatttcaccctgaccataagcagcctggaacctgaggacttcgccgtgtactactgccagcagagaagcaactggcctcctacattcggccagggcaccaaggtggaaatcaaaggcggaggcggaagtggaggcggaggatctggcggcggaggctctcaactccagctgcaagagtctggccccggactggtcaagcctagcgaaacactgagcctgacctgtaccgtgtctggcggcagcatcagcagcagctcttattggtggggctggaccagacagcctcctggcagaggactggaatggatcggcaccatgtactacagcggcaacatctactacaaccccagcctccagagccgggccaccatctctgtggacaccagcaagaaccagttcagcctgaagctgagcagcgtgacagccgccgataccgccgtgtattattgcgccagacatgtgggctacagctacggcagacggttctggtacttcgacctgtggggcagaggcaccctggtcacagtttcttctacgcgtatccagaaccctgatcctgccgtgtaccagctgcgggatagcaagagcagcgacaagagcgtgtgtctgttcaccgacttcgacagccagaccaacgtgtcccagagcaaggactccgacgtgtacatcaccgataagtgcgtgctggacatgcggagcatggacttcaagagcaactccgccgtggcctggtccaacaagtccgatttcgcctgcgccaacgccttcaacaacagcattatccccgaggacacattcttcccaagccccgagagcagcgactccaccgaccacgtgaagcccaaagagacagagaacaccaagcagcccagcaagagctgccacaagcccaaggccatcgtgcacaccgagaaagtgaacatgatgagcctgaccgtgctgggcctgcggatgctgttcgccaaaaccgtggccgtgaacttcctgctgaccgccaagctgttcttcctccgcgccaagagaagcggatctggcgtgaagcagaccctgaatttcgacctgctgaagctggctggcgacgtggaatccaacccaggcccttctagaggccatatgaccgagtacaagcccacggtgcgcctcgccacccgcgacgacgtccccagggccgtacgcaccctcgccgccgcgttcgccgactaccccgccacgcgccacaccgtcgatccggaccgccacatcgagcgggtcaccgagctgcaagaactcttcctcacgcgcgtcgggctcgacatcggcaaggtgtgggtcgcggacgacggcgccgcggtggcggtctggaccacgccggagagcgtcgaagcgggggcggtgttcgccgagatcggcccgcgcatggccgagttgagcggttcccggctggccgcgcagcaacagatggaaggcctcctggcgccgcaccggcccaaggagcccgcgtggttcctggccaccgtcggcgtctcgcccgaccaccagggcaagggtctgggcagcgccgtcgtgctccccggagtggaggcggccgagcgcgccggggtgcccgccttcctggagacctccgcgccccgcaacctccccttctacgagcggctcggcttcaccgtcaccgccgacgtcgaggtgcccgaaggaccgcgcacctggtgcatgacccgcaagcccggtgcctga

SEQ ID NO: 36012 - DNA, 2931 bp, synthetic construct
  source 1..2931: mol_type = other DNA
atggccttaccagtgaccgccttgctcctgccgctggccttgctgctccacgccgccaggccgctcgagatccagaaccctgatcctgccgtgtaccagctgcgggatagcaagagcagcgacaagagcgtgtgtctgttcaccgacttcgacagccagaccaacgtgtcccagagcaaggactccgacgtgtacatcaccgataagtgcgtgctggacatgcggagcatggacttcaagagcaactccgccgtggcctggtccaacaagtccgatttcgcctgcgccaacgccttcaacaacagcattatccccgaggacacattcttcccaagccccgagagcagcgactccaccgaccacgtgaagcccaaagagacagagaacaccaagcagcccagcaagagctgccacaagcccaaggccatcgtgcacaccgagaaagtgaacatgatgagcctgaccgtgctgggcctgcggatgctgttcgccaaaaccgtggccgtgaacttcctgctgaccgccaagctgttcttcctcagggccaagcgatctggatctggagcaacaaacttctcactactcaaacaagcaggtgacgtggaggagaatcccgggcctactagcatggccttaccagtgaccgccttgctcctgccgctggccttgctgctccacgccgccaggccggagatcgtgctgacacagtctcccgccacactgtcactgtctccaggcgaaagagccacactgagctgtagagccagccagagcgtgtcctcttacctggcctggtatcagcagaagcctggacaggctccccggctgctgatctacgatgccagcaatagagccacaggcatccccgccagattttctggctctggcagcggcaccgatttcaccctgaccataagcagcctggaacctgaggacttcgccgtgtactactgccagcagagaagcaactggcctcctacattcggccagggcaccaaggtggaaatcaaaggcggaggcggaagtggaggcggaggatctggcggcggaggctctcaactccagctgcaagagtctggccccggactggtcaagcctagcgaaacactgagcctgacctgtaccgtgtctggcggcagcatcagcagcagctcttattggtggggctggaccagacagcctcctggcagaggactggaatggatcggcaccatgtactacagcggcaacatctactacaaccccagcctccagagccgggccaccatctctgtggacaccagcaagaaccagttcagcctgaagctgagcagcgtgacagccgccgataccgccgtgtattattgcgccagacatgtgggctacagctacggcagacggttctggtacttcgacctgtggggcagaggcaccctggtcacagtttcttctacgcgtgaggacctgaagaacgtgttcccacctgaggtggccgtgttcgagcctagcgaggccgagatcagccacacccagaaagccaccctcgtgtgcctggctaccggcttctaccccgaccatgtggaactgtcttggtgggtcaacggcaaagaggtgcacagcggcgtgtgtaccgacccccagccactgaaagaacagcccgccctgaacgacagccggtactgcctgagcagcagactgagagtgtccgccaccttctggcagaacccccggaaccacttcagatgccaggtgcagttctacggcctgagcgagaacgacgagtggacccaggacagagccaagcccgtgacccagatcgtgtctgccgaagcctggggcagagccgatgatgtgattaagatccactggcaggaaaagaagtccaacaccatcctgggcagccaggaaggcaacaccatgaagaccaacgacacctacatgaagttcagctggctgaccgtgcccgagaagtccctggacaaagaacacagatgcatcgtgcggcacgaaaacaacaagaacggcgtggaccaggaaatcatcttcccacccatcaagaccgatgtgattacaatggaccccaaggacaactgctccaaggacgccaacgataccctgctgctccagctgaccaacaccagcgcctactacatgtacttgttgctgctgctgaagtccgtggtgtacttcgccatcatcacatgctgcctgctgcggagaaccgccttctgctgcaacggcgagaagtctcgcgccaagagaagcggatctggcgtgaagcagaccctgaatttcgacctgctgaagctggctggcgacgtggaatccaacccaggcccttctagaggccatatgaccgagtacaagcccacggtgcgcctcgccacccgcgacgacgtccccagggccgtacgcaccctcgccgccgcgttcgccgactaccccgccacgcgccacaccgtcgatccggaccgccacatcgagcgggtcaccgagctgcaagaactcttcctcacgcgcgtcgggctcgacatcggcaaggtgtgggtcgcggacgacggcgccgcggtggcggtctggaccacgccggagagcgtcgaagcgggggcggtgttcgccgagatcggcccgcgcatggccgagttgagcggttcccggctggccgcgcagcaacagatggaaggcctcctggcgccgcaccggcccaaggagcccgcgtggttcctggccaccgtcggcgtctcgcccgaccaccagggcaagggtctgggcagcgccgtcgtgctccccggagtggaggcggccgagcgcgccggggtgcccgccttcctggagacctccgcgccccgcaacctccccttctacgagcggctcggcttcaccgtcaccgccgacgtcgaggtgcccgaaggaccgcgcacctggtgcatgacccgcaagcccggtgcctga

SEQ ID NO: 36013 - DNA, 2931 bp, synthetic construct
  source 1..2931: mol_type = other DNA
atggccttaccagtgaccgccttgctcctgccgctggccttgctgctccacgccgccaggccgctcgaggaggacctgaagaacgtgttcccacctgaggtggccgtgttcgagcctagcgaggccgagatcagccacacccagaaagccaccctcgtgtgcctggctaccggcttctaccccgaccatgtggaactgtcttggtgggtcaacggcaaagaggtgcacagcggcgtgtctaccgacccccagccactgaaagaacagcccgccctgaacgacagccggtactgcctgagcagcagactgagagtgtccgccaccttctggcagaacccccggaaccacttcagatgccaggtgcagttctacggcctgagcgagaacgacgagtggacccaggacagagccaagcccgtgacccagatcgtgtctgccgaagcctggggcagagccgatgatgtgattaagatccactggcaggaaaagaagtccaacaccatcctgggcagccaggaaggcaacaccatgaagaccaacgacacctacatgaagttcagctggctgaccgtgcccgagaagtccctggacaaagaacacagatgcatcgtgcggcacgaaaacaacaagaacggcgtggaccaggaaatcatcttcccacccatcaagaccgatgtgattacaatggaccccaaggacaactgctccaaggacgccaacgataccctgctgctccagctgaccaacaccagcgcctactacatgtacttgttgctgctgctgaagtccgtggtgtacttcgccatcatcacatgctgcctgctgcggagaaccgccttctgctgcaacggcgagaagtctagggccaagcgatctggatctggagcaacaaacttctcactactcaaacaagcaggtgacgtggaggagaatcccgggcctactagcatggccttaccagtgaccgccttgctcctgccgctggccttgctgctccacgccgccaggccggagatcgtgctgacacagtctcccgccacactgtcactgtctccaggcgaaagagccacactgagctgtagagccagccagagcgtgtcctcttacctggcctggtatcagcagaagcctggacaggctccccggctgctgatctacgatgccagcaatagagccacaggcatccccgccagattttctggctctggcagcggcaccgatttcaccctgaccataagcagcctggaacctgaggacttcgccgtgtactactgccagcagagaagcaactggcctcctacattcggccagggcaccaaggtggaaatcaaaggcggaggcggaagtggaggcggaggatctggcggcggaggctctcaactccagctgcaagagtctggccccggactggtcaagcctagcgaaacactgagcctgacctgtaccgtgtctggcggcagcatcagcagcagctcttattggtggggctggaccagacagcctcctggcagaggactggaatggatcggcaccatgtactacagcggcaacatctactacaaccccagcctccagagccgggccaccatctctgtggacaccagcaagaaccagttcagcctgaagctgagcagcgtgacagccgccgataccgccgtgtattattgcgccagacatgtgggctacagctacggcagacggttctggtacttcgacctgtggggcagaggcaccctggtcacagtttcttctacgcgtatccagaaccctgatcctgccgtgtaccagctgcgggatagcaagagcagcgacaagagcgtgtgtctgttcaccgacttcgacagccagaccaacgtgtcccagagcaaggactccgacgtgtacatcaccgataagaccgtgctggacatgcggagcatggacttcaagagcaactccgccgtggcctggtccaacaagtccgatttcgcctgcgccaacgccttcaacaacagcattatccccgaggacacattcttcccaagccccgagagcagcgactccaccgaccacgtgaagcccaaagagacagagaacaccaagcagcccagcaagagctgccacaagcccaaggccatcgtgcacaccgagaaagtgaacatgatgagcctgaccgtgctgggcctgcggatgctgttcgccaaaaccgtggccgtgaacttcctgctgaccgccaagctgttcttcctccgcgccaagagaagcggatctggcgtgaagcagaccctgaatttcgacctgctgaagctggctggcgacgtggaatccaacccaggcccttctagaggccatatgaccgagtacaagcccacggtgcgcctcgccacccgcgacgacgtccccagggccgtacgcaccctcgccgccgcgttcgccgactaccccgccacgcgccacaccgtcgatccggaccgccacatcgagcgggtcaccgagctgcaagaactcttcctcacgcgcgtcgggctcgacatcggcaaggtgtgggtcgcggacgacggcgccgcggtggcggtctggaccacgccggagagcgtcgaagcgggggcggtgttcgccgagatcggcccgcgcatggccgagttgagcggttcccggctggccgcgcagcaacagatggaaggcctcctggcgccgcaccggcccaaggagcccgcgtggttcctggccaccgtcggcgtctcgcccgaccaccagggcaagggtctgggcagcgccgtcgtgctccccggagtggaggcggccgagcgcgccggggtgcccgccttcctggagacctccgcgccccgcaacctccccttctacgagcggctcggcttcaccgtcaccgccgacgtcgaggtgcccgaaggaccgcgcacctggtgcatgacccgcaagcccggtgcctga

SEQ ID NO: 36014 - DNA, 2931 bp, synthetic construct
  source 1..2931: mol_type = other DNA
atggccttaccagtgaccgccttgctcctgccgctggccttgctgctccacgccgccaggccgctcgagatccagaaccctgatcctgccgtgtaccagctgcgggatagcaagagcagcgacaagagcgtgtgtctgttcaccgacttcgacagccagaccaacgtgtcccagagcaaggactccgacgtgtacatcaccgataagaccgtgctggacatgcggagcatggacttcaagagcaactccgccgtggcctggtccaacaagtccgatttcgcctgcgccaacgccttcaacaacagcattatccccgaggacacattcttcccaagccccgagagcagcgactccaccgaccacgtgaagcccaaagagacagagaacaccaagcagcccagcaagagctgccacaagcccaaggccatcgtgcacaccgagaaagtgaacatgatgagcctgaccgtgctgggcctgcggatgctgttcgccaaaaccgtggccgtgaacttcctgctgaccgccaagctgttcttcctcagggccaagcgatctggatctggagcaacaaacttctcactactcaaacaagcaggtgacgtggaggagaatcccgggcctactagcatggccttaccagtgaccgccttgctcctgccgctggccttgctgctccacgccgccaggccggagatcgtgctgacacagtctcccgccacactgtcactgtctccaggcgaaagagccacactgagctgtagagccagccagagcgtgtcctcttacctggcctggtatcagcagaagcctggacaggctccccggctgctgatctacgatgccagcaatagagccacaggcatccccgccagattttctggctctggcagcggcaccgatttcaccctgaccataagcagcctggaacctgaggacttcgccgtgtactactgccagcagagaagcaactggcctcctacattcggccagggcaccaaggtggaaatcaaaggcggaggcggaagtggaggcggaggatctggcggcggaggctctcaactccagctgcaagagtctggccccggactggtcaagcctagcgaaacactgagcctgacctgtaccgtgtctggcggcagcatcagcagcagctcttattggtggggctggaccagacagcctcctggcagaggactggaatggatcggcaccatgtactacagcggcaacatctactacaaccccagcctccagagccgggccaccatctctgtggacaccagcaagaaccagttcagcctgaagctgagcagcgtgacagccgccgataccgccgtgtattattgcgccagacatgtgggctacagctacggcagacggttctggtacttcgacctgtggggcagaggcaccctggtcacagtttcttctacgcgtgaggacctgaagaacgtgttcccacctgaggtggccgtgttcgagcctagcgaggccgagatcagccacacccagaaagccaccctcgtgtgcctggctaccggcttctaccccgaccatgtggaactgtcttggtgggtcaacggcaaagaggtgcacagcggcgtgtctaccgacccccagccactgaaagaacagcccgccctgaacgacagccggtactgcctgagcagcagactgagagtgtccgccaccttctggcagaacccccggaaccacttcagatgccaggtgcagttctacggcctgagcgagaacgacgagtggacccaggacagagccaagcccgtgacccagatcgtgtctgccgaagcctggggcagagccgatgatgtgattaagatccactggcaggaaaagaagtccaacaccatcctgggcagccaggaaggcaacaccatgaagaccaacgacacctacatgaagttcagctggctgaccgtgcccgagaagtccctggacaaagaacacagatgcatcgtgcggcacgaaaacaacaagaacggcgtggaccaggaaatcatcttcccacccatcaagaccgatgtgattacaatggaccccaaggacaactgctccaaggacgccaacgataccctgctgctccagctgaccaacaccagcgcctactacatgtacttgttgctgctgctgaagtccgtggtgtacttcgccatcatcacatgctgcctgctgcggagaaccgccttctgctgcaacggcgagaagtctcgcgccaagagaagcggatctggcgtgaagcagaccctgaatttcgacctgctgaagctggctggcgacgtggaatccaacccaggcccttctagaggccatatgaccgagtacaagcccacggtgcgcctcgccacccgcgacgacgtccccagggccgtacgcaccctcgccgccgcgttcgccgactaccccgccacgcgccacaccgtcgatccggaccgccacatcgagcgggtcaccgagctgcaagaactcttcctcacgcgcgtcgggctcgacatcggcaaggtgtgggtcgcggacgacggcgccgcggtggcggtctggaccacgccggagagcgtcgaagcgggggcggtgttcgccgagatcggcccgcgcatggccgagttgagcggttcccggctggccgcgcagcaacagatggaaggcctcctggcgccgcaccggcccaaggagcccgcgtggttcctggccaccgtcggcgtctcgcccgaccaccagggcaagggtctgggcagcgccgtcgtgctccccggagtggaggcggccgagcgcgccggggtgcccgccttcctggagacctccgcgccccgcaacctccccttctacgagcggctcggcttcaccgtcaccgccgacgtcgaggtgcccgaaggaccgcgcacctggtgcatgacccgcaagcccggtgcctga

SEQ ID NO: 36015 - DNA, 2625 bp, synthetic construct
  source 1..2625: mol_type = other DNA
atggccttaccagtgaccgccttgctcctgccgctggccttgctgctccacgccgccaggccgctcgaggaggacctgaagaacgtgttcccacctgaggtggccgtgttcgagcctagcaaggccgagatcgcccacacccagaaagccaccctcgtgtgcctggctaccggcttctaccccgaccatgtggaactgtcttggtgggtcaacggcaaagaggtgcacagcggcgtgtgtaccgacccccagccactgaaagaacagcccgccctgaacgacagccggtactgcctgagcagcagactgagagtgtccgccaccttctggcagaacccccggaaccacttcagatgccaggtgcagttctacggcctgagcgagaacgacgagtggacccaggacagagccaagcccgtgacccagatcgtgtctgccgaagcctggggcagagccgattgcggcatcaccagcgccagctaccaccagggcgtgctgagcgccaccatcctgtacgagatcctgctgggcaaggccaccctgtacgccgtgctggtgtctgccctggtgctgatggctatggtcaagcggaaggacagccggggaagggccaagcgatctggatctggagcaacaaacttctcactactcaaacaagcaggtgacgtggaggagaatcccgggcctactagcatggccttaccagtgaccgccttgctcctgccgctggccttgctgctccacgccgccaggccggagatcgtgctgacacagtctcccgccacactgtcactgtctccaggcgaaagagccacactgagctgtagagccagccagagcgtgtcctcttacctggcctggtatcagcagaagcctggacaggctccccggctgctgatctacgatgccagcaatagagccacaggcatccccgccagattttctggctctggcagcggcaccgatttcaccctgaccataagcagcctggaacctgaggacttcgccgtgtactactgccagcagagaagcaactggcctcctacattcggccagggcaccaaggtggaaatcaaaggcggaggcggaagtggaggcggaggatctggcggcggaggctctcaactccagctgcaagagtctggccccggactggtcaagcctagcgaaacactgagcctgacctgtaccgtgtctggcggcagcatcagcagcagctcttattggtggggctggaccagacagcctcctggcagaggactggaatggatcggcaccatgtactacagcggcaacatctactacaaccccagcctccagagccgggccaccatctctgtggacaccagcaagaaccagttcagcctgaagctgagcagcgtgacagccgccgataccgccgtgtattattgcgccagacatgtgggctacagctacggcagacggttctggtacttcgacctgtggggcagaggcaccctggtcacagtttcttctacgcgtatccagaaccctgatcctgccgtgtaccagctgcgggatagcaagagcagcgacaagagcgtgtgtctgttcaccgacttcgacagccagaccaacgtgtcccagagcaaggactccgacgtgtacatcaccgataagtgcgtgctggacatgcggagcatggacttcaagagcaactccgccgtggcctggtccaacaagtccgatttcgcctgcgccaacgccttcaacaacagcattatccccgaggacacattcttcccaagcagcgacgtgccctgcgacgtgaagctggtggaaaagagcttcgagacagacaccaacctgaacttccagaacctgagcgtgatcggcttcagaatcctgctgctgaaagtggccggctttaacctgctgatgaccctgcggctgtggtccagccgcgccaagagaagcggatctggcgtgaagcagaccctgaatttcgacctgctgaagctggctggcgacgtggaatccaacccaggcccttctagaggccatatgaccgagtacaagcccacggtgcgcctcgccacccgcgacgacgtccccagggccgtacgcaccctcgccgccgcgttcgccgactaccccgccacgcgccacaccgtcgatccggaccgccacatcgagcgggtcaccgagctgcaagaactcttcctcacgcgcgtcgggctcgacatcggcaaggtgtgggtcgcggacgacggcgccgcggtggcggtctggaccacgccggagagcgtcgaagcgggggcggtgttcgccgagatcggcccgcgcatggccgagttgagcggttcccggctggccgcgcagcaacagatggaaggcctcctggcgccgcaccggcccaaggagcccgcgtggttcctggccaccgtcggcgtctcgcccgaccaccagggcaagggtctgggcagcgccgtcgtgctccccggagtggaggcggccgagcgcgccggggtgcccgccttcctggagacctccgcgccccgcaacctccccttctacgagcggctcggcttcaccgtcaccgccgacgtcgaggtgcccgaaggaccgcgcacctggtgcatgacccgcaagcccggtgcctga

SEQ ID NO: 36016 - DNA, 2625 bp, synthetic construct
  source 1..2625: mol_type = other DNA
atggccttaccagtgaccgccttgctcctgccgctggccttgctgctccacgccgccaggccgctcgagatccagaaccctgatcctgccgtgtaccagctgcgggatagcaagagcagcgacaagagcgtgtgtctgttcaccgacttcgacagccagaccaacgtgtcccagagcaaggactccgacgtgtacatcaccgataagtgcgtgctggacatgcggagcatggacttcaagagcaactccgccgtggcctggtccaacaagtccgatttcgcctgcgccaacgccttcaacaacagcattatccccgaggacacattcttcccaagcagcgacgtgccctgcgacgtgaagctggtggaaaagagcttcgagacagacaccaacctgaacttccagaacctgagcgtgatcggcttcagaatcctgctgctgaaagtggccggctttaacctgctgatgaccctgcggctgtggtccagcagggccaagcgatctggatctggagcaacaaacttctcactactcaaacaagcaggtgacgtggaggagaatcccgggcctactagcatggccttaccagtgaccgccttgctcctgccgctggccttgctgctccacgccgccaggccggagatcgtgctgacacagtctcccgccacactgtcactgtctccaggcgaaagagccacactgagctgtagagccagccagagcgtgtcctcttacctggcctggtatcagcagaagcctggacaggctccccggctgctgatctacgatgccagcaatagagccacaggcatccccgccagattttctggctctggcagcggcaccgatttcaccctgaccataagcagcctggaacctgaggacttcgccgtgtactactgccagcagagaagcaactggcctcctacattcggccagggcaccaaggtggaaatcaaaggcggaggcggaagtggaggcggaggatctggcggcggaggctctcaactccagctgcaagagtctggccccggactggtcaagcctagcgaaacactgagcctgacctgtaccgtgtctggcggcagcatcagcagcagctcttattggtggggctggaccagacagcctcctggcagaggactggaatggatcggcaccatgtactacagcggcaacatctactacaaccccagcctccagagccgggccaccatctctgtggacaccagcaagaaccagttcagcctgaagctgagcagcgtgacagccgccgataccgccgtgtattattgcgccagacatgtgggctacagctacggcagacggttctggtacttcgacctgtggggcagaggcaccctggtcacagtttcttctacgcgtgaggacctgaagaacgtgttcccacctgaggtggccgtgttcgagcctagcaaggccgagatcgcccacacccagaaagccaccctcgtgtgcctggctaccggcttctaccccgaccatgtggaactgtcttggtgggtcaacggcaaagaggtgcacagcggcgtgtgtaccgacccccagccactgaaagaacagcccgccctgaacgacagccggtactgcctgagcagcagactgagagtgtccgccaccttctggcagaacccccggaaccacttcagatgccaggtgcagttctacggcctgagcgagaacgacgagtggacccaggacagagccaagcccgtgacccagatcgtgtctgccgaagcctggggcagagccgattgcggcatcaccagcgccagctaccaccagggcgtgctgagcgccaccatcctgtacgagatcctgctgggcaaggccaccctgtacgccgtgctggtgtctgccctggtgctgatggctatggtcaagcggaaggacagccggggacgcgccaagagaagcggatctggcgtgaagcagaccctgaatttcgacctgctgaagctggctggcgacgtggaatccaacccaggcccttctagaggccatatgaccgagtacaagcccacggtgcgcctcgccacccgcgacgacgtccccagggccgtacgcaccctcgccgccgcgttcgccgactaccccgccacgcgccacaccgtcgatccggaccgccacatcgagcgggtcaccgagctgcaagaactcttcctcacgcgcgtcgggctcgacatcggcaaggtgtgggtcgcggacgacggcgccgcggtggcggtctggaccacgccggagagcgtcgaagcgggggcggtgttcgccgagatcggcccgcgcatggccgagttgagcggttcccggctggccgcgcagcaacagatggaaggcctcctggcgccgcaccggcccaaggagcccgcgtggttcctggccaccgtcggcgtctcgcccgaccaccagggcaagggtctgggcagcgccgtcgtgctccccggagtggaggcggccgagcgcgccggggtgcccgccttcctggagacctccgcgccccgcaacctccccttctacgagcggctcggcttcaccgtcaccgccgacgtcgaggtgcccgaaggaccgcgcacctggtgcatgacccgcaagcccggtgcctga

SEQ ID NO: 36017 - DNA, 2304 bp, synthetic construct
  source 1..2304: mol_type = other DNA
atggccttaccagtgaccgccttgctcctgccgctggccttgctgctccacgccgccaggccgctcgagcagagttttgggttgttggaccctaaattgtgctatctgttggacggaatcctgttcatttacggagtgatcctgaccgcattgttcctgcgggttaagttttccagatccgcagacgcacccgcttaccaacaagggcagaaccaactctacaatgaacttaatttggggcggagggaagagtacgacgttctggacaaaaggaggggacgagatcccgagatgggcggaaagcctcagcgaaggaagaatccgcaagaggggctttataacgaactccagaaagataaaatggcagaagcctatagtgagattgggatgaagggagaaaggaggaggggtaaaggtcacgatgggttgtaccaaggattgagcacagccactaaagatacctatgatgcgctccacatgcaggccctgccgccaagaagggccaagcgatctggatctggagcaacaaacttctcactactcaaacaagcaggtgacgtggaggagaatcccgggcctactagcatggccttaccagtgaccgccttgctcctgccgctggccttgctgctccacgccgccaggccggagatcgtgctgacacagtctcccgccacactgtcactgtctccaggcgaaagagccacactgagctgtagagccagccagagcgtgtcctcttacctggcctggtatcagcagaagcctggacaggctccccggctgctgatctacgatgccagcaatagagccacaggcatccccgccagattttctggctctggcagcggcaccgatttcaccctgaccataagcagcctggaacctgaggacttcgccgtgtactactgccagcagagaagcaactggcctcctacattcggccagggcaccaaggtggaaatcaaaggcggaggcggaagtggaggcggaggatctggcggcggaggctctcaactccagctgcaagagtctggccccggactggtcaagcctagcgaaacactgagcctgacctgtaccgtgtctggcggcagcatcagcagcagctcttattggtggggctggaccagacagcctcctggcagaggactggaatggatcggcaccatgtactacagcggcaacatctactacaaccccagcctccagagccgggccaccatctctgtggacaccagcaagaaccagttcagcctgaagctgagcagcgtgacagccgccgataccgccgtgtattattgcgccagacatgtgggctacagctacggcagacggttctggtacttcgacctgtggggcagaggcaccctggtcacagtttcttctacgcgtgagctgggagagcctcagctgtgctatatcctggacgccatcctgtttctgtacggcatcgtgctgaccctgctgtactgccggctgaagatccaagtgcggaaggccgccatcaccagctacgagaaatccgacggcgtgtacaccggcctgagcaccagaaatcaagagacatacgagacactgaagcacgaaaagcctccacaacgcgccaagagaagcggatctggcgtgaagcagaccctgaatttcgacctgctgaagctggctggcgacgtggaatccaacccaggcccttctagaggccatatgaccgagtacaagcccacggtgcgcctcgccacccgcgacgacgtccccagggccgtacgcaccctcgccgccgcgttcgccgactaccccgccacgcgccacaccgtcgatccggaccgccacatcgagcgggtcaccgagctgcaagaactcttcctcacgcgcgtcgggctcgacatcggcaaggtgtgggtcgcggacgacggcgccgcggtggcggtctggaccacgccggagagcgtcgaagcgggggcggtgttcgccgagatcggcccgcgcatggccgagttgagcggttcccggctggccgcgcagcaacagatggaaggcctcctggcgccgcaccggcccaaggagcccgcgtggttcctggccaccgtcggcgtctcgcccgaccaccagggcaagggtctgggcagcgccgtcgtgctccccggagtggaggcggccgagcgcgccggggtgcccgccttcctggagacctccgcgccccgcaacctccccttctacgagcggctcggcttcaccgtcaccgccgacgtcgaggtgcccgaaggaccgcgcacctggtgcatgacccgcaagcccggtgcctga

SEQ ID NO: 36018 - DNA, 2937 bp, synthetic construct; identical to SEQ ID NO: 36009
  source 1..2937: mol_type = other DNA

SEQ ID NO: 36019 - DNA, 2937 bp, synthetic construct; identical to SEQ ID NO: 36010
  source 1..2937: mol_type = other DNA

SEQ ID NO: 36020 - DNA, 2934 bp, synthetic construct
  source 1..2934: mol_type = other DNA
atggccttaccagtgaccgccttgctcctgccgctggccttgctgctccacgccgccaggccgctcgaggaggaggacctgaagaacgtgttcccacctgaggtggccgtgttcgagcctagcgaggccgagatcagccacacccagaaagccaccctcgtgtgcctggctaccggcttctaccccgaccatgtggaactgtcttggtgggtcaacggcaaagaggtgcacagcggcgtgtgtaccgacccccagccactgaaagaacagcccgccctgaacgacagccggtactgcctgagcagcagactgagagtgtccgccaccttctggcagaacccccggaaccacttcagatgccaggtgcagttctacggcctgagcgagaacgacgagtggacccaggacagagccaagcccgtgacccagatcgtgtctgccgaagcctggggcagagccgatgatgtgattaagatccactggcaggaaaagaagtccaacaccatcctgggcagccaggaaggcaacaccatgaagaccaacgacacctacatgaagttcagctggctgaccgtgcccgagaagtccctggacaaagaacacagatgcatcgtgcggcacgaaaacaacaagaacggcgtggaccaggaaatcatcttcccacccatcaagaccgatgtgattacaatggaccccaaggacaactgctccaaggacgccaacgataccctgctgctccagctgaccaacaccagcgcctactacatgtacttgttgctgctgctgaagtccgtggtgtacttcgccatcatcacatgctgcctgctgcggagaaccgccttctgctgcaacggcgagaagtctagggccaagcgatctggatctggagcaacaaacttctcactactcaaacaagcaggtgacgtggaggagaatcccgggcctactagcatggccttaccagtgaccgccttgctcctgccgctggccttgctgctccacgccgccaggccggagatcgtgctgacacagtctcccgccacactgtcactgtctccaggcgaaagagccacactgagctgtagagccagccagagcgtgtcctcttacctggcctggtatcagcagaagcctggacaggctccccggctgctgatctacgatgccagcaatagagccacaggcatccccgccagattttctggctctggcagcggcaccgatttcaccctgaccataagcagcctggaacctgaggacttcgccgtgtactactgccagcagagaagcaactggcctcctacattcggccagggcaccaaggtggaaatcaaaggcggaggcggaagtggaggcggaggatctggcggcggaggctctcaactccagctgcaagagtctggccccggactggtcaagcctagcgaaacactgagcctgacctgtaccgtgtctggcggcagcatcagcagcagctcttattggtggggctggaccagacagcctcctggcagaggactggaatggatcggcaccatgtactacagcggcaacatctactacaaccccagcctccagagccgggccaccatctctgtggacaccagcaagaaccagttcagcctgaagctgagcagcgtgacagccgccgataccgccgtgtattattgcgccagacatgtgggctacagctacggcagacggttctggtacttcgacctgtggggcagaggcaccctggtcacagtttcttctacgcgtatccagaaccctgatcctgccgtgtaccagctgcgggatagcaagagcagcgacaagagcgtgtgtctgttcaccgacttcgacagccagaccaacgtgtcccagagcaaggactccgacgtgtacatcaccgataagtgcgtgctggacatgcggagcatggacttcaagagcaactccgccgtggcctggtccaacaagtccgatttcgcctgcgccaacgccttcaacaacagcattatccccgaggacacattcttcccaagccccgagagcagcgactccaccgaccacgtgaagcccaaagagacagagaacaccaagcagcccagcaagagctgccacaagcccaaggccatcgtgcacaccgagaaagtgaacatgatgagcctgaccgtgctgggcctgcggatgctgttcgccaaaaccgtggccgtgaacttcctgctgaccgccaagctgttcttcctccgcgccaagagaagcggatctggcgtgaagcagaccctgaatttcgacctgctgaagctggctggcgacgtggaatccaacccaggcccttctagaggccatatgaccgagtacaagcccacggtgcgcctcgccacccgcgacgacgtccccagggccgtacgcaccctcgccgccgcgttcgccgactaccccgccacgcgccacaccgtcgatccggaccgccacatcgagcgggtcaccgagctgcaagaactcttcctcacgcgcgtcgggctcgacatcggcaaggtgtgggtcgcggacgacggcgccgcggtggcggtctggaccacgccggagagcgtcgaagcgggggcggtgttcgccgagatcggcccgcgcatggccgagttgagcggttcccggctggccgcgcagcaacagatggaaggcctcctggcgccgcaccggcccaaggagcccgcgtggttcctggccaccgtcggcgtctcgcccgaccaccagggcaagggtctgggcagcgccgtcgtgctccccggagtggaggcggccgagcgcgccggggtgcccgccttcctggagacctccgcgccccgcaacctccccttctacgagcggctcggcttcaccgtcaccgccgacgtcgaggtgcccgaaggaccgcgcacctggtgcatgacccgcaagcccggtgcctga

SEQ ID NO: 36021 - DNA, 2934 bp, synthetic construct
  source 1..2934: mol_type = other DNA
atggccttaccagtgaccgccttgctcctgccgctggccttgctgctccacgccgccaggccgctcgagatccagaaccctgatcctgccgtgtaccagctgcgggatagcaagagcagcgacaagagcgtgtgtctgttcaccgacttcgacagccagaccaacgtgtcccagagcaaggactccgacgtgtacatcaccgataagtgcgtgctggacatgcggagcatggacttcaagagcaactccgccgtggcctggtccaacaagtccgatttcgcctgcgccaacgccttcaacaacagcattatccccgaggacacattcttcccaagccccgagagcagcgactccaccgaccacgtgaagcccaaagagacagagaacaccaagcagcccagcaagagctgccacaagcccaaggccatcgtgcacaccgagaaagtgaacatgatgagcctgaccgtgctgggcctgcggatgctgttcgccaaaaccgtggccgtgaacttcctgctgaccgccaagctgttcttcctcagggccaagcgatctggatctggagcaacaaacttctcactactcaaacaagcaggtgacgtggaggagaatcccgggcctactagcatggccttaccagtgaccgccttgctcctgccgctggccttgctgctccacgccgccaggccggagatcgtgctgacacagtctcccgccacactgtcactgtctccaggcgaaagagccacactgagctgtagagccagccagagcgtgtcctcttacctggcctggtatcagcagaagcctggacaggctccccggctgctgatctacgatgccagcaatagagccacaggcatccccgccagattttctggctctggcagcggcaccgatttcaccctgaccataagcagcctggaacctgaggacttcgccgtgtactactgccagcagagaagcaactggcctcctacattcggccagggcaccaaggtggaaatcaaaggcggaggcggaagtggaggcggaggatctggcggcggaggctctcaactccagctgcaagagtctggccccggactggtcaagcctagcgaaacactgagcctgacctgtaccgtgtctggcggcagcatcagcagcagctcttattggtggggctggaccagacagcctcctggcagaggactggaatggatcggcaccatgtactacagcggcaacatctactacaaccccagcctccagagccgggccaccatctctgtggacaccagcaagaaccagttcagcctgaagctgagcagcgtgacagccgccgataccgccgtgtattattgcgccagacatgtgggctacagctacggcagacggttctggtacttcgacctgtggggcagaggcaccctggtcacagtttcttctacgcgtgaggaggacctgaagaacgtgttcccacctgaggtggccgtgttcgagcctagcgaggccgagatcagccacacccagaaagccaccctcgtgtgcctggctaccggcttctaccccgaccatgtggaactgtcttggtgggtcaacggcaaagaggtgcacagcggcgtgtgtaccgacccccagccactgaaagaacagcccgccctgaacgacagccggtactgcctgagcagcagactgagagtgtccgccaccttctggcagaacccccggaaccacttcagatgccaggtgcagttctacggcctgagcgagaacgacgagtggacccaggacagagccaagcccgtgacccagatcgtgtctgccgaagcctggggcagagccgatgatgtgattaagatccactggcaggaaaagaagtccaacaccatcctgggcagccaggaaggcaacaccatgaagaccaacgacacctacatgaagttcagctggctgaccgtgcccgagaagtccctggacaaagaacacagatgcatcgtgcggcacgaaaacaacaagaacggcgtggaccaggaaatcatcttcccacccatcaagaccgatgtgattacaatggaccccaaggacaactgctccaaggacgccaacgataccctgctgctccagctgaccaacaccagcgcctactacatgtacttgttgctgctgctgaagtccgtggtgtacttcgccatcatcacatgctgcctgctgcggagaaccgccttctgctgcaacggcgagaagtctcgcgccaagagaagcggatctggcgtgaagcagaccctgaatttcgacctgctgaagctggctggcgacgtggaatccaacccaggcccttctagaggccatatgaccgagtacaagcccacggtgcgcctcgccacccgcgacgacgtccccagggccgtacgcaccctcgccgccgcgttcgccgactaccccgccacgcgccacaccgtcgatccggaccgccacatcgagcgggtcaccgagctgcaagaactcttcctcacgcgcgtcgggctcgacatcggcaaggtgtgggtcgcggacgacggcgccgcggtggcggtctggaccacgccggagagcgtcgaagcgggggcggtgttcgccgagatcggcccgcgcatggccgagttgagcggttcccggctggccgcgcagcaacagatggaaggcctcctggcgccgcaccggcccaaggagcccgcgtggttcctggccaccgtcggcgtctcgcccgaccaccagggcaagggtctgggcagcgccgtcgtgctccccggagtggaggcggccgagcgcgccggggtgcccgccttcctggagacctccgcgccccgcaacctccccttctacgagcggctcggcttcaccgtcaccgccgacgtcgaggtgcccgaaggaccgcgcacctggtgcatgacccgcaagcccggtgcctga

SEQ ID NO: 36022 - DNA, 2625 bp, synthetic construct
  source 1..2625: mol_type = other DNA
atggccttaccagtgaccgccttgctcctgccgctggccttgctgctccacgccgccaggccgctcgaggaggacctgaagaacgtgttcccacctgaggtggccgtgttcgagcctagcgaggccgagatcagccacacccagaaagccaccctcgtgtgcctggctaccggcttctaccccgaccatgtggaactgtcttggtgggtcaacggcaaagaggtgcacagcggcgtgtctaccgacccccagccactgaaagaacagcccgccctgaacgacagccggtactgcctgagcagcagactgagagtgtccgccaccttctggcagaacccccggaaccacttcagatgccaggtgcagttctacggcctgagcgagaacgacgagtggacccaggacagagccaagcccgtgacccagatcgtgtctgccgaagcctggggcagagccgattgcggctttaccagcgagagctaccagcagggcgtgctgagcgccaccaacctgagcgtgatcggcttcagaatcctgctgctgaaagtggccggctttaacctgctgatgaccctgcggctgtggtccagcagggccaagcgatctggatctggagcaacaaacttctcactactcaaacaagcaggtgacgtggaggagaatcccgggcctactagcatggccttaccagtgaccgccttgctcctgccgctggccttgctgctccacgccgccaggccggagatcgtgctgacacagtctcccgccacactgtcactgtctccaggcgaaagagccacactgagctgtagagccagccagagcgtgtcctcttacctggcctggtatcagcagaagcctggacaggctccccggctgctgatctacgatgccagcaatagagccacaggcatccccgccagattttctggctctggcagcggcaccgatttcaccctgaccataagcagcctggaacctgaggacttcgccgtgtactactgccagcagagaagcaactggcctcctacattcggccagggcaccaaggtggaaatcaaaggcggaggcggaagtggaggcggaggatctggcggcggaggctctcaactccagctgcaagagtctggccccggactggtcaagcctagcgaaacactgagcctgacctgtaccgtgtctggcggcagcatcagcagcagctcttattggtggggctggaccagacagcctcctggcagaggactggaatggatcggcaccatgtactacagcggcaacatctactacaaccccagcctccagagccgggccaccatctctgtggacaccagcaagaaccagttcagcctgaagctgagcagcgtgacagccgccgataccgccgtgtattattgcgccagacatgtgggctacagctacggcagacggttctggtacttcgacctgtggggcagaggcaccctggtcacagtttcttctacgcgtatccagaaccctgatcctgccgtgtaccagctgcgggatagcaagagcagcgacaagagcgtgtgtctgttcaccgacttcgacagccagaccaacgtgtcccagagcaaggactccgacgtgtacatcaccgataagaccgtgctggacatgcggagcatggacttcaagagcaactccgccgtggcctggtccaacaagtccgatttcgcctgcgccaacgccttcaacaacagcattatccccgaggacacattcttcccaagccccgagagcagctgcgacgtgaagctggtggaaaagagcttcgagacagacaccaacctgaacttccagatcctgtacgagatcctgctgggcaaggccaccctgtacgccgtgctggtgtctgccctggtgctgatggctatggtcaagcggaaggacagccggggacgcgccaagagaagcggatctggcgtgaagcagaccctgaatttcgacctgctgaagctggctggcgacgtggaatccaacccaggcccttctagaggccatatgaccgagtacaagcccacggtgcgcctcgccacccgcgacgacgtccccagggccgtacgcaccctcgccgccgcgttcgccgactaccccgccacgcgccacaccgtcgatccggaccgccacatcgagcgggtcaccgagctgcaagaactcttcctcacgcgcgtcgggctcgacatcggcaaggtgtgggtcgcggacgacggcgccgcggtggcggtctggaccacgccggagagcgtcgaagcgggggcggtgttcgccgagatcggcccgcgcatggccgagttgagcggttcccggctggccgcgcagcaacagatggaaggcctcctggcgccgcaccggcccaaggagcccgcgtggttcctggccaccgtcggcgtctcgcccgaccaccagggcaagggtctgggcagcgccgtcgtgctccccggagtggaggcggccgagcgcgccggggtgcccgccttcctggagacctccgcgccccgcaacctccccttctacgagcggctcggcttcaccgtcaccgccgacgtcgaggtgcccgaaggaccgcgcacctggtgcatgacccgcaagcccggtgcctga

SEQ ID NO: 36023 - DNA, 2625 bp, synthetic construct
  source 1..2625: mol_type = other DNA
atggccttaccagtgaccgccttgctcctgccgctggccttgctgctccacgccgccaggccgctcgagatccagaaccctgatcctgccgtgtaccagctgcgggatagcaagagcagcgacaagagcgtgtgtctgttcaccgacttcgacagccagaccaacgtgtcccagagcaaggactccgacgtgtacatcaccgataagaccgtgctggacatgcggagcatggacttcaagagcaactccgccgtggcctggtccaacaagtccgatttcgcctgcgccaacgccttcaacaacagcattatccccgaggacacattcttcccaagccccgagagcagctgcgacgtgaagctggtggaaaagagcttcgagacagacaccaacctgaacttccagatcctgtacgagatcctgctgggcaaggccaccctgtacgccgtgctggtgtctgccctggtgctgatggctatggtcaagcggaaggacagccggggaagggccaagcgatctggatctggagcaacaaacttctcactactcaaacaagcaggtgacgtggaggagaatcccgggcctactagcatggccttaccagtgaccgccttgctcctgccgctggccttgctgctccacgccgccaggccggagatcgtgctgacacagtctcccgccacactgtcactgtctccaggcgaaagagccacactgagctgtagagccagccagagcgtgtcctcttacctggcctggtatcagcagaagcctggacaggctccccggctgctgatctacgatgccagcaatagagccacaggcatccccgccagattttctggctctggcagcggcaccgatttcaccctgaccataagcagcctggaacctgaggacttcgccgtgtactactgccagcagagaagcaactggcctcctacattcggccagggcaccaaggtggaaatcaaaggcggaggcggaagtggaggcggaggatctggcggcggaggctctcaactccagctgcaagagtctggccccggactggtcaagcctagcgaaacactgagcctgacctgtaccgtgtctggcggcagcatcagcagcagctcttattggtggggctggaccagacagcctcctggcagaggactggaatggatcggcaccatgtactacagcggcaacatctactacaaccccagcctccagagccgggccaccatctctgtggacaccagcaagaaccagttcagcctgaagctgagcagcgtgacagccgccgataccgccgtgtattattgcgccagacatgtgggctacagctacggcagacggttctggtacttcgacctgtggggcagaggcaccctggtcacagtttcttctacgcgtgaggacctgaagaacgtgttcccacctgaggtggccgtgttcgagcctagcgaggccgagatcagccacacccagaaagccaccctcgtgtgcctggctaccggcttctaccccgaccatgtggaactgtcttggtgggtcaacggcaaagaggtgcacagcggcgtgtctaccgacccccagccactgaaagaacagcccgccctgaacgacagccggtactgcctgagcagcagactgagagtgtccgccaccttctggcagaacccccggaaccacttcagatgccaggtgcagttctacggcctgagcgagaacgacgagtggacccaggacagagccaagcccgtgacccagatcgtgtctgccgaagcctggggcagagccgattgcggctttaccagcgagagctaccagcagggcgtgctgagcgccaccaacctgagcgtgatcggcttcagaatcctgctgctgaaagtggccggctttaacctgctgatgaccctgcggctgtggtccagccgcgccaagagaagcggatctggcgtgaagcagaccctgaatttcgacctgctgaagctggctggcgacgtggaatccaacccaggcccttctagaggccatatgaccgagtacaagcccacggtgcgcctcgccacccgcgacgacgtccccagggccgtacgcaccctcgccgccgcgttcgccgactaccccgccacgcgccacaccgtcgatccggaccgccacatcgagcgggtcaccgagctgcaagaactcttcctcacgcgcgtcgggctcgacatcggcaaggtgtgggtcgcggacgacggcgccgcggtggcggtctggaccacgccggagagcgtcgaagcgggggcggtgttcgccgagatcggcccgcgcatggccgagttgagcggttcccggctggccgcgcagcaacagatggaaggcctcctggcgccgcaccggcccaaggagcccgcgtggttcctggccaccgtcggcgtctcgcccgaccaccagggcaagggtctgggcagcgccgtcgtgctccccggagtggaggcggccgagcgcgccggggtgcccgccttcctggagacctccgcgccccgcaacctccccttctacgagcggctcggcttcaccgtcaccgccgacgtcgaggtgcccgaaggaccgcgcacctggtgcatgacccgcaagcccggtgcctga

SEQ ID NO: 36024 - DNA, 2625 bp, synthetic construct
  source 1..2625: mol_type = other DNA
atggccttaccagtgaccgccttgctcctgccgctggccttgctgctccacgccgccaggccgctcgaggaggacctgaagaacgtgttcccacctgaggtggccgtgttcgagcctagcgaggccgagatcagccacacccagaaagccaccctcgtgtgcctggctaccggcttctaccccgaccatgtggaactgtcttggtgggtcaacggcaaagaggtgcacagcggcgtgtgtaccgacccccagccactgaaagaacagcccgccctgaacgacagccggtactgcctgagcagcagactgagagtgtccgccaccttctggcagaacccccggaaccacttcagatgccaggtgcagttctacggcctgagcgagaacgacgagtggacccaggacagagccaagcccgtgacccagatcgtgtctgccgaagcctggggcagagccgattgcgacgtgaagctggtggaaaagagcttcgagacagacaccaacctgaacttccagaacctgagcgtgatcggcttcagaatcctgctgctgaaagtggccggctttaacctgctgatgaccctgcggctgtggtccagcagggccaagcgatctggatctggagcaacaaacttctcactactcaaacaagcaggtgacgtggaggagaatcccgggcctactagcatggccttaccagtgaccgccttgctcctgccgctggccttgctgctccacgccgccaggccggagatcgtgctgacacagtctcccgccacactgtcactgtctccaggcgaaagagccacactgagctgtagagccagccagagcgtgtcctcttacctggcctggtatcagcagaagcctggacaggctccccggctgctgatctacgatgccagcaatagagccacaggcatccccgccagattttctggctctggcagcggcaccgatttcaccctgaccataagcagcctggaacctgaggacttcgccgtgtactactgccagcagagaagcaactggcctcctacattcggccagggcaccaaggtggaaatcaaaggcggaggcggaagtggaggcggaggatctggcggcggaggctctcaactccagctgcaagagtctggccccggactggtcaagcctagcgaaacactgagcctgacctgtaccgtgtctggcggcagcatcagcagcagctcttattggtggggctggaccagacagcctcctggcagaggactggaatggatcggcaccatgtactacagcggcaacatctactacaaccccagcctccagagccgggccaccatctctgtggacaccagcaagaaccagttcagcctgaagctgagcagcgtgacagccgccgataccgccgtgtattattgcgccagacatgtgggctacagctacggcagacggttctggtacttcgacctgtggggcagaggcaccctggtcacagtttcttctacgcgtatccagaaccctgatcctgccgtgtaccagctgcgggatagcaagagcagcgacaagagcgtgtgtctgttcaccgacttcgacagccagaccaacgtgtcccagagcaaggactccgacgtgtacatcaccgataagtgcgtgctggacatgcggagcatggacttcaagagcaactccgccgtggcctggtccaacaagtccgatttcgcctgcgccaacgccttcaacaacagcattatccccgaggacacattcttcccaagccccgagagcagctgcggctttaccagcgagagctaccagcagggcgtgctgagcgccaccatcctgtacgagatcctgctgggcaaggccaccctgtacgccgtgctggtgtctgccctggtgctgatggctatggtcaagcggaaggacagccggggacgcgccaagagaagcggatctggcgtgaagcagaccctgaatttcgacctgctgaagctggctggcgacgtggaatccaacccaggcccttctagaggccatatgaccgagtacaagcccacggtgcgcctcgccacccgcgacgacgtccccagggccgtacgcaccctcgccgccgcgttcgccgactaccccgccacgcgccacaccgtcgatccggaccgccacatcgagcgggtcaccgagctgcaagaactcttcctcacgcgcgtcgggctcgacatcggcaaggtgtgggtcgcggacgacggcgccgcggtggcggtctggaccacgccggagagcgtcgaagcgggggcggtgttcgccgagatcggcccgcgcatggccgagttgagcggttcccggctggccgcgcagcaacagatggaaggcctcctggcgccgcaccggcccaaggagcccgcgtggttcctggccaccgtcggcgtctcgcccgaccaccagggcaagggtctgggcagcgccgtcgtgctccccggagtggaggcggccgagcgcgccggggtgcccgccttcctggagacctccgcgccccgcaacctccccttctacgagcggctcggcttcaccgtcaccgccgacgtcgaggtgcccgaaggaccgcgcacctggtgcatgacccgcaagcccggtgcctga

SEQ ID NO: 36025 - DNA, 2625 bp, synthetic construct
  source 1..2625: mol_type = other DNA
atggccttaccagtgaccgccttgctcctgccgctggccttgctgctccacgccgccaggccgctcgaggaggacctgaagaacgtgttcccacctgaggtggccgtgttcgagcctagcgaggccgagatcagccacacccagaaagccaccctcgtgtgcctggctaccggcttctaccccgaccatgtggaactgtcttggtgggtcaacggcaaagaggtgcacagcggcgtgtctaccgacccccagccactgaaagaacagcccgccctgaacgacagccggtactgcctgagcagcagactgagagtgtccgccaccttctggcagaacccccggaaccacttcagatgccaggtgcagttctacggcctgagcgagaacgacgagtggacccaggacagagccaagcccgtgacccagatcgtgtctgccgaagcctggggcagagccgattgcgacgtgaagctggtggaaaagagcttcgagacagacaccaacctgaacttccagaacctgagcgtgatcggcttcagaatcctgctgctgaaagtggccggctttaacctgctgatgaccctgcggctgtggtccagcagggccaagcgatctggatctggagcaacaaacttctcactactcaaacaagcaggtgacgtggaggagaatcccgggcctactagcatggccttaccagtgaccgccttgctcctgccgctggccttgctgctccacgccgccaggccggagatcgtgctgacacagtctcccgccacactgtcactgtctccaggcgaaagagccacactgagctgtagagccagccagagcgtgtcctcttacctggcctggtatcagcagaagcctggacaggctccccggctgctgatctacgatgccagcaatagagccacaggcatccccgccagattttctggctctggcagcggcaccgatttcaccctgaccataagcagcctggaacctgaggacttcgccgtgtactactgccagcagagaagcaactggcctcctacattcggccagggcaccaaggtggaaatcaaaggcggaggcggaagtggaggcggaggatctggcggcggaggctctcaactccagctgcaagagtctggccccggactggtcaagcctagcgaaacactgagcctgacctgtaccgtgtctggcggcagcatcagcagcagctcttattggtggggctggaccagacagcctcctggcagaggactggaatggatcggcaccatgtactacagcggcaacatctactacaaccccagcctccagagccgggccaccatctctgtggacaccagcaagaaccagttcagcctgaagctgagcagcgtgacagccgccgataccgccgtgtattattgcgccagacatgtgggctacagctacggcagacggttctggtacttcgacctgtggggcagaggcaccctggtcacagtttcttctacgcgtatccagaaccctgatcctgccgtgtaccagctgcgggatagcaagagcagcgacaagagcgtgtgtctgttcaccgacttcgacagccagaccaacgtgtcccagagcaaggactccgacgtgtacatcaccgataagaccgtgctggacatgcggagcatggacttcaagagcaactccgccgtggcctggtccaacaagtccgatttcgcctgcgccaacgccttcaacaacagcattatccccgaggacacattcttcccaagccccgagagcagctgcggctttaccagcgagagctaccagcagggcgtgctgagcgccaccatcctgtacgagatcctgctgggcaaggccaccctgtacgccgtgctggtgtctgccctggtgctgatggctatggtcaagcggaaggacagccggggacgcgccaagagaagcggatctggcgtgaagcagaccctgaatttcgacctgctgaagctggctggcgacgtggaatccaacccaggcccttctagaggccatatgaccgagtacaagcccacggtgcgcctcgccacccgcgacgacgtccccagggccgtacgcaccctcgccgccgcgttcgccgactaccccgccacgcgccacaccgtcgatccggaccgccacatcgagcgggtcaccgagctgcaagaactcttcctcacgcgcgtcgggctcgacatcggcaaggtgtgggtcgcggacgacggcgccgcggtggcggtctggaccacgccggagagcgtcgaagcgggggcggtgttcgccgagatcggcccgcgcatggccgagttgagcggttcccggctggccgcgcagcaacagatggaaggcctcctggcgccgcaccggcccaaggagcccgcgtggttcctggccaccgtcggcgtctcgcccgaccaccagggcaagggtctgggcagcgccgtcgtgctccccggagtggaggcggccgagcgcgccggggtgcccgccttcctggagacctccgcgccccgcaacctccccttctacgagcggctcggcttcaccgtcaccgccgacgtcgaggtgcccgaaggaccgcgcacctggtgcatgacccgcaagcccggtgcctga

SEQ ID NO: 36026 - DNA, 2934 bp, synthetic construct
  source 1..2934: mol_type = other DNA
atggccttaccagtgaccgccttgctcctgccgctggccttgctgctccacgccgccaggccgctcgaggaggaggacctgaagaacgtgttcccacctgaggtggccgtgttcgagcctagcgaggccgagatcagccacacccagaaagccaccctcgtgtgcctggctaccggcttctaccccgaccatgtggaactgtcttggtgggtcaacggcaaagaggtgcacagcggcgtgtctaccgacccccagccactgaaagaacagcccgccctgaacgacagccggtactgcctgagcagcagactgagagtgtccgccaccttctggcagaacccccggaaccacttcagatgccaggtgcagttctacggcctgagcgagaacgacgagtggacccaggacagagccaagcccgtgacccagatcgtgtctgccgaagcctggggcagagccgatgatgtgattaagatccactggcaggaaaagaagtccaacaccatcctgggcagccaggaaggcaacaccatgaagaccaacgacacctacatgaagttcagctggctgaccgtgcccgagaagtccctggacaaagaacacagatgcatcgtgcggcacgaaaacaacaagaacggcgtggaccaggaaatcatcttcccacccatcaagaccgatgtgattacaatggaccccaaggacaactgctccaaggacgccaacgataccctgctgctccagctgaccaacaccagcgcctactacatgtacttgttgctgctgctgaagtccgtggtgtacttcgccatcatcacatgctgcctgctgcggagaaccgccttctgctgcaacggcgagaagtctagggccaagcgatctggatctggagcaacaaacttctcactactcaaacaagcaggtgacgtggaggagaatcccgggcctactagcatggccttaccagtgaccgccttgctcctgccgctggccttgctgctccacgccgccaggccggagatcgtgctgacacagtctcccgccacactgtcactgtctccaggcgaaagagccacactgagctgtagagccagccagagcgtgtcctcttacctggcctggtatcagcagaagcctggacaggctccccggctgctgatctacgatgccagcaatagagccacaggcatccccgccagattttctggctctggcagcggcaccgatttcaccctgaccataagcagcctggaacctgaggacttcgccgtgtactactgccagcagagaagcaactggcctcctacattcggccagggcaccaaggtggaaatcaaaggcggaggcggaagtggaggcggaggatctggcggcggaggctctcaactccagctgcaagagtctggccccggactggtcaagcctagcgaaacactgagcctgacctgtaccgtgtctggcggcagcatcagcagcagctcttattggtggggctggaccagacagcctcctggcagaggactggaatggatcggcaccatgtactacagcggcaacatctactacaaccccagcctccagagccgggccaccatctctgtggacaccagcaagaaccagttcagcctgaagctgagcagcgtgacagccgccgataccgccgtgtattattgcgccagacatgtgggctacagctacggcagacggttctggtacttcgacctgtggggcagaggcaccctggtcacagtttcttctacgcgtatccagaaccctgatcctgccgtgtaccagctgcgggatagcaagagcagcgacaagagcgtgtgtctgttcaccgacttcgacagccagaccaacgtgtcccagagcaaggactccgacgtgtacatcaccgataagaccgtgctggacatgcggagcatggacttcaagagcaactccgccgtggcctggtccaacaagtccgatttcgcctgcgccaacgccttcaacaacagcattatccccgaggacacattcttcccaagccccgagagcagcgactccaccgaccacgtgaagcccaaagagacagagaacaccaagcagcccagcaagagctgccacaagcccaaggccatcgtgcacaccgagaaagtgaacatgatgagcctgaccgtgctgggcctgcggatgctgttcgccaaaaccgtggccgtgaacttcctgctgaccgccaagctgttcttcctccgcgccaagagaagcggatctggcgtgaagcagaccctgaatttcgacctgctgaagctggctggcgacgtggaatccaacccaggcccttctagaggccatatgaccgagtacaagcccacggtgcgcctcgccacccgcgacgacgtccccagggccgtacgcaccctcgccgccgcgttcgccgactaccccgccacgcgccacaccgtcgatccggaccgccacatcgagcgggtcaccgagctgcaagaactcttcctcacgcgcgtcgggctcgacatcggcaaggtgtgggtcgcggacgacggcgccgcggtggcggtctggaccacgccggagagcgtcgaagcgggggcggtgttcgccgagatcggcccgcgcatggccgagttgagcggttcccggctggccgcgcagcaacagatggaaggcctcctggcgccgcaccggcccaaggagcccgcgtggttcctggccaccgtcggcgtctcgcccgaccaccagggcaagggtctgggcagcgccgtcgtgctccccggagtggaggcggccgagcgcgccggggtgcccgccttcctggagacctccgcgccccgcaacctccccttctacgagcggctcggcttcaccgtcaccgccgacgtcgaggtgcccgaaggaccgcgcacctggtgcatgacccgcaagcccggtgcctga

SEQ ID NO: 36027 - DNA, 2625 bp, synthetic construct
  source 1..2625: mol_type = other DNA
atggccttaccagtgaccgccttgctcctgccgctggccttgctgctccacgccgccaggccgctcgaggaggacctgaagaacgtgttcccacctgaggtggccgtgttcgagcctagcgaggccgagatcagccacacccagaaagccaccctcgtgtgcctggctaccggcttctaccccgaccatgtggaactgtcttggtgggtcaacggcaaagaggtgcacagcggcgtgtgtaccgacccccagccactgaaagaacagcccgccctgaacgacagccggtactgcctgagcagcagactgagagtgtccgccaccttctggcagaacccccggaaccacttcagatgccaggtgcagttctacggcctgagcgagaacgacgagtggacccaggacagagccaagcccgtgacccagatcgtgtctgccgaagcctggggcagagccgattgcggctttaccagcgagagctaccagcagggcgtgctgagcgccaccaacctgagcgtgatcggcttcagaatcctgctgctgaaagtggccggctttaacctgctgatgaccctgcggctgtggtccagcagggccaagcgatctggatctggagcaacaaacttctcactactcaaacaagcaggtgacgtggaggagaatcccgggcctactagcatggccttaccagtgaccgccttgctcctgccgctggccttgctgctccacgccgccaggccggagatcgtgctgacacagtctcccgccacactgtcactgtctccaggcgaaagagccacactgagctgtagagccagccagagcgtgtcctcttacctggcctggtatcagcagaagcctggacaggctccccggctgctgatctacgatgccagcaatagagccacaggcatccccgccagattttctggctctggcagcggcaccgatttcaccctgaccataagcagcctggaacctgaggacttcgccgtgtactactgccagcagagaagcaactggcctcctacattcggccagggcaccaaggtggaaatcaaaggcggaggcggaagtggaggcggaggatctggcggcggaggctctcaactccagctgcaagagtctggccccggactggtcaagcctagcgaaacactgagcctgacctgtaccgtgtctggcggcagcatcagcagcagctcttattggtggggctggaccagacagcctcctggcagaggactggaatggatcggcaccatgtactacagcggcaacatctactacaaccccagcctccagagccgggccaccatctctgtggacaccagcaagaaccagttcagcctgaagctgagcagcgtgacagccgccgataccgccgtgtattattgcgccagacatgtgggctacagctacggcagacggttctggtacttcgacctgtggggcagaggcaccctggtcacagtttcttctacgcgtatccagaaccctgatcctgccgtgtaccagctgcgggatagcaagagcagcgacaagagcgtgtgtctgttcaccgacttcgacagccagaccaacgtgtcccagagcaaggactccgacgtgtacatcaccgataagtgcgtgctggacatgcggagcatggacttcaagagcaactccgccgtggcctggtccaacaagtccgatttcgcctgcgccaacgccttcaacaacagcattatccccgaggacacattcttcccaagccccgagagcagctgcgacgtgaagctggtggaaaagagcttcgagacagacaccaacctgaacttccagatcctgtacgagatcctgctgggcaaggccaccctgtacgccgtgctggtgtctgccctggtgctgatggctatggtcaagcggaaggacagccggggacgcgccaagagaagcggatctggcgtgaagcagaccctgaatttcgacctgctgaagctggctggcgacgtggaatccaacccaggcccttctagaggccatatgaccgagtacaagcccacggtgcgcctcgccacccgcgacgacgtccccagggccgtacgcaccctcgccgccgcgttcgccgactaccccgccacgcgccacaccgtcgatccggaccgccacatcgagcgggtcaccgagctgcaagaactcttcctcacgcgcgtcgggctcgacatcggcaaggtgtgggtcgcggacgacggcgccgcggtggcggtctggaccacgccggagagcgtcgaagcgggggcggtgttcgccgagatcggcccgcgcatggccgagttgagcggttcccggctggccgcgcagcaacagatggaaggcctcctggcgccgcaccggcccaaggagcccgcgtggttcctggccaccgtcggcgtctcgcccgaccaccagggcaagggtctgggcagcgccgtcgtgctccccggagtggaggcggccgagcgcgccggggtgcccgccttcctggagacctccgcgccccgcaacctccccttctacgagcggctcggcttcaccgtcaccgccgacgtcgaggtgcccgaaggaccgcgcacctggtgcatgacccgcaagcccggtgcctga

SEQ ID NO: 36028 - DNA, 2712 bp, synthetic construct
  source 1..2712: mol_type = other DNA
atggccttaccagtgaccgccttgctcctgccgctggccttgctgctccacgccgccaggccgctcgaggaggaggacctgaagaacgtgttcccacctgaggtggccgtgttcgagcctagcgaggccgagatcagccacacccagaaagccaccctcgtgtgcctggctaccggcttctaccccgaccatgtggaactgtcttggtgggtcaacggcaaagaggtgcacagcggcgtgtgtaccgacccccagccactgaaagaacagcccgccctgaacgacagccggtactgcctgagcagcagactgagagtgtccgccaccttctggcagaacccccggaaccacttcagatgccaggtgcagttctacggcctgagcgagaacgacgagtggacccaggacagagccaagcccgtgacccagatcgtgtctgccgaagcctggggcagagccgattgcggctttaccagcgagagctaccagcagggcgtgctgagcgccaccaacctgagcgtgatcggcttcagaatcctgctgctgaaagtggccggctttaacctgctgatgaccctgcggctgtggtccagcagggccaagcgatctggatctggagcaacaaacttctcactactcaaacaagcaggtgacgtggaggagaatcccgggcctactagcatggccttaccagtgaccgccttgctcctgccgctggccttgctgctccacgccgccaggccggagatcgtgctgacacagtctcccgccacactgtcactgtctccaggcgaaagagccacactgagctgtagagccagccagagcgtgtcctcttacctggcctggtatcagcagaagcctggacaggctccccggctgctgatctacgatgccagcaatagagccacaggcatccccgccagattttctggctctggcagcggcaccgatttcaccctgaccataagcagcctggaacctgaggacttcgccgtgtactactgccagcagagaagcaactggcctcctacattcggccagggcaccaaggtggaaatcaaaggcggaggcggaagtggaggcggaggatctggcggcggaggctctcaactccagctgcaagagtctggccccggactggtcaagcctagcgaaacactgagcctgacctgtaccgtgtctggcggcagcatcagcagcagctcttattggtggggctggaccagacagcctcctggcagaggactggaatggatcggcaccatgtactacagcggcaacatctactacaaccccagcctccagagccgggccaccatctctgtggacaccagcaagaaccagttcagcctgaagctgagcagcgtgacagccgccgataccgccgtgtattattgcgccagacatgtgggctacagctacggcagacggttctggtacttcgacctgtggggcagaggcaccctggtcacagtttcttctacgcgtggacagcctaaggccaatcctaccgtgacactgttccctccaagcagcgaagaactccaggccaacaaggccacacttgtgtgcctgatctccgacttctaccctggggctgtgacagtggcttggaaggccgatggatctcctgtgaaagccggcgtggaaaccaccaagccatccaagcagagcaacaacaaatacgccgccagctcctacctgagcctgacacctgagcagtggaagtcccacagatcctacagctgccaagtgacccacgaaggcagcaccgtggaaaagacagtggcccctacagagtgcagccccatcaagaccgatgtgattacaatggaccccaaggacaactgctccaaggacgccaacgataccctgctgctccagctgaccaacaccagcgcctactacatgtacttgttgctgctgctgaagtccgtggtgtacttcgccatcatcacatgctgcctgctgcggagaaccgccttctgctgcaacggcgagaagtctcgcgccaagagaagcggatctggcgtgaagcagaccctgaatttcgacctgctgaagctggctggcgacgtggaatccaacccaggcccttctagaggccatatgaccgagtacaagcccacggtgcgcctcgccacccgcgacgacgtccccagggccgtacgcaccctcgccgccgcgttcgccgactaccccgccacgcgccacaccgtcgatccggaccgccacatcgagcgggtcaccgagctgcaagaactcttcctcacgcgcgtcgggctcgacatcggcaaggtgtgggtcgcggacgacggcgccgcggtggcggtctggaccacgccggagagcgtcgaagcgggggcggtgttcgccgagatcggcccgcgcatggccgagttgagcggttcccggctggccgcgcagcaacagatggaaggcctcctggcgccgcaccggcccaaggagcccgcgtggttcctggccaccgtcggcgtctcgcccgaccaccagggcaagggtctgggcagcgccgtcgtgctccccggagtggaggcggccgagcgcgccggggtgcccgccttcctggagacctccgcgccccgcaacctccccttctacgagcggctcggcttcaccgtcaccgccgacgtcgaggtgcccgaaggaccgcgcacctggtgcatgacccgcaagcccggtgcctga

SEQ ID NO: 36029 - DNA, 2712 bp, synthetic construct
  source 1..2712: mol_type = other DNA
atggccttaccagtgaccgccttgctcctgccgctggccttgctgctccacgccgccaggccgctcgagggacagcctaaggccaatcctaccgtgacactgttccctccaagcagcgaagaactccaggccaacaaggccacacttgtgtgcctgatctccgacttctaccctggggctgtgacagtggcttggaaggccgatggatctcctgtgaaagccggcgtggaaaccaccaagccatccaagcagagcaacaacaaatacgccgccagctcctacctgagcctgacacctgagcagtggaagtcccacagatcctacagctgccaagtgacccacgaaggcagcaccgtggaaaagacagtggcccctacagagtgcagccccatcaagaccgatgtgattacaatggaccccaaggacaactgctccaaggacgccaacgataccctgctgctccagctgaccaacaccagcgcctactacatgtacttgttgctgctgctgaagtccgtggtgtacttcgccatcatcacatgctgcctgctgcggagaaccgccttctgctgcaacggcgagaagtctagggccaagcgatctggatctggagcaacaaacttctcactactcaaacaagcaggtgacgtggaggagaatcccgggcctactagcatggccttaccagtgaccgccttgctcctgccgctggccttgctgctccacgccgccaggccggagatcgtgctgacacagtctcccgccacactgtcactgtctccaggcgaaagagccacactgagctgtagagccagccagagcgtgtcctcttacctggcctggtatcagcagaagcctggacaggctccccggctgctgatctacgatgccagcaatagagccacaggcatccccgccagattttctggctctggcagcggcaccgatttcaccctgaccataagcagcctggaacctgaggacttcgccgtgtactactgccagcagagaagcaactggcctcctacattcggccagggcaccaaggtggaaatcaaaggcggaggcggaagtggaggcggaggatctggcggcggaggctctcaactccagctgcaagagtctggccccggactggtcaagcctagcgaaacactgagcctgacctgtaccgtgtctggcggcagcatcagcagcagctcttattggtggggctggaccagacagcctcctggcagaggactggaatggatcggcaccatgtactacagcggcaacatctactacaaccccagcctccagagccgggccaccatctctgtggacaccagcaagaaccagttcagcctgaagctgagcagcgtgacagccgccgataccgccgtgtattattgcgccagacatgtgggctacagctacggcagacggttctggtacttcgacctgtggggcagaggcaccctggtcacagtttcttctacgcgtgaggaggacctgaagaacgtgttcccacctgaggtggccgtgttcgagcctagcgaggccgagatcagccacacccagaaagccaccctcgtgtgcctggctaccggcttctaccccgaccatgtggaactgtcttggtgggtcaacggcaaagaggtgcacagcggcgtgtgtaccgacccccagccactgaaagaacagcccgccctgaacgacagccggtactgcctgagcagcagactgagagtgtccgccaccttctggcagaacccccggaaccacttcagatgccaggtgcagttctacggcctgagcgagaacgacgagtggacccaggacagagccaagcccgtgacccagatcgtgtctgccgaagcctggggcagagccgattgcggctttaccagcgagagctaccagcagggcgtgctgagcgccaccaacctgagcgtgatcggcttcagaatcctgctgctgaaagtggccggctttaacctgctgatgaccctgcggctgtggtccagccgcgccaagagaagcggatctggcgtgaagcagaccctgaatttcgacctgctgaagctggctggcgacgtggaatccaacccaggcccttctagaggccatatgaccgagtacaagcccacggtgcgcctcgccacccgcgacgacgtccccagggccgtacgcaccctcgccgccgcgttcgccgactaccccgccacgcgccacaccgtcgatccggaccgccacatcgagcgggtcaccgagctgcaagaactcttcctcacgcgcgtcgggctcgacatcggcaaggtgtgggtcgcggacgacggcgccgcggtggcggtctggaccacgccggagagcgtcgaagcgggggcggtgttcgccgagatcggcccgcgcatggccgagttgagcggttcccggctggccgcgcagcaacagatggaaggcctcctggcgccgcaccggcccaaggagcccgcgtggttcctggccaccgtcggcgtctcgcccgaccaccagggcaagggtctgggcagcgccgtcgtgctccccggagtggaggcggccgagcgcgccggggtgcccgccttcctggagacctccgcgccccgcaacctccccttctacgagcggctcggcttcaccgtcaccgccgacgtcgaggtgcccgaaggaccgcgcacctggtgcatgacccgcaagcccggtgcctga

SEQ ID NO: 36030 - DNA, 2703 bp, synthetic construct
  source 1..2703: mol_type = other DNA
atggccttaccagtgaccgccttgctcctgccgctggccttgctgctccacgccgccaggccgctcgaggaggcctctacaaagggaccctccgtgtttcctctggctcccagcagcaagtctacaagcggaggaacagccgctctgggctgcctggtcaaggattactttcccgagcctgtgaccgtgtcctggaatagcggagcactgacaagcggcgtgcacacctttccagccgtgctgcaaagcagcggcctgtactctctgagcagcgtggtcacagtgcctagctctagcctgggcacccagacctacatctgcaatgtgaaccacaagcctagcaacaccaaggtggacaagagagtggaacccaagagctgtcccatcaagaccgatgtgattacaatggaccccaaggacaactgctccaaggacgccaacgataccctgctgctccagctgaccaacaccagcgcctactacatgtacttgttgctgctgctgaagtccgtggtgtacttcgccatcatcacatgctgcctgctgcggagaaccgccttctgctgcaacggcgagaagtctagggccaagcgatctggatctggagcaacaaacttctcactactcaaacaagcaggtgacgtggaggagaatcccgggcctactagcatggccttaccagtgaccgccttgctcctgccgctggccttgctgctccacgccgccaggccggagatcgtgctgacacagtctcccgccacactgtcactgtctccaggcgaaagagccacactgagctgtagagccagccagagcgtgtcctcttacctggcctggtatcagcagaagcctggacaggctccccggctgctgatctacgatgccagcaatagagccacaggcatccccgccagattttctggctctggcagcggcaccgatttcaccctgaccataagcagcctggaacctgaggacttcgccgtgtactactgccagcagagaagcaactggcctcctacattcggccagggcaccaaggtggaaatcaaaggcggaggcggaagtggaggcggaggatctggcggcggaggctctcaactccagctgcaagagtctggccccggactggtcaagcctagcgaaacactgagcctgacctgtaccgtgtctggcggcagcatcagcagcagctcttattggtggggctggaccagacagcctcctggcagaggactggaatggatcggcaccatgtactacagcggcaacatctactacaaccccagcctccagagccgggccaccatctctgtggacaccagcaagaaccagttcagcctgaagctgagcagcgtgacagccgccgataccgccgtgtattattgcgccagacatgtgggctacagctacggcagacggttctggtacttcgacctgtggggcagaggcaccctggtcacagtttcttctacgcgtggacagcctaaggccaatcctaccgtgacactgttccctccaagcagcgaagaactccaggccaacaaggccacacttgtgtgcctgatctccgacttctaccctggggctgtgacagtggcttggaaggccgatggatctcctgtgaaagccggcgtggaaaccaccaagccatccaagcagagcaacaacaaatacgccgccagctcctacctgagcctgacacctgagcagtggaagtcccacagatcctacagctgccaagtgacccacgaaggcagcaccgtggaaaagacagtggcccctacagagtgcagcgaagtgaaaaccgactccaccgaccacgtgaagcccaaagagacagagaacaccaagcagcccagcaagagctgccacaagcccaaggccatcgtgcacaccgagaaagtgaacatgatgagcctgaccgtgctgggcctgcggatgctgttcgccaaaaccgtggccgtgaacttcctgctgaccgccaagctgttcttcctccgcgccaagagaagcggatctggcgtgaagcagaccctgaatttcgacctgctgaagctggctggcgacgtggaatccaacccaggcccttctagaggccatatgaccgagtacaagcccacggtgcgcctcgccacccgcgacgacgtccccagggccgtacgcaccctcgccgccgcgttcgccgactaccccgccacgcgccacaccgtcgatccggaccgccacatcgagcgggtcaccgagctgcaagaactcttcctcacgcgcgtcgggctcgacatcggcaaggtgtgggtcgcggacgacggcgccgcggtggcggtctggaccacgccggagagcgtcgaagcgggggcggtgttcgccgagatcggcccgcgcatggccgagttgagcggttcccggctggccgcgcagcaacagatggaaggcctcctggcgccgcaccggcccaaggagcccgcgtggttcctggccaccgtcggcgtctcgcccgaccaccagggcaagggtctgggcagcgccgtcgtgctccccggagtggaggcggccgagcgcgccggggtgcccgccttcctggagacctccgcgccccgcaacctccccttctacgagcggctcggcttcaccgtcaccgccgacgtcgaggtgcccgaaggaccgcgcacctggtgcatgacccgcaagcccggtgcctga

SEQ ID NO: 36031 - DNA, 2637 bp, synthetic construct
  source 1..2637: mol_type = other DNA
atggccttaccagtgaccgccttgctcctgccgctggccttgctgctccacgccgccaggccgctcgaggaggcctctacaaagggaccctccgtgtttcctctggctcccagcagcaagtctacaagcggaggaacagccgctctgggctgcctggtcaaggattactttcccgagcctgtgaccgtgtcctggaatagcggagcactgacaagcggcgtgcacacctttccagccgtgctgcaaagcagcggcctgtactctctgagcagcgtggtcacagtgcctagctctagcctgggcacccagacctacatctgcaatgtgaaccacaagcctagcaacaccaaggtggacaagagagtggaacccaagagctgtggcagagccgattgcggctttaccagcgagagctaccagcagggcgtgctgagcgccaccatcctgtacgagatcctgctgggcaaggccaccctgtacgccgtgctggtgtctgccctggtgctgatggctatggtcaagcggaaggacagccggggaagggccaagcgatctggatctggagcaacaaacttctcactactcaaacaagcaggtgacgtggaggagaatcccgggcctactagcatggccttaccagtgaccgccttgctcctgccgctggccttgctgctccacgccgccaggccggagatcgtgctgacacagtctcccgccacactgtcactgtctccaggcgaaagagccacactgagctgtagagccagccagagcgtgtcctcttacctggcctggtatcagcagaagcctggacaggctccccggctgctgatctacgatgccagcaatagagccacaggcatccccgccagattttctggctctggcagcggcaccgatttcaccctgaccataagcagcctggaacctgaggacttcgccgtgtactactgccagcagagaagcaactggcctcctacattcggccagggcaccaaggtggaaatcaaaggcggaggcggaagtggaggcggaggatctggcggcggaggctctcaactccagctgcaagagtctggccccggactggtcaagcctagcgaaacactgagcctgacctgtaccgtgtctggcggcagcatcagcagcagctcttattggtggggctggaccagacagcctcctggcagaggactggaatggatcggcaccatgtactacagcggcaacatctactacaaccccagcctccagagccgggccaccatctctgtggacaccagcaagaaccagttcagcctgaagctgagcagcgtgacagccgccgataccgccgtgtattattgcgccagacatgtgggctacagctacggcagacggttctggtacttcgacctgtggggcagaggcaccctggtcacagtttcttctacgcgtggacagcctaaggccaatcctaccgtgacactgttccctccaagcagcgaagaactccaggccaacaaggccacacttgtgtgcctgatctccgacttctaccctggggctgtgacagtggcttggaaggccgatggatctcctgtgaaagccggcgtggaaaccaccaagccatccaagcagagcaacaacaaatacgccgccagctcctacctgagcctgacacctgagcagtggaagtcccacagatcctacagctgccaagtgacccacgaaggcagcaccgtggaaaagacagtggcccctacagagtgcagcatccccgaggacacattcttcccaagccccgagagcagctgcgacgtgaagctggtggaaaagagcttcgagacagacaccaacctgaacttccagaacctgagcgtgatcggcttcagaatcctgctgctgaaagtggccggctttaacctgctgatgaccctgcggctgtggtccagccgcgccaagagaagcggatctggcgtgaagcagaccctgaatttcgacctgctgaagctggctggcgacgtggaatccaacccaggcccttctagaggccatatgaccgagtacaagcccacggtgcgcctcgccacccgcgacgacgtccccagggccgtacgcaccctcgccgccgcgttcgccgactaccccgccacgcgccacaccgtcgatccggaccgccacatcgagcgggtcaccgagctgcaagaactcttcctcacgcgcgtcgggctcgacatcggcaaggtgtgggtcgcggacgacggcgccgcggtggcggtctggaccacgccggagagcgtcgaagcgggggcggtgttcgccgagatcggcccgcgcatggccgagttgagcggttcccggctggccgcgcagcaacagatggaaggcctcctggcgccgcaccggcccaaggagcccgcgtggttcctggccaccgtcggcgtctcgcccgaccaccagggcaagggtctgggcagcgccgtcgtgctccccggagtggaggcggccgagcgcgccggggtgcccgccttcctggagacctccgcgccccgcaacctccccttctacgagcggctcggcttcaccgtcaccgccgacgtcgaggtgcccgaaggaccgcgcacctggtgcatgacccgcaagcccggtgcctga

SEQ ID NO: 36032 - DNA, 2637 bp, synthetic construct
  source 1..2637: mol_type = other DNA
atggccttaccagtgaccgccttgctcctgccgctggccttgctgctccacgccgccaggccgctcgaggaggcctctacaaagggaccctccgtgtttcctctggctcccagcagcaagtctacaagcggaggaacagccgctctgggctgcctggtcaaggattactttcccgagcctgtgaccgtgtcctggaatagcggagcactgacaagcggcgtgcacacctttccagccgtgctgcaaagcagcggcctgtactctctgagcagcgtggtcacagtgcctagctctagcctgggcacccagacctacatctgcaatgtgaaccacaagcctagcaacaccaaggtggacaagagagtggaacccaagagctgtatccccgaggacacattcttcccaagccccgagagcagctgcgacgtgaagctggtggaaaagagcttcgagacagacaccaacctgaacttccagaacctgagcgtgatcggcttcagaatcctgctgctgaaagtggccggctttaacctgctgatgaccctgcggctgtggtccagcagggccaagcgatctggatctggagcaacaaacttctcactactcaaacaagcaggtgacgtggaggagaatcccgggcctactagcatggccttaccagtgaccgccttgctcctgccgctggccttgctgctccacgccgccaggccggagatcgtgctgacacagtctcccgccacactgtcactgtctccaggcgaaagagccacactgagctgtagagccagccagagcgtgtcctcttacctggcctggtatcagcagaagcctggacaggctccccggctgctgatctacgatgccagcaatagagccacaggcatccccgccagattttctggctctggcagcggcaccgatttcaccctgaccataagcagcctggaacctgaggacttcgccgtgtactactgccagcagagaagcaactggcctcctacattcggccagggcaccaaggtggaaatcaaaggcggaggcggaagtggaggcggaggatctggcggcggaggctctcaactccagctgcaagagtctggccccggactggtcaagcctagcgaaacactgagcctgacctgtaccgtgtctggcggcagcatcagcagcagctcttattggtggggctggaccagacagcctcctggcagaggactggaatggatcggcaccatgtactacagcggcaacatctactacaaccccagcctccagagccgggccaccatctctgtggacaccagcaagaaccagttcagcctgaagctgagcagcgtgacagccgccgataccgccgtgtattattgcgccagacatgtgggctacagctacggcagacggttctggtacttcgacctgtggggcagaggcaccctggtcacagtttcttctacgcgtggacagcctaaggccaatcctaccgtgacactgttccctccaagcagcgaagaactccaggccaacaaggccacacttgtgtgcctgatctccgacttctaccctggggctgtgacagtggcttggaaggccgatggatctcctgtgaaagccggcgtggaaaccaccaagccatccaagcagagcaacaacaaatacgccgccagctcctacctgagcctgacacctgagcagtggaagtcccacagatcctacagctgccaagtgacccacgaaggcagcaccgtggaaaagacagtggcccctacagagtgcagcggcagagccgattgcggctttaccagcgagagctaccagcagggcgtgctgagcgccaccatcctgtacgagatcctgctgggcaaggccaccctgtacgccgtgctggtgtctgccctggtgctgatggctatggtcaagcggaaggacagccggggacgcgccaagagaagcggatctggcgtgaagcagaccctgaatttcgacctgctgaagctggctggcgacgtggaatccaacccaggcccttctagaggccatatgaccgagtacaagcccacggtgcgcctcgccacccgcgacgacgtccccagggccgtacgcaccctcgccgccgcgttcgccgactaccccgccacgcgccacaccgtcgatccggaccgccacatcgagcgggtcaccgagctgcaagaactcttcctcacgcgcgtcgggctcgacatcggcaaggtgtgggtcgcggacgacggcgccgcggtggcggtctggaccacgccggagagcgtcgaagcgggggcggtgttcgccgagatcggcccgcgcatggccgagttgagcggttcccggctggccgcgcagcaacagatggaaggcctcctggcgccgcaccggcccaaggagcccgcgtggttcctggccaccgtcggcgtctcgcccgaccaccagggcaagggtctgggcagcgccgtcgtgctccccggagtggaggcggccgagcgcgccggggtgcccgccttcctggagacctccgcgccccgcaacctccccttctacgagcggctcggcttcaccgtcaccgccgacgtcgaggtgcccgaaggaccgcgcacctggtgcatgacccgcaagcccggtgcctga

SEQ ID NO: 36033 - DNA, 1875 bp, synthetic construct
  source 1..1875: mol_type = other DNA
atggccttaccagtgaccgccttgctcctgccgctggccttgctgctccacgccgccaggccggagatcgtgctgacacagtctcccgccacactgtcactgtctccaggcgaaagagccacactgagctgtagagccagccagagcgtgtcctcttacctggcctggtatcagcagaagcctggacaggctccccggctgctgatctacgatgccagcaatagagccacaggcatccccgccagattttctggctctggcagcggcaccgatttcaccctgaccataagcagcctggaacctgaggacttcgccgtgtactactgccagcagagaagcaactggcctcctacattcggccagggcaccaaggtggaaatcaaactcgaggacctgaagaacgtgttcccacctgaggtggccgtgttcgagcctagcgaggccgagatcagccacacccagaaagccaccctcgtgtgcctggctaccggcttctaccccgaccatgtggaactgtcttggtgggtcaacggcaaagaggtgcacagcggcgtgtgtaccgacccccagccactgaaagaacagcccgccctgaacgacagccggtactgcctgagcagcagactgagagtgtccgccaccttctggcagaacccccggaaccacttcagatgccaggtgcagttctacggcctgagcgagaacgacgagtggacccaggacagagccaagcccgtgacccagatcgtgtctgccgaagcctggggcagagccgatagcggctttaccagcgagagctaccagcagggcgtgctgagcgccaccatcctgtacgagatcctgctgggcaaggccaccctgtacgccgtgctggtgtctgccctggtgctgatggctatggtcaagcggaaggacagccggggaagggccaagcgatctggatctggagcaacaaacttctcactactcaaacaagcaggtgacgtggaggagaatcccgggcctactagtatggactggatttggcgcatccttttccttgtcggcgctgctaccggcgcgcattccttcgaacaactccagctgcaagagtctggccccggactggtcaagcctagcgaaacactgagcctgacctgtaccgtgtctggcggcagcatcagcagcagctcttattggtggggctggaccagacagcctcctggcagaggactggaatggatcggcaccatgtactacagcggcaacatctactacaaccccagcctccagagccgggccaccatctctgtggacaccagcaagaaccagttcagcctgaagctgagcagcgtgacagccgccgataccgccgtgtattattgcgccagacatgtgggctacagctacggcagacggttctggtacttcgacctgtggggcagaggcaccctggtcacagtttcttctacgcgtatccagaaccctgatcctgccgtgtaccagctgcgggatagcaagagcagcgacaagagcgtgtgtctgttcaccgacttcgacagccagaccaacgtgtcccagagcaaggactccgacgtgtacatcaccgataagtgcgtgctggacatgcggagcatggacttcaagagcaactccgccgtggcctggtccaacaagtccgatttcgcctgcgccaacgccttcaacaacagcattatccccgaggacacattcttcccaagccccgagagcagcagcgacgtgaagctggtggaaaagagcttcgagacagacaccaacctgaacttccagaacctgagcgtgatcggcttcagaatcctgctgctgaaagtggccggctttaacctgctgatgaccctgcggctgtggtccagc

SEQ ID NO: 36034 - DNA, 2715 bp, synthetic construct
  source 1..2715: mol_type = other DNA
atggccttaccagtgaccgccttgctcctgccgctggccttgctgctccacgccgccaggccggaggttcagctgcttgagtctggcggaggactggttcaacctggcggaagcctgagactgtcttgtgccgcctctggcagaaccttcagcatgggctggtatagacaggcccctggcaagggcctcgaatttgtgtctgccatcacatacagcggcggcagcccttactacgccgattctgtgaagggcagattcaccatcagccgggacaacagcaagaacaccgtgtacctccagatgaacagcctgagagccgaggacaccgccgtgtactactgtgccgccaatccaacctacggcagcgactggaatgccgagaattggggccagggcacactggtcacagtgtctagtggtaccggcggaggcggatctggcggcggaggtagcggtggcggaggatctgaattcgagatcgtgctgacacagtctcccgccacactgtcactgtctccaggcgaaagagccacactgagctgtagagccagccagagcgtgtcctcttacctggcctggtatcagcagaagcctggacaggctccccggctgctgatctacgatgccagcaatagagccacaggcatccccgccagattttctggctctggcagcggcaccgatttcaccctgaccataagcagcctggaacctgaggacttcgccgtgtactactgccagcagagaagcaactggcctcctacattcggccagggcaccaaggtggaaatcaaactcgagatccagaaccctgatcctgccgtgtaccagctgcgggatagcaagagcagcgacaagagcgtgtgtctgttcaccgacttcgacagccagaccaacgtgtcccagagcaaggactccgacgtgtacatcaccgataagtgcgtgctggacatgcggagcatggacttcaagagcaactccgccgtggcctggtccaacaagtccgatttcgcctgcgccaacgccttcaacaacagcattatccccgaggacacattcttcccaagcagcgacgtgccctgcgacgtgaagctggtggaaaagagcttcgagacagacaccaacctgaacttccagaacctgagcgtgatcggcttcagaatcctgctgctgaaagtggccggctttaacctgctgatgaccctgcggctgtggtccagccgcgccaagagaagcggatctggcgtgaagcagaccctgaatttcgacctgctgaagctggctggcgacgtggaatccaacccaggccctactagtaccatggactggatttggcgcatccttttccttgtcggcgctgctaccggcacccattccgggcccgaagtgcaactggttgaatccggtggcggcctggtgcaacccggcggatctctcagacttagctgtgccgcctccggcagaaccttcacaatgggatggtacaggcaggctccagggaaagagagagagttcgtcgccgccatctctctgtctcccacactggcctactacgccgactctgtgaaaggccggttcaccatctccagagataatagcaagaacaccgtggtgctgcaaatgaactctctgagagccgaggatacagccctgtactattgtgccgctgaccggaagtccgtgatgagcatcagacccgattactggggacagggcacactggtcacagtgtctagtggatccggcggcggaggatctggcggaggcggatctgggggcggaggctctttcgaacaactccagctgcaagagtctggccccggactggtcaagcctagcgaaacactgagcctgacctgtaccgtgtctggcggcagcatcagcagcagctcttattggtggggctggaccagacagcctcctggcagaggactggaatggatcggcaccatgtactacagcggcaacatctactacaaccccagcctccagagccgggccaccatctctgtggacaccagcaagaaccagttcagcctgaagctgagcagcgtgacagccgccgataccgccgtgtattattgcgccagacatgtgggctacagctacggcagacggttctggtacttcgacctgtggggcagaggcaccctggtcacagtttcttctacgcgtgaggacctgaagaacgtgttcccacctgaggtggccgtgttcgagcctagcaaggccgagatcgcccacacccagaaagccaccctcgtgtgcctggctaccggcttctaccccgaccatgtggaactgtcttggtgggtcaacggcaaagaggtgcacagcggcgtgtgtaccgacccccagccactgaaagaacagcccgccctgaacgacagccggtactgcctgagcagcagactgagagtgtccgccaccttctggcagaacccccggaaccacttcagatgccaggtgcagttctacggcctgagcgagaacgacgagtggacccaggacagagccaagcccgtgacccagatcgtgtctgccgaagcctggggcagagccgattgcggcatcaccagcgccagctaccaccagggcgtgctgagcgccaccatcctgtacgagatcctgctgggcaaggccaccctgtacgccgtgctggtgtctgccctggtgctgatggctatggtcaagcggaaggacagccggggataa

SEQ ID NO: 36035 - DNA, 2715 bp, synthetic construct
  source 1..2715: mol_type = other DNA
atggccttaccagtgaccgccttgctcctgccgctggccttgctgctccacgccgccaggccggaagtgcagctggttgaatctggcggaggactggttcaggctggcggatctctgagactgtcttgtgccgccagcggcagaacctttagcatgggctggtttagacaggcccctggcaaagagagagagttcgtcgccgccatcacatactctggcggcagcccttactacgccgactctgtgaagggcagattcaccatcagccgggacaacgccaagaacaccgtgtacctccagatgaacagcctgaagcctgaggacaccgccgtgtactactgcgccgccaatccaacatacggcagcgactggaacgccgagaattggggccagggaacccaagtgacagtgtctagcggtaccggcggaggcggatctggcggcggaggtagcggtggcggaggatctgaattcgagatcgtgctgacacagtctcccgccacactgtcactgtctccaggcgaaagagccacactgagctgtagagccagccagagcgtgtcctcttacctggcctggtatcagcagaagcctggacaggctccccggctgctgatctacgatgccagcaatagagccacaggcatccccgccagattttctggctctggcagcggcaccgatttcaccctgaccataagcagcctggaacctgaggacttcgccgtgtactactgccagcagagaagcaactggcctcctacattcggccagggcaccaaggtggaaatcaaactcgagatccagaaccctgatcctgccgtgtaccagctgcgggatagcaagagcagcgacaagagcgtgtgtctgttcaccgacttcgacagccagaccaacgtgtcccagagcaaggactccgacgtgtacatcaccgataagtgcgtgctggacatgcggagcatggacttcaagagcaactccgccgtggcctggtccaacaagtccgatttcgcctgcgccaacgccttcaacaacagcattatccccgaggacacattcttcccaagcagcgacgtgccctgcgacgtgaagctggtggaaaagagcttcgagacagacaccaacctgaacttccagaacctgagcgtgatcggcttcagaatcctgctgctgaaagtggccggctttaacctgctgatgaccctgcggctgtggtccagccgcgccaagagaagcggatctggcgtgaagcagaccctgaatttcgacctgctgaagctggctggcgacgtggaatccaacccaggccctactagtaccatggactggatttggcgcatccttttccttgtcggcgctgctaccggcgcccattccgggcccgaagtgcaactggttgaatccggtggcggcctggtgcaacccggcggatctctcagacttagctgtgccgcctccggcagaaccttcacaatgggatggtacaggcaggctccagggaaagagagagagttcgtcgccgccatctctctgtctcccacactggcctactacgccgactctgtgaaaggccggttcaccatctccagagataatagcaagaacaccgtggtgctgcaaatgaactctctgagagccgaggatacagccctgtactattgtgccgctgaccggaagtccgtgatgagcatcagacccgattactggggacagggcacactggtcacagtgtctagtggatccggcggcggaggatctggcggaggcggatctgggggcggaggctctttcgaacaactccagctgcaagagtctggccccggactggtcaagcctagcgaaacactgagcctgacctgtaccgtgtctggcggcagcatcagcagcagctcttattggtggggctggaccagacagcctcctggcagaggactggaatggatcggcaccatgtactacagcggcaacatctactacaaccccagcctccagagccgggccaccatctctgtggacaccagcaagaaccagttcagcctgaagctgagcagcgtgacagccgccgataccgccgtgtattattgcgccagacatgtgggctacagctacggcagacggttctggtacttcgacctgtggggcagaggcaccctggtcacagtttcttctacgcgtgaggacctgaagaacgtgttcccacctgaggtggccgtgttcgagcctagcaaggccgagatcgcccacacccagaaagccaccctcgtgtgcctggctaccggcttctaccccgaccatgtggaactgtcttggtgggtcaacggcaaagaggtgcacagcggcgtgtgtaccgacccccagccactgaaagaacagcccgccctgaacgacagccggtactgcctgagcagcagactgagagtgtccgccaccttctggcagaacccccggaaccacttcagatgccaggtgcagttctacggcctgagcgagaacgacgagtggacccaggacagagccaagcccgtgacccagatcgtgtctgccgaagcctggggcagagccgattgcggcatcaccagcgccagctaccaccagggcgtgctgagcgccaccatcctgtacgagatcctgctgggcaaggccaccctgtacgccgtgctggtgtctgccctggtgctgatggctatggtcaagcggaaggacagccggggataa

SEQ ID NO: 36036 - DNA, 2706 bp, synthetic construct
  source 1..2706: mol_type = other DNA
atggccttaccagtgaccgccttgctcctgccgctggccttgctgctccacgccgccaggccggaagtgcagctggttgaatctggcggaggactggttcaggctggcggatctctgagactgtcttgtgccgccagcggcagaacctttagcatgggctggtttagacaggcccctggcaaagagagagagttcgtcgccgccatcacatactctggcggcagcccttactacgccgactctgtgaagggcagattcaccatcagccgggacaacgccaagaacaccgtgtacctccagatgaacagcctgaagcctgaggacaccgccgtgtactactgcgccgccaatccaacatacggcagcgactggaacgccgagaattggggccagggaacccaagtgacagtgtctagcggtaccggcggaggcggatctggcggcggaggtagcggtggcggaggatctgaattcgagatcgtgctgacacagtctcccgccacactgtcactgtctccaggcgaaagagccacactgagctgtagagccagccagagcgtgtcctcttacctggcctggtatcagcagaagcctggacaggctccccggctgctgatctacgatgccagcaatagagccacaggcatccccgccagattttctggctctggcagcggcaccgatttcaccctgaccataagcagcctggaacctgaggacttcgccgtgtactactgccagcagagaagcaactggcctcctacattcggccagggcaccaaggtggaaatcaaactcgaggacctgaagaacgtgttcccacctgaggtggccgtgttcgagcctagcgaggccgagatcagccacacccagaaagccaccctcgtgtgcctggctaccggcttctaccccgaccatgtggaactgtcttggtgggtcaacggcaaagaggtgcacagcggcgtgtgtaccgacccccagccactgaaagaacagcccgccctgaacgacagccggtactgcctgagcagcagactgagagtgtccgccaccttctggcagaacccccggaaccacttcagatgccaggtgcagttctacggcctgagcgagaacgacgagtggacccaggacagagccaagcccgtgacccagatcgtgtctgccgaagcctggggcagagccgattgcggctttaccagcgagagctaccagcagggcgtgctgagcgccaccatcctgtacgagatcctgctgggcaaggccaccctgtacgccgtgctggtgtctgccctggtgctgatggctatggtcaagcggaaggacagccggggaagggccaagcgatctggatctggagcaacaaacttctcactactcaaacaagcaggtgacgtggaggagaatcccgggcctactagtgccaccatggactggatttggcgcatccttttccttgtcggcgctgctaccggcgcccattccgggcccgaagtgcaactggttgaatccggtggcggcctggtgcaagcaggcggatctctcagacttagctgtgccgcctccggcagaaccttcacaatgggatggtttaggcaggctccagggaaagagagagagttcgtcgccgccatctctctgtctcccacactggcctactacgccgactctgtgaaaggccggttcaccatctccagagataatgccaagaacaccgtggtgctgcaaatgaactctctgaaacccgaggatacagccctgtactattgtgccgctgaccggaagtccgtgatgagcatcagacccgattactggggacagggcacacaagtcacagtgtcctctggatccggcggcggaggatctggcggaggcggatctgggggcggaggctctttcgaacaactccagctgcaagagtctggccccggactggtcaagcctagcgaaacactgagcctgacctgtaccgtgtctggcggcagcatcagcagcagctcttattggtggggctggaccagacagcctcctggcagaggactggaatggatcggcaccatgtactacagcggcaacatctactacaaccccagcctccagagccgggccaccatctctgtggacaccagcaagaaccagttcagcctgaagctgagcagcgtgacagccgccgataccgccgtgtattattgcgccagacatgtgggctacagctacggcagacggttctggtacttcgacctgtggggcagaggcaccctggtcacagtttcttctacgcgtatccagaaccctgatcctgccgtgtaccagctgcgggatagcaagagcagcgacaagagcgtgtgtctgttcaccgacttcgacagccagaccaacgtgtcccagagcaaggactccgacgtgtacatcaccgataagtgcgtgctggacatgcggagcatggacttcaagagcaactccgccgtggcctggtccaacaagtccgatttcgcctgcgccaacgccttcaacaacagcattatccccgaggacacattcttcccaagccccgagagcagctgcgacgtgaagctggtggaaaagagcttcgagacagacaccaacctgaacttccagaacctgagcgtgatcggcttcagaatcctgctgctgaaagtggccggctttaacctgctgatgaccctgcggctgtggtccagctaa

SEQ ID NO: 36037 - DNA, 2319 bp, synthetic construct
  source 1..2319: mol_type = other DNA
atggccttaccagtgaccgccttgctcctgccgctggccttgctgctccacgccgccaggccggaagtgcagctggttgaatctggcggaggactggttcagcctggcggatctctgagactgagctgtgaagccagcggcttcgccagcgacgattacatcatcggctggttcagacaggcccctggcaaagagagagagggcgtcagctgcatcagctctaagtacgccaacaccgtgtacaccgacagcgtgaagggcagattcagactgagcagaggcaccgccaagaataccgtgtacctccagatgagcgccctgaagcctgaggataccgccgtgtactactgcgctatggacagccgcagagtgacatgccctgagatcagcaccatgcaccggaacttcgattcttggggccagggcacactggtcacagtgtcatctggtaccggcggaggcggatctggcggcggaggtagcggtggcggaggatctgaattcgagatcgtgctgacacagtctcccgccacactgtcactgtctccaggcgaaagagccacactgagctgtagagccagccagagcgtgtcctcttacctggcctggtatcagcagaagcctggacaggctccccggctgctgatctacgatgccagcaatagagccacaggcatccccgccagattttctggctctggcagcggcaccgatttcaccctgaccataagcagcctggaacctgaggacttcgccgtgtactactgccagcagagaagcaactggcctcctacattcggccagggcaccaaggtggaaatcaaactcgaggacctgaagaacgtgttcccacctgaggtggccgtgttcgagcctagcaaggccgagatcgcccacacccagaaagccaccctcgtgtgcctggctaccggcttctaccccgaccatgtggaactgtcttggtgggtcaacggcaaagaggtgcacagcggcgtgtgtaccgacccccagccactgaaagaacagcccgccctgaacgacagccggtactgcctgagcagcagactgagagtgtccgccaccttctggcagaacccccggaaccacttcagatgccaggtgcagttctacggcctgagcgagaacgacgagtggacccaggacagagccaagcccgtgacccagatcgtgtctgccgaagcctggggcagagccgattgcggcatcaccagcgccagctaccaccagggcgtgctgagcgccaccatcctgtacgagatcctgctgggcaaggccaccctgtacgccgtgctggtgtctgccctggtgctgatggctatggtcaagcggaaggacagccggggaagggccaagcgatctggatctggagcaacaaacttctcactactcaaacaagcaggtgacgtggaggagaatcccgggcctactagtatggactggatttggcgcatccttttccttgtcggcgctgctaccggcgcgcattccttcgaacaactccagctgcaagagtctggccccggactggtcaagcctagcgaaacactgagcctgacctgtaccgtgtctggcggcagcatcagcagcagctcttattggtggggctggaccagacagcctcctggcagaggactggaatggatcggcaccatgtactacagcggcaacatctactacaaccccagcctccagagccgggccaccatctctgtggacaccagcaagaaccagttcagcctgaagctgagcagcgtgacagccgccgataccgccgtgtattattgcgccagacatgtgggctacagctacggcagacggttctggtacttcgacctgtggggcagaggcaccctggtcacagtttcttctacgcgtatccagaaccctgatcctgccgtgtaccagctgcgggatagcaagagcagcgacaagagcgtgtgtctgttcaccgacttcgacagccagaccaacgtgtcccagagcaaggactccgacgtgtacatcaccgataagtgcgtgctggacatgcggagcatggacttcaagagcaactccgccgtggcctggtccaacaagtccgatttcgcctgcgccaacgccttcaacaacagcattatccccgaggacacattcttcccaagcagcgacgtgccctgcgacgtgaagctggtggaaaagagcttcgagacagacaccaacctgaacttccagaacctgagcgtgatcggcttcagaatcctgctgctgaaagtggccggctttaacctgctgatgaccctgcggctgtggtccagctaa

SEQ ID NO: 36038 - DNA, 2292 bp, synthetic construct
  source 1..2292: mol_type = other DNA
atggccttaccagtgaccgccttgctcctgccgctggccttgctgctccacgccgccaggccggagatcgtgctgacacagtctcccgccacactgtcactgtctccaggcgaaagagccacactgagctgtagagccagccagagcgtgtcctcttacctggcctggtatcagcagaagcctggacaggctccccggctgctgatctacgatgccagcaatagagccacaggcatccccgccagattttctggctctggcagcggcaccgatttcaccctgaccataagcagcctggaacctgaggacttcgccgtgtactactgccagcagagaagcaactggcctcctacattcggccagggcaccaaggtggaaatcaaactcgaggacctgaagaacgtgttcccacctgaggtggccgtgttcgagcctagcgaggccgagatcagccacacccagaaagccaccctcgtgtgcctggctaccggcttctaccccgaccatgtggaactgtcttggtgggtcaacggcaaagaggtgcacagcggcgtgtgtaccgacccccagccactgaaagaacagcccgccctgaacgacagccggtactgcctgagcagcagactgagagtgtccgccaccttctggcagaacccccggaaccacttcagatgccaggtgcagttctacggcctgagcgagaacgacgagtggacccaggacagagccaagcccgtgacccagatcgtgtctgccgaagcctggggcagagccgattgcggctttaccagcgagagctaccagcagggcgtgctgagcgccaccatcctgtacgagatcctgctgggcaaggccaccctgtacgccgtgctggtgtctgccctggtgctgatggctatggtcaagcggaaggacagccggggaagggccaagcgatctggatctggagcaacaaacttctcactactcaaacaagcaggtgacgtggaggagaatcccgggcctactagtaccatggactggatttggcgcatccttttccttgtcggcgctgctaccggcgcccattccgggcccgaagtgcaactggttgaatccggtggcggcctggtgcaacccggcggatctctcagacttagctgtgccgcctccggcagaaccttcacaatgggatggtacaggcaggctccagggaaagagagagagttcgtcgccgccatctctctgtctcccacactggcctactacgccgactctgtgaaaggccggttcaccatctccagagataatagcaagaacaccgtggtgctgcaaatgaactctctgagagccgaggatacagccctgtactattgtgccgctgaccggaagtccgtgatgagcatcagacccgattactggggacagggcacactggtcacagtgtctagtggatccggcggcggaggatctggcggaggcggatctgggggcggaggctctttcgaacaactccagctgcaagagtctggccccggactggtcaagcctagcgaaacactgagcctgacctgtaccgtgtctggcggcagcatcagcagcagctcttattggtggggctggaccagacagcctcctggcagaggactggaatggatcggcaccatgtactacagcggcaacatctactacaaccccagcctccagagccgggccaccatctctgtggacaccagcaagaaccagttcagcctgaagctgagcagcgtgacagccgccgataccgccgtgtattattgcgccagacatgtgggctacagctacggcagacggttctggtacttcgacctgtggggcagaggcaccctggtcacagtttcttctacgcgtatccagaaccctgatcctgccgtgtaccagctgcgggatagcaagagcagcgacaagagcgtgtgtctgttcaccgacttcgacagccagaccaacgtgtcccagagcaaggactccgacgtgtacatcaccgataagtgcgtgctggacatgcggagcatggacttcaagagcaactccgccgtggcctggtccaacaagtccgatttcgcctgcgccaacgccttcaacaacagcattatccccgaggacacattcttcccaagccccgagagcagctgcgacgtgaagctggtggaaaagagcttcgagacagacaccaacctgaacttccagaacctgagcgtgatcggcttcagaatcctgctgctgaaagtggccggctttaacctgctgatgaccctgcggctgtggtccagctaa

SEQ ID NO: 36039 - DNA, 2310 bp, synthetic construct
  source 1..2310: mol_type = other DNA
atggccttaccagtgaccgccttgctcctgccgctggccttgctgctccacgccgccaggccggagatcgtgctgacacagtctcccgccacactgtcactgtctccaggcgaaagagccacactgagctgtagagccagccagagcgtgtcctcttacctggcctggtatcagcagaagcctggacaggctccccggctgctgatctacgatgccagcaatagagccacaggcatccccgccagattttctggctctggcagcggcaccgatttcaccctgaccataagcagcctggaacctgaggacttcgccgtgtactactgccagcagagaagcaactggcctcctacattcggccagggcaccaaggtggaaatcaaactcgaggacctgaagaacgtgttcccacctgaggtggccgtgttcgagcctagcgaggccgagatcagccacacccagaaagccaccctcgtgtgcctggctaccggcttctaccccgaccatgtggaactgtcttggtgggtcaacggcaaagaggtgcacagcggcgtgtgtaccgacccccagccactgaaagaacagcccgccctgaacgacagccggtactgcctgagcagcagactgagagtgtccgccaccttctggcagaacccccggaaccacttcagatgccaggtgcagttctacggcctgagcgagaacgacgagtggacccaggacagagccaagcccgtgacccagatcgtgtctgccgaagcctggggcagagccgattgcggctttaccagcgagagctaccagcagggcgtgctgagcgccaccatcctgtacgagatcctgctgggcaaggccaccctgtacgccgtgctggtgtctgccctggtgctgatggctatggtcaagcggaaggacagccggggaagggccaagcgatctggatctggagcaacaaacttctcactactcaaacaagcaggtgacgtggaggagaatcccgggcctactagtaccatggactggatttggcgcatccttttccttgtcggcgctgctaccggcgcccattccgggccccaggtgcagctggttgaatctggcggaggactggttcagcctggcggatctctgagactgtcttgtgccgccagcggcaacatcaacagcagaaactgcatgggctggttcagacaggcccctggcaagggaagagaaggcgtggcagctatcggccaagtgaccggcagaacctactacgtggacagcgtgaagggcagattcaccatcagcctggacaacagcaagaacaccctgtacctccagatgaacagcctgagagccgaggacaccgccgtgtactattgtgctgctgcccctggctgtctgctgtctgcacttagaagcgccgactacagaaactggggccagggcacactggtcaccgtttcttctggatccggcggcggaggatctggcggaggcggatctgggggcggaggctctttcgaacaactccagctgcaagagtctggccccggactggtcaagcctagcgaaacactgagcctgacctgtaccgtgtctggcggcagcatcagcagcagctcttattggtggggctggaccagacagcctcctggcagaggactggaatggatcggcaccatgtactacagcggcaacatctactacaaccccagcctccagagccgggccaccatctctgtggacaccagcaagaaccagttcagcctgaagctgagcagcgtgacagccgccgataccgccgtgtattattgcgccagacatgtgggctacagctacggcagacggttctggtacttcgacctgtggggcagaggcaccctggtcacagtttcttctacgcgtatccagaaccctgatcctgccgtgtaccagctgcgggatagcaagagcagcgacaagagcgtgtgtctgttcaccgacttcgacagccagaccaacgtgtcccagagcaaggactccgacgtgtacatcaccgataagtgcgtgctggacatgcggagcatggacttcaagagcaactccgccgtggcctggtccaacaagtccgatttcgcctgcgccaacgccttcaacaacagcattatccccgaggacacattcttcccaagccccgagagcagctgcgacgtgaagctggtggaaaagagcttcgagacagacaccaacctgaacttccagaacctgagcgtgatcggcttcagaatcctgctgctgaaagtggccggctttaacctgctgatgaccctgcggctgtggtccagc

SEQ ID NO: 36040 - DNA, 2313 bp, synthetic construct
  source 1..2313: mol_type = other DNA
atggccttaccagtgaccgccttgctcctgccgctggccttgctgctccacgccgccaggccggagatcgtgctgacacagtctcccgccacactgtcactgtctccaggcgaaagagccacactgagctgtagagccagccagagcgtgtcctcttacctggcctggtatcagcagaagcctggacaggctccccggctgctgatctacgatgccagcaatagagccacaggcatccccgccagattttctggctctggcagcggcaccgatttcaccctgaccataagcagcctggaacctgaggacttcgccgtgtactactgccagcagagaagcaactggcctcctacattcggccagggcaccaaggtggaaatcaaactcgaggacctgaagaacgtgttcccacctgaggtggccgtgttcgagcctagcgaggccgagatcagccacacccagaaagccaccctcgtgtgcctggctaccggcttctaccccgaccatgtggaactgtcttggtgggtcaacggcaaagaggtgcacagcggcgtgtgtaccgacccccagccactgaaagaacagcccgccctgaacgacagccggtactgcctgagcagcagactgagagtgtccgccaccttctggcagaacccccggaaccacttcagatgccaggtgcagttctacggcctgagcgagaacgacgagtggacccaggacagagccaagcccgtgacccagatcgtgtctgccgaagcctggggcagagccgattgcggctttaccagcgagagctaccagcagggcgtgctgagcgccaccatcctgtacgagatcctgctgggcaaggccaccctgtacgccgtgctggtgtctgccctggtgctgatggctatggtcaagcggaaggacagccggggaagggccaagcgatctggatctggagcaacaaacttctcactactcaaacaagcaggtgacgtggaggagaatcccgggcctactagtaccatggactggatttggcgcatccttttccttgtcggcgctgctaccggcgcccattccgggccccaggtgcagctggttgaatctggcggaggatctgttcaggctggcggctctctgagactgtcttgtggcgcttccggcaacatcagcagcagaaactgcatgggctggttcagacaggcccctggcaaagagagagaaggcgttgccgccatcggacaagtgaccggcagatcctactacgtggacagcgtgaagggcagattcaccatcagcctggacaacgccaagaacaccctgtacctccagatgaacacactgaagcccgaggacaccgccatgtactactgtgctgctgcccctggctgtctgctgtctgcacttagaagcgccgactacagaaactggggccagggaacccaagtgacagtgtctagtggatccggcggcggaggatctggcggaggcggatctgggggcggaggctctttcgaacaactccagctgcaagagtctggccccggactggtcaagcctagcgaaacactgagcctgacctgtaccgtgtctggcggcagcatcagcagcagctcttattggtggggctggaccagacagcctcctggcagaggactggaatggatcggcaccatgtactacagcggcaacatctactacaaccccagcctccagagccgggccaccatctctgtggacaccagcaagaaccagttcagcctgaagctgagcagcgtgacagccgccgataccgccgtgtattattgcgccagacatgtgggctacagctacggcagacggttctggtacttcgacctgtggggcagaggcaccctggtcacagtttcttctacgcgtatccagaaccctgatcctgccgtgtaccagctgcgggatagcaagagcagcgacaagagcgtgtgtctgttcaccgacttcgacagccagaccaacgtgtcccagagcaaggactccgacgtgtacatcaccgataagtgcgtgctggacatgcggagcatggacttcaagagcaactccgccgtggcctggtccaacaagtccgatttcgcctgcgccaacgccttcaacaacagcattatccccgaggacacattcttcccaagccccgagagcagctgcgacgtgaagctggtggaaaagagcttcgagacagacaccaacctgaacttccagaacctgagcgtgatcggcttcagaatcctgctgctgaaagtggccggctttaacctgctgatgaccctgcggctgtggtccagctaa

SEQ ID NO: 36041 - DNA, 2736 bp, synthetic construct
  source 1..2736: mol_type = other DNA
atggccttaccagtgaccgccttgctcctgccgctggccttgctgctccacgccgccaggccggaagtgcagctggttgaatctggcggaggactggttcaggctggcggatctctgagactgtcttgtgccgccagcggcagaacctttagcatgggctggtttagacaggcccctggcaaagagagagagttcgtcgccgccatcacatactctggcggcagcccttactacgccgactctgtgaagggcagattcaccatcagccgggacaacgccaagaacaccgtgtacctccagatgaacagcctgaagcctgaggacaccgccgtgtactactgcgccgccaatccaacatacggcagcgactggaacgccgagaattggggccagggaacccaagtgacagtgtctagcggtaccggcggaggcggatctggcggcggaggtagcggtggcggaggatctgaattcgagatcgtgctgacacagtctcccgccacactgtcactgtctccaggcgaaagagccacactgagctgtagagccagccagagcgtgtcctcttacctggcctggtatcagcagaagcctggacaggctccccggctgctgatctacgatgccagcaatagagccacaggcatccccgccagattttctggctctggcagcggcaccgatttcaccctgaccataagcagcctggaacctgaggacttcgccgtgtactactgccagcagagaagcaactggcctcctacattcggccagggcaccaaggtggaaatcaaactcgagatccagaaccctgatcctgccgtgtaccagctgcgggatagcaagagcagcgacaagagcgtgtgtctgttcaccgacttcgacagccagaccaacgtgtcccagagcaaggactccgacgtgtacatcaccgataagtgcgtgctggacatgcggagcatggacttcaagagcaactccgccgtggcctggtccaacaagtccgatttcgcctgcgccaacgccttcaacaacagcattatccccgaggacacattcttcccaagcagcgacgtgccctgcgacgtgaagctggtggaaaagagcttcgagacagacaccaacctgaacttccagaacctgagcgtgatcggcttcagaatcctgctgctgaaagtggccggctttaacctgctgatgaccctgcggctgtggtccagccgcgccaagagaagcggatctggcgtgaagcagaccctgaatttcgacctgctgaagctggctggcgacgtggaatccaacccaggccctactagtaccatggactggatttggcgcatccttttccttgtcggcgctgctaccggcgcccattccgggccccaggtgcagctggttgaatctggcggaggatctgttcaggctggcggctctctgagactgtcttgtggcgcttccggcaacatcagcagcagaaactgcatgggctggttcagacaggcccctggcaaagagagagaaggcgttgccgccatcggacaagtgaccggcagatcctactacgtggacagcgtgaagggcagattcaccatcagcctggacaacgccaagaacaccctgtacctccagatgaacacactgaagcccgaggacaccgccatgtactactgtgctgctgcccctggctgtctgctgtctgcacttagaagcgccgactacagaaactggggccagggaacccaagtgacagtgtctagtggatccggcggcggaggatctggcggaggcggatctgggggcggaggctctttcgaacaactccagctgcaagagtctggccccggactggtcaagcctagcgaaacactgagcctgacctgtaccgtgtctggcggcagcatcagcagcagctcttattggtggggctggaccagacagcctcctggcagaggactggaatggatcggcaccatgtactacagcggcaacatctactacaaccccagcctccagagccgggccaccatctctgtggacaccagcaagaaccagttcagcctgaagctgagcagcgtgacagccgccgataccgccgtgtattattgcgccagacatgtgggctacagctacggcagacggttctggtacttcgacctgtggggcagaggcaccctggtcacagtttcttctacgcgtgaggacctgaagaacgtgttcccacctgaggtggccgtgttcgagcctagcaaggccgagatcgcccacacccagaaagccaccctcgtgtgcctggctaccggcttctaccccgaccatgtggaactgtcttggtgggtcaacggcaaagaggtgcacagcggcgtgtgtaccgacccccagccactgaaagaacagcccgccctgaacgacagccggtactgcctgagcagcagactgagagtgtccgccaccttctggcagaacccccggaaccacttcagatgccaggtgcagttctacggcctgagcgagaacgacgagtggacccaggacagagccaagcccgtgacccagatcgtgtctgccgaagcctggggcagagccgattgcggcatcaccagcgccagctaccaccagggcgtgctgagcgccaccatcctgtacgagatcctgctgggcaaggccaccctgtacgccgtgctggtgtctgccctggtgctgatggctatggtcaagcggaaggacagccggggataa

SEQ ID NO: 36042 - DNA, 2727 bp, synthetic construct
  source 1..2727: mol_type = other DNA
atggccttaccagtgaccgccttgctcctgccgctggccttgctgctccacgccgccaggccgcaggtgcagctggttgaatctggcggaggatctgttcaggctggcggctctctgagactgtcttgtggcgcttccggcaacatcagcagcagaaactgcatgggctggttcagacaggcccctggcaaagagagagaaggcgttgccgccatcggacaagtgaccggcagatcctactacgtggacagcgtgaagggcagattcaccatcagcctggacaacgccaagaacaccctgtacctccagatgaacacactgaagcccgaggacaccgccatgtactactgtgctgctgcccctggctgtctgctgtctgcacttagaagcgccgactacagaaactggggccagggaacccaagtgacagtgtctagtggtaccggcggaggcggatctggcggcggaggtagcggtggcggaggatctgaattcgagatcgtgctgacacagtctcccgccacactgtcactgtctccaggcgaaagagccacactgagctgtagagccagccagagcgtgtcctcttacctggcctggtatcagcagaagcctggacaggctccccggctgctgatctacgatgccagcaatagagccacaggcatccccgccagattttctggctctggcagcggcaccgatttcaccctgaccataagcagcctggaacctgaggacttcgccgtgtactactgccagcagagaagcaactggcctcctacattcggccagggcaccaaggtggaaatcaaactcgaggacctgaagaacgtgttcccacctgaggtggccgtgttcgagcctagcgaggccgagatcagccacacccagaaagccaccctcgtgtgcctggctaccggcttctaccccgaccatgtggaactgtcttggtgggtcaacggcaaagaggtgcacagcggcgtgtgtaccgacccccagccactgaaagaacagcccgccctgaacgacagccggtactgcctgagcagcagactgagagtgtccgccaccttctggcagaacccccggaaccacttcagatgccaggtgcagttctacggcctgagcgagaacgacgagtggacccaggacagagccaagcccgtgacccagatcgtgtctgccgaagcctggggcagagccgattgcggctttaccagcgagagctaccagcagggcgtgctgagcgccaccatcctgtacgagatcctgctgggcaaggccaccctgtacgccgtgctggtgtctgccctggtgctgatggctatggtcaagcggaaggacagccggggaagggccaagcgatctggatctggagcaacaaacttctcactactcaaacaagcaggtgacgtggaggagaatcccgggcctactagtgccaccatggactggatttggcgcatccttttccttgtcggcgctgctaccggcgcccattccgggcccgaagtgcaactggttgaatccggtggcggcctggtgcaagcaggcggatctctcagacttagctgtgccgcctccggcagaaccttcacaatgggatggtttaggcaggctccagggaaagagagagagttcgtcgccgccatctctctgtctcccacactggcctactacgccgactctgtgaaaggccggttcaccatctccagagataatgccaagaacaccgtggtgctgcaaatgaactctctgaaacccgaggatacagccctgtactattgtgccgctgaccggaagtccgtgatgagcatcagacccgattactggggacagggcacacaagtcacagtgtcctctggatccggcggcggaggatctggcggaggcggatctgggggcggaggctctttcgaacaactccagctgcaagagtctggccccggactggtcaagcctagcgaaacactgagcctgacctgtaccgtgtctggcggcagcatcagcagcagctcttattggtggggctggaccagacagcctcctggcagaggactggaatggatcggcaccatgtactacagcggcaacatctactacaaccccagcctccagagccgggccaccatctctgtggacaccagcaagaaccagttcagcctgaagctgagcagcgtgacagccgccgataccgccgtgtattattgcgccagacatgtgggctacagctacggcagacggttctggtacttcgacctgtggggcagaggcaccctggtcacagtttcttctacgcgtatccagaaccctgatcctgccgtgtaccagctgcgggatagcaagagcagcgacaagagcgtgtgtctgttcaccgacttcgacagccagaccaacgtgtcccagagcaaggactccgacgtgtacatcaccgataagtgcgtgctggacatgcggagcatggacttcaagagcaactccgccgtggcctggtccaacaagtccgatttcgcctgcgccaacgccttcaacaacagcattatccccgaggacacattcttcccaagccccgagagcagctgcgacgtgaagctggtggaaaagagcttcgagacagacaccaacctgaacttccagaacctgagcgtgatcggcttcagaatcctgctgctgaaagtggccggctttaacctgctgatgaccctgcggctgtggtccagctaa

SEQ ID NO: 36043 - DNA, 2316 bp, synthetic construct
  source 1..2316: mol_type = other DNA
atggccttaccagtgaccgccttgctcctgccgctggccttgctgctccacgccgccaggccgcaggtgcagctggttgaatctggcggaggatctgttcaggctggcggctctctgagactgtcttgtggcgcttccggcaacatcagcagcagaaactgcatgggctggttcagacaggcccctggcaaagagagagaaggcgttgccgccatcggacaagtgaccggcagatcctactacgtggacagcgtgaagggcagattcaccatcagcctggacaacgccaagaacaccctgtacctccagatgaacacactgaagcccgaggacaccgccatgtactactgtgctgctgcccctggctgtctgctgtctgcacttagaagcgccgactacagaaactggggccagggaacccaagtgacagtgtctagtggtaccggcggaggcggatctggcggcggaggtagcggtggcggaggatctgaattcgagatcgtgctgacacagtctcccgccacactgtcactgtctccaggcgaaagagccacactgagctgtagagccagccagagcgtgtcctcttacctggcctggtatcagcagaagcctggacaggctccccggctgctgatctacgatgccagcaatagagccacaggcatccccgccagattttctggctctggcagcggcaccgatttcaccctgaccataagcagcctggaacctgaggacttcgccgtgtactactgccagcagagaagcaactggcctcctacattcggccagggcaccaaggtggaaatcaaactcgaggacctgaagaacgtgttcccacctgaggtggccgtgttcgagcctagcgaggccgagatcagccacacccagaaagccaccctcgtgtgcctggctaccggcttctaccccgaccatgtggaactgtcttggtgggtcaacggcaaagaggtgcacagcggcgtgtgtaccgacccccagccactgaaagaacagcccgccctgaacgacagccggtactgcctgagcagcagactgagagtgtccgccaccttctggcagaacccccggaaccacttcagatgccaggtgcagttctacggcctgagcgagaacgacgagtggacccaggacagagccaagcccgtgacccagatcgtgtctgccgaagcctggggcagagccgattgcggctttaccagcgagagctaccagcagggcgtgctgagcgccaccatcctgtacgagatcctgctgggcaaggccaccctgtacgccgtgctggtgtctgccctggtgctgatggctatggtcaagcggaaggacagccggggaagggccaagcgatctggatctggagcaacaaacttctcactactcaaacaagcaggtgacgtggaggagaatcccgggcctactagtgccaccatggactggatttggcgcatccttttccttgtcggcgctgctaccggcgcccattccttcgaacaactccagctgcaagagtctggccccggactggtcaagcctagcgaaacactgagcctgacctgtaccgtgtctggcggcagcatcagcagcagctcttattggtggggctggaccagacagcctcctggcagaggactggaatggatcggcaccatgtactacagcggcaacatctactacaaccccagcctccagagccgggccaccatctctgtggacaccagcaagaaccagttcagcctgaagctgagcagcgtgacagccgccgataccgccgtgtattattgcgccagacatgtgggctacagctacggcagacggttctggtacttcgacctgtggggcagaggcaccctggtcacagtttcttctacgcgtatccagaaccctgatcctgccgtgtaccagctgcgggatagcaagagcagcgacaagagcgtgtgtctgttcaccgacttcgacagccagaccaacgtgtcccagagcaaggactccgacgtgtacatcaccgataagtgcgtgctggacatgcggagcatggacttcaagagcaactccgccgtggcctggtccaacaagtccgatttcgcctgcgccaacgccttcaacaacagcattatccccgaggacacattcttcccaagccccgagagcagctgcgacgtgaagctggtggaaaagagcttcgagacagacaccaacctgaacttccagaacctgagcgtgatcggcttcagaatcctgctgctgaaagtggccggctttaacctgctgatgaccctgcggctgtggtccagctaa

SEQ ID NO: 36044 - DNA, 2316 bp, synthetic construct
  source 1..2316: mol_type = other DNA
atggccttaccagtgaccgccttgctcctgccgctggccttgctgctccacgccgccaggccgcaagttcagctggtggaaagcggtggtggcgttgtgcaacctggtggaagtctgaggctgagctgtgccgcttctggcctgagctttagcacctacactgtggcctggttcaggcaggctcccggaaagggtcttgaaggcgtggccgccattccttacaccagccagcacatggtgtacacagacagcgtcagaggccggttcaccatcagcagagacaactccaagaatacgctctatctccagatgaactctctgcgcgccgaagatacagccgtgtattactgcgccaccgacagacggcctggcacctctatgctggctatcaacggctacaacagatggggacagggaaccaccgtgaccgtgtcatctggtaccggcggaggcggatctggcggcggaggtagcggtggcggaggatctgaattcgagatcgtgctgacacagtctcccgccacactgtcactgtctccaggcgaaagagccacactgagctgtagagccagccagagcgtgtcctcttacctggcctggtatcagcagaagcctggacaggctccccggctgctgatctacgatgccagcaatagagccacaggcatccccgccagattttctggctctggcagcggcaccgatttcaccctgaccataagcagcctggaacctgaggacttcgccgtgtactactgccagcagagaagcaactggcctcctacattcggccagggcaccaaggtggaaatcaaactcgaggacctgaagaacgtgttcccacctgaggtggccgtgttcgagcctagcgaggccgagatcagccacacccagaaagccaccctcgtgtgcctggctaccggcttctaccccgaccatgtggaactgtcttggtgggtcaacggcaaagaggtgcacagcggcgtgtgtaccgacccccagccactgaaagaacagcccgccctgaacgacagccggtactgcctgagcagcagactgagagtgtccgccaccttctggcagaacccccggaaccacttcagatgccaggtgcagttctacggcctgagcgagaacgacgagtggacccaggacagagccaagcccgtgacccagatcgtgtctgccgaagcctggggcagagccgattgcggctttaccagcgagagctaccagcagggcgtgctgagcgccaccatcctgtacgagatcctgctgggcaaggccaccctgtacgccgtgctggtgtctgccctggtgctgatggctatggtcaagcggaaggacagccggggaagggccaagcgatctggatctggagcaacaaacttctcactactcaaacaagcaggtgacgtggaggagaatcccgggcctactagtgccaccatggactggatttggcgcatccttttccttgtcggcgctgctaccggcgcccattccttcgaacaactccagctgcaagagtctggccccggactggtcaagcctagcgaaacactgagcctgacctgtaccgtgtctggcggcagcatcagcagcagctcttattggtggggctggaccagacagcctcctggcagaggactggaatggatcggcaccatgtactacagcggcaacatctactacaaccccagcctccagagccgggccaccatctctgtggacaccagcaagaaccagttcagcctgaagctgagcagcgtgacagccgccgataccgccgtgtattattgcgccagacatgtgggctacagctacggcagacggttctggtacttcgacctgtggggcagaggcaccctggtcacagtttcttctacgcgtatccagaaccctgatcctgccgtgtaccagctgcgggatagcaagagcagcgacaagagcgtgtgtctgttcaccgacttcgacagccagaccaacgtgtcccagagcaaggactccgacgtgtacatcaccgataagtgcgtgctggacatgcggagcatggacttcaagagcaactccgccgtggcctggtccaacaagtccgatttcgcctgcgccaacgccttcaacaacagcattatccccgaggacacattcttcccaagccccgagagcagctgcgacgtgaagctggtggaaaagagcttcgagacagacaccaacctgaacttccagaacctgagcgtgatcggcttcagaatcctgctgctgaaagtggccggctttaacctgctgatgaccctgcggctgtggtccagctaa

SEQ ID NO: 36045 - DNA, 2313 bp, synthetic construct
  source 1..2313: mol_type = other DNA
atggccttaccagtgaccgccttgctcctgccgctggccttgctgctccacgccgccaggccggagatcgtgctgacacagtctcccgccacactgtcactgtctccaggcgaaagagccacactgagctgtagagccagccagagcgtgtcctcttacctggcctggtatcagcagaagcctggacaggctccccggctgctgatctacgatgccagcaatagagccacaggcatccccgccagattttctggctctggcagcggcaccgatttcaccctgaccataagcagcctggaacctgaggacttcgccgtgtactactgccagcagagaagcaactggcctcctacattcggccagggcaccaaggtggaaatcaaactcgaggacctgaagaacgtgttcccacctgaggtggccgtgttcgagcctagcgaggccgagatcagccacacccagaaagccaccctcgtgtgcctggctaccggcttctaccccgaccatgtggaactgtcttggtgggtcaacggcaaagaggtgcacagcggcgtgtgtaccgacccccagccactgaaagaacagcccgccctgaacgacagccggtactgcctgagcagcagactgagagtgtccgccaccttctggcagaacccccggaaccacttcagatgccaggtgcagttctacggcctgagcgagaacgacgagtggacccaggacagagccaagcccgtgacccagatcgtgtctgccgaagcctggggcagagccgattgcggctttaccagcgagagctaccagcagggcgtgctgagcgccaccatcctgtacgagatcctgctgggcaaggccaccctgtacgccgtgctggtgtctgccctggtgctgatggctatggtcaagcggaaggacagccggggaagggccaagcgatctggatctggagcaacaaacttctcactactcaaacaagcaggtgacgtggaggagaatcccgggcctactagtaccatggactggatttggcgcatccttttccttgtcggcgctgctaccggcgcccattccgggccccaagttcagctggtggaaagcggtggtggcgttgtgcaacctggtggaagtctgaggctgagctgtgccgcttctggcctgagctttagcacctacactgtggcctggttcaggcaggctcccggaaagggtcttgaaggcgtggccgccattccttacaccagccagcacatggtgtacacagacagcgtcagaggccggttcaccatcagcagagacaactccaagaatacgctctatctccagatgaactctctgcgcgccgaagatacagccgtgtattactgcgccaccgacagacggcctggcacctctatgctggctatcaacggctacaacagatggggacagggaaccaccgtgaccgtgtcatctggatccggcggcggaggatctggcggaggcggatctgggggcggaggctctttcgaacaactccagctgcaagagtctggccccggactggtcaagcctagcgaaacactgagcctgacctgtaccgtgtctggcggcagcatcagcagcagctcttattggtggggctggaccagacagcctcctggcagaggactggaatggatcggcaccatgtactacagcggcaacatctactacaaccccagcctccagagccgggccaccatctctgtggacaccagcaagaaccagttcagcctgaagctgagcagcgtgacagccgccgataccgccgtgtattattgcgccagacatgtgggctacagctacggcagacggttctggtacttcgacctgtggggcagaggcaccctggtcacagtttcttctacgcgtatccagaaccctgatcctgccgtgtaccagctgcgggatagcaagagcagcgacaagagcgtgtgtctgttcaccgacttcgacagccagaccaacgtgtcccagagcaaggactccgacgtgtacatcaccgataagtgcgtgctggacatgcggagcatggacttcaagagcaactccgccgtggcctggtccaacaagtccgatttcgcctgcgccaacgccttcaacaacagcattatccccgaggacacattcttcccaagccccgagagcagctgcgacgtgaagctggtggaaaagagcttcgagacagacaccaacctgaacttccagaacctgagcgtgatcggcttcagaatcctgctgctgaaagtggccggctttaacctgctgatgaccctgcggctgtggtccagctaa

SEQ ID NO: 36046 - DNA, 2319 bp, synthetic construct
  source 1..2319: mol_type = other DNA
atggccttaccagtgaccgccttgctcctgccgctggccttgctgctccacgccgccaggccggagatcgtgctgacacagtctcccgccacactgtcactgtctccaggcgaaagagccacactgagctgtagagccagccagagcgtgtcctcttacctggcctggtatcagcagaagcctggacaggctccccggctgctgatctacgatgccagcaatagagccacaggcatccccgccagattttctggctctggcagcggcaccgatttcaccctgaccataagcagcctggaacctgaggacttcgccgtgtactactgccagcagagaagcaactggcctcctacattcggccagggcaccaaggtggaaatcaaactcgaggacctgaagaacgtgttcccacctgaggtggccgtgttcgagcctagcgaggccgagatcagccacacccagaaagccaccctcgtgtgcctggctaccggcttctaccccgaccatgtggaactgtcttggtgggtcaacggcaaagaggtgcacagcggcgtgtgtaccgacccccagccactgaaagaacagcccgccctgaacgacagccggtactgcctgagcagcagactgagagtgtccgccaccttctggcagaacccccggaaccacttcagatgccaggtgcagttctacggcctgagcgagaacgacgagtggacccaggacagagccaagcccgtgacccagatcgtgtctgccgaagcctggggcagagccgattgcggctttaccagcgagagctaccagcagggcgtgctgagcgccaccatcctgtacgagatcctgctgggcaaggccaccctgtacgccgtgctggtgtctgccctggtgctgatggctatggtcaagcggaaggacagccggggaagggccaagcgatctggatctggagcaacaaacttctcactactcaaacaagcaggtgacgtggaggagaatcccgggcctactagtaccatggactggatttggcgcatccttttccttgtcggcgctgctaccggcgcccattccgggcccgaggtgcagctggttgaatctggcggaggatctgttcaggctggcggctctctgagactgtcttgtgccgccagcggctacacctacagcatcaactgcatgggctggttcagacaggcccctggcaaagagagagaaggcgttgccgccatctctaccggcggaggcagaaccgattaccgggattctgtgaagggcagattcaccatcagccaggacaacgccaagaacaccgtgtacctccagatgaacagcctgaagcctgaggacaccgccatgtactactgtgccggcaagaccacctatcctggctacggatgtggcctgggcagaagcgcctacaattattggggccagggcacccaagtgaccgtgtcatctggatccggcggcggaggatctggcggaggcggatctgggggcggaggctctttcgaacaactccagctgcaagagtctggccccggactggtcaagcctagcgaaacactgagcctgacctgtaccgtgtctggcggcagcatcagcagcagctcttattggtggggctggaccagacagcctcctggcagaggactggaatggatcggcaccatgtactacagcggcaacatctactacaaccccagcctccagagccgggccaccatctctgtggacaccagcaagaaccagttcagcctgaagctgagcagcgtgacagccgccgataccgccgtgtattattgcgccagacatgtgggctacagctacggcagacggttctggtacttcgacctgtggggcagaggcaccctggtcacagtttcttctacgcgtatccagaaccctgatcctgccgtgtaccagctgcgggatagcaagagcagcgacaagagcgtgtgtctgttcaccgacttcgacagccagaccaacgtgtcccagagcaaggactccgacgtgtacatcaccgataagtgcgtgctggacatgcggagcatggacttcaagagcaactccgccgtggcctggtccaacaagtccgatttcgcctgcgccaacgccttcaacaacagcattatccccgaggacacattcttcccaagccccgagagcagctgcgacgtgaagctggtggaaaagagcttcgagacagacaccaacctgaacttccagaacctgagcgtgatcggcttcagaatcctgctgctgaaagtggccggctttaacctgctgatgaccctgcggctgtggtccagctaa

SEQ ID NO: 36047 - DNA, 1875 bp, synthetic construct
  source 1..1875: mol_type = other DNA
atggccttaccagtgaccgccttgctcctgccgctggccttgctgctccacgccgccaggccggagatcgtgctgacacagtctcccgccacactgtcactgtctccaggcgaaagagccacactgagctgtagagccagccagagcgtgtcctcttacctggcctggtatcagcagaagcctggacaggctccccggctgctgatctacgatgccagcaatagagccacaggcatccccgccagattttctggctctggcagcggcaccgatttcaccctgaccataagcagcctggaacctgaggacttcgccgtgtactactgccagcagagaagcaactggcctcctacattcggccagggcaccaaggtggaaatcaaactcgaggacctgaagcacgtgttcccacctgaggtggccgtgttcgagcctagcgacgccgagatctggcacacccagaaagccaccctcgtgtgcctggctaccggcttctaccccgaccatgtggaactgtcttggtgggtcaacggcaaagaggtgcacagcggcgtgtctaccgacccccagccactgaaagaacagcccgccctgaacgacagccggtactgcctgagcagcagactgagagtgtccgccaccttctggcagaacccccggaaccacttcagatgccaggtgcagttctacggcctgagcgagaacgacgagtggacccaggacagagccaagcccgtgacccagatcgtgtctgccgaagcctggggcagagccgattgcggctttaccagcgagagctaccagcagggcgtgctgagcgccaccatcctgtacgagatcctgctgggcaaggccaccctgtacgccgtgctggtgtctgccctggtgctgatggctatggtcaagcggaaggacagccggggaagggccaagcgatctggatctggagcaacaaacttctcactactcaaacaagcaggtgacgtggaggagaatcccgggcctactagtatggactggatttggcgcatccttttccttgtcggcgctgctaccggcgcgcattccttcgaacaactccagctgcaagagtctggccccggactggtcaagcctagcgaaacactgagcctgacctgtaccgtgtctggcggcagcatcagcagcagctcttattggtggggctggaccagacagcctcctggcagaggactggaatggatcggcaccatgtactacagcggcaacatctactacaaccccagcctccagagccgggccaccatctctgtggacaccagcaagaaccagttcagcctgaagctgagcagcgtgacagccgccgataccgccgtgtattattgcgccagacatgtgggctacagctacggcagacggttctggtacttcgacctgtggggcagaggcaccctggtcacagtttcttctacgcgtatccagaaccctgatcctgccgtgtaccagctgcgggatagcaagagcagcgacaagagcgtgtgtctgttcaccgacttcgacagccagaccaacgtgtcccagagcaaggactccgacgtgtacatcaccgataagaccgtgctggacatgcggagcatggacttcaagagcaactccgccgtggcctggtccagcaagtccgatttcgcctgcgccaacgccttcaacaacagcattatccccgaggacacattcttcccaagccccgagatggcctgcgacgtgaagctggtggaaaagagcttcgagacagacaccaacctgaacttccagaacctgctcgtgatctggctgagaatcctgctgctgaaagtggccggctttaacctgctgatgaccctgcggctgtggtccagc

SEQ ID NO: 36048 - DNA, 1875 bp, synthetic construct
  source 1..1875: mol_type = other DNA
atggccttaccagtgaccgccttgctcctgccgctggccttgctgctccacgccgccaggccggagatcgtgctgacacagtctcccgccacactgtcactgtctccaggcgaaagagccacactgagctgtagagccagccagagcgtgtcctcttacctggcctggtatcagcagaagcctggacaggctccccggctgctgatctacgatgccagcaatagagccacaggcatccccgccagattttctggctctggcagcggcaccgatttcaccctgaccataagcagcctggaacctgaggacttcgccgtgtactactgccagcagagaagcaactggcctcctacattcggccagggcaccaaggtggaaatcaaactcgaggacctgaagcacgtgttcccacctgaggtggccgtgttcgagcctagcgacgccgagatctggcacacccagaaagccaccctcgtgtgcctggctaccggcttctaccccgaccatgtggaactgtcttggtgggtcaacggcaaagaggtgcacagcggcgtgtctaccgacccccagccactgaaagaacagcccgccctgaacgacagccggtactgcctgagcagcagactgagagtgtccgccaccttctggcagaacccccggaaccacttcagatgccaggtgcagttctacggcctgagcgagaacgacgagtggacccaggacagagccaagcccgtgacccagatcgtgtctgccgaagcctggggcagagccgattgcggctttaccagcgagagctaccagcagggcgtgctgagcgccaccatcctgtacgagatcctgctgggcaaggccaccctgtacgccgtgctggtgtctgccctggtgctgatggctatggtcaagcggaaggacagccggggaagggccaagcgatctggatctggagcaacaaacttctcactactcaaacaagcaggtgacgtggaggagaatcccgggcctactagtatggactggatttggcgcatccttttccttgtcggcgctgctaccggcgcgcattccttcgaacaactccagctgcaagagtctggccccggactggtcaagcctagcgaaacactgagcctgacctgtaccgtgtctggcggcagcatcagcagcagctcttattggtggggctggaccagacagcctcctggcagaggactggaatggatcggcaccatgtactacagcggcaacatctactacaaccccagcctccagagccgggccaccatctctgtggacaccagcaagaaccagttcagcctgaagctgagcagcgtgacagccgccgataccgccgtgtattattgcgccagacatgtgggctacagctacggcagacggttctggtacttcgacctgtggggcagaggcaccctggtcacagtttcttctacgcgtatccagaaccctgatcctgccgtgtaccagctgcgggatagcaagagcagcgacaagagcgtgtgtctgttcaccgacttcgacagccagaccaacgtgtcccagagcaaggactccgacgtgtacatcaccgataagaccgtgctggacatgcggagcatggacttcaagagcaactccgccgtggcctggtccaccaagtccgatttcgcctgcgccaacgccttcaacaacagcattatccccgaggacacattcttcccaagccccgaggtggtgtgcgacgtgaagctggtggaaaagagcttcgagacagacaccaacctgaacttccagaacctggtggtgatcggcgccagaatcctgctgctgaaagtggccggctttaacctgctgatgaccctgcggctgtggtccagc

SEQ ID NO: 36049 - DNA, 1875 bp, synthetic construct
  source 1..1875: mol_type = other DNA
atggccttaccagtgaccgccttgctcctgccgctggccttgctgctccacgccgccaggccggagatcgtgctgacacagtctcccgccacactgtcactgtctccaggcgaaagagccacactgagctgtagagccagccagagcgtgtcctcttacctggcctggtatcagcagaagcctggacaggctccccggctgctgatctacgatgccagcaatagagccacaggcatccccgccagattttctggctctggcagcggcaccgatttcaccctgaccataagcagcctggaacctgaggacttcgccgtgtactactgccagcagagaagcaactggcctcctacattcggccagggcaccaaggtggaaatcaaactcgaggacctgaagaacgtgttcccacctgaggtggccgtgttcgagcctagcaaggccgagatcagcagaacccagaaagccaccctcgtgtgcctggctaccggcttctaccctcctcatgtggaactgtcttggtgggtcaacggcaaagaggtgcacgacggcgtgtgtaccgacccccagccactgaaagaacagcccgccctgaacgacagccggtactgcctgagcagcagactgagagtgtccgccaccttctggcagaacccccggaaccacttcagatgccaggtgcagttctacggcctgagcgagaacgacgagtggacccaggacagagccaagcccgtgacccagatcgtgtctgccgaagcctggggcagagccgattgcggctttaccagcgagagctaccagcagggcgtgctgagcgccaccatcctgtacgagatcctgctgggcaaggccaccctgtacgccgtgctggtgtctgccctggtgctgatggctatggtcaagcggaaggacagccggggaagggccaagcgatctggatctggagcaacaaacttctcactactcaaacaagcaggtgacgtggaggagaatcccgggcctactagtatggactggatttggcgcatccttttccttgtcggcgctgctaccggcgcgcattccttcgaacaactccagctgcaagagtctggccccggactggtcaagcctagcgaaacactgagcctgacctgtaccgtgtctggcggcagcatcagcagcagctcttattggtggggctggaccagacagcctcctggcagaggactggaatggatcggcaccatgtactacagcggcaacatctactacaaccccagcctccagagccgggccaccatctctgtggacaccagcaagaaccagttcagcctgaagctgagcagcgtgacagccgccgataccgccgtgtattattgcgccagacatgtgggctacagctacggcagacggttctggtacttcgacctgtggggcagaggcaccctggtcacagtttcttctacgcgtatccagaaccctgatcctgccgtgtaccagctgcgggatagcaagagcagcgacaagttcgtgtgtctgttcaccgacttcgacagccagatcaacgtgtcccagagcaaggactccgacgtgtacatcaccgataagtgcgtgctggacatgcggagcatggacttcaagagcaactccgccgtggcctggtccaacaagtccgatttcacctgcgccaacgccttcaacaacagcattatccccgaggacacattcttcccaagccccgagagcagctgcgacgtgaagctggtggaaaagagcttcgagacagacaccaacctgaacttccagaacctgagcgtgatcggcttcagaatcctgctgctgaaagtggccggctttaacctgctgatgaccctgcggctgtggtccagc

SEQ ID NO: 36050 - DNA, 2301 bp, synthetic construct
  source 1..2301: mol_type = other DNA
atggccttaccagtgaccgccttgctcctgccgctggccttgctgctccacgccgccaggccggagatcgtgctgacacagtctcccgccacactgtcactgtctccaggcgaaagagccacactgagctgtagagccagccagagcgtgtcctcttacctggcctggtatcagcagaagcctggacaggctccccggctgctgatctacgatgccagcaatagagccacaggcatccccgccagattttctggctctggcagcggcaccgatttcaccctgaccataagcagcctggaacctgaggacttcgccgtgtactactgccagcagagaagcaactggcctcctacattcggccagggcaccaaggtggaaatcaaactcgaggacctgaagaacgtgttcccacctgaggtggccgtgttcgagcctagcgaggccgagatcagccacacccagaaagccaccctcgtgtgcctggctaccggcttctaccccgaccatgtggaactgtcttggtgggtcaacggcaaagaggtgcacagcggcgtgtgtaccgacccccagccactgaaagaacagcccgccctgaacgacagccggtactgcctgagcagcagactgagagtgtccgccaccttctggcagaacccccggaaccacttcagatgccaggtgcagttctacggcctgagcgagaacgacgagtggacccaggacagagccaagcccgtgacccagatcgtgtctgccgaagcctggggcagagccgattgcggctttaccagcgagagctaccagcagggcgtgctgagcgccaccatcctgtacgagatcctgctgggcaaggccaccctgtacgccgtgctggtgtctgccctggtgctgatggctatggtcaagcggaaggacagccggggaagggccaagcgatctggatctggagcaacaaacttctcactactcaaacaagcaggtgacgtggaggagaatcccgggcctactagtaccatggactggatttggcgcatccttttccttgtcggcgctgctaccggcgcccattccgggccccaggtgcagctccaagaaagcggacccggactggttaagccctctcagaccctgtctctgacctgcacagttagcggagccagcattaccacaggcgagtattattggaattggtttcggcagccaccaggcaaggggcttgagtggatgggtgctattgctgcctctggcagcaccacctactctcccagctttgagagcagaacctccatcagccgggacacctccaaaaaccagttctctctgaagctgtcctccgtgaccgctgctgacaccgccgtctattattgtggccggtctttcggcgtggcagctgtgaccacaggacagaacagaggccagggaacacttgtgaccgtgtcctctggatccggcggcggaggatctggcggaggcggatctgggggcggaggctctttcgaacaactccagctgcaagagtctggccccggactggtcaagcctagcgaaacactgagcctgacctgtaccgtgtctggcggcagcatcagcagcagctcttattggtggggctggaccagacagcctcctggcagaggactggaatggatcggcaccatgtactacagcggcaacatctactacaaccccagcctccagagccgggccaccatctctgtggacaccagcaagaaccagttcagcctgaagctgagcagcgtgacagccgccgataccgccgtgtattattgcgccagacatgtgggctacagctacggcagacggttctggtacttcgacctgtggggcagaggcaccctggtcacagtttcttctacgcgtatccagaaccctgatcctgccgtgtaccagctgcgggatagcaagagcagcgacaagagcgtgtgtctgttcaccgacttcgacagccagaccaacgtgtcccagagcaaggactccgacgtgtacatcaccgataagtgcgtgctggacatgcggagcatggacttcaagagcaactccgccgtggcctggtccaacaagtccgatttcgcctgcgccaacgccttcaacaacagcattatccccgaggacacattcttcccaagccccgagagcagctgcgacgtgaagctggtggaaaagagcttcgagacagacaccaacctgaacttccagaacctgagcgtgatcggcttcagaatcctgctgctgaaagtggccggctttaacctgctgatgaccctgcggctgtggtccagc

SEQ ID NO: 36051 - DNA, 2724 bp, synthetic construct
  source 1..2724: mol_type = other DNA
atggccttaccagtgaccgccttgctcctgccgctggccttgctgctccacgccgccaggccgcaggttcagctgcaagagtctggccctggcctggtcaagcctagccaaacactgagcctgacctgtaccgtgtctggcggctctatcaccaccggcgagttctactggaactggttcagacagcctcctggcaaaggactggaatggatgggagccattgccgccagcggcagcacaacatacagccctagcttcgagagccggaccagcatcagcagagacaccagcaagaatcagttcagcctgaagctgagcagcgtgacagccgccgatacagccgtgtattactgcggcagatcctttggagtggccgccgtgacaaccggccagaatagaggacagggcaccctggtcacagtgtctagcggtaccggcggaggcggatctggcggcggaggtagcggtggcggaggatctgaattcgagatcgtgctgacacagtctcccgccacactgtcactgtctccaggcgaaagagccacactgagctgtagagccagccagagcgtgtcctcttacctggcctggtatcagcagaagcctggacaggctccccggctgctgatctacgatgccagcaatagagccacaggcatccccgccagattttctggctctggcagcggcaccgatttcaccctgaccataagcagcctggaacctgaggacttcgccgtgtactactgccagcagagaagcaactggcctcctacattcggccagggcaccaaggtggaaatcaaactcgagatccagaaccctgatcctgccgtgtaccagctgcgggatagcaagagcagcgacaagagcgtgtgtctgttcaccgacttcgacagccagaccaacgtgtcccagagcaaggactccgacgtgtacatcaccgataagtgcgtgctggacatgcggagcatggacttcaagagcaactccgccgtggcctggtccaacaagtccgatttcgcctgcgccaacgccttcaacaacagcattatccccgaggacacattcttcccaagcagcgacgtgccctgcgacgtgaagctggtggaaaagagcttcgagacagacaccaacctgaacttccagaacctgagcgtgatcggcttcagaatcctgctgctgaaagtggccggctttaacctgctgatgaccctgcggctgtggtccagccgcgccaagagaagcggatctggcgtgaagcagaccctgaatttcgacctgctgaagctggctggcgacgtggaatccaacccaggccctactagtaccatggactggatttggcgcatccttttccttgtcggcgctgctaccggcgcccattccgggcccgaagtgcaactggttgaatccggtggcggcctggtgcaacccggcggatctctcagacttagctgtgccgcctccggcagaaccttcacaatgggatggtacaggcaggctccagggaaagagagagagttcgtcgccgccatctctctgtctcccacactggcctactacgccgactctgtgaaaggccggttcaccatctccagagataatagcaagaacaccgtggtgctgcaaatgaactctctgagagccgaggatacagccctgtactattgtgccgctgaccggaagtccgtgatgagcatcagacccgattactggggacagggcacactggtcacagtgtctagtggatccggcggcggaggatctggcggaggcggatctgggggcggaggctctttcgaacaactccagctgcaagagtctggccccggactggtcaagcctagcgaaacactgagcctgacctgtaccgtgtctggcggcagcatcagcagcagctcttattggtggggctggaccagacagcctcctggcagaggactggaatggatcggcaccatgtactacagcggcaacatctactacaaccccagcctccagagccgggccaccatctctgtggacaccagcaagaaccagttcagcctgaagctgagcagcgtgacagccgccgataccgccgtgtattattgcgccagacatgtgggctacagctacggcagacggttctggtacttcgacctgtggggcagaggcaccctggtcacagtttcttctacgcgtgaggacctgaagaacgtgttcccacctgaggtggccgtgttcgagcctagcaaggccgagatcgcccacacccagaaagccaccctcgtgtgcctggctaccggcttctaccccgaccatgtggaactgtcttggtgggtcaacggcaaagaggtgcacagcggcgtgtgtaccgacccccagccactgaaagaacagcccgccctgaacgacagccggtactgcctgagcagcagactgagagtgtccgccaccttctggcagaacccccggaaccacttcagatgccaggtgcagttctacggcctgagcgagaacgacgagtggacccaggacagagccaagcccgtgacccagatcgtgtctgccgaagcctggggcagagccgattgcggcatcaccagcgccagctaccaccagggcgtgctgagcgccaccatcctgtacgagatcctgctgggcaaggccaccctgtacgccgtgctggtgtctgccctggtgctgatggctatggtcaagcggaaggacagccgggga

SEQ ID NO: 36052 - DNA, 2313 bp, synthetic construct
  source 1..2313: mol_type = other DNA
atggccttaccagtgaccgccttgctcctgccgctggccttgctgctccacgccgccaggccgcaggttcagctgcaagagtctggccctggcctggtcaagcctagccaaacactgagcctgacctgtaccgtgtctggcggctctatcaccaccggcgagttctactggaactggttcagacagcctcctggcaaaggactggaatggatgggagccattgccgccagcggcagcacaacatacagccctagcttcgagagccggaccagcatcagcagagacaccagcaagaatcagttcagcctgaagctgagcagcgtgacagccgccgatacagccgtgtattactgcggcagatcctttggagtggccgccgtgacaaccggccagaatagaggacagggcaccctggtcacagtgtctagcggtaccggcggaggcggatctggcggcggaggtagcggtggcggaggatctgaattcgagatcgtgctgacacagtctcccgccacactgtcactgtctccaggcgaaagagccacactgagctgtagagccagccagagcgtgtcctcttacctggcctggtatcagcagaagcctggacaggctccccggctgctgatctacgatgccagcaatagagccacaggcatccccgccagattttctggctctggcagcggcaccgatttcaccctgaccataagcagcctggaacctgaggacttcgccgtgtactactgccagcagagaagcaactggcctcctacattcggccagggcaccaaggtggaaatcaaactcgagatccagaaccctgatcctgccgtgtaccagctgcgggatagcaagagcagcgacaagagcgtgtgtctgttcaccgacttcgacagccagaccaacgtgtcccagagcaaggactccgacgtgtacatcaccgataagtgcgtgctggacatgcggagcatggacttcaagagcaactccgccgtggcctggtccaacaagtccgatttcgcctgcgccaacgccttcaacaacagcattatccccgaggacacattcttcccaagcagcgacgtgccctgcgacgtgaagctggtggaaaagagcttcgagacagacaccaacctgaacttccagaacctgagcgtgatcggcttcagaatcctgctgctgaaagtggccggctttaacctgctgatgaccctgcggctgtggtccagccgcgccaagagaagcggatctggcgtgaagcagaccctgaatttcgacctgctgaagctggctggcgacgtggaatccaacccaggccctactagtaccatggactggatttggcgcatccttttccttgtcggcgctgctaccggcgcccattccttcgaacaactccagctgcaagagtctggccccggactggtcaagcctagcgaaacactgagcctgacctgtaccgtgtctggcggcagcatcagcagcagctcttattggtggggctggaccagacagcctcctggcagaggactggaatggatcggcaccatgtactacagcggcaacatctactacaaccccagcctccagagccgggccaccatctctgtggacaccagcaagaaccagttcagcctgaagctgagcagcgtgacagccgccgataccgccgtgtattattgcgccagacatgtgggctacagctacggcagacggttctggtacttcgacctgtggggcagaggcaccctggtcacagtttcttctacgcgtgaggacctgaagaacgtgttcccacctgaggtggccgtgttcgagcctagcaaggccgagatcgcccacacccagaaagccaccctcgtgtgcctggctaccggcttctaccccgaccatgtggaactgtcttggtgggtcaacggcaaagaggtgcacagcggcgtgtgtaccgacccccagccactgaaagaacagcccgccctgaacgacagccggtactgcctgagcagcagactgagagtgtccgccaccttctggcagaacccccggaaccacttcagatgccaggtgcagttctacggcctgagcgagaacgacgagtggacccaggacagagccaagcccgtgacccagatcgtgtctgccgaagcctggggcagagccgattgcggcatcaccagcgccagctaccaccagggcgtgctgagcgccaccatcctgtacgagatcctgctgggcaaggccaccctgtacgccgtgctggtgtctgccctggtgctgatggctatggtcaagcggaaggacagccgggga

SEQ ID NO: 36053 - DNA, 2712 bp, synthetic construct
  source 1..2712: mol_type = other DNA
atggccttaccagtgaccgccttgctcctgccgctggccttgctgctccacgccgccaggccggaagtgcagctggttgaatctggcggaggactggttcaggctggcggatctctgagactgtcttgtgccgccagcggcagaacctttagcatgggctggtttagacaggcccctggcaaagagagagagttcgtcgccgccatcacatactctggcggcagcccttactacgccgactctgtgaagggcagattcaccatcagccgggacaacgccaagaacaccgtgtacctccagatgaacagcctgaagcctgaggacaccgccgtgtactactgcgccgccaatccaacatacggcagcgactggaacgccgagaattggggccagggaacccaagtgacagtgtctagcggtaccggcggaggcggatctggcggcggaggtagcggtggcggaggatctgaattcgagatcgtgctgacacagtctcccgccacactgtcactgtctccaggcgaaagagccacactgagctgtagagccagccagagcgtgtcctcttacctggcctggtatcagcagaagcctggacaggctccccggctgctgatctacgatgccagcaatagagccacaggcatccccgccagattttctggctctggcagcggcaccgatttcaccctgaccataagcagcctggaacctgaggacttcgccgtgtactactgccagcagagaagcaactggcctcctacattcggccagggcaccaaggtggaaatcaaactcgaggacctgaagaacgtgttcccacctgaggtggccgtgttcgagcctagcgaggccgagatcagccacacccagaaagccaccctcgtgtgcctggctaccggcttctaccccgaccatgtggaactgtcttggtgggtcaacggcaaagaggtgcacagcggcgtgtgtaccgacccccagccactgaaagaacagcccgccctgaacgacagccggtactgcctgagcagcagactgagagtgtccgccaccttctggcagaacccccggaaccacttcagatgccaggtgcagttctacggcctgagcgagaacgacgagtggacccaggacagagccaagcccgtgacccagatcgtgtctgccgaagcctggggcagagccgattgcggctttaccagcgagagctaccagcagggcgtgctgagcgccaccatcctgtacgagatcctgctgggcaaggccaccctgtacgccgtgctggtgtctgccctggtgctgatggctatggtcaagcggaaggacagccggggaagggccaagcgatctggatctggagcaacaaacttctcactactcaaacaagcaggtgacgtggaggagaatcccgggcctactagtaccatggactggatttggcgcatccttttccttgtcggcgctgctaccggcgcccattccgggccccaggtgcagctccaagaaagcggacccggactggttaagccctctcagaccctgtctctgacctgcacagttagcggagccagcattaccacaggcgagtattattggaattggtttcggcagccaccaggcaaggggcttgagtggatgggtgctattgctgcctctggcagcaccacctactctcccagctttgagagcagaacctccatcagccgggacacctccaaaaaccagttctctctgaagctgtcctccgtgaccgctgctgacaccgccgtctattattgtggccggtctttcggcgtggcagctgtgaccacaggacagaacagaggccagggaacacttgtgaccgtgtcctctggatccggcggcggaggatctggcggaggcggatctgggggcggaggctctttcgaacaactccagctgcaagagtctggccccggactggtcaagcctagcgaaacactgagcctgacctgtaccgtgtctggcggcagcatcagcagcagctcttattggtggggctggaccagacagcctcctggcagaggactggaatggatcggcaccatgtactacagcggcaacatctactacaaccccagcctccagagccgggccaccatctctgtggacaccagcaagaaccagttcagcctgaagctgagcagcgtgacagccgccgataccgccgtgtattattgcgccagacatgtgggctacagctacggcagacggttctggtacttcgacctgtggggcagaggcaccctggtcacagtttcttctacgcgtatccagaaccctgatcctgccgtgtaccagctgcgggatagcaagagcagcgacaagagcgtgtgtctgttcaccgacttcgacagccagaccaacgtgtcccagagcaaggactccgacgtgtacatcaccgataagtgcgtgctggacatgcggagcatggacttcaagagcaactccgccgtggcctggtccaacaagtccgatttcgcctgcgccaacgccttcaacaacagcattatccccgaggacacattcttcccaagccccgagagcagctgcgacgtgaagctggtggaaaagagcttcgagacagacaccaacctgaacttccagaacctgagcgtgatcggcttcagaatcctgctgctgaaagtggccggctttaacctgctgatgaccctgcggctgtggtccagc

SEQ ID NO: 36054 - DNA, 2733 bp, synthetic construct
  source 1..2733: mol_type = other DNA
atggccttaccagtgaccgccttgctcctgccgctggccttgctgctccacgccgccaggccggaagtgcagctggttgaatctggcggaggactggttcaggctggcggatctctgagactgtcttgtgccgccagcggcagaacctttagcatgggctggtttagacaggcccctggcaaagagagagagttcgtcgccgccatcacatactctggcggcagcccttactacgccgactctgtgaagggcagattcaccatcagccgggacaacgccaagaacaccgtgtacctccagatgaacagcctgaagcctgaggacaccgccgtgtactactgcgccgccaatccaacatacggcagcgactggaacgccgagaattggggccagggaacccaagtgacagtgtctagcggtaccggcggaggcggatctggcggcggaggtagcggtggcggaggatctgaattcgagatcgtgctgacacagtctcccgccacactgtcactgtctccaggcgaaagagccacactgagctgtagagccagccagagcgtgtcctcttacctggcctggtatcagcagaagcctggacaggctccccggctgctgatctacgatgccagcaatagagccacaggcatccccgccagattttctggctctggcagcggcaccgatttcaccctgaccataagcagcctggaacctgaggacttcgccgtgtactactgccagcagagaagcaactggcctcctacattcggccagggcaccaaggtggaaatcaaactcgagatccagaaccctgatcctgccgtgtaccagctgcgggatagcaagagcagcgacaagagcgtgtgtctgttcaccgacttcgacagccagaccaacgtgtcccagagcaaggactccgacgtgtacatcaccgataagtgcgtgctggacatgcggagcatggacttcaagagcaactccgccgtggcctggtccaacaagtccgatttcgcctgcgccaacgccttcaacaacagcattatccccgaggacacattcttcccaagcagcgacgtgccctgcgacgtgaagctggtggaaaagagcttcgagacagacaccaacctgaacttccagaacctgagcgtgatcggcttcagaatcctgctgctgaaagtggccggctttaacctgctgatgaccctgcggctgtggtccagccgcgccaagagaagcggatctggcgtgaagcagaccctgaatttcgacctgctgaagctggctggcgacgtggaatccaacccaggccctactagtaccatggactggatttggcgcatccttttccttgtcggcgctgctaccggcgcccattccgggccccaggtgcagctggttgaatctggcggaggactggttcagcctggcggatctctgagactgtcttgtgccgccagcggcaacatcaacagcagaaactgcatgggctggttcagacaggcccctggcaagggaagagaaggcgtggcagctatcggccaagtgaccggcagaacctactacgtggacagcgtgaagggcagattcaccatcagcctggacaacagcaagaacaccctgtacctccagatgaacagcctgagagccgaggacaccgccgtgtactattgtgctgctgcccctggctgtctgctgtctgcacttagaagcgccgactacagaaactggggccagggcacactggtcaccgtttcttctggatccggcggcggaggatctggcggaggcggatctgggggcggaggctctttcgaacaactccagctgcaagagtctggccccggactggtcaagcctagcgaaacactgagcctgacctgtaccgtgtctggcggcagcatcagcagcagctcttattggtggggctggaccagacagcctcctggcagaggactggaatggatcggcaccatgtactacagcggcaacatctactacaaccccagcctccagagccgggccaccatctctgtggacaccagcaagaaccagttcagcctgaagctgagcagcgtgacagccgccgataccgccgtgtattattgcgccagacatgtgggctacagctacggcagacggttctggtacttcgacctgtggggcagaggcaccctggtcacagtttcttctacgcgtgaggacctgaagaacgtgttcccacctgaggtggccgtgttcgagcctagcaaggccgagatcgcccacacccagaaagccaccctcgtgtgcctggctaccggcttctaccccgaccatgtggaactgtcttggtgggtcaacggcaaagaggtgcacagcggcgtgtgtaccgacccccagccactgaaagaacagcccgccctgaacgacagccggtactgcctgagcagcagactgagagtgtccgccaccttctggcagaacccccggaaccacttcagatgccaggtgcagttctacggcctgagcgagaacgacgagtggacccaggacagagccaagcccgtgacccagatcgtgtctgccgaagcctggggcagagccgattgcggcatcaccagcgccagctaccaccagggcgtgctgagcgccaccatcctgtacgagatcctgctgggcaaggccaccctgtacgccgtgctggtgtctgccctggtgctgatggctatggtcaagcggaaggacagccgggga

SEQ ID NO: 36055 - DNA, 2721 bp, synthetic construct
  source 1..2721: mol_type = other DNA
atggccttaccagtgaccgccttgctcctgccgctggccttgctgctccacgccgccaggccggaagtgcagctggttgaatctggcggaggactggttcaggctggcggatctctgagactgtcttgtgccgccagcggcagaacctttagcatgggctggtttagacaggcccctggcaaagagagagagttcgtcgccgccatcacatactctggcggcagcccttactacgccgactctgtgaagggcagattcaccatcagccgggacaacgccaagaacaccgtgtacctccagatgaacagcctgaagcctgaggacaccgccgtgtactactgcgccgccaatccaacatacggcagcgactggaacgccgagaattggggccagggaacccaagtgacagtgtctagcggtaccggcggaggcggatctggcggcggaggtagcggtggcggaggatctgaattcgagatcgtgctgacacagtctcccgccacactgtcactgtctccaggcgaaagagccacactgagctgtagagccagccagagcgtgtcctcttacctggcctggtatcagcagaagcctggacaggctccccggctgctgatctacgatgccagcaatagagccacaggcatccccgccagattttctggctctggcagcggcaccgatttcaccctgaccataagcagcctggaacctgaggacttcgccgtgtactactgccagcagagaagcaactggcctcctacattcggccagggcaccaaggtggaaatcaaactcgaggacctgaagaacgtgttcccacctgaggtggccgtgttcgagcctagcgaggccgagatcagccacacccagaaagccaccctcgtgtgcctggctaccggcttctaccccgaccatgtggaactgtcttggtgggtcaacggcaaagaggtgcacagcggcgtgtgtaccgacccccagccactgaaagaacagcccgccctgaacgacagccggtactgcctgagcagcagactgagagtgtccgccaccttctggcagaacccccggaaccacttcagatgccaggtgcagttctacggcctgagcgagaacgacgagtggacccaggacagagccaagcccgtgacccagatcgtgtctgccgaagcctggggcagagccgattgcggctttaccagcgagagctaccagcagggcgtgctgagcgccaccatcctgtacgagatcctgctgggcaaggccaccctgtacgccgtgctggtgtctgccctggtgctgatggctatggtcaagcggaaggacagccggggaagggccaagcgatctggatctggagcaacaaacttctcactactcaaacaagcaggtgacgtggaggagaatcccgggcctactagtaccatggactggatttggcgcatccttttccttgtcggcgctgctaccggcgcccattccgggccccaggtgcagctggttgaatctggcggaggactggttcagcctggcggatctctgagactgtcttgtgccgccagcggcaacatcaacagcagaaactgcatgggctggttcagacaggcccctggcaagggaagagaaggcgtggcagctatcggccaagtgaccggcagaacctactacgtggacagcgtgaagggcagattcaccatcagcctggacaacagcaagaacaccctgtacctccagatgaacagcctgagagccgaggacaccgccgtgtactattgtgctgctgcccctggctgtctgctgtctgcacttagaagcgccgactacagaaactggggccagggcacactggtcaccgtttcttctggatccggcggcggaggatctggcggaggcggatctgggggcggaggctctttcgaacaactccagctgcaagagtctggccccggactggtcaagcctagcgaaacactgagcctgacctgtaccgtgtctggcggcagcatcagcagcagctcttattggtggggctggaccagacagcctcctggcagaggactggaatggatcggcaccatgtactacagcggcaacatctactacaaccccagcctccagagccgggccaccatctctgtggacaccagcaagaaccagttcagcctgaagctgagcagcgtgacagccgccgataccgccgtgtattattgcgccagacatgtgggctacagctacggcagacggttctggtacttcgacctgtggggcagaggcaccctggtcacagtttcttctacgcgtatccagaaccctgatcctgccgtgtaccagctgcgggatagcaagagcagcgacaagagcgtgtgtctgttcaccgacttcgacagccagaccaacgtgtcccagagcaaggactccgacgtgtacatcaccgataagtgcgtgctggacatgcggagcatggacttcaagagcaactccgccgtggcctggtccaacaagtccgatttcgcctgcgccaacgccttcaacaacagcattatccccgaggacacattcttcccaagccccgagagcagctgcgacgtgaagctggtggaaaagagcttcgagacagacaccaacctgaacttccagaacctgagcgtgatcggcttcagaatcctgctgctgaaagtggccggctttaacctgctgatgaccctgcggctgtggtccagc

SEQ ID NO: 36056 - DNA, 2721 bp, synthetic construct
  source 1..2721: mol_type = other DNA
atggccttaccagtgaccgccttgctcctgccgctggccttgctgctccacgccgccaggccggaagtgcaactggttgaatccggtggcggcctggtgcaagcaggcggatctctcagacttagctgtgccgcctccggcagaaccttcacaatgggatggtttaggcaggctccagggaaagagagagagttcgtcgccgccatctctctgtctcccacactggcctactacgccgactctgtgaaaggccggttcaccatctccagagataatgccaagaacaccgtggtgctgcaaatgaactctctgaaacccgaggatacagccctgtactattgtgccgctgaccggaagtccgtgatgagcatcagacccgattactggggacagggcacacaagtcacagtgtcctctggtaccggcggaggcggatctggcggcggaggtagcggtggcggaggatctgaattcgagatcgtgctgacacagtctcccgccacactgtcactgtctccaggcgaaagagccacactgagctgtagagccagccagagcgtgtcctcttacctggcctggtatcagcagaagcctggacaggctccccggctgctgatctacgatgccagcaatagagccacaggcatccccgccagattttctggctctggcagcggcaccgatttcaccctgaccataagcagcctggaacctgaggacttcgccgtgtactactgccagcagagaagcaactggcctcctacattcggccagggcaccaaggtggaaatcaaactcgaggacctgaagaacgtgttcccacctgaggtggccgtgttcgagcctagcgaggccgagatcagccacacccagaaagccaccctcgtgtgcctggctaccggcttctaccccgaccatgtggaactgtcttggtgggtcaacggcaaagaggtgcacagcggcgtgtgtaccgacccccagccactgaaagaacagcccgccctgaacgacagccggtactgcctgagcagcagactgagagtgtccgccaccttctggcagaacccccggaaccacttcagatgccaggtgcagttctacggcctgagcgagaacgacgagtggacccaggacagagccaagcccgtgacccagatcgtgtctgccgaagcctggggcagagccgattgcggctttaccagcgagagctaccagcagggcgtgctgagcgccaccatcctgtacgagatcctgctgggcaaggccaccctgtacgccgtgctggtgtctgccctggtgctgatggctatggtcaagcggaaggacagccggggaagggccaagcgatctggatctggagcaacaaacttctcactactcaaacaagcaggtgacgtggaggagaatcccgggcctactagtaccatggactggatttggcgcatccttttccttgtcggcgctgctaccggcgcccattccgggccccaggtgcagctggttgaatctggcggaggactggttcagcctggcggatctctgagactgtcttgtgccgccagcggcaacatcaacagcagaaactgcatgggctggttcagacaggcccctggcaagggaagagaaggcgtggcagctatcggccaagtgaccggcagaacctactacgtggacagcgtgaagggcagattcaccatcagcctggacaacagcaagaacaccctgtacctccagatgaacagcctgagagccgaggacaccgccgtgtactattgtgctgctgcccctggctgtctgctgtctgcacttagaagcgccgactacagaaactggggccagggcacactggtcaccgtttcttctggatccggcggcggaggatctggcggaggcggatctgggggcggaggctctttcgaacaactccagctgcaagagtctggccccggactggtcaagcctagcgaaacactgagcctgacctgtaccgtgtctggcggcagcatcagcagcagctcttattggtggggctggaccagacagcctcctggcagaggactggaatggatcggcaccatgtactacagcggcaacatctactacaaccccagcctccagagccgggccaccatctctgtggacaccagcaagaaccagttcagcctgaagctgagcagcgtgacagccgccgataccgccgtgtattattgcgccagacatgtgggctacagctacggcagacggttctggtacttcgacctgtggggcagaggcaccctggtcacagtttcttctacgcgtatccagaaccctgatcctgccgtgtaccagctgcgggatagcaagagcagcgacaagagcgtgtgtctgttcaccgacttcgacagccagaccaacgtgtcccagagcaaggactccgacgtgtacatcaccgataagtgcgtgctggacatgcggagcatggacttcaagagcaactccgccgtggcctggtccaacaagtccgatttcgcctgcgccaacgccttcaacaacagcattatccccgaggacacattcttcccaagccccgagagcagctgcgacgtgaagctggtggaaaagagcttcgagacagacaccaacctgaacttccagaacctgagcgtgatcggcttcagaatcctgctgctgaaagtggccggctttaacctgctgatgaccctgcggctgtggtccagc

SEQ ID NO: 36057 - DNA, 2733 bp, synthetic construct
  source 1..2733: mol_type = other DNA
atggccttaccagtgaccgccttgctcctgccgctggccttgctgctccacgccgccaggccgcaggttcagctgcaagagtctggccctggcctggtcaagcctagccaaacactgagcctgacctgtaccgtgtctggcggctctatcaccaccggcgagttctactggaactggttcagacagcctcctggcaaaggactggaatggatgggagccattgccgccagcggcagcacaacatacagccctagcttcgagagccggaccagcatcagcagagacaccagcaagaatcagttcagcctgaagctgagcagcgtgacagccgccgatacagccgtgtattactgcggcagatcctttggagtggccgccgtgacaaccggccagaatagaggacagggcaccctggtcacagtgtctagcggtaccggcggaggcggatctggcggcggaggtagcggtggcggaggatctgaattcgagatcgtgctgacacagtctcccgccacactgtcactgtctccaggcgaaagagccacactgagctgtagagccagccagagcgtgtcctcttacctggcctggtatcagcagaagcctggacaggctccccggctgctgatctacgatgccagcaatagagccacaggcatccccgccagattttctggctctggcagcggcaccgatttcaccctgaccataagcagcctggaacctgaggacttcgccgtgtactactgccagcagagaagcaactggcctcctacattcggccagggcaccaaggtggaaatcaaactcgaggacctgaagaacgtgttcccacctgaggtggccgtgttcgagcctagcgaggccgagatcagccacacccagaaagccaccctcgtgtgcctggctaccggcttctaccccgaccatgtggaactgtcttggtgggtcaacggcaaagaggtgcacagcggcgtgtgtaccgacccccagccactgaaagaacagcccgccctgaacgacagccggtactgcctgagcagcagactgagagtgtccgccaccttctggcagaacccccggaaccacttcagatgccaggtgcagttctacggcctgagcgagaacgacgagtggacccaggacagagccaagcccgtgacccagatcgtgtctgccgaagcctggggcagagccgattgcggctttaccagcgagagctaccagcagggcgtgctgagcgccaccatcctgtacgagatcctgctgggcaaggccaccctgtacgccgtgctggtgtctgccctggtgctgatggctatggtcaagcggaaggacagccggggaagggccaagcgatctggatctggagcaacaaacttctcactactcaaacaagcaggtgacgtggaggagaatcccgggcctactagtaccatggactggatttggcgcatccttttccttgtcggcgctgctaccggcgcccattccgggccccaggtgcagctggttgaatctggcggaggactggttcagcctggcggatctctgagactgtcttgtgccgccagcggcaacatcaacagcagaaactgcatgggctggttcagacaggcccctggcaagggaagagaaggcgtggcagctatcggccaagtgaccggcagaacctactacgtggacagcgtgaagggcagattcaccatcagcctggacaacagcaagaacaccctgtacctccagatgaacagcctgagagccgaggacaccgccgtgtactattgtgctgctgcccctggctgtctgctgtctgcacttagaagcgccgactacagaaactggggccagggcacactggtcaccgtttcttctggatccggcggcggaggatctggcggaggcggatctgggggcggaggctctttcgaacaactccagctgcaagagtctggccccggactggtcaagcctagcgaaacactgagcctgacctgtaccgtgtctggcggcagcatcagcagcagctcttattggtggggctggaccagacagcctcctggcagaggactggaatggatcggcaccatgtactacagcggcaacatctactacaaccccagcctccagagccgggccaccatctctgtggacaccagcaagaaccagttcagcctgaagctgagcagcgtgacagccgccgataccgccgtgtattattgcgccagacatgtgggctacagctacggcagacggttctggtacttcgacctgtggggcagaggcaccctggtcacagtttcttctacgcgtatccagaaccctgatcctgccgtgtaccagctgcgggatagcaagagcagcgacaagagcgtgtgtctgttcaccgacttcgacagccagaccaacgtgtcccagagcaaggactccgacgtgtacatcaccgataagtgcgtgctggacatgcggagcatggacttcaagagcaactccgccgtggcctggtccaacaagtccgatttcgcctgcgccaacgccttcaacaacagcattatccccgaggacacattcttcccaagccccgagagcagctgcgacgtgaagctggtggaaaagagcttcgagacagacaccaacctgaacttccagaacctgagcgtgatcggcttcagaatcctgctgctgaaagtggccggctttaacctgctgatgaccctgcggctgtggtccagc

SEQ ID NO: 36058 - DNA, 1461 bp, synthetic construct
  source 1..1461: mol_type = other DNA
atggccttaccagtgaccgccttgctcctgccgctggccttgctgctccacgccgccaggccggacatccagatgacacagagccctagcagcctgtctgccagcgtgggagacagagtgaccatcacatgcaaggccagcgaccacatcaacaactggctggcctggtatcagcagaagcctggcaaggcccctaagctgctgatctacggcgctaccacactggaaacaggcgtgcccagcagattttctggcagcggctctggcaccgacttcaccctgacaatatccagcctccagcctgaggacttcgccacctactactgtcagcagagctggaacaccccttggacattcggccagggcaccaaggtggaaatcaagagaggcggaggcggaagtggaggcggaggatctggcggcggaggctctgaagttcagctggttgaatctggcggcggactggttcaacctggcggatctctgagactgagctgtgccgcctctggctacacctttagcagctactgggtcaactgggttcgacaggcccctggcaaaggactggaatgggtcgcccaaatctatcccggcgacggcgacaccaactacaacggcaagttcaagggcagattcaccatcagccgggacaacagcaagaacaccctgtacctccagatgaactccctgagagccgaggacaccgccgtgtactattgtgccagatccatcaccaccgtcgtgggctgcgctatggattattggggccagggaaccctggtcaccgtgtcctctacgcgtaaaattgaagttatgtatcctcctccttacctagacaatgagaagagcaatggaaccattatccatgtgaaagggaaacacctttgtccaagtcccctatttcccggaccttctaagcccttttgggtgctggtggtggttgggggagtcctggcttgctatagcttgctagtaacagtggcctttattattttctgggtgaggagtaagaggagcaggctcctgcacagtgactacatgaacatgactccacgccgccccggacccacccgcaagcattaccagccctatgccccaccacgcgacttcgcagcctatcgctccagagtgaagttcagcaggagcgcagacgcccccgcgtaccagcagggccagaaccagctctataacgagctcaatctaggacgaagagaggagtacgatgttttggacaagagacgtggccgggaccctgagatggggggaaagccgagaaggaagaaccctcaggaaggcctgtacaatgaactgcagaaagataagatggcggaggcctacagtgagattgggatgaaaggcgagcgccggaggggcaaggggcacgatggcctttaccagggtctcagtacagccaccaaggacacctacgacgcccttcacatgcaggccctgccccctcgc

SEQ ID NO: 36059 - DNA, 1479 bp, synthetic construct
  source 1..1479: mol_type = other DNA
atggccttaccagtgaccgccttgctcctgccgctggccttgctgctccacgccgccaggccggacatccagatgacacagagccctagcagcctgtctgccagcgtgggagacagagtgaccatcacatgcaaggccagcgaccacatcaacaactggctggcctggtatcagcagaagcctggcaaggcccctaagctgctgatctacggcgctaccacactggaaacaggcgtgcccagcagattttctggcagcggctctggcaccgacttcaccctgacaatatccagcctccagcctgaggacttcgccacctactactgtcagcagagctggaacaccccttggacattcggccagggcaccaaggtggaaatcaagagaggcggaggcggaagtggaggcggaggatctggcggcggaggctctgaagttcagctggttgaatctggcggcggactggttcaacctggcggatctctgagactgagctgtgccgcctctggctacacctttagcagctactgggtcaactgggttcgacaggcccctggcaaaggactggaatgggtcgcccaaatctatcccggcgacggcgacaccaactacaacggcaagttcaagggcagattcaccatcagccgggacaacagcaagaacaccctgtacctccagatgaactccctgagagccgaggacaccgccgtgtactattgtgccagatccatcaccaccgtcgtgggctgcgctatggattattggggccagggaaccctggtcaccgtgtcctctacgcgtgcgaagcccaccacgacgccagcgccgcgaccaccaacaccggcgcccaccatcgcgtcgcagcccctgtccctgcgcccagaggcgtgccggccagcggcggggggcgcagtgcacacgagggggctggacttcgcctgtgacatctacatctgggcgcccttggccgggacttgtggggtccttctcctgtcactggttatcaccctttactgcaaacggggcagaaagaaactcctgtatatattcaaacaaccatttatgagaccagtacaaactactcaagaggaagatggctgtagctgccgatttccagaagaagaagaaggaggatgtgaactgagagtgaagttcagcaggagcgcagacgcccccgcgtaccagcagggccagaaccagctctataacgagctgaatctaggacgaagagaggagtacgatgttttggacaagagacgtggccgggaccctgagatggggggaaagccgagaaggaagaaccctcaggaaggcctgtacaatgaactgcagaaagataagatggcggaggcctacagtgagattgggatgaaaggcgagcgccggaggggcaaggggcacgatggcctttaccagggtctcagtacagccaccaaggacacctacgacgcccttcacatgcaggccctgccccctcgc

SEQ ID NO: 36060 - DNA, 1479 bp, synthetic construct
  source 1..1479: mol_type = other DNA
atggccttaccagtgaccgccttgctcctgccgctggccttgctgctccacgccgccaggccggaagttcagctggttgaatctggcggcggactggttcaacctggcggatctctgagactgagctgtgccgcctctggctacacctttagcagctactgggtcaactgggttcgacaggcccctggcaaaggactggaatgggtcgcccaaatctatcccggcgacggcgacaccaactacaacggcaagttcaagggcagattcaccatcagccgggacaacagcaagaacaccctgtacctccagatgaactccctgagagccgaggacaccgccgtgtactattgtgccagatccatcaccaccgtcgtgggctgcgctatggattattggggccagggaaccctggtcaccgtgtcctctggcggaggcggaagtggaggcggaggatctggcggcggaggctctgacatccagatgacacagagccctagcagcctgtctgccagcgtgggagacagagtgaccatcacatgcaaggccagcgaccacatcaacaactggctggcctggtatcagcagaagcctggcaaggcccctaagctgctgatctacggcgctaccacactggaaacaggcgtgcccagcagattttctggcagcggctctggcaccgacttcaccctgacaatatccagcctccagcctgaggacttcgccacctactactgtcagcagagctggaacaccccttggacattcggccagggcaccaaggtggaaatcaagagaacgcgtgcgaagcccaccacgacgccagcgccgcgaccaccaacaccggcgcccaccatcgcgtcgcagcccctgtccctgcgcccagaggcgtgccggccagcggcggggggcgcagtgcacacgagggggctggacttcgcctgtgacatctacatctgggcgcccttggccgggacttgtggggtccttctcctgtcactggttatcaccctttactgcaaacggggcagaaagaaactcctgtatatattcaaacaaccatttatgagaccagtacaaactactcaagaggaagatggctgtagctgccgatttccagaagaagaagaaggaggatgtgaactgagagtgaagttcagcaggagcgcagacgcccccgcgtaccagcagggccagaaccagctctataacgagctgaatctaggacgaagagaggagtacgatgttttggacaagagacgtggccgggaccctgagatggggggaaagccgagaaggaagaaccctcaggaaggcctgtacaatgaactgcagaaagataagatggcggaggcctacagtgagattgggatgaaaggcgagcgccggaggggcaaggggcacgatggcctttaccagggtctcagtacagccaccaaggacacctacgacgcccttcacatgcaggccctgccccctcgc

SEQ ID NO: 36061 - DNA, 1878 bp, synthetic construct
  source 1..1878: mol_type = other DNA
atggccttaccagtgaccgccttgctcctgccgctggccttgctgctccacgccgccaggccggacatccagatgacacagagccctagcagcctgtctgccagcgtgggagacagagtgaccatcacatgcaaggccagcgaccacatcaacaactggctggcctggtatcagcagaagcctggcaaggcccctaagctgctgatctacggcgctaccacactggaaacaggcgtgcccagcagattttctggcagcggctctggcaccgacttcaccctgacaatatccagcctccagcctgaggacttcgccacctactactgtcagcagagctggaacaccccttggacattcggccagggcaccaaggtggaaatcaagagactcgagatccagaaccctgatcctgccgtgtaccagctgcgggatagcaagagcagcgacaagagcgtgtgtctgttcaccgacttcgacagccagaccaacgtgtcccagagcaaggactccgacgtgtacatcaccgataagtgcgtgctggacatgcggagcatggacttcaagagcaactccgccgtggcctggtccaacaagtccgatttcgcctgcgccaacgccttcaacaacagcattatccccgaggacacattcttcccaagcagcgacgtgccctgcgacgtgaagctggtggaaaagagcttcgagacagacaccaacctgaacttccagaacctgagcgtgatcggcttcagaatcctgctgctgaaagtggccggctttaacctgctgatgaccctgcggctgtggtccagccgcgccaagagaagcggatctggcgtgaagcagaccctgaatttcgacctgctgaagctggctggcgacgtggaatccaacccaggccctactagtatggactggatttggcgcatccttttccttgtcggcgctgctaccggcgcgcattccttcgaagaagttcagctggttgaatctggcggcggactggttcaacctggcggatctctgagactgagctgtgccgcctctggctacacctttagcagctactgggtcaactgggttcgacaggcccctggcaaaggactggaatgggtcgcccaaatctatcccggcgacggcgacaccaactacaacggcaagttcaagggcagattcaccatcagccgggacaacagcaagaacaccctgtacctccagatgaactccctgagagccgaggacaccgccgtgtactattgtgccagatccatcaccaccgtcgtgggctgcgctatggattattggggccagggaaccctggtcaccgtgtcctctacgcgtgaggacctgaagaacgtgttcccacctgaggtggccgtgttcgagcctagcaaggccgagatcgcccacacccagaaagccaccctcgtgtgcctggctaccggcttctaccccgaccatgtggaactgtcttggtgggtcaacggcaaagaggtgcacagcggcgtgtgtaccgacccccagccactgaaagaacagcccgccctgaacgacagccggtactgcctgagcagcagactgagagtgtccgccaccttctggcagaacccccggaaccacttcagatgccaggtgcagttctacggcctgagcgagaacgacgagtggacccaggacagagccaagcccgtgacccagatcgtgtctgccgaagcctggggcagagccgattgcggcatcaccagcgccagctaccaccagggcgtgctgagcgccaccatcctgtacgagatcctgctgggcaaggccaccctgtacgccgtgctggtgtctgccctggtgctgatggctatggtcaagcggaaggacagccgggga

SEQ ID NO: 36062 - DNA, 1866 bp, synthetic construct
  source 1..1866: mol_type = other DNA
atggccttaccagtgaccgccttgctcctgccgctggccttgctgctccacgccgccaggccggacatccagatgacacagagccctagcagcctgtctgccagcgtgggagacagagtgaccatcacatgcaaggccagcgaccacatcaacaactggctggcctggtatcagcagaagcctggcaaggcccctaagctgctgatctacggcgctaccacactggaaacaggcgtgcccagcagattttctggcagcggctctggcaccgacttcaccctgacaatatccagcctccagcctgaggacttcgccacctactactgtcagcagagctggaacaccccttggacattcggccagggcaccaaggtggaaatcaagagactcgaggacctgaagaacgtgttcccacctgaggtggccgtgttcgagcctagcaaggccgagatcgcccacacccagaaagccaccctcgtgtgcctggctaccggcttctaccccgaccatgtggaactgtcttggtgggtcaacggcaaagaggtgcacagcggcgtgtgtaccgacccccagccactgaaagaacagcccgccctgaacgacagccggtactgcctgagcagcagactgagagtgtccgccaccttctggcagaacccccggaaccacttcagatgccaggtgcagttctacggcctgagcgagaacgacgagtggacccaggacagagccaagcccgtgacccagatcgtgtctgccgaagcctggggcagagccgattgcggcatcaccagcgccagctaccaccagggcgtgctgagcgccaccatcctgtacgagatcctgctgggcaaggccaccctgtacgccgtgctggtgtctgccctggtgctgatggctatggtcaagcggaaggacagccggggaagggccaagcgatctggatctggagcaacaaacttctcactactcaaacaagcaggtgacgtggaggagaatcccgggcctactagtatggactggatttggcgcatccttttccttgtcggcgctgctaccggcgcgcattccttcgaagaagttcagctggttgaatctggcggcggactggttcaacctggcggatctctgagactgagctgtgccgcctctggctacacctttagcagctactgggtcaactgggttcgacaggcccctggcaaaggactggaatgggtcgcccaaatctatcccggcgacggcgacaccaactacaacggcaagttcaagggcagattcaccatcagccgggacaacagcaagaacaccctgtacctccagatgaactccctgagagccgaggacaccgccgtgtactattgtgccagatccatcaccaccgtcgtgggctgcgctatggattattggggccagggaaccctggtcaccgtgtcctctacgcgtatccagaaccctgatcctgccgtgtaccagctgcgggatagcaagagcagcgacaagagcgtgtgtctgttcaccgacttcgacagccagaccaacgtgtcccagagcaaggactccgacgtgtacatcaccgataagtgcgtgctggacatgcggagcatggacttcaagagcaactccgccgtggcctggtccaacaagtccgatttcgcctgcgccaacgccttcaacaacagcattatccccgaggacacattcttcccaagcagcgacgtgccctgcgacgtgaagctggtggaaaagagcttcgagacagacaccaacctgaacttccagaacctgagcgtgatcggcttcagaatcctgctgctgaaagtggccggctttaacctgctgatgaccctgcggctgtggtccagc

SEQ ID NO: 36063 - DNA, 1866 bp, synthetic construct
  source 1..1866: mol_type = other DNA
atggccttaccagtgaccgccttgctcctgccgctggccttgctgctccacgccgccaggccggacatccagatgacacagagccctagcagcctgtctgccagcgtgggagacagagtgaccatcacatgcaaggccagcgaccacatcaacaactggctggcctggtatcagcagaagcctggcaaggcccctaagctgctgatctacggcgctaccacactggaaacaggcgtgcccagcagattttctggcagcggctctggcaccgacttcaccctgacaatatccagcctccagcctgaggacttcgccacctactactgtcagcagagctggaacaccccttggacattcggccagggcaccaaggtggaaatcaagagactcgaggacctgaagaacgtgttcccacctgaggtggccgtgttcgagcctagcgaggccgagatcagccacacccagaaagccaccctcgtgtgcctggctaccggcttctaccccgaccatgtggaactgtcttggtgggtcaacggcaaagaggtgcacagcggcgtgtgtaccgacccccagccactgaaagaacagcccgccctgaacgacagccggtactgcctgagcagcagactgagagtgtccgccaccttctggcagaacccccggaaccacttcagatgccaggtgcagttctacggcctgagcgagaacgacgagtggacccaggacagagccaagcccgtgacccagatcgtgtctgccgaagcctggggcagagccgattgcggctttaccagcgagagctaccagcagggcgtgctgagcgccaccatcctgtacgagatcctgctgggcaaggccaccctgtacgccgtgctggtgtctgccctggtgctgatggctatggtcaagcggaaggacagccggggaagggccaagcgatctggatctggagcaacaaacttctcactactcaaacaagcaggtgacgtggaggagaatcccgggcctactagtatggactggatttggcgcatccttttccttgtcggcgctgctaccggcgcgcattccttcgaagaagttcagctggttgaatctggcggcggactggttcaacctggcggatctctgagactgagctgtgccgcctctggctacacctttagcagctactgggtcaactgggttcgacaggcccctggcaaaggactggaatgggtcgcccaaatctatcccggcgacggcgacaccaactacaacggcaagttcaagggcagattcaccatcagccgggacaacagcaagaacaccctgtacctccagatgaactccctgagagccgaggacaccgccgtgtactattgtgccagatccatcaccaccgtcgtgggctgcgctatggattattggggccagggaaccctggtcaccgtgtcctctacgcgtatccagaaccctgatcctgccgtgtaccagctgcgggatagcaagagcagcgacaagagcgtgtgtctgttcaccgacttcgacagccagaccaacgtgtcccagagcaaggactccgacgtgtacatcaccgataagtgcgtgctggacatgcggagcatggacttcaagagcaactccgccgtggcctggtccaacaagtccgatttcgcctgcgccaacgccttcaacaacagcattatccccgaggacacattcttcccaagccccgagagcagctgcgacgtgaagctggtggaaaagagcttcgagacagacaccaacctgaacttccagaacctgagcgtgatcggcttcagaatcctgctgctgaaagtggccggctttaacctgctgatgaccctgcggctgtggtccagc

SEQ ID NO: 36064 - DNA, 1878 bp, synthetic construct
  source 1..1878: mol_type = other DNA
atggccttaccagtgaccgccttgctcctgccgctggccttgctgctccacgccgccaggccggacatccagatgacacagagccctagcagcctgtctgccagcgtgggagacagagtgaccatcacatgcaaggccagcgaccacatcaacaactggctggcctggtatcagcagaagcctggcaaggcccctaagctgctgatctacggcgctaccacactggaaacaggcgtgcccagcagattttctggcagcggctctggcaccgacttcaccctgacaatatccagcctccagcctgaggacttcgccacctactactgtcagcagagctggaacaccccttggacattcggccagggcaccaaggtggaaatcaagagactcgagatccagaaccctgatcctgccgtgtaccagctgcgggatagcaagagcagcgacaagagcgtgtgtctgttcaccgacttcgacagccagaccaacgtgtcccagagcaaggactccgacgtgtacatcaccgataagtgcgtgctggacatgcggagcatggacttcaagagcaactccgccgtggcctggtccaacaagtccgatttcgcctgcgccaacgccttcaacaacagcattatccccgaggacacattcttcccaagccccgagagcagctgcgacgtgaagctggtggaaaagagcttcgagacagacaccaacctgaacttccagaacctgagcgtgatcggcttcagaatcctgctgctgaaagtggccggctttaacctgctgatgaccctgcggctgtggtccagccgcgccaagagaagcggatctggcgtgaagcagaccctgaatttcgacctgctgaagctggctggcgacgtggaatccaacccaggccctactagtatggactggatttggcgcatccttttccttgtcggcgctgctaccggcgcgcattccttcgaagaagttcagctggttgaatctggcggcggactggttcaacctggcggatctctgagactgagctgtgccgcctctggctacacctttagcagctactgggtcaactgggttcgacaggcccctggcaaaggactggaatgggtcgcccaaatctatcccggcgacggcgacaccaactacaacggcaagttcaagggcagattcaccatcagccgggacaacagcaagaacaccctgtacctccagatgaactccctgagagccgaggacaccgccgtgtactattgtgccagatccatcaccaccgtcgtgggctgcgctatggattattggggccagggaaccctggtcaccgtgtcctctacgcgtgaggacctgaagaacgtgttcccacctgaggtggccgtgttcgagcctagcgaggccgagatcagccacacccagaaagccaccctcgtgtgcctggctaccggcttctaccccgaccatgtggaactgtcttggtgggtcaacggcaaagaggtgcacagcggcgtgtgtaccgacccccagccactgaaagaacagcccgccctgaacgacagccggtactgcctgagcagcagactgagagtgtccgccaccttctggcagaacccccggaaccacttcagatgccaggtgcagttctacggcctgagcgagaacgacgagtggacccaggacagagccaagcccgtgacccagatcgtgtctgccgaagcctggggcagagccgattgcggctttaccagcgagagctaccagcagggcgtgctgagcgccaccatcctgtacgagatcctgctgggcaaggccaccctgtacgccgtgctggtgtctgccctggtgctgatggctatggtcaagcggaaggacagccgggga

SEQ ID NO: 36065 - DNA, 1914 bp, synthetic construct
  source 1..1914: mol_type = other DNA
atggccttaccagtgaccgccttgctcctgccgctggccttgctgctccacgccgccaggccgctcgaggaggacctgaagaacgtgttcccacctgaggtggccgtgttcgagcctagcaaggccgagatcgcccacacccagaaagccaccctcgtgtgcctggctaccggcttctaccccgaccatgtggaactgtcttggtgggtcaacggcaaagaggtgcacagcggcgtgtgtaccgacccccagccactgaaagaacagcccgccctgaacgacagccggtactgcctgagcagcagactgagagtgtccgccaccttctggcagaacccccggaaccacttcagatgccaggtgcagttctacggcctgagcgagaacgacgagtggacccaggacagagccaagcccgtgacccagatcgtgtctgccgaagcctggggcagagccgattgcggcatcaccagcgccagctaccaccagggcgtgctgagcgccaccatcctgtacgagatcctgctgggcaaggccaccctgtacgccgtgctggtgtctgccctggtgctgatggctatggtcaagcggaaggacagccggggaagggccaagcgatctggatctggagcaacaaacttctcactactcaaacaagcaggtgacgtggaggagaatcccgggcctactagcatggccttaccagtgaccgccttgctcctgccgctggccttgctgctccacgccgccaggccggacatccagatgacacagagccctagcagcctgtctgccagcgtgggagacagagtgaccatcacatgcaaggccagcgaccacatcaacaactggctggcctggtatcagcagaagcctggcaaggcccctaagctgctgatctacggcgctaccacactggaaacaggcgtgcccagcagattttctggcagcggctctggcaccgacttcaccctgacaatatccagcctccagcctgaggacttcgccacctactactgtcagcagagctggaacaccccttggacattcggccagggcaccaaggtggaaatcaagagaggcggaggcggaagtggaggcggaggatctggcggcggaggctctgaagttcagctggttgaatctggcggcggactggttcaacctggcggatctctgagactgagctgtgccgcctctggctacacctttagcagctactgggtcaactgggttcgacaggcccctggcaaaggactggaatgggtcgcccaaatctatcccggcgacggcgacaccaactacaacggcaagttcaagggcagattcaccatcagccgggacaacagcaagaacaccctgtacctccagatgaactccctgagagccgaggacaccgccgtgtactattgtgccagatccatcaccaccgtcgtgggctgcgctatggattattggggccagggaaccctggtcaccgtgtcctctacgcgtatccagaaccctgatcctgccgtgtaccagctgcgggatagcaagagcagcgacaagagcgtgtgtctgttcaccgacttcgacagccagaccaacgtgtcccagagcaaggactccgacgtgtacatcaccgataagtgcgtgctggacatgcggagcatggacttcaagagcaactccgccgtggcctggtccaacaagtccgatttcgcctgcgccaacgccttcaacaacagcattatccccgaggacacattcttcccaagcagcgacgtgccctgcgacgtgaagctggtggaaaagagcttcgagacagacaccaacctgaacttccagaacctgagcgtgatcggcttcagaatcctgctgctgaaagtggccggctttaacctgctgatgaccctgcggctgtggtccagc

SEQ ID NO: 36066 - DNA, 1935 bp, synthetic construct
  source 1..1935: mol_type = other DNA
atggccttaccagtgaccgccttgctcctgccgctggccttgctgctccacgccgccaggccgctcgagggctccggcgatcgccctgatcctgccgtgtaccagctgcgggatagcaagagcagcgacaagagcgtgtgtctgttcaccgacttcgacagccagaccaacgtgtcccagagcaaggactccgacgtgtacatcaccgataagtgcgtgctggacatgcggagcatggacttcaagagcaactccgccgtggcctggtccaacaagtccgatttcgcctgcgccaacgccttcaacaacagcattatccccgaggacacattcttcccaagccccgagagcagctgcgacgtgaagctggtggaaaagagcttcgagacagacaccaacctgaacttccagaacctgagcgtgatcggcttcagaatcctgctgctgaaagtggccggctttaacctgctgatgaccctgcggctgtggtccagctctagtcgcgccaagagaagcggatctggcgtgaagcagaccctgaatttcgacctgctgaagctggctggcgacgtggaatccaacccaggccccactagcatggccttaccagtgaccgccttgctcctgccgctggccttgctgctccacgccgccaggccggacatccagatgacacagagccctagcagcctgtctgccagcgtgggagacagagtgaccatcacatgcaaggccagcgaccacatcaacaactggctggcctggtatcagcagaagcctggcaaggcccctaagctgctgatctacggcgctaccacactggaaacaggcgtgcccagcagattttctggcagcggctctggcaccgacttcaccctgacaatatccagcctccagcctgaggacttcgccacctactactgtcagcagagctggaacaccccttggacattcggccagggcaccaaggtggaaatcaagagaggcggaggcggaagtggaggcggaggatctggcggcggaggctctgaagttcagctggttgaatctggcggcggactggttcaacctggcggatctctgagactgagctgtgccgcctctggctacacctttagcagctactgggtcaactgggttcgacaggcccctggcaaaggactggaatgggtcgcccaaatctatcccggcgacggcgacaccaactacaacggcaagttcaagggcagattcaccatcagccgggacaacagcaagaacaccctgtacctccagatgaactccctgagagccgaggacaccgccgtgtactattgtgccagatccatcaccaccgtcgtgggctgcgctatggattattggggccagggaaccctggtcaccgtgtcctctacgcgtgaggacctgaagaacgtgttcccacctgaggtggccgtgttcgagcctagcgaggccgagatcagccacacccagaaagccaccctcgtgtgcctggctaccggcttctaccccgaccatgtggaactgtcttggtgggtcaacggcaaagaggtgcacagcggcgtgtgtaccgacccccagccactgaaagaacagcccgccctgaacgacagccggtactgcctgagcagcagactgagagtgtccgccaccttctggcagaacccccggaaccacttcagatgccaggtgcagttctacggcctgagcgagaacgacgagtggacccaggacagagccaagcccgtgacccagatcgtgtctgccgaagcctggggcagagccgattgcggctttaccagcgagagctaccagcagggcgtgctgagcgccaccatcctgtacgagatcctgctgggcaaggccaccctgtacgccgtgctggtgtctgccctggtgctgatggctatggtcaagcggaaggacagccgggga

SEQ ID NO: 36067 - DNA, 1866 bp, synthetic construct
  source 1..1866: mol_type = other DNA
atggccttaccagtgaccgccttgctcctgccgctggccttgctgctccacgccgccaggccggacatccagatgacacagagccctagcagcctgtctgccagcgtgggagacagagtgaccatcacatgcaaggccagcgaccacatcaacaactggctggcctggtatcagcagaagcctggcaaggcccctaagctgctgatctacggcgctaccacactggaaacaggcgtgcccagcagattttctggcagcggctctggcaccgacttcaccctgacaatatccagcctccagcctgaggacttcgccacctactactgtcagcagagctggaacaccccttggacattcggccagggcaccaaggtggaaatcaagagactcgaggacctgaagaacgtgttcccacctgaggtggccgtgttcgagcctagcgaggccgagatcagccacacccagaaagccaccctcgtgtgcctggctaccggcttctaccccgaccatgtggaactgtcttggtgggtcaacggcaaagaggtgcacagcggcgtgtctaccgacccccagccactgaaagaacagcccgccctgaacgacagccggtactgcctgagcagcagactgagagtgtccgccaccttctggcagaacccccggaaccacttcagatgccaggtgcagttctacggcctgagcgagaacgacgagtggacccaggacagagccaagcccgtgacccagatcgtgtctgccgaagcctggggcagagccgattgcggctttaccagcgagagctaccagcagggcgtgctgagcgccaccatcctgtacgagatcctgctgggcaaggccaccctgtacgccgtgctggtgtctgccctggtgctgatggctatggtcaagcggaaggacagccggggaagggccaagcgatctggatctggagcaacaaacttctcactactcaaacaagcaggtgacgtggaggagaatcccgggcctactagtatggactggatttggcgcatccttttccttgtcggcgctgctaccggcgcgcattccttcgaagaagttcagctggttgaatctggcggcggactggttcaacctggcggatctctgagactgagctgtgccgcctctggctacacctttagcagctactgggtcaactgggttcgacaggcccctggcaaaggactggaatgggtcgcccaaatctatcccggcgacggcgacaccaactacaacggcaagttcaagggcagattcaccatcagccgggacaacagcaagaacaccctgtacctccagatgaactccctgagagccgaggacaccgccgtgtactattgtgccagatccatcaccaccgtcgtgggctgcgctatggattattggggccagggaaccctggtcaccgtgtcctctacgcgtatccagaaccctgatcctgccgtgtaccagctgcgggatagcaagagcagcgacaagagcgtgtgtctgttcaccgacttcgacagccagaccaacgtgtcccagagcaaggactccgacgtgtacatcaccgataagaccgtgctggacatgcggagcatggacttcaagagcaactccgccgtggcctggtccaacaagtccgatttcgcctgcgccaacgccttcaacaacagcattatccccgaggacacattcttcccaagccccgagagcagctgcgacgtgaagctggtggaaaagagcttcgagacagacaccaacctgaacttccagaacctgagcgtgatcggcttcagaatcctgctgctgaaagtggccggctttaacctgctgatgaccctgcggctgtggtccagc

SEQ ID NO: 36068 - DNA, 1890 bp, synthetic construct
  source 1..1890: mol_type = other DNA
atggccttaccagtgaccgccttgctcctgccgctggccttgctgctccacgccgccaggccggacatccagatgacacagagccctagcagcctgtctgccagcgtgggagacagagtgaccatcacatgcaaggccagcgaccacatcaacaactggctggcctggtatcagcagaagcctggcaaggcccctaagctgctgatctacggcgctaccacactggaaacaggcgtgcccagcagattttctggcagcggctctggcaccgacttcaccctgacaatatccagcctccagcctgaggacttcgccacctactactgtcagcagagctggaacaccccttggacattcggccagggcaccaaggtggaaatcaagagactcgaggacaagcagctggacgccgacgtgtcccccaagcctaccatcttcctgccctctatcgccgagacaaagctccagaaggccggcacctacctgtgcctgctggaaaagttcttcccagatgtgattaagatccactggcaggaaaagaagtccaacaccatcctgggcagccaggaaggcaacaccatgaagaccaacgacacctacatgaagttcagctggctgaccgtgcccgagaagtccctggacaaagaacacagatgcatcgtgcggcacgaaaacaacaagaacggcgtggaccaggaaatcatcttcccacccatcaagaccgatgtgattacaatggaccccaaggacaactgctccaaggacgccaacgataccctgctgctccagctgaccaacaccagcgcctactacatgtacttgttgctgctgctgaagtccgtggtgtacttcgccatcatcacatgctgcctgctgcggagaaccgccttctgctgcaacggcgagaagtctagggccaagcgatctggatctggagcaacaaacttctcactactcaaacaagcaggtgacgtggaggagaatcccgggcctactagtatggactggatttggcgcatccttttccttgtcggcgctgctaccggcgcgcattccttcgaagaagttcagctggttgaatctggcggcggactggttcaacctggcggatctctgagactgagctgtgccgcctctggctacacctttagcagctactgggtcaactgggttcgacaggcccctggcaaaggactggaatgggtcgcccaaatctatcccggcgacggcgacaccaactacaacggcaagttcaagggcagattcaccatcagccgggacaacagcaagaacaccctgtacctccagatgaactccctgagagccgaggacaccgccgtgtactattgtgccagatccatcaccaccgtcgtgggctgcgctatggattattggggccagggaaccctggtcaccgtgtcctctacgcgtagccagcctcacaccaagcccagcgtgttcgtgatgaagaacggcaccaacgtggcctgcctcgtgaaagagttctaccccaaggacatcaggatcaacctggtgtccagcaagaagatcaccgagttcgaccccgccatcgtgatctcccccagcggcaagtacaacgccgtgaagctggggaagtacgaggacagcaacagcgtgacctgctccgtgcagcacgacaacaagaccgtgcacagcaccgactttgaagtgaaaaccgactccaccgaccacgtgaagcccaaagagacagagaacaccaagcagcccagcaagagctgccacaagcccaaggccatcgtgcacaccgagaaagtgaacatgatgagcctgaccgtgctgggcctgcggatgctgttcgccaaaaccgtggccgtgaacttcctgctgaccgccaagctgttcttcctc

SEQ ID NO: 36069 - DNA, 1890 bp, synthetic construct
  source 1..1890: mol_type = other DNA
atggccttaccagtgaccgccttgctcctgccgctggccttgctgctccacgccgccaggccggacatccagatgacacagagccctagcagcctgtctgccagcgtgggagacagagtgaccatcacatgcaaggccagcgaccacatcaacaactggctggcctggtatcagcagaagcctggcaaggcccctaagctgctgatctacggcgctaccacactggaaacaggcgtgcccagcagattttctggcagcggctctggcaccgacttcaccctgacaatatccagcctccagcctgaggacttcgccacctactactgtcagcagagctggaacaccccttggacattcggccagggcaccaaggtggaaatcaagagactcgagagccagcctcacaccaagcccagcgtgttcgtgatgaagaacggcaccaacgtggcctgcctcgtgaaagagttctaccccaaggacatcaggatcaacctggtgtccagcaagaagatcaccgagttcgaccccgccatcgtgatctcccccagcggcaagtacaacgccgtgaagctggggaagtacgaggacagcaacagcgtgacctgctccgtgcagcacgacaacaagaccgtgcacagcaccgactttgaagtgaaaaccgactccaccgaccacgtgaagcccaaagagacagagaacaccaagcagcccagcaagagctgccacaagcccaaggccatcgtgcacaccgagaaagtgaacatgatgagcctgaccgtgctgggcctgcggatgctgttcgccaaaaccgtggccgtgaacttcctgctgaccgccaagctgttcttcctcagggccaagcgatctggatctggagcaacaaacttctcactactcaaacaagcaggtgacgtggaggagaatcccgggcctactagtatggactggatttggcgcatccttttccttgtcggcgctgctaccggcgcgcattccttcgaagaagttcagctggttgaatctggcggcggactggttcaacctggcggatctctgagactgagctgtgccgcctctggctacacctttagcagctactgggtcaactgggttcgacaggcccctggcaaaggactggaatgggtcgcccaaatctatcccggcgacggcgacaccaactacaacggcaagttcaagggcagattcaccatcagccgggacaacagcaagaacaccctgtacctccagatgaactccctgagagccgaggacaccgccgtgtactattgtgccagatccatcaccaccgtcgtgggctgcgctatggattattggggccagggaaccctggtcaccgtgtcctctacgcgtgacaagcagctggacgccgacgtgtcccccaagcctaccatcttcctgccctctatcgccgagacaaagctccagaaggccggcacctacctgtgcctgctggaaaagttcttcccagatgtgattaagatccactggcaggaaaagaagtccaacaccatcctgggcagccaggaaggcaacaccatgaagaccaacgacacctacatgaagttcagctggctgaccgtgcccgagaagtccctggacaaagaacacagatgcatcgtgcggcacgaaaacaacaagaacggcgtggaccaggaaatcatcttcccacccatcaagaccgatgtgattacaatggaccccaaggacaactgctccaaggacgccaacgataccctgctgctccagctgaccaacaccagcgcctactacatgtacttgttgctgctgctgaagtccgtggtgtacttcgccatcatcacatgctgcctgctgcggagaaccgccttctgctgcaacggcgagaagtct

SEQ ID NO: 36070 - DNA, 1935 bp, synthetic construct
  source 1..1935: mol_type = other DNA
atggccttaccagtgaccgccttgctcctgccgctggccttgctgctccacgccgccaggccgctcgaggacaagcagctggacgccgacgtgtcccccaagcctaccatcttcctgccctctatcgccgagacaaagctccagaaggccggcacctacctgtgcctgctggaaaagttcttcccagatgtgattaagatccactggcaggaaaagaagtccaacaccatcctgggcagccaggaaggcaacaccatgaagaccaacgacacctacatgaagttcagctggctgaccgtgcccgagaagtccctggacaaagaacacagatgcatcgtgcggcacgaaaacaacaagaacggcgtggaccaggaaatcatcttcccacccatcaagaccgatgtgattacaatggaccccaaggacaactgctccaaggacgccaacgataccctgctgctccagctgaccaacaccagcgcctactacatgtacttgttgctgctgctgaagtccgtggtgtacttcgccatcatcacatgctgcctgctgcggagaaccgccttctgctgcaacggcgagaagtctagggccaagcgatctggatctggagcaacaaacttctcactactcaaacaagcaggtgacgtggaggagaatcccgggcctactagcatggccttaccagtgaccgccttgctcctgccgctggccttgctgctccacgccgccaggccggacatccagatgacacagagccctagcagcctgtctgccagcgtgggagacagagtgaccatcacatgcaaggccagcgaccacatcaacaactggctggcctggtatcagcagaagcctggcaaggcccctaagctgctgatctacggcgctaccacactggaaacaggcgtgcccagcagattttctggcagcggctctggcaccgacttcaccctgacaatatccagcctccagcctgaggacttcgccacctactactgtcagcagagctggaacaccccttggacattcggccagggcaccaaggtggaaatcaagagaggcggaggcggaagtggaggcggaggatctggcggcggaggctctgaagttcagctggttgaatctggcggcggactggttcaacctggcggatctctgagactgagctgtgccgcctctggctacacctttagcagctactgggtcaactgggttcgacaggcccctggcaaaggactggaatgggtcgcccaaatctatcccggcgacggcgacaccaactacaacggcaagttcaagggcagattcaccatcagccgggacaacagcaagaacaccctgtacctccagatgaactccctgagagccgaggacaccgccgtgtactattgtgccagatccatcaccaccgtcgtgggctgcgctatggattattggggccagggaaccctggtcaccgtgtcctctacgcgtagccagcctcacaccaagcccagcgtgttcgtgatgaagaacggcaccaacgtggcctgcctcgtgaaagagttctaccccaaggacatcaggatcaacctggtgtccagcaagaagatcaccgagttcgaccccgccatcgtgatctcccccagcggcaagtacaacgccgtgaagctggggaagtacgaggacagcaacagcgtgacctgctccgtgcagcacgacaacaagaccgtgcacagcaccgactttgaagtgaaaaccgactccaccgaccacgtgaagcccaaagagacagagaacaccaagcagcccagcaagagctgccacaagcccaaggccatcgtgcacaccgagaaagtgaacatgatgagcctgaccgtgctgggcctgcggatgctgttcgccaaaaccgtggccgtgaacttcctgctgaccgccaagctgttcttcctc

SEQ ID NO: 36071 - DNA, 2397 bp, synthetic construct
  source 1..2397: mol_type = other DNA
atggccttaccagtgaccgccttgctcctgccgctggccttgctgctccacgccgccaggccggacatccagatgacacagagccctagcagcctgtctgccagcgtgggagacagagtgaccatcacatgcaaggccagcgaccacatcaacaactggctggcctggtatcagcagaagcctggcaaggcccctaagctgctgatctacggcgctaccacactggaaacaggcgtgcccagcagattttctggcagcggctctggcaccgacttcaccctgacaatatccagcctccagcctgaggacttcgccacctactactgtcagcagagctggaacaccccttggacattcggccagggcaccaaggtggaaatcaagagaggacagcctaaggccaatcctaccgtgacactgttccctccaagcagcgaagaactccaggccaacaaggccacacttgtgtgcctgatctccgacttctaccctggggctgtgacagtggcttggaaggccgatggatctcctgtgaaagccggcgtggaaaccaccaagccatccaagcagagcaacaacaaatacgccgccagctcctacctgagcctgacacctgagcagtggaagtcccacagatcctacagctgccaagtgacccacgaaggcagcaccgtggaaaagacagtggcccctacagagtgcagcggatcccagagcttcggcctgctggaccccaagctgtgctacctgctggatggcatcctgttcatctacggcgtgatcctgaccgccctgttcctgagagtgaagttcagcagaagcgccgacgcccctgcctaccagcagggacagaaccaactgtacaacgagctgaacctgggcagacgggaagagtacgacgtgctggacaagcggagaggcagggaccctgagatgggcggaaagccccagcggagaaagaacccccaggaaggactgtataacgaactccagaaagacaagatggccgaagcctacagcgagatcggcatgaagggcgagcggagaagaggcaagggccacgatggcctgtaccagggcctgagcaccgccaccaaggacacctatgacgccctgcacatgcaggccctgcctccaagaagggccaagcgatctggatctggagcaacaaacttctcactactcaaacaagcaggtgacgtggaggagaatcccgggcctactagtatggactggatttggcgcatccttttccttgtcggcgctgctaccggcgcgcattccttcgaagaagttcagctggttgaatctggcggcggactggttcaacctggcggatctctgagactgagctgtgccgcctctggctacacctttagcagctactgggtcaactgggttcgacaggcccctggcaaaggactggaatgggtcgcccaaatctatcccggcgacggcgacaccaactacaacggcaagttcaagggcagattcaccatcagccgggacaacagcaagaacaccctgtacctccagatgaactccctgagagccgaggacaccgccgtgtactattgtgccagatccatcaccaccgtcgtgggctgcgctatggattattggggccagggaaccctggtcaccgtgtcctctgcctctacaaagggaccctccgtgtttcctctggctcccagcagcaagtctacaagcggaggaacagccgctctgggctgcctggtcaaggattactttcccgagcctgtgaccgtgtcctggaatagcggagcactgacaagcggcgtgcacacctttccagccgtgctgcaaagcagcggcctgtactctctgagcagcgtggtcacagtgcctagctctagcctgggcacccagacctacatctgcaatgtgaaccacaagcctagcaacaccaaggtggacaagagagtggaacccaagagctgtggtacccagagttttgggttgttggaccctaaattgtgctatctgttggacggaatcctgttcatttacggagtgatcctgaccgcattgttcctgcgggttaagttttccagatccgcagacgcacccgcttaccaacaagggcagaaccaactctacaatgaacttaatttggggcggagggaagagtacgacgttctggacaaaaggaggggacgagatcccgagatgggcggaaagcctcagcgaaggaagaatccgcaagaggggctttataacgaactccagaaagataaaatggcagaagcctatagtgagattgggatgaagggagaaaggaggaggggtaaaggtcacgatgggttgtaccaaggattgagcacagccactaaagatacctatgatgcgctccacatgcaggccctgccgccaaga

SEQ ID NO: 36072 - DNA, 2454 bp, synthetic construct
  source 1..2454: mol_type = other DNA
atggccttaccagtgaccgccttgctcctgccgctggccttgctgctccacgccgccaggccggacatccagatgacacagagccctagcagcctgtctgccagcgtgggagacagagtgaccatcacatgcaaggccagcgaccacatcaacaactggctggcctggtatcagcagaagcctggcaaggcccctaagctgctgatctacggcgctaccacactggaaacaggcgtgcccagcagattttctggcagcggctctggcaccgacttcaccctgacaatatccagcctccagcctgaggacttcgccacctactactgtcagcagagctggaacaccccttggacattcggccagggcaccaaggtggaaatcaagagactcgaggacctgaagaacgtgttcccacctgaggtggccgtgttcgagcctagcgaggccgagatcagccacacccagaaagccaccctcgtgtgcctggctaccggcttctaccccgaccatgtggaactgtcttggtgggtcaacggcaaagaggtgcacagcggcgtgtctaccgacccccagccactgaaagaacagcccgccctgaacgacagccggtactgcctgagcagcagactgagagtgtccgccaccttctggcagaacccccggaaccacttcagatgccaggtgcagttctacggcctgagcgagaacgacgagtggacccaggacagagccaagcccgtgacccagatcgtgtctgccgaagcctggggcagagccgattgcggatcccagagcttcggcctgctggaccccaagctgtgctacctgctggatggcatcctgttcatctacggcgtgatcctgaccgccctgttcctgagagtgaagttcagcagaagcgccgacgcccctgcctaccagcagggacagaaccaactgtacaacgagctgaacctgggcagacgggaagagtacgacgtgctggacaagcggagaggcagggaccctgagatgggcggaaagccccagcggagaaagaacccccaggaaggactgtataacgaactccagaaagacaagatggccgaagcctacagcgagatcggcatgaagggcgagcggagaagaggcaagggccacgatggcctgtaccagggcctgagcaccgccaccaaggacacctatgacgccctgcacatgcaggccctgcctccaagaagggccaagcgatctggatctggagcaacaaacttctcactactcaaacaagcaggtgacgtggaggagaatcccgggcctactagtatggactggatttggcgcatccttttccttgtcggcgctgctaccggcgcgcattccttcgaagaagttcagctggttgaatctggcggcggactggttcaacctggcggatctctgagactgagctgtgccgcctctggctacacctttagcagctactgggtcaactgggttcgacaggcccctggcaaaggactggaatgggtcgcccaaatctatcccggcgacggcgacaccaactacaacggcaagttcaagggcagattcaccatcagccgggacaacagcaagaacaccctgtacctccagatgaactccctgagagccgaggacaccgccgtgtactattgtgccagatccatcaccaccgtcgtgggctgcgctatggattattggggccagggaaccctggtcaccgtgtcctctacgcgtatccagaaccctgatcctgccgtgtaccagctgcgggatagcaagagcagcgacaagagcgtgtgtctgttcaccgacttcgacagccagaccaacgtgtcccagagcaaggactccgacgtgtacatcaccgataagaccgtgctggacatgcggagcatggacttcaagagcaactccgccgtggcctggtccaacaagtccgatttcgcctgcgccaacgccttcaacaacagcattatccccgaggacacattcttcccaagccccgagagcagctgcggtacccagagttttgggttgttggaccctaaattgtgctatctgttggacggaatcctgttcatttacggagtgatcctgaccgcattgttcctgcgggttaagttttccagatccgcagacgcacccgcttaccaacaagggcagaaccaactctacaatgaacttaatttggggcggagggaagagtacgacgttctggacaaaaggaggggacgagatcccgagatgggcggaaagcctcagcgaaggaagaatccgcaagaggggctttataacgaactccagaaagataaaatggcagaagcctatagtgagattgggatgaagggagaaaggaggaggggtaaaggtcacgatgggttgtaccaaggattgagcacagccactaaagatacctatgatgcgctccacatgcaggccctgccgccaaga

SEQ ID NO: 36073 - DNA, 2580 bp, synthetic construct
  source 1..2580: mol_type = other DNA
atggccttaccagtgaccgccttgctcctgccgctggccttgctgctccacgccgccaggccggacatccagatgacacagagccctagcagcctgtctgccagcgtgggagacagagtgaccatcacatgcaaggccagcgaccacatcaacaactggctggcctggtatcagcagaagcctggcaaggcccctaagctgctgatctacggcgctaccacactggaaacaggcgtgcccagcagattttctggcagcggctctggcaccgacttcaccctgacaatatccagcctccagcctgaggacttcgccacctactactgtcagcagagctggaacaccccttggacattcggccagggcaccaaggtggaaatcaagagactcgaggaggacctgaagaacgtgttcccacctgaggtggccgtgttcgagcctagcgaggccgagatcagccacacccagaaagccaccctcgtgtgcctggctaccggcttctaccccgaccatgtggaactgtcttggtgggtcaacggcaaagaggtgcacagcggcgtgtctaccgacccccagccactgaaagaacagcccgccctgaacgacagccggtactgcctgagcagcagactgagagtgtccgccaccttctggcagaacccccggaaccacttcagatgccaggtgcagttctacggcctgagcgagaacgacgagtggacccaggacagagccaagcccgtgacccagatcgtgtctgccgaagcctggggcagagccgattgcggatcccagagcttcggcctgctggaccccaagctgtgctacctgctggatggcatcctgttcatctacggcgtgatcctgaccgccctgttcctgagagtgaagttcagcagaagcgccgacgcccctgcctaccagcagggacagaaccaactgtacaacgagctgaacctgggcagacgggaagagtacgacgtgctggacaagcggagaggcagggaccctgagatgggcggaaagccccagcggagaaagaacccccaggaaggactgtataacgaactccagaaagacaagatggccgaagcctacagcgagatcggcatgaagggcgagcggagaagaggcaagggccacgatggcctgtaccagggcctgagcaccgccaccaaggacacctatgacgccctgcacatgcaggccctgcctccaagaagggccaagcgatctggatctggagcaacaaacttctcactactcaaacaagcaggtgacgtggaggagaatcccgggcctactagtatggactggatttggcgcatccttttccttgtcggcgctgctaccggcgcgcattccttcgaagaagttcagctggttgaatctggcggcggactggttcaacctggcggatctctgagactgagctgtgccgcctctggctacacctttagcagctactgggtcaactgggttcgacaggcccctggcaaaggactggaatgggtcgcccaaatctatcccggcgacggcgacaccaactacaacggcaagttcaagggcagattcaccatcagccgggacaacagcaagaacaccctgtacctccagatgaactccctgagagccgaggacaccgccgtgtactattgtgccagatccatcaccaccgtcgtgggctgcgctatggattattggggccagggaaccctggtcaccgtgtcctctacgcgtatccagaaccctgatcctgccgtgtaccagctgcgggatagcaagagcagcgacaagagcgtgtgtctgttcaccgacttcgacagccagaccaacgtgtcccagagcaaggactccgacgtgtacatcaccgataagaccgtgctggacatgcggagcatggacttcaagagcaactccgccgtggcctggtccaacaagtccgatttcgcctgcgccaacgccttcaacaacagcattatccccgaggacacattcttcccaagccccgagagcagctgcggtacccagagttttgggttgttggaccctaaattgtgctatctgttggacggaatcctgttcatttacggagtgatcctgaccgcattgttcctgaggagcaagcggtcacggctgctccacagcgattacatgaatatgacaccacgaagaccgggtcctactcgcaaacactaccaaccctacgcacctccccgcgactttgcagcgtaccgatctcgggttaagttttccagatccgcagacgcacccgcttaccaacaagggcagaaccaactctacaatgaacttaatttggggcggagggaagagtacgacgttctggacaaaaggaggggacgagatcccgagatgggcggaaagcctcagcgaaggaagaatccgcaagaggggctttataacgaactccagaaagataaaatggcagaagcctatagtgagattgggatgaagggagaaaggaggaggggtaaaggtcacgatgggttgtaccaaggattgagcacagccactaaagatacctatgatgcgctccacatgcaggccctgccgccaaga

SEQ ID NO: 36074 - DNA, 2709 bp, synthetic construct
  source 1..2709: mol_type = other DNA
atggccttaccagtgaccgccttgctcctgccgctggccttgctgctccacgccgccaggccggacatccagatgacacagagccctagcagcctgtctgccagcgtgggagacagagtgaccatcacatgcaaggccagcgaccacatcaacaactggctggcctggtatcagcagaagcctggcaaggcccctaagctgctgatctacggcgctaccacactggaaacaggcgtgcccagcagattttctggcagcggctctggcaccgacttcaccctgacaatatccagcctccagcctgaggacttcgccacctactactgtcagcagagctggaacaccccttggacattcggccagggcaccaaggtggaaatcaagagactcgaggaggacctgaagaacgtgttcccacctgaggtggccgtgttcgagcctagcgaggccgagatcagccacacccagaaagccaccctcgtgtgcctggctaccggcttctaccccgaccatgtggaactgtcttggtgggtcaacggcaaagaggtgcacagcggcgtgtctaccgacccccagccactgaaagaacagcccgccctgaacgacagccggtactgcctgagcagcagactgagagtgtccgccaccttctggcagaacccccggaaccacttcagatgccaggtgcagttctacggcctgagcgagaacgacgagtggacccaggacagagccaagcccgtgacccagatcgtgtctgccgaagcctggggcagagccgattgcggatcccagagcttcggcctgctggaccccaagctgtgctacctgctggatggcatcctgttcatctacggcgtgatcctgaccgccctgttcctgaaacggggcagaaagaaactcctgtatatattcaaacaaccatttatgagaccagtacaaactactcaagaggaagatggctgtagctgccgatttccagaagaagaagaaggaggatgtgaactgagagtgaagttcagcagaagcgccgacgcccctgcctaccagcagggacagaaccaactgtacaacgagctgaacctgggcagacgggaagagtacgacgtgctggacaagcggagaggcagggaccctgagatgggcggaaagccccagcggagaaagaacccccaggaaggactgtataacgaactccagaaagacaagatggccgaagcctacagcgagatcggcatgaagggcgagcggagaagaggcaagggccacgatggcctgtaccagggcctgagcaccgccaccaaggacacctatgacgccctgcacatgcaggccctgcctccaagaagggccaagcgatctggatctggagcaacaaacttctcactactcaaacaagcaggtgacgtggaggagaatcccgggcctactagtatggactggatttggcgcatccttttccttgtcggcgctgctaccggcgcgcattccttcgaagaagttcagctggttgaatctggcggcggactggttcaacctggcggatctctgagactgagctgtgccgcctctggctacacctttagcagctactgggtcaactgggttcgacaggcccctggcaaaggactggaatgggtcgcccaaatctatcccggcgacggcgacaccaactacaacggcaagttcaagggcagattcaccatcagccgggacaacagcaagaacaccctgtacctccagatgaactccctgagagccgaggacaccgccgtgtactattgtgccagatccatcaccaccgtcgtgggctgcgctatggattattggggccagggaaccctggtcaccgtgtcctctacgcgtatccagaaccctgatcctgccgtgtaccagctgcgggatagcaagagcagcgacaagagcgtgtgtctgttcaccgacttcgacagccagaccaacgtgtcccagagcaaggactccgacgtgtacatcaccgataagaccgtgctggacatgcggagcatggacttcaagagcaactccgccgtggcctggtccaacaagtccgatttcgcctgcgccaacgccttcaacaacagcattatccccgaggacacattcttcccaagccccgagagcagctgcggtacccagagttttgggttgttggaccctaaattgtgctatctgttggacggaatcctgttcatttacggagtgatcctgaccgcattgttcctgaagagaggccggaagaagctgctgtacatcttcaagcagcctttcatgcggcccgtgcagaccacccaggaagaggacggctgctcctgccggttccccgaggaagaagaaggcggctgcgagctgcgggttaagttttccagatccgcagacgcacccgcttaccaacaagggcagaaccaactctacaatgaacttaatttggggcggagggaagagtacgacgttctggacaaaaggaggggacgagatcccgagatgggcggaaagcctcagcgaaggaagaatccgcaagaggggctttataacgaactccagaaagataaaatggcagaagcctatagtgagattgggatgaagggagaaaggaggaggggtaaaggtcacgatgggttgtaccaaggattgagcacagccactaaagatacctatgatgcgctccacatgcaggccctgccgccaaga

SEQ ID NO: 36075 - DNA, 1770 bp, synthetic construct
  source 1..1770: mol_type = other DNA
atggccttaccagtgaccgccttgctcctgccgctggccttgctgctccacgccgccaggccggacatccagatgacacagagccctagcagcctgtctgccagcgtgggagacagagtgaccatcacatgcaaggccagcgaccacatcaacaactggctggcctggtatcagcagaagcctggcaaggcccctaagctgctgatctacggcgctaccacactggaaacaggcgtgcccagcagattttctggcagcggctctggcaccgacttcaccctgacaatatccagcctccagcctgaggacttcgccacctactactgtcagcagagctggaacaccccttggacattcggccagggcaccaaggtggaaatcaagagactcgagcagagcttcggcctgctggaccccaagctgtgctacctgctggatggcatcctgttcatctacggcgtgatcctgaccgccctgttcctgagagtgaagttcagcagaagcgccgacgcccctgcctaccagcagggacagaaccaactgtacaacgagctgaacctgggcagacgggaagagtacgacgtgctggacaagcggagaggcagggaccctgagatgggcggaaagccccagcggagaaagaacccccaggaaggactgtataacgaactccagaaagacaagatggccgaagcctacagcgagatcggcatgaagggcgagcggagaagaggcaagggccacgatggcctgtaccagggcctgagcaccgccaccaaggacacctatgacgccctgcacatgcaggccctgcctccaagaagggccaagcgatctggatctggagcaacaaacttctcactactcaaacaagcaggtgacgtggaggagaatcccgggcctactagtatggactggatttggcgcatccttttccttgtcggcgctgctaccggcgcgcattccttcgaagaagttcagctggttgaatctggcggcggactggttcaacctggcggatctctgagactgagctgtgccgcctctggctacacctttagcagctactgggtcaactgggttcgacaggcccctggcaaaggactggaatgggtcgcccaaatctatcccggcgacggcgacaccaactacaacggcaagttcaagggcagattcaccatcagccgggacaacagcaagaacaccctgtacctccagatgaactccctgagagccgaggacaccgccgtgtactattgtgccagatccatcaccaccgtcgtgggctgcgctatggattattggggccagggaaccctggtcaccgtgtcctctacgcgtcagagttttgggttgttggaccctaaattgtgctatctgttggacggaatcctgttcatttacggagtgatcctgaccgcattgttcctgcgggttaagttttccagatccgcagacgcacccgcttaccaacaagggcagaaccaactctacaatgaacttaatttggggcggagggaagagtacgacgttctggacaaaaggaggggacgagatcccgagatgggcggaaagcctcagcgaaggaagaatccgcaagaggggctttataacgaactccagaaagataaaatggcagaagcctatagtgagattgggatgaagggagaaaggaggaggggtaaaggtcacgatgggttgtaccaaggattgagcacagccactaaagatacctatgatgcgctccacatgcaggccctgccgccaaga

SEQ ID NO: 36076 - DNA, 1944 bp, synthetic construct
  source 1..1944: mol_type = other DNA
atggccttaccagtgaccgccttgctcctgccgctggccttgctgctccacgccgccaggccggacatccagatgacacagagccctagcagcctgtctgccagcgtgggagacagagtgaccatcacatgcaaggccagcgaccacatcaacaactggctggcctggtatcagcagaagcctggcaaggcccctaagctgctgatctacggcgctaccacactggaaacaggcgtgcccagcagattttctggcagcggctctggcaccgacttcaccctgacaatatccagcctccagcctgaggacttcgccacctactactgtcagcagagctggaacaccccttggacattcggccagggcaccaaggtggaaatcaagagactcgagggacagcctaaggccaatcctaccgtgacactgttccctccaagcagcgaagaactccaggccaacaaggccacacttgtgtgcctgatctccgacttctaccctggggctgtgacagtggcttggaaggccgatggatctcctgtgaaagccggcgtggaaaccaccaagccatccaagcagagcaacaacaaatacgccgccagctcctacctgagcctgacacctgagcagtggaagtcccacagatcctacagctgccaagtgacccacgaaggcagcaccgtggaaaagacagtggcccctacagagtgcagccccatcaagaccgatgtgattacaatggaccccaaggacaactgctccaaggacgccaacgataccctgctgctccagctgaccaacaccagcgcctactacatgtacttgttgctgctgctgaagtccgtggtgtacttcgccatcatcacatgctgcctgctgcggagaaccgccttctgctgcaacggcgagaagtctagggccaagcgatctggatctggagcaacaaacttctcactactcaaacaagcaggtgacgtggaggagaatcccgggcctactagtatggactggatttggcgcatccttttccttgtcggcgctgctaccggcgcgcattccttcgaagaagttcagctggttgaatctggcggcggactggttcaacctggcggatctctgagactgagctgtgccgcctctggctacacctttagcagctactgggtcaactgggttcgacaggcccctggcaaaggactggaatgggtcgcccaaatctatcccggcgacggcgacaccaactacaacggcaagttcaagggcagattcaccatcagccgggacaacagcaagaacaccctgtacctccagatgaactccctgagagccgaggacaccgccgtgtactattgtgccagatccatcaccaccgtcgtgggctgcgctatggattattggggccagggaaccctggtcaccgtgtcctctacgcgtgcctctacaaagggaccctccgtgtttcctctggctcccagcagcaagtctacaagcggaggaacagccgctctgggctgcctggtcaaggattactttcccgagcctgtgaccgtgtcctggaatagcggagcactgacaagcggcgtgcacacctttccagccgtgctgcaaagcagcggcctgtactctctgagcagcgtggtcacagtgcctagctctagcctgggcacccagacctacatctgcaatgtgaaccacaagcctagcaacaccaaggtggacaagagagtggaacccaagagctgtgaagtgaaaaccgactccaccgaccacgtgaagcccaaagagacagagaacaccaagcagcccagcaagagctgccacaagcccaaggccatcgtgcacaccgagaaagtgaacatgatgagcctgaccgtgctgggcctgcggatgctgttcgccaaaaccgtggccgtgaacttcctgctgaccgccaagctgttcttcctc

SEQ ID NO: 36077 - DNA, 1878 bp, synthetic construct
  source 1..1878: mol_type = other DNA
atggccttaccagtgaccgccttgctcctgccgctggccttgctgctccacgccgccaggccggacatccagatgacacagagccctagcagcctgtctgccagcgtgggagacagagtgaccatcacatgcaaggccagcgaccacatcaacaactggctggcctggtatcagcagaagcctggcaaggcccctaagctgctgatctacggcgctaccacactggaaacaggcgtgcccagcagattttctggcagcggctctggcaccgacttcaccctgacaatatccagcctccagcctgaggacttcgccacctactactgtcagcagagctggaacaccccttggacattcggccagggcaccaaggtggaaatcaagagactcgagggacagcctaaggccaatcctaccgtgacactgttccctccaagcagcgaagaactccaggccaacaaggccacacttgtgtgcctgatctccgacttctaccctggggctgtgacagtggcttggaaggccgatggatctcctgtgaaagccggcgtggaaaccaccaagccatccaagcagagcaacaacaaatacgccgccagctcctacctgagcctgacacctgagcagtggaagtcccacagatcctacagctgccaagtgacccacgaaggcagcaccgtggaaaagacagtggcccctacagagtgcagcggcagagccgattgcggcatcaccagcgccagctaccaccagggcgtgctgagcgccaccatcctgtacgagatcctgctgggcaaggccaccctgtacgccgtgctggtgtctgccctggtgctgatggctatggtcaagcggaaggacagccggggaagggccaagcgatctggatctggagcaacaaacttctcactactcaaacaagcaggtgacgtggaggagaatcccgggcctactagtatggactggatttggcgcatccttttccttgtcggcgctgctaccggcgcgcattccttcgaagaagttcagctggttgaatctggcggcggactggttcaacctggcggatctctgagactgagctgtgccgcctctggctacacctttagcagctactgggtcaactgggttcgacaggcccctggcaaaggactggaatgggtcgcccaaatctatcccggcgacggcgacaccaactacaacggcaagttcaagggcagattcaccatcagccgggacaacagcaagaacaccctgtacctccagatgaactccctgagagccgaggacaccgccgtgtactattgtgccagatccatcaccaccgtcgtgggctgcgctatggattattggggccagggaaccctggtcaccgtgtcctctacgcgtgcctctacaaagggaccctccgtgtttcctctggctcccagcagcaagtctacaagcggaggaacagccgctctgggctgcctggtcaaggattactttcccgagcctgtgaccgtgtcctggaatagcggagcactgacaagcggcgtgcacacctttccagccgtgctgcaaagcagcggcctgtactctctgagcagcgtggtcacagtgcctagctctagcctgggcacccagacctacatctgcaatgtgaaccacaagcctagcaacaccaaggtggacaagagagtggaacccaagagctgtatccccgaggacacattcttcccaagcagcgacgtgccctgcgacgtgaagctggtggaaaagagcttcgagacagacaccaacctgaacttccagaacctgagcgtgatcggcttcagaatcctgctgctgaaagtggccggctttaacctgctgatgaccctgcggctgtggtccagc

SEQ ID NO: 36078 - DNA, 1878 bp, synthetic construct
  source 1..1878: mol_type = other DNA
atggccttaccagtgaccgccttgctcctgccgctggccttgctgctccacgccgccaggccggacatccagatgacacagagccctagcagcctgtctgccagcgtgggagacagagtgaccatcacatgcaaggccagcgaccacatcaacaactggctggcctggtatcagcagaagcctggcaaggcccctaagctgctgatctacggcgctaccacactggaaacaggcgtgcccagcagattttctggcagcggctctggcaccgacttcaccctgacaatatccagcctccagcctgaggacttcgccacctactactgtcagcagagctggaacaccccttggacattcggccagggcaccaaggtggaaatcaagagactcgagggacagcctaaggccaatcctaccgtgacactgttccctccaagcagcgaagaactccaggccaacaaggccacacttgtgtgcctgatctccgacttctaccctggggctgtgacagtggcttggaaggccgatggatctcctgtgaaagccggcgtggaaaccaccaagccatccaagcagagcaacaacaaatacgccgccagctcctacctgagcctgacacctgagcagtggaagtcccacagatcctacagctgccaagtgacccacgaaggcagcaccgtggaaaagacagtggcccctacagagtgcagcggcagagccgattgcggctttaccagcgagagctaccagcagggcgtgctgagcgccaccatcctgtacgagatcctgctgggcaaggccaccctgtacgccgtgctggtgtctgccctggtgctgatggctatggtcaagcggaaggacagccggggaagggccaagcgatctggatctggagcaacaaacttctcactactcaaacaagcaggtgacgtggaggagaatcccgggcctactagtatggactggatttggcgcatccttttccttgtcggcgctgctaccggcgcgcattccttcgaagaagttcagctggttgaatctggcggcggactggttcaacctggcggatctctgagactgagctgtgccgcctctggctacacctttagcagctactgggtcaactgggttcgacaggcccctggcaaaggactggaatgggtcgcccaaatctatcccggcgacggcgacaccaactacaacggcaagttcaagggcagattcaccatcagccgggacaacagcaagaacaccctgtacctccagatgaactccctgagagccgaggacaccgccgtgtactattgtgccagatccatcaccaccgtcgtgggctgcgctatggattattggggccagggaaccctggtcaccgtgtcctctacgcgtgcctctacaaagggaccctccgtgtttcctctggctcccagcagcaagtctacaagcggaggaacagccgctctgggctgcctggtcaaggattactttcccgagcctgtgaccgtgtcctggaatagcggagcactgacaagcggcgtgcacacctttccagccgtgctgcaaagcagcggcctgtactctctgagcagcgtggtcacagtgcctagctctagcctgggcacccagacctacatctgcaatgtgaaccacaagcctagcaacaccaaggtggacaagagagtggaacccaagagctgtatccccgaggacacattcttcccaagccccgagagcagctgcgacgtgaagctggtggaaaagagcttcgagacagacaccaacctgaacttccagaacctgagcgtgatcggcttcagaatcctgctgctgaaagtggccggctttaacctgctgatgaccctgcggctgtggtccagc

SEQ ID NO: 36079 - DNA, 1356 bp, synthetic construct
  source 1..1356: mol_type = other DNA
atggccttaccagtgaccgccttgctcctgccgctggccttgctgctccacgccgccaggccggacatccagatgacacagagccctagcagcctgtctgccagcgtgggagacagagtgaccatcacatgcaaggccagcgaccacatcaacaactggctggcctggtatcagcagaagcctggcaaggcccctaagctgctgatctacggcgctaccacactggaaacaggcgtgcccagcagattttctggcagcggctctggcaccgacttcaccctgacaatatccagcctccagcctgaggacttcgccacctactactgtcagcagagctggaacaccccttggacattcggccagggcaccaaggtggaaatcaagagaggcggaggcggaagtggaggcggaggatctggcggcggaggctctgaagttcagctggttgaatctggcggcggactggttcaacctggcggatctctgagactgagctgtgccgcctctggctacacctttagcagctactgggtcaactgggttcgacaggcccctggcaaaggactggaatgggtcgcccaaatctatcccggcgacggcgacaccaactacaacggcaagttcaagggcagattcaccatcagccgggacaacagcaagaacaccctgtacctccagatgaactccctgagagccgaggacaccgccgtgtactattgtgccagatccatcaccaccgtcgtgggctgcgctatggattattggggccagggaaccctggtcaccgtgtcctctacgcgtgacggtaacgaggagatgggaggaatcactcaaaccccttacaaagtctcaatttcaggaacaactgttatccttacatgtccccagtatcctggcagcgagatcctttggcagcataacgacaagaatatagggggagatgaagacgataagaatatcggatctgacgaggatcacttgagcctgaaagagttctccgagcttgaacaaagcggatattatgtgtgctatccgcgcgggtcaaagccggaagacgctaacttttacctttatctccgagccagagtgtgcgaaaattgcatggaaatggacgttatgtccgttgctacaatagttatcgtagatatatgcatcacgggtggactgcttctgctggtttattattggtccaagaatagaaaggccaaagctaaacccgtgaccagaggcgctggcgcaggcggaaggcaaaggggacaaaacaaagaacggccaccaccagtgccaaatccagattatgagcctattcggaaaggacagagggacctgtactctggcctgaatcagagaagaatc

SEQ ID NO: 36080 - DNA, 1251 bp, synthetic construct
  source 1..1251: mol_type = other DNA
atggccttaccagtgaccgccttgctcctgccgctggccttgctgctccacgccgccaggccggacatccagatgacacagagccctagcagcctgtctgccagcgtgggagacagagtgaccatcacatgcaaggccagcgaccacatcaacaactggctggcctggtatcagcagaagcctggcaaggcccctaagctgctgatctacggcgctaccacactggaaacaggcgtgcccagcagattttctggcagcggctctggcaccgacttcaccctgacaatatccagcctccagcctgaggacttcgccacctactactgtcagcagagctggaacaccccttggacattcggccagggcaccaaggtggaaatcaagagaggcggaggcggaagtggaggcggaggatctggcggcggaggctctgaagttcagctggttgaatctggcggcggactggttcaacctggcggatctctgagactgagctgtgccgcctctggctacacctttagcagctactgggtcaactgggttcgacaggcccctggcaaaggactggaatgggtcgcccaaatctatcccggcgacggcgacaccaactacaacggcaagttcaagggcagattcaccatcagccgggacaacagcaagaacaccctgtacctccagatgaactccctgagagccgaggacaccgccgtgtactattgtgccagatccatcaccaccgtcgtgggctgcgctatggattattggggccagggaaccctggtcaccgtgtcctctacgcgtttcaagatccccatcgaggaactggaagatcgggtgttcgtgaactgcaacacctctatcacctgggtggaaggcaccgtgggaacactgctgagcgacatcaccagactggacctcggcaagcggattctggaccctcggggcatctacagatgcaacggcaccgacatctacaaggacaaagaaagcaccgtgcaggtccactacagaatgtgccagtcctgcgtggaactggaccctgctacagtggccggcatcatcgtgaccgatgtgatcgctactctgctgctggctctgggagtgttctgcttcgccggacacgaaacaggcagactgtctggcgctgccgatacacaggccctgctgagaaacgaccaagtgtatcagcccctgcgcgacagagatgatgcccagtattctcacctcggcggcaactgggctagaaacaag

SEQ ID NO: 36081 - DNA, 1281 bp, synthetic construct
  source 1..1281: mol_type = other DNA
atggccttaccagtgaccgccttgctcctgccgctggccttgctgctccacgccgccaggccggacatccagatgacacagagccctagcagcctgtctgccagcgtgggagacagagtgaccatcacatgcaaggccagcgaccacatcaacaactggctggcctggtatcagcagaagcctggcaaggcccctaagctgctgatctacggcgctaccacactggaaacaggcgtgcccagcagattttctggcagcggctctggcaccgacttcaccctgacaatatccagcctccagcctgaggacttcgccacctactactgtcagcagagctggaacaccccttggacattcggccagggcaccaaggtggaaatcaagagaggcggaggcggaagtggaggcggaggatctggcggcggaggctctgaagttcagctggttgaatctggcggcggactggttcaacctggcggatctctgagactgagctgtgccgcctctggctacacctttagcagctactgggtcaactgggttcgacaggcccctggcaaaggactggaatgggtcgcccaaatctatcccggcgacggcgacaccaactacaacggcaagttcaagggcagattcaccatcagccgggacaacagcaagaacaccctgtacctccagatgaactccctgagagccgaggacaccgccgtgtactattgtgccagatccatcaccaccgtcgtgggctgcgctatggattattggggccagggaaccctggtcaccgtgtcctctacgcgtcagagcatcaagggcaaccacctggtcaaggtgtacgactaccaagaggacggcagcgtgctgctgacatgtgatgccgaggccaagaacatcacctggtttaaggacggcaagatgatcggcttcctgaccgaggacaagaagaagtggaacctgggcagcaacgctaaggaccccagaggcatgtatcagtgcaagggcagccagaacaagagcaagcccctccaggtgtactaccggatgtgccagaactgcatcgagctgaacgccgctaccatcagcggctttctgttcgccgagatcgtgtccatcttcgtgctggccgtgggcgtgtactttatcgctggacaggatggcgtgcggcagagcagagcttccgataagcaaaccctgctgcctaacgaccagctgtaccagcctctgaaggacagagaggacgaccagtacagccacctccagggcaatcagctgagaagaaac

SEQ ID NO: 36082 - DNA, 1230 bp, synthetic construct
  source 1..1230: mol_type = other DNA
atggccttaccagtgaccgccttgctcctgccgctggccttgctgctccacgccgccaggccggacatccagatgacacagagccctagcagcctgtctgccagcgtgggagacagagtgaccatcacatgcaaggccagcgaccacatcaacaactggctggcctggtatcagcagaagcctggcaaggcccctaagctgctgatctacggcgctaccacactggaaacaggcgtgcccagcagattttctggcagcggctctggcaccgacttcaccctgacaatatccagcctccagcctgaggacttcgccacctactactgtcagcagagctggaacaccccttggacattcggccagggcaccaaggtggaaatcaagagaggcggaggcggaagtggaggcggaggatctggcggcggaggctctgaagttcagctggttgaatctggcggcggactggttcaacctggcggatctctgagactgagctgtgccgcctctggctacacctttagcagctactgggtcaactgggttcgacaggcccctggcaaaggactggaatgggtcgcccaaatctatcccggcgacggcgacaccaactacaacggcaagttcaagggcagattcaccatcagccgggacaacagcaagaacaccctgtacctccagatgaactccctgagagccgaggacaccgccgtgtactattgtgccagatccatcaccaccgtcgtgggctgcgctatggattattggggccagggaaccctggtcaccgtgtcctctacgcgtcagagttttgggttgttggaccctaaattgtgctatctgttggacggaatcctgttcatttacggagtgatcctgaccgcattgttcctgcgggttaagttttccagatccgcagacgcacccgcttaccaacaagggcagaaccaactctacaatgaacttaatttggggcggagggaagagtacgacgttctggacaaaaggaggggacgagatcccgagatgggcggaaagcctcagcgaaggaagaatccgcaagaggggctttataacgaactccagaaagataaaatggcagaagcctatagtgagattgggatgaagggagaaaggaggaggggtaaaggtcacgatgggttgtaccaaggattgagcacagccactaaagatacctatgatgcgctccacatgcaggccctgccgccaaga

SEQ ID NO: 36083 - DNA, 1515 bp, synthetic construct
  source 1..1515: mol_type = other DNA
atggccttaccagtgaccgccttgctcctgccgctggccttgctgctccacgccgccaggccggacatccagatgacacagagccctagcagcctgtctgccagcgtgggagacagagtgaccatcacatgcaaggccagcgaccacatcaacaactggctggcctggtatcagcagaagcctggcaaggcccctaagctgctgatctacggcgctaccacactggaaacaggcgtgcccagcagattttctggcagcggctctggcaccgacttcaccctgacaatatccagcctccagcctgaggacttcgccacctactactgtcagcagagctggaacaccccttggacattcggccagggcaccaaggtggaaatcaagagaggcggaggcggaagtggaggcggaggatctggcggcggaggctctgaagttcagctggttgaatctggcggcggactggttcaacctggcggatctctgagactgagctgtgccgcctctggctacacctttagcagctactgggtcaactgggttcgacaggcccctggcaaaggactggaatgggtcgcccaaatctatcccggcgacggcgacaccaactacaacggcaagttcaagggcagattcaccatcagccgggacaacagcaagaacaccctgtacctccagatgaactccctgagagccgaggacaccgccgtgtactattgtgccagatccatcaccaccgtcgtgggctgcgctatggattattggggccagggaaccctggtcaccgtgtcctctacgcgtggaatgaggactgaggatcttcccaaagctgtcgtctttctcgaaccccaatggtatcgggtgctcgaaaaagactctgtgacactgaaatgccaaggggcctactctcccgaggacaactccacacagtggtttcataatgagtccctcatcagctctcaggccagctcttatttcattgatgccgctacagtggacgactccggcgagtatcggtgtcagaccaatctgtctacactgtctgaccccgtgcagcttgaggtccacattggatggttgctcttgcaagccccacgctgggttttcaaagaggaagatccaatccatctgcggtgccacagctggaaaaacaccgctctccacaaagtcacatacctgcaaaatggcaaaggacgcaaatacttccatcacaattccgatttttacattccgaaggctaccctgaaagacagcggcagctatttctgccggggactcgtcggctccaagaatgtgtcctccgaaaccgtgaatatcacgattacccaaggactggctgtgcctacaatctctagcttctttccgcctggataccaagtctccttctgtcttgtgatggtcctcctgtttgctgtggacacaggactgtacttttccgtgaaaacgaacatccgcagctccacacgcgattggaaagatcacaagtttaaatggcgcaaagatccccaggacaag

SEQ ID NO: 36084 - DNA, 1440 bp, synthetic construct
  source 1..1440: mol_type = other DNA
atggccttaccagtgaccgccttgctcctgccgctggccttgctgctccacgccgccaggccggacatccagatgacacagagccctagcagcctgtctgccagcgtgggagacagagtgaccatcacatgcaaggccagcgaccacatcaacaactggctggcctggtatcagcagaagcctggcaaggcccctaagctgctgatctacggcgctaccacactggaaacaggcgtgcccagcagattttctggcagcggctctggcaccgacttcaccctgacaatatccagcctccagcctgaggacttcgccacctactactgtcagcagagctggaacaccccttggacattcggccagggcaccaaggtggaaatcaagagaggcggaggcggaagtggaggcggaggatctggcggcggaggctctgaagttcagctggttgaatctggcggcggactggttcaacctggcggatctctgagactgagctgtgccgcctctggctacacctttagcagctactgggtcaactgggttcgacaggcccctggcaaaggactggaatgggtcgcccaaatctatcccggcgacggcgacaccaactacaacggcaagttcaagggcagattcaccatcagccgggacaacagcaagaacaccctgtacctccagatgaactccctgagagccgaggacaccgccgtgtactattgtgccagatccatcaccaccgtcgtgggctgcgctatggattattggggccagggaaccctggtcaccgtgtcctctacgcgtggaatgaggactgaggatcttcccaaagctgtcgtctttctcgaaccccaatggtatcgggtgctcgaaaaagactctgtgacactgaaatgccaaggggcctactctcccgaggacaactccacacagtggtttcataatgagtccctcatcagctctcaggccagctcttatttcattgatgccgctacagtggacgactccggcgagtatcggtgtcagaccaatctgtctacactgtctgaccccgtgcagcttgaggtccacattggatggttgctcttgcaagccccacgctgggttttcaaagaggaagatccaatccatctgcggtgccacagctggaaaaacaccgctctccacaaagtcacatacctgcaaaatggcaaaggacgcaaatacttccatcacaattccgatttttacattccgaaggctaccctgaaagacagcggcagctatttctgccggggactcgtcggctccaagaatgtgtcctccgaaaccgtgaatatcacgattacccaaggactggctgtgcctacaatctctagcttctttccgcctggataccaagtctccttctgtcttgtgatggtcctcctgtttgctgtggacacaggactgtacttttccgtg

SEQ ID NO: 36085 - DNA, 1443 bp, synthetic construct
  source 1..1443: mol_type = other DNA
atggccttaccagtgaccgccttgctcctgccgctggccttgctgctccacgccgccaggccggacatccagatgacacagagccctagcagcctgtctgccagcgtgggagacagagtgaccatcacatgcaaggccagcgaccacatcaacaactggctggcctggtatcagcagaagcctggcaaggcccctaagctgctgatctacggcgctaccacactggaaacaggcgtgcccagcagattttctggcagcggctctggcaccgacttcaccctgacaatatccagcctccagcctgaggacttcgccacctactactgtcagcagagctggaacaccccttggacattcggccagggcaccaaggtggaaatcaagagaggcggaggcggaagtggaggcggaggatctggcggcggaggctctgaagttcagctggttgaatctggcggcggactggttcaacctggcggatctctgagactgagctgtgccgcctctggctacacctttagcagctactgggtcaactgggttcgacaggcccctggcaaaggactggaatgggtcgcccaaatctatcccggcgacggcgacaccaactacaacggcaagttcaagggcagattcaccatcagccgggacaacagcaagaacaccctgtacctccagatgaactccctgagagccgaggacaccgccgtgtactattgtgccagatccatcaccaccgtcgtgggctgcgctatggattattggggccagggaaccctggtcaccgtgtcctctacgcgtggaatgaggactgaggatcttcccaaagctgtcgtctttctcgaaccccaatggtatcgggtgctcgaaaaagactctgtgacactgaaatgccaaggggcctactctcccgaggacaactccacacagtggtttcataatgagtccctcatcagctctcaggccagctcttatttcattgatgccgctacagtggacgactccggcgagtatcggtgtcagaccaatctgtctacactgtctgaccccgtgcagcttgaggtccacattggatggttgctcttgcaagccccacgctgggttttcaaagaggaagatccaatccatctgcggtgccacagctggaaaaacaccgctctccacaaagtcacatacctgcaaaatggcaaaggacgcaaatacttccatcacaattccgatttttacattccgaaggctaccctgaaagacagcggcagctatttctgccggggactcgtcggctccaagaatgtgtcctccgaaaccgtgaatatcacgattacccaaggactggctgtgcctacaatctctagcttctttccgcctggataccaagtctccttctgtcttgtgatggtcctcctgtttgctgtggacacaggactgtacttttccgtgaaa

SEQ ID NO: 36086 - DNA, 2175 bp, synthetic construct
  source 1..2175: mol_type = other DNA
atggccttaccagtgaccgccttgctcctgccgctggccttgctgctccacgccgccaggccggacatccagatgacacagagccctagcagcctgtctgccagcgtgggagacagagtgaccatcacatgcaaggccagcgaccacatcaacaactggctggcctggtatcagcagaagcctggcaaggcccctaagctgctgatctacggcgctaccacactggaaacaggcgtgcccagcagattttctggcagcggctctggcaccgacttcaccctgacaatatccagcctccagcctgaggacttcgccacctactactgtcagcagagctggaacaccccttggacattcggccagggcaccaaggtggaaatcaagagactcgagggacagcctaaggccaatcctaccgtgacactgttccctccaagcagcgaagaactccaggccaacaaggccacacttgtgtgcctgatctccgacttctaccctggggctgtgacagtggcttggaaggccgatggatctcctgtgaaagccggcgtggaaaccaccaagccatccaagcagagcaacaacaaatacgccgccagctcctacctgagcctgacacctgagcagtggaagtcccacagatcctacagctgccaagtgacccacgaaggcagcaccgtggaaaagacagtggcccctacagagtgcagcggatcccagagcttcggcctgctggaccccaagctgtgctacctgctggatggcatcctgttcatctacggcgtgatcctgaccgccctgttcctgagagtgaagttcagcagaagcgccgacgcccctgcctaccagcagggacagaaccaactgtacaacgagctgaacctgggcagacgggaagagtacgacgtgctggacaagcggagaggcagggaccctgagatgggcggaaagccccagcggagaaagaacccccaggaaggactgtataacgaactccagaaagacaagatggccgaagcctacagcgagatcggcatgaagggcgagcggagaagaggcaagggccacgatggcctgtaccagggcctgagcaccgccaccaaggacacctatgacgccctgcacatgcaggccctgcctccaagaagggccaagcgatctggatctggagcaacaaacttctcactactcaaacaagcaggtgacgtggaggagaatcccgggcctactagtatggactggatttggcgcatccttttccttgtcggcgctgctaccggcgcgcattccttcgaagaagttcagctggttgaatctggcggcggactggttcaacctggcggatctctgagactgagctgtgccgcctctggctacacctttagcagctactgggtcaactgggttcgacaggcccctggcaaaggactggaatgggtcgcccaaatctatcccggcgacggcgacaccaactacaacggcaagttcaagggcagattcaccatcagccgggacaacagcaagaacaccctgtacctccagatgaactccctgagagccgaggacaccgccgtgtactattgtgccagatccatcaccaccgtcgtgggctgcgctatggattattggggccagggaaccctggtcaccgtgtcctctacgcgtgcctctacaaagggaccctccgtgtttcctctggctcccagcagcaagtctacaagcggaggaacagccgctctgggctgcctggtcaaggattactttcccgagcctgtgaccgtgtcctggaatagcggagcactgacaagcggcgtgcacacctttccagccgtgctgcaaagcagcggcctgtactctctgagcagcgtggtcacagtgcctagctctagcctgggcacccagacctacatctgcaatgtgaaccacaagcctagcaacaccaaggtggacaagagagtggaacccaagagctgtggtaccatcactcaaggtttggcagtgtcaaccatctcatcattctttccacctggctaccaagtgtccttctgcctggtcatggtgctgctgttcgccgtggataccggcctgtacttcagcgtcaagaccaacatccggtccagcaccagagactggaaggaccacaagttcaagtggcggaaggaccctcaggacaag

SEQ ID NO: 36087 - DNA, 2220 bp, synthetic construct
  source 1..2220: mol_type = other DNA
atggccttaccagtgaccgccttgctcctgccgctggccttgctgctccacgccgccaggccggacatccagatgacacagagccctagcagcctgtctgccagcgtgggagacagagtgaccatcacatgcaaggccagcgaccacatcaacaactggctggcctggtatcagcagaagcctggcaaggcccctaagctgctgatctacggcgctaccacactggaaacaggcgtgcccagcagattttctggcagcggctctggcaccgacttcaccctgacaatatccagcctccagcctgaggacttcgccacctactactgtcagcagagctggaacaccccttggacattcggccagggcaccaaggtggaaatcaagagactcgaggacctgaagaacgtgttcccacctgaggtggccgtgttcgagcctagcgaggccgagatcagccacacccagaaagccaccctcgtgtgcctggctaccggcttctaccccgaccatgtggaactgtcttggtgggtcaacggcaaagaggtgcacagcggcgtgtctaccgacccccagccactgaaagaacagcccgccctgaacgacagccggtactgcctgagcagcagactgagagtgtccgccaccttctggcagaacccccggaaccacttcagatgccaggtgcagttctacggcctgagcgagaacgacgagtggacccaggacagagccaagcccgtgacccagatcgtgtctgccgaagcctggggcagagccgattgcggatcccagagcttcggcctgctggaccccaagctgtgctacctgctggatggcatcctgttcatctacggcgtgatcctgaccgccctgttcctgagagtgaagttcagcagaagcgccgacgcccctgcctaccagcagggacagaaccaactgtacaacgagctgaacctgggcagacgggaagagtacgacgtgctggacaagcggagaggcagggaccctgagatgggcggaaagccccagcggagaaagaacccccaggaaggactgtataacgaactccagaaagacaagatggccgaagcctacagcgagatcggcatgaagggcgagcggagaagaggcaagggccacgatggcctgtaccagggcctgagcaccgccaccaaggacacctatgacgccctgcacatgcaggccctgcctccaagaagggccaagcgatctggatctggagcaacaaacttctcactactcaaacaagcaggtgacgtggaggagaatcccgggcctactagtatggactggatttggcgcatccttttccttgtcggcgctgctaccggcgcgcattccttcgaagaagttcagctggttgaatctggcggcggactggttcaacctggcggatctctgagactgagctgtgccgcctctggctacacctttagcagctactgggtcaactgggttcgacaggcccctggcaaaggactggaatgggtcgcccaaatctatcccggcgacggcgacaccaactacaacggcaagttcaagggcagattcaccatcagccgggacaacagcaagaacaccctgtacctccagatgaactccctgagagccgaggacaccgccgtgtactattgtgccagatccatcaccaccgtcgtgggctgcgctatggattattggggccagggaaccctggtcaccgtgtcctctacgcgtatccagaaccctgatcctgccgtgtaccagctgcgggatagcaagagcagcgacaagagcgtgtgtctgttcaccgacttcgacagccagaccaacgtgtcccagagcaaggactccgacgtgtacatcaccgataagaccgtgctggacatgcggagcatggacttcaagagcaactccgccgtggcctggtccaacaagtccgatttcgcctgcgccaacgccttcaacaacagcattatccccgaggacacattcttcccaagccccgagagcagctgcggtaccatcactcaaggtttggcagtgtcaaccatctcatcattctttccacctggctaccaagtgtccttctgcctggtcatggtgctgctgttcgccgtggataccggcctgtacttcagcgtcaagaccaacatccggtccagcaccagagactggaaggaccacaagttcaagtggcggaaggaccctcaggacaag

SEQ ID NO: 36088 - DNA, 2145 bp, synthetic construct
  source 1..2145: mol_type = other DNA
atggccttaccagtgaccgccttgctcctgccgctggccttgctgctccacgccgccaggccggacatccagatgacacagagccctagcagcctgtctgccagcgtgggagacagagtgaccatcacatgcaaggccagcgaccacatcaacaactggctggcctggtatcagcagaagcctggcaaggcccctaagctgctgatctacggcgctaccacactggaaacaggcgtgcccagcagattttctggcagcggctctggcaccgacttcaccctgacaatatccagcctccagcctgaggacttcgccacctactactgtcagcagagctggaacaccccttggacattcggccagggcaccaaggtggaaatcaagagactcgaggacctgaagaacgtgttcccacctgaggtggccgtgttcgagcctagcgaggccgagatcagccacacccagaaagccaccctcgtgtgcctggctaccggcttctaccccgaccatgtggaactgtcttggtgggtcaacggcaaagaggtgcacagcggcgtgtctaccgacccccagccactgaaagaacagcccgccctgaacgacagccggtactgcctgagcagcagactgagagtgtccgccaccttctggcagaacccccggaaccacttcagatgccaggtgcagttctacggcctgagcgagaacgacgagtggacccaggacagagccaagcccgtgacccagatcgtgtctgccgaagcctggggcagagccgattgcggatcccagagcttcggcctgctggaccccaagctgtgctacctgctggatggcatcctgttcatctacggcgtgatcctgaccgccctgttcctgagagtgaagttcagcagaagcgccgacgcccctgcctaccagcagggacagaaccaactgtacaacgagctgaacctgggcagacgggaagagtacgacgtgctggacaagcggagaggcagggaccctgagatgggcggaaagccccagcggagaaagaacccccaggaaggactgtataacgaactccagaaagacaagatggccgaagcctacagcgagatcggcatgaagggcgagcggagaagaggcaagggccacgatggcctgtaccagggcctgagcaccgccaccaaggacacctatgacgccctgcacatgcaggccctgcctccaagaagggccaagcgatctggatctggagcaacaaacttctcactactcaaacaagcaggtgacgtggaggagaatcccgggcctactagtatggactggatttggcgcatccttttccttgtcggcgctgctaccggcgcgcattccttcgaagaagttcagctggttgaatctggcggcggactggttcaacctggcggatctctgagactgagctgtgccgcctctggctacacctttagcagctactgggtcaactgggttcgacaggcccctggcaaaggactggaatgggtcgcccaaatctatcccggcgacggcgacaccaactacaacggcaagttcaagggcagattcaccatcagccgggacaacagcaagaacaccctgtacctccagatgaactccctgagagccgaggacaccgccgtgtactattgtgccagatccatcaccaccgtcgtgggctgcgctatggattattggggccagggaaccctggtcaccgtgtcctctacgcgtatccagaaccctgatcctgccgtgtaccagctgcgggatagcaagagcagcgacaagagcgtgtgtctgttcaccgacttcgacagccagaccaacgtgtcccagagcaaggactccgacgtgtacatcaccgataagaccgtgctggacatgcggagcatggacttcaagagcaactccgccgtggcctggtccaacaagtccgatttcgcctgcgccaacgccttcaacaacagcattatccccgaggacacattcttcccaagccccgagagcagctgcggtaccatcactcaaggtttggcagtgtcaaccatctcatcattctttccacctggctaccaagtgtccttctgcctggtcatggtgctgctgttcgccgtggataccggcctgtacttcagcgtc

SEQ ID NO: 36089 - DNA, 2148 bp, synthetic construct
  source 1..2148: mol_type = other DNA
atggccttaccagtgaccgccttgctcctgccgctggccttgctgctccacgccgccaggccggacatccagatgacacagagccctagcagcctgtctgccagcgtgggagacagagtgaccatcacatgcaaggccagcgaccacatcaacaactggctggcctggtatcagcagaagcctggcaaggcccctaagctgctgatctacggcgctaccacactggaaacaggcgtgcccagcagattttctggcagcggctctggcaccgacttcaccctgacaatatccagcctccagcctgaggacttcgccacctactactgtcagcagagctggaacaccccttggacattcggccagggcaccaaggtggaaatcaagagactcgaggacctgaagaacgtgttcccacctgaggtggccgtgttcgagcctagcgaggccgagatcagccacacccagaaagccaccctcgtgtgcctggctaccggcttctaccccgaccatgtggaactgtcttggtgggtcaacggcaaagaggtgcacagcggcgtgtctaccgacccccagccactgaaagaacagcccgccctgaacgacagccggtactgcctgagcagcagactgagagtgtccgccaccttctggcagaacccccggaaccacttcagatgccaggtgcagttctacggcctgagcgagaacgacgagtggacccaggacagagccaagcccgtgacccagatcgtgtctgccgaagcctggggcagagccgattgcggatcccagagcttcggcctgctggaccccaagctgtgctacctgctggatggcatcctgttcatctacggcgtgatcctgaccgccctgttcctgagagtgaagttcagcagaagcgccgacgcccctgcctaccagcagggacagaaccaactgtacaacgagctgaacctgggcagacgggaagagtacgacgtgctggacaagcggagaggcagggaccctgagatgggcggaaagccccagcggagaaagaacccccaggaaggactgtataacgaactccagaaagacaagatggccgaagcctacagcgagatcggcatgaagggcgagcggagaagaggcaagggccacgatggcctgtaccagggcctgagcaccgccaccaaggacacctatgacgccctgcacatgcaggccctgcctccaagaagggccaagcgatctggatctggagcaacaaacttctcactactcaaacaagcaggtgacgtggaggagaatcccgggcctactagtatggactggatttggcgcatccttttccttgtcggcgctgctaccggcgcgcattccttcgaagaagttcagctggttgaatctggcggcggactggttcaacctggcggatctctgagactgagctgtgccgcctctggctacacctttagcagctactgggtcaactgggttcgacaggcccctggcaaaggactggaatgggtcgcccaaatctatcccggcgacggcgacaccaactacaacggcaagttcaagggcagattcaccatcagccgggacaacagcaagaacaccctgtacctccagatgaactccctgagagccgaggacaccgccgtgtactattgtgccagatccatcaccaccgtcgtgggctgcgctatggattattggggccagggaaccctggtcaccgtgtcctctacgcgtatccagaaccctgatcctgccgtgtaccagctgcgggatagcaagagcagcgacaagagcgtgtgtctgttcaccgacttcgacagccagaccaacgtgtcccagagcaaggactccgacgtgtacatcaccgataagaccgtgctggacatgcggagcatggacttcaagagcaactccgccgtggcctggtccaacaagtccgatttcgcctgcgccaacgccttcaacaacagcattatccccgaggacacattcttcccaagccccgagagcagctgcggtaccatcactcaaggtttggcagtgtcaaccatctcatcattctttccacctggctaccaagtgtccttctgcctggtcatggtgctgctgttcgccgtggataccggcctgtacttcagcgtcaag

SEQ ID NO: 36090 - DNA, 2151 bp, synthetic construct
  source 1..2151: mol_type = other DNA
atggccttaccagtgaccgccttgctcctgccgctggccttgctgctccacgccgccaggccggacatccagatgacacagagccctagcagcctgtctgccagcgtgggagacagagtgaccatcacatgcaaggccagcgaccacatcaacaactggctggcctggtatcagcagaagcctggcaaggcccctaagctgctgatctacggcgctaccacactggaaacaggcgtgcccagcagattttctggcagcggctctggcaccgacttcaccctgacaatatccagcctccagcctgaggacttcgccacctactactgtcagcagagctggaacaccccttggacattcggccagggcaccaaggtggaaatcaagagactcgaggacctgaagaacgtgttcccacctgaggtggccgtgttcgagcctagcgaggccgagatcagccacacccagaaagccaccctcgtgtgcctggctaccggcttctaccccgaccatgtggaactgtcttggtgggtcaacggcaaagaggtgcacagcggcgtgtctaccgacccccagccactgaaagaacagcccgccctgaacgacagccggtactgcctgagcagcagactgagagtgtccgccaccttctggcagaacccccggaaccacttcagatgccaggtgcagttctacggcctgagcgagaacgacgagtggacccaggacagagccaagcccgtgacccagatcgtgtctgccgaagcctggggcagagccgattgcggatcccagagcttcggcctgctggaccccaagctgtgctacctgctggatggcatcctgttcatctacggcgtgatcctgaccgccctgttcctgagagtgaagttcagcagaagcgccgacgcccctgcctaccagcagggacagaaccaactgtacaacgagctgaacctgggcagacgggaagagtacgacgtgctggacaagcggagaggcagggaccctgagatgggcggaaagccccagcggagaaagaacccccaggaaggactgtataacgaactccagaaagacaagatggccgaagcctacagcgagatcggcatgaagggcgagcggagaagaggcaagggccacgatggcctgtaccagggcctgagcaccgccaccaaggacacctatgacgccctgcacatgcaggccctgcctccaagaagggccaagcgatctggatctggagcaacaaacttctcactactcaaacaagcaggtgacgtggaggagaatcccgggcctactagtatggactggatttggcgcatccttttccttgtcggcgctgctaccggcgcgcattccttcgaagaagttcagctggttgaatctggcggcggactggttcaacctggcggatctctgagactgagctgtgccgcctctggctacacctttagcagctactgggtcaactgggttcgacaggcccctggcaaaggactggaatgggtcgcccaaatctatcccggcgacggcgacaccaactacaacggcaagttcaagggcagattcaccatcagccgggacaacagcaagaacaccctgtacctccagatgaactccctgagagccgaggacaccgccgtgtactattgtgccagatccatcaccaccgtcgtgggctgcgctatggattattggggccagggaaccctggtcaccgtgtcctctacgcgtatccagaaccctgatcctgccgtgtaccagctgcgggatagcaagagcagcgacaagagcgtgtgtctgttcaccgacttcgacagccagaccaacgtgtcccagagcaaggactccgacgtgtacatcaccgataagaccgtgctggacatgcggagcatggacttcaagagcaactccgccgtggcctggtccaacaagtccgatttcgcctgcgccaacgccttcaacaacagcattatccccgaggacacattcttcccaagccccgagagcagctgcggtaccatcactcaaggtttggcagtgtcaaccatctcatcattctttccacctggctaccaagtgtccttctgcctggtcatggtgctgctgttcgccgtggataccggcctgtacttcagcgtcaagacc

SEQ ID NO: 36091 - DNA, 1962 bp, synthetic construct
  source 1..1962: mol_type = other DNA
atggccttaccagtgaccgccttgctcctgccgctggccttgctgctccacgccgccaggccggacatccagatgacacagagccctagcagcctgtctgccagcgtgggagacagagtgaccatcacatgcaaggccagcgaccacatcaacaactggctggcctggtatcagcagaagcctggcaaggcccctaagctgctgatctacggcgctaccacactggaaacaggcgtgcccagcagattttctggcagcggctctggcaccgacttcaccctgacaatatccagcctccagcctgaggacttcgccacctactactgtcagcagagctggaacaccccttggacattcggccagggcaccaaggtggaaatcaagagactcgagggacagcctaaggccaatcctaccgtgacactgttccctccaagcagcgaagaactccaggccaacaaggccacacttgtgtgcctgatctccgacttctaccctggggctgtgacagtggcttggaaggccgatggatctcctgtgaaagccggcgtggaaaccaccaagccatccaagcagagcaacaacaaatacgccgccagctcctacctgagcctgacacctgagcagtggaagtcccacagatcctacagctgccaagtgacccacgaaggcagcaccgtggaaaagacagtggcccctacagagtgcagcggatccctgggagagcctcagctgtgctatatcctggacgccatcctgtttctgtacggcatcgtgctgaccctgctgtactgccggctgaagatccaagtgcggaaggccgccatcaccagctacgagaaatccgacggcgtgtacaccggcctgagcaccagaaatcaagagacatacgagacactgaagcacgaaaagcctccacaaagggccaagcgatctggatctggagcaacaaacttctcactactcaaacaagcaggtgacgtggaggagaatcccgggcctactagtatggactggatttggcgcatccttttccttgtcggcgctgctaccggcgcgcattccttcgaagaagttcagctggttgaatctggcggcggactggttcaacctggcggatctctgagactgagctgtgccgcctctggctacacctttagcagctactgggtcaactgggttcgacaggcccctggcaaaggactggaatgggtcgcccaaatctatcccggcgacggcgacaccaactacaacggcaagttcaagggcagattcaccatcagccgggacaacagcaagaacaccctgtacctccagatgaactccctgagagccgaggacaccgccgtgtactattgtgccagatccatcaccaccgtcgtgggctgcgctatggattattggggccagggaaccctggtcaccgtgtcctctacgcgtgcctctacaaagggaccctccgtgtttcctctggctcccagcagcaagtctacaagcggaggaacagccgctctgggctgcctggtcaaggattactttcccgagcctgtgaccgtgtcctggaatagcggagcactgacaagcggcgtgcacacctttccagccgtgctgcaaagcagcggcctgtactctctgagcagcgtggtcacagtgcctagctctagcctgggcacccagacctacatctgcaatgtgaaccacaagcctagcaacaccaaggtggacaagagagtggaacccaagagctgtggtaccctcggagaaccacagctctgttacattctggatgctatcctgttcctctatgggatcgtcctgacactcctgtattgcagactcaaaattcaagttcgcaaagccgccattacctcttacgagaagagtgatggggtgtacacaggactgtctacccggaatcaagaaacctacgaaaccctcaaacatgagaagccacctcagtaa

SEQ ID NO: 36092 - DNA, 1869 bp, synthetic construct
  source 1..1869: mol_type = other DNA
atggccttaccagtgaccgccttgctcctgccgctggccttgctgctccacgccgccaggccggacatccagatgacacagagccctagcagcctgtctgccagcgtgggagacagagtgaccatcacatgcaaggccagcgaccacatcaacaactggctggcctggtatcagcagaagcctggcaaggcccctaagctgctgatctacggcgctaccacactggaaacaggcgtgcccagcagattttctggcagcggctctggcaccgacttcaccctgacaatatccagcctccagcctgaggacttcgccacctactactgtcagcagagctggaacaccccttggacattcggccagggcaccaaggtggaaatcaagagactcgaggacctgaagaacgtgttcccacctgaggtggccgtgttcgagcctagcgaggccgagatcagccacacccagaaagccaccctcgtgtgcctggctaccggcttctaccccgaccatgtggaactgtcttggtgggtcaacggcaaagaggtgcacagcggcgtgtgtaccgacccccagccactgaaagaacagcccgccctgaacgacagccggtactgcctgagcagcagactgagagtgtccgccaccttctggcagaacccccggaaccacttcagatgccaggtgcagttctacggcctgagcgagaacgacgagtggacccaggacagagccaagcccgtgacccagatcgtgtctgccgaagcctggggcagagccgattgcggctttaccagcgagagctaccagcagggcgtgctgagcgcctactacatgtacttgttgctgctgctgaagtccgtggtgtacttcgccatcatcacatgctgcctgctgcggagaaccgccttctgctgcaacggcgagaagtctagggccaagcgatctggatctggagcaacaaacttctcactactcaaacaagcaggtgacgtggaggagaatcccgggcctactagtatggactggatttggcgcatccttttccttgtcggcgctgctaccggcgcgcattccttcgaagaagttcagctggttgaatctggcggcggactggttcaacctggcggatctctgagactgagctgtgccgcctctggctacacctttagcagctactgggtcaactgggttcgacaggcccctggcaaaggactggaatgggtcgcccaaatctatcccggcgacggcgacaccaactacaacggcaagttcaagggcagattcaccatcagccgggacaacagcaagaacaccctgtacctccagatgaactccctgagagccgaggacaccgccgtgtactattgtgccagatccatcaccaccgtcgtgggctgcgctatggattattggggccagggaaccctggtcaccgtgtcctctacgcgtatccagaaccctgatcctgccgtgtaccagctgcgggatagcaagagcagcgacaagagcgtgtgtctgttcaccgacttcgacagccagaccaacgtgtcccagagcaaggactccgacgtgtacatcaccgataagtgcgtgctggacatgcggagcatggacttcaagagcaactccgccgtggcctggtccaacaagtccgatttcgcctgcgccaacgccttcaacaacagcattatccccgaggacacattcttcccaagccccgagagcagctgcgacgtgaagctggtggaaaagagcttcgagacagacaccaacctgaacttccagaacctgagcgtgatcggcttcagaatcctgctgctgaaagtggccggctttaacctgctgatgaccctgcggctgtggtccagc

SEQ ID NO: 36093 - DNA, 1890 bp, synthetic construct
  source 1..1890: mol_type = other DNA
atggccttaccagtgaccgccttgctcctgccgctggccttgctgctccacgccgccaggccggacatccagatgacacagagccctagcagcctgtctgccagcgtgggagacagagtgaccatcacatgcaaggccagcgaccacatcaacaactggctggcctggtatcagcagaagcctggcaaggcccctaagctgctgatctacggcgctaccacactggaaacaggcgtgcccagcagattttctggcagcggctctggcaccgacttcaccctgacaatatccagcctccagcctgaggacttcgccacctactactgtcagcagagctggaacaccccttggacattcggccagggcaccaaggtggaaatcaagagactcgaggacaagcagctggacgccgacgtgtcccccaagcctaccatcttcctgccctctatcgccgagacaaagctccagaaggccggcacctacctgtgcctgctggaaaagttcttcccagatgtgattaagatccactggcaggaaaagaagtccaacaccatcctgggcagccaggaaggcaacaccatgaagaccaacgacacctacatgaagttcagctggctgaccgtgcccgagaagtccctggacaaagaacacagatgcatcgtgcggcacgaaaacaacaagaacggcgtggaccaggaaatcatcttcccacccatcaagaccgatgtgattacaatggaccccaaggacaactgctccaaggacgccaacgataccctgctgctccagctgaccaacaccagcgcctactacatgtacgagatcctgctgggcaaggccaccctgtacgccgtgctggtgtctgccctggtgctgatggctatggtcaagcggaaggacagccggggaagggccaagcgatctggatctggagcaacaaacttctcactactcaaacaagcaggtgacgtggaggagaatcccgggcctactagtatggactggatttggcgcatccttttccttgtcggcgctgctaccggcgcgcattccttcgaagaagttcagctggttgaatctggcggcggactggttcaacctggcggatctctgagactgagctgtgccgcctctggctacacctttagcagctactgggtcaactgggttcgacaggcccctggcaaaggactggaatgggtcgcccaaatctatcccggcgacggcgacaccaactacaacggcaagttcaagggcagattcaccatcagccgggacaacagcaagaacaccctgtacctccagatgaactccctgagagccgaggacaccgccgtgtactattgtgccagatccatcaccaccgtcgtgggctgcgctatggattattggggccagggaaccctggtcaccgtgtcctctacgcgtagccagcctcacaccaagcccagcgtgttcgtgatgaagaacggcaccaacgtggcctgcctcgtgaaagagttctaccccaaggacatcaggatcaacctggtgtccagcaagaagatcaccgagttcgaccccgccatcgtgatctcccccagcggcaagtacaacgccgtgaagctggggaagtatgaggacagcaacagcgtgacctgctccgtgcagcacgacaacaagaccgtgcacagcaccgactttgaagtgaaaaccgactccaccgaccacgtgaagcccaaagagacagagaacaccaagcagcccagcaagagctgccacaagcccaaggccatcgtgcacaccgagaaagtgaacatgatgagcctgaccgtgatcggcttcagaatcctgctgctgaaagtggccggctttaacctgctgatgaccctgcggctgtggtccagctaa

SEQ ID NO: 36094 - DNA, 1890 bp, synthetic construct
  source 1..1890: mol_type = other DNA
atggccttaccagtgaccgccttgctcctgccgctggccttgctgctccacgccgccaggccggacatccagatgacacagagccctagcagcctgtctgccagcgtgggagacagagtgaccatcacatgcaaggccagcgaccacatcaacaactggctggcctggtatcagcagaagcctggcaaggcccctaagctgctgatctacggcgctaccacactggaaacaggcgtgcccagcagattttctggcagcggctctggcaccgacttcaccctgacaatatccagcctccagcctgaggacttcgccacctactactgtcagcagagctggaacaccccttggacattcggccagggcaccaaggtggaaatcaagagactcgaggacaagcagctggacgccgacgtgtcccccaagcctaccatcttcctgccctctatcgccgagacaaagctccagaaggccggcacctacctgtgcctgctggaaaagttcttcccagatgtgattaagatccactggcaggaaaagaagtccaacaccatcctgggcagccaggaaggcaacaccatgaagaccaacgacacctacatgaagttcagctggctgaccgtgcccgagaagtccctggacaaagaacacagatgcatcgtgcggcacgaaaacaacaagaacggcgtggaccaggaaatcatcttcccacccatcaagaccgatgtgattacaatggaccccaaggacaactgctccaaggacgccaacgataccctgctgctccagctgaccaacaccagcgccaccatcctgtacgagatcctgctgggcaaggccaccctgtacgccgtgctggtgtctgccctggtgctgatggctatggtcaagcggaaggacagccggggaagggccaagcgatctggatctggagcaacaaacttctcactactcaaacaagcaggtgacgtggaggagaatcccgggcctactagtatggactggatttggcgcatccttttccttgtcggcgctgctaccggcgcgcattccttcgaagaagttcagctggttgaatctggcggcggactggttcaacctggcggatctctgagactgagctgtgccgcctctggctacacctttagcagctactgggtcaactgggttcgacaggcccctggcaaaggactggaatgggtcgcccaaatctatcccggcgacggcgacaccaactacaacggcaagttcaagggcagattcaccatcagccgggacaacagcaagaacaccctgtacctccagatgaactccctgagagccgaggacaccgccgtgtactattgtgccagatccatcaccaccgtcgtgggctgcgctatggattattggggccagggaaccctggtcaccgtgtcctctacgcgtagccagcctcacaccaagcccagcgtgttcgtgatgaagaacggcaccaacgtggcctgcctcgtgaaagagttctaccccaaggacatcaggatcaacctggtgtccagcaagaagatcaccgagttcgaccccgccatcgtgatctcccccagcggcaagtacaacgccgtgaagctggggaagtatgaggacagcaacagcgtgacctgctccgtgcagcacgacaacaagaccgtgcacagcaccgactttgaagtgaaaaccgactccaccgaccacgtgaagcccaaagagacagagaacaccaagcagcccagcaagagctgccacaagcccaaggccatcgtgcacaccgagaaagtgaacatgatgagcctgaccgtgatcggcttcagaatcctgctgctgaaagtggccggctttaacctgctgatgaccctgcggctgtggtccagctaa

SEQ ID NO: 36095 - DNA, 1890 bp, synthetic construct
  source 1..1890: mol_type = other DNA
atggccttaccagtgaccgccttgctcctgccgctggccttgctgctccacgccgccaggccggacatccagatgacacagagccctagcagcctgtctgccagcgtgggagacagagtgaccatcacatgcaaggccagcgaccacatcaacaactggctggcctggtatcagcagaagcctggcaaggcccctaagctgctgatctacggcgctaccacactggaaacaggcgtgcccagcagattttctggcagcggctctggcaccgacttcaccctgacaatatccagcctccagcctgaggacttcgccacctactactgtcagcagagctggaacaccccttggacattcggccagggcaccaaggtggaaatcaagagactcgaggacaagcagctggacgccgacgtgtcccccaagcctaccatcttcctgccctctatcgccgagacaaagctccagaaggccggcacctacctgtgcctgctggaaaagttcttcccagatgtgattaagatccactggcaggaaaagaagtccaacaccatcctgggcagccaggaaggcaacaccatgaagaccaacgacacctacatgaagttcagctggctgaccgtgcccgagaagtccctggacaaagaacacagatgcatcgtgcggcacgaaaacaacaagaacggcgtggaccaggaaatcatcttcccacccatcaagaccgatgtgattacaatggaccccaaggacaactgctccaaggacgccaacgataccctgctgctccagctgaccaacaccagcgcctactacatgtacgagatcctgctgggcaaggccaccctgtacgccgtgctggtgtctgccctggtgctgatggctatggtcaagcggaaggacagccggggaagggccaagcgatctggatctggagcaacaaacttctcactactcaaacaagcaggtgacgtggaggagaatcccgggcctactagtatggactggatttggcgcatccttttccttgtcggcgctgctaccggcgcgcattccttcgaagaagttcagctggttgaatctggcggcggactggttcaacctggcggatctctgagactgagctgtgccgcctctggctacacctttagcagctactgggtcaactgggttcgacaggcccctggcaaaggactggaatgggtcgcccaaatctatcccggcgacggcgacaccaactacaacggcaagttcaagggcagattcaccatcagccgggacaacagcaagaacaccctgtacctccagatgaactccctgagagccgaggacaccgccgtgtactattgtgccagatccatcaccaccgtcgtgggctgcgctatggattattggggccagggaaccctggtcaccgtgtcctctacgcgtagccagcctcacaccaagcccagcgtgttcgtgatgaagaacggcaccaacgtggcctgcctcgtgaaagagttctaccccaaggacatcaggatcaacctggtgtccagcaagaagatcaccgagttcgaccccgccatcgtgatctcccccagcggcaagtacaacgccgtgaagctggggaagtacgaggacagcaacagcgtgacctgctccgtgcagcacgacaacaagaccgtgcacagcaccgactttgaagtgaaaaccgactccaccgaccacgtgaagcccaaagagacagagaacaccaagcagcccagcaagagctgccacaagcccaaggccatcgtgcacaccgagaaagtgaacatgatgagcctgaccgtgctgggcttcagaatcctgctgctgaaagtggccggctttaacctgctgatgaccctgcggctgtggtccagctaa

SEQ ID NO: 36096 - DNA, 1890 bp, synthetic construct
  source 1..1890: mol_type = other DNA
atggccttaccagtgaccgccttgctcctgccgctggccttgctgctccacgccgccaggccggacatccagatgacacagagccctagcagcctgtctgccagcgtgggagacagagtgaccatcacatgcaaggccagcgaccacatcaacaactggctggcctggtatcagcagaagcctggcaaggcccctaagctgctgatctacggcgctaccacactggaaacaggcgtgcccagcagattttctggcagcggctctggcaccgacttcaccctgacaatatccagcctccagcctgaggacttcgccacctactactgtcagcagagctggaacaccccttggacattcggccagggcaccaaggtggaaatcaagagactcgaggacaagcagctggacgccgacgtgtcccccaagcctaccatcttcctgccctctatcgccgagacaaagctccagaaggccggcacctacctgtgcctgctggaaaagttcttcccagatgtgattaagatccactggcaggaaaagaagtccaacaccatcctgggcagccaggaaggcaacaccatgaagaccaacgacacctacatgaagttcagctggctgaccgtgcccgagaagtccctggacaaagaacacagatgcatcgtgcggcacgaaaacaacaagaacggcgtggaccaggaaatcatcttcccacccatcaagaccgatgtgattacaatggaccccaaggacaactgctccaaggacgccaacgataccctgctgctccagctgaccaacaccagcgccaccatcctgtacgagatcctgctgggcaaggccaccctgtacgccgtgctggtgtctgccctggtgctgatggctatggtcaagcggaaggacagccggggaagggccaagcgatctggatctggagcaacaaacttctcactactcaaacaagcaggtgacgtggaggagaatcccgggcctactagtatggactggatttggcgcatccttttccttgtcggcgctgctaccggcgcgcattccttcgaagaagttcagctggttgaatctggcggcggactggttcaacctggcggatctctgagactgagctgtgccgcctctggctacacctttagcagctactgggtcaactgggttcgacaggcccctggcaaaggactggaatgggtcgcccaaatctatcccggcgacggcgacaccaactacaacggcaagttcaagggcagattcaccatcagccgggacaacagcaagaacaccctgtacctccagatgaactccctgagagccgaggacaccgccgtgtactattgtgccagatccatcaccaccgtcgtgggctgcgctatggattattggggccagggaaccctggtcaccgtgtcctctacgcgtagccagcctcacaccaagcccagcgtgttcgtgatgaagaacggcaccaacgtggcctgcctcgtgaaagagttctaccccaaggacatcaggatcaacctggtgtccagcaagaagatcaccgagttcgaccccgccatcgtgatctcccccagcggcaagtacaacgccgtgaagctggggaagtacgaggacagcaacagcgtgacctgctccgtgcagcacgacaacaagaccgtgcacagcaccgactttgaagtgaaaaccgactccaccgaccacgtgaagcccaaagagacagagaacaccaagcagcccagcaagagctgccacaagcccaaggccatcgtgcacaccgagaaagtgaacatgatgagcctgaccgtgctgggcttcagaatcctgctgctgaaagtggccggctttaacctgctgatgaccctgcggctgtggtccagctaa

SEQ ID NO: 36097 - DNA, 1872 bp, synthetic construct
  source 1..1872: mol_type = other DNA
atggccttaccagtgaccgccttgctcctgccgctggccttgctgctccacgccgccaggccggacatccagatgacacagagccctagcagcctgtctgccagcgtgggagacagagtgaccatcacatgcaaggccagcgaccacatcaacaactggctggcctggtatcagcagaagcctggcaaggcccctaagctgctgatctacggcgctaccacactggaaacaggcgtgcccagcagattttctggcagcggctctggcaccgacttcaccctgacaatatccagcctccagcctgaggacttcgccacctactactgtcagcagagctggaacaccccttggacattcggccagggcaccaaggtggaaatcaagagactcgaggacctgaagaacgtgttcccacctgaggtggccgtgttcgagcctagcgaggccgagatcagccacacccagaaagccaccctcgtgtgcctggctaccggcttctaccccgaccatgtggaactgtcttggtgggtcaacggcaaagaggtgcacagcggcgtgtgtaccgacccccagccactgaaagaacagcccgccctgaacgacagccggtactgcctgagcagcagactgagagtgtccgccaccttctggcagaacccccggaaccacttcagatgccaggtgcagttctacggcctgagcgagaacgacgagtggacccaggacagagccaagcccgtgacccagatcgtgtctgccgaagcctggggcagagccgattgcggctttaccagcgagagctaccagcagggcgtgctgagcgccaccatcctgtacttgttgctgctgctgaagtccgtggtgtacttcgccatcatcacatgctgcctgctgcggagaaccgccttctgctgcaacggcgagaagtctagggccaagcgatctggatctggagcaacaaacttctcactactcaaacaagcaggtgacgtggaggagaatcccgggcctactagtatggactggatttggcgcatccttttccttgtcggcgctgctaccggcgcgcattccttcgaagaagttcagctggttgaatctggcggcggactggttcaacctggcggatctctgagactgagctgtgccgcctctggctacacctttagcagctactgggtcaactgggttcgacaggcccctggcaaaggactggaatgggtcgcccaaatctatcccggcgacggcgacaccaactacaacggcaagttcaagggcagattcaccatcagccgggacaacagcaagaacaccctgtacctccagatgaactccctgagagccgaggacaccgccgtgtactattgtgccagatccatcaccaccgtcgtgggctgcgctatggattattggggccagggaaccctggtcaccgtgtcctctacgcgtatccagaaccctgatcctgccgtgtaccagctgcgggatagcaagagcagcgacaagagcgtgtgtctgttcaccgacttcgacagccagaccaacgtgtcccagagcaaggactccgacgtgtacatcaccgataagtgcgtgctggacatgcggagcatggacttcaagagcaactccgccgtggcctggtccaacaagtccgatttcgcctgcgccaacgccttcaacaacagcattatccccgaggacacattcttcccaagccccgagagcagctgcgacgtgaagctggtggaaaagagcttcgagacagacaccaacctgaacttccagaacctgagcgtgatcggcctgcggatgctgttcgccaaaaccgtggccgtgaacttcctgctgaccgccaagctgttcttcctctaa

SEQ ID NO: 36098 - DNA, 1959 bp, synthetic construct
  source 1..1959: mol_type = other DNA
atggccttaccagtgaccgccttgctcctgccgctggccttgctgctccacgccgccaggccggacatccagatgacacagagccctagcagcctgtctgccagcgtgggagacagagtgaccatcacatgcaaggccagcgaccacatcaacaactggctggcctggtatcagcagaagcctggcaaggcccctaagctgctgatctacggcgctaccacactggaaacaggcgtgcccagcagattttctggcagcggctctggcaccgacttcaccctgacaatatccagcctccagcctgaggacttcgccacctactactgtcagcagagctggaacaccccttggacattcggccagggcaccaaggtggaaatcaagagactcgaggacctgaagaacgtgttcccacctgaggtggccgtgttcgagcctagcgaggccgagatcagccacacccagaaagccaccctcgtgtgcctggctaccggcttctaccccgaccatgtggaactgtcttggtgggtcaacggcaaagaggtgcacagcggcgtgtctaccgacccccagccactgaaagaacagcccgccctgaacgacagccggtactgcctgagcagcagactgagagtgtccgccaccttctggcagaacccccggaaccacttcagatgccaggtgcagttctacggcctgagcgagaacgacgagtggacccaggacagagccaagcccgtgacccagatcgtgtctgccgaagcctggggcagagccgattgcggatcctccaaggacgccaacgataccctgctgctccagctgaccaacaccagcgcctactacatgtacttgttgctgctgctgaagtccgtggtgtacttcgccatcatcacatgctgcctgctgcggagaaccgccttctgctgcaacggcgagaagtctagggccaagcgatctggatctggagcaacaaacttctcactactcaaacaagcaggtgacgtggaggagaatcccgggcctactagtatggactggatttggcgcatccttttccttgtcggcgctgctaccggcgcgcattccttcgaagaagttcagctggttgaatctggcggcggactggttcaacctggcggatctctgagactgagctgtgccgcctctggctacacctttagcagctactgggtcaactgggttcgacaggcccctggcaaaggactggaatgggtcgcccaaatctatcccggcgacggcgacaccaactacaacggcaagttcaagggcagattcaccatcagccgggacaacagcaagaacaccctgtacctccagatgaactccctgagagccgaggacaccgccgtgtactattgtgccagatccatcaccaccgtcgtgggctgcgctatggattattggggccagggaaccctggtcaccgtgtcctctacgcgtatccagaaccctgatcctgccgtgtaccagctgcgggatagcaagagcagcgacaagagcgtgtgtctgttcaccgacttcgacagccagaccaacgtgtcccagagcaaggactccgacgtgtacatcaccgataagaccgtgctggacatgcggagcatggacttcaagagcaactccgccgtggcctggtccaacaagtccgatttcgcctgcgccaacgccttcaacaacagcattatccccgaggacacattcttcccaagccccgagagcagctgcggtaccgaagtgaaaaccgactccaccgaccacgtgaagcccaaagagacagagaacaccaagcagcccagcaagagctgccacaagcccaaggccatcgtgcacaccgagaaagtgaacatgatgagcctgaccgtgctgggcctgcggatgctgttcgccaaaaccgtggccgtgaacttcctgctgaccgccaagctgttcttcctctaa

SEQ ID NO: 36099 - DNA, 1869 bp, synthetic construct
  source 1..1869: mol_type = other DNA
atggccttaccagtgaccgccttgctcctgccgctggccttgctgctccacgccgccaggccggacatccagatgacacagagccctagcagcctgtctgccagcgtgggagacagagtgaccatcacatgcaaggccagcgaccacatcaacaactggctggcctggtatcagcagaagcctggcaaggcccctaagctgctgatctacggcgctaccacactggaaacaggcgtgcccagcagattttctggcagcggctctggcaccgacttcaccctgacaatatccagcctccagcctgaggacttcgccacctactactgtcagcagagctggaacaccccttggacattcggccagggcaccaaggtggaaatcaagagactcgaggacctgaagaacgtgttcccacctgaggtggccgtgttcgagcctagcgaggccgagatcagccacacccagaaagccaccctcgtgtgcctggctaccggcttctaccccgaccatgtggaactgtcttggtgggtcaacggcaaagaggtgcacagcggcgtgtgtaccgacccccagccactgaaagaacagcccgccctgaacgacagccggtactgcctgagcagcagactgagagtgtccgccaccttctggcagaacccccggaaccacttcagatgccaggtgcagttctacggcctgagcgagaacgacgagtggacccaggacagagccaagcccgtgacccagatcgtgtctgccgaagcctggggcagagccgattgcgacgtgaagctggtggaaaagagcttcgagacagacaccaacctgaacttccagaacctgagcgtgatcggcttcagaatcctgctgctgaaagtggccggctttaacctgctgatgaccctgcggctgtggtccagcagggccaagcgatctggatctggagcaacaaacttctcactactcaaacaagcaggtgacgtggaggagaatcccgggcctactagtatggactggatttggcgcatccttttccttgtcggcgctgctaccggcgcgcattccttcgaagaagttcagctggttgaatctggcggcggactggttcaacctggcggatctctgagactgagctgtgccgcctctggctacacctttagcagctactgggtcaactgggttcgacaggcccctggcaaaggactggaatgggtcgcccaaatctatcccggcgacggcgacaccaactacaacggcaagttcaagggcagattcaccatcagccgggacaacagcaagaacaccctgtacctccagatgaactccctgagagccgaggacaccgccgtgtactattgtgccagatccatcaccaccgtcgtgggctgcgctatggattattggggccagggaaccctggtcaccgtgtcctctacgcgtatccagaaccctgatcctgccgtgtaccagctgcgggatagcaagagcagcgacaagagcgtgtgtctgttcaccgacttcgacagccagaccaacgtgtcccagagcaaggactccgacgtgtacatcaccgataagtgcgtgctggacatgcggagcatggacttcaagagcaactccgccgtggcctggtccaacaagtccgatttcgcctgcgccaacgccttcaacaacagcattatccccgaggacacattcttcccaagccccgagagcagctgcggctttaccagcgagagctaccagcagggcgtgctgagcgccaccatcctgtacgagatcctgctgggcaaggccaccctgtacgccgtgctggtgtctgccctggtgctgatggctatggtcaagcggaaggacagccggggataa

SEQ ID NO: 36100 - DNA, 1869 bp, synthetic construct
  source 1..1869: mol_type = other DNA
atggccttaccagtgaccgccttgctcctgccgctggccttgctgctccacgccgccaggccggacatccagatgacacagagccctagcagcctgtctgccagcgtgggagacagagtgaccatcacatgcaaggccagcgaccacatcaacaactggctggcctggtatcagcagaagcctggcaaggcccctaagctgctgatctacggcgctaccacactggaaacaggcgtgcccagcagattttctggcagcggctctggcaccgacttcaccctgacaatatccagcctccagcctgaggacttcgccacctactactgtcagcagagctggaacaccccttggacattcggccagggcaccaaggtggaaatcaagagactcgaggacctgaagaacgtgttcccacctgaggtggccgtgttcgagcctagcgaggccgagatcagccacacccagaaagccaccctcgtgtgcctggctaccggcttctaccccgaccatgtggaactgtcttggtgggtcaacggcaaagaggtgcacagcggcgtgtgtaccgacccccagccactgaaagaacagcccgccctgaacgacagccggtactgcctgagcagcagactgagagtgtccgccaccttctggcagaacccccggaaccacttcagatgccaggtgcagttctacggcctgagcgagaacgacgagtggacccaggacagagccaagcccgtgacccagatcgtgtctgccgaagcctggggcagagccgattgcggctttaccagcgagagctaccagcagggcgtgctgagcgccaccaacctgagcgtgatcggcttcagaatcctgctgctgaaagtggccggctttaacctgctgatgaccctgcggctgtggtccagcagggccaagcgatctggatctggagcaacaaacttctcactactcaaacaagcaggtgacgtggaggagaatcccgggcctactagtatggactggatttggcgcatccttttccttgtcggcgctgctaccggcgcgcattccttcgaagaagttcagctggttgaatctggcggcggactggttcaacctggcggatctctgagactgagctgtgccgcctctggctacacctttagcagctactgggtcaactgggttcgacaggcccctggcaaaggactggaatgggtcgcccaaatctatcccggcgacggcgacaccaactacaacggcaagttcaagggcagattcaccatcagccgggacaacagcaagaacaccctgtacctccagatgaactccctgagagccgaggacaccgccgtgtactattgtgccagatccatcaccaccgtcgtgggctgcgctatggattattggggccagggaaccctggtcaccgtgtcctctacgcgtatccagaaccctgatcctgccgtgtaccagctgcgggatagcaagagcagcgacaagagcgtgtgtctgttcaccgacttcgacagccagaccaacgtgtcccagagcaaggactccgacgtgtacatcaccgataagtgcgtgctggacatgcggagcatggacttcaagagcaactccgccgtggcctggtccaacaagtccgatttcgcctgcgccaacgccttcaacaacagcattatccccgaggacacattcttcccaagccccgagagcagctgcgacgtgaagctggtggaaaagagcttcgagacagacaccaacctgaacttccagatcctgtacgagatcctgctgggcaaggccaccctgtacgccgtgctggtgtctgccctggtgctgatggctatggtcaagcggaaggacagccggggataa

SEQ ID NO: 36101 - DNA, 1869 bp, synthetic construct; identical to SEQ ID NO: 36099
  source 1..1869: mol_type = other DNA

SEQ ID NO: 36102 - DNA, 1869 bp, synthetic construct; identical to SEQ ID NO: 36100
  source 1..1869: mol_type = other DNA

SEQ ID NO: 36103 - DNA, 1866 bp, synthetic construct
  source 1..1866: mol_type = other DNA
atggccttaccagtgaccgccttgctcctgccgctggccttgctgctccacgccgccaggccggacatccagatgacacagagccctagcagcctgtctgccagcgtgggagacagagtgaccatcacatgcaaggccagcgaccacatcaacaactggctggcctggtatcagcagaagcctggcaaggcccctaagctgctgatctacggcgctaccacactggaaacaggcgtgcccagcagattttctggcagcggctctggcaccgacttcaccctgacaatatccagcctccagcctgaggacttcgccacctactactgtcagcagagctggaacaccccttggacattcggccagggcaccaaggtggaaatcaagagactcgaggacctgaagaacgtgttcccacctgaggtggccgtgttcgagcctagcgaggccgagatcagccacacccagaaagccaccctcgtgtgcctggctaccggcttctaccccgaccatgtggaactgtcttggtgggtcaacggcaaagaggtgcacagcggcgtgtgtaccgacccccagccactgaaagaacagcccgccctgaacgacagccggtactgcctgagcagcagactgagagtgtccgccaccttctggcagaacccccggaaccacttcagatgccaggtgcagttctacggcctgagcgagaacgacgagtggacccaggacagagccaagcccgtgacccagatcgtgtctgccgaagcctggggcagagccgattgcgacgtgaagctggtggaaaagagcttcgagacagacaccaacctgaacttccagaacctgagcgtgatcggcttcagaatcctgctgctgaaagtggccggctttaacctgctgatgaccctgcggctgtggtccagcagggccaagcgatctggatctggagcaacaaacttctcactactcaaacaagcaggtgacgtggaggagaatcccgggcctactagtatggactggatttggcgcatccttttccttgtcggcgctgctaccggcgcgcattccttcgaagaagttcagctggttgaatctggcggcggactggttcaacctggcggatctctgagactgagctgtgccgcctctggctacacctttagcagctactgggtcaactgggttcgacaggcccctggcaaaggactggaatgggtcgcccaaatctatcccggcgacggcgacaccaactacaacggcaagttcaagggcagattcaccatcagccgggacaacagcaagaacaccctgtacctccagatgaactccctgagagccgaggacaccgccgtgtactattgtgccagatccatcaccaccgtcgtgggctgcgctatggattattggggccagggaaccctggtcaccgtgtcctctacgcgtatccagaaccctgatcctgccgtgtaccagctgcgggatagcaagagcagcgacaagagcgtgtgtctgttcaccgacttcgacagccagaccaacgtgtcccagagcaaggactccgacgtgtacatcaccgataagtgcgtgctggacatgcggagcatggacttcaagagcaactccgccgtggcctggtccaacaagtccgatttcgcctgcgccaacgccttcaacaacagcattatccccgaggacacattcttcccaagccccgagagcagctgcggctttaccagcgagagctaccagcagggcgtgctgagcgccaccatcctgtacgagatcctgctgggcaaggccaccctgtacgccgtgctggtgtctgccctggtgctgatggctatggtcaagcggaaggacagccgggga

SEQ ID NO: 36104 - DNA, 1878 bp, synthetic construct
  source 1..1878: mol_type = other DNA
atggccttaccagtgaccgccttgctcctgccgctggccttgctgctccacgccgccaggccggacatccagatgacacagagccctagcagcctgtctgccagcgtgggagacagagtgaccatcacatgcaaggccagcgaccacatcaacaactggctggcctggtatcagcagaagcctggcaaggcccctaagctgctgatctacggcgctaccacactggaaacaggcgtgcccagcagattttctggcagcggctctggcaccgacttcaccctgacaatatccagcctccagcctgaggacttcgccacctactactgtcagcagagctggaacaccccttggacattcggccagggcaccaaggtggaaatcaagagactcgaggccgacgtgtcccccaagcctaccatcttcctgccctctatcgccgagacaaagctccagaaggccggcacctacctgtgcctgctggaaaagttcttcccagatgtgattaagatccactggcaggaaaagaagtccaacaccatcctgggcagccaggaaggcaacaccatgaagaccaacgacacctacatgaagttcagctggctgaccgtgcccgagaagtccctggacaaagaacacagatgcatcgtgcggcacgaaaacaacaagaacggcgtggaccaggaaatcatcttcccacccatcaagaccgatgtgattacaatggaccccaaggacaactgctccaaggacgccaacgataccctgctgctccagctgaccaacaccagcgcctactacatgtacttgttgctgctgctgaagtccgtggtgtacttcgccatcatcacatgctgcctgctgcggagaaccgccttctgctgcaacggcgagaagtctagggccaagcgatctggatctggagcaacaaacttctcactactcaaacaagcaggtgacgtggaggagaatcccgggcctactagtatggactggatttggcgcatccttttccttgtcggcgctgctaccggcgcgcattccttcgaagaagttcagctggttgaatctggcggcggactggttcaacctggcggatctctgagactgagctgtgccgcctctggctacacctttagcagctactgggtcaactgggttcgacaggcccctggcaaaggactggaatgggtcgcccaaatctatcccggcgacggcgacaccaactacaacggcaagttcaagggcagattcaccatcagccgggacaacagcaagaacaccctgtacctccagatgaactccctgagagccgaggacaccgccgtgtactattgtgccagatccatcaccaccgtcgtgggctgcgctatggattattggggccagggaaccctggtcaccgtgtcctctacgcgtagccagcctcacaccaagcccagcgtgttcgtgatgaagaacggcaccaacgtggcctgcctcgtgaaagagttctaccccaaggacatcaggatcaacctggtgtccagcaagaagatcaccgagttcgaccccgccatcgtgatctcccccagcggcaagtacaacgccgtgaagctggggaagtatgaggacagcaacagcgtgacctgctccgtgcagcacgacaacaagaccgtgcacagcaccgactttgaagtgaaaaccgactccaccgaccacgtgaagcccaaagagacagagaacaccaagcagcccagcaagagctgccacaagcccaaggccatcgtgcacaccgagaaagtgaacatgatgagcctgaccgtgatcggcttcagaatcctgctgctgaaagtggccggctttaacctgctgatgaccctgcggctgtggtccagctaa

SEQ ID NO: 36105 - DNA, 1878 bp, synthetic construct
  source 1..1878: mol_type = other DNA
atggccttaccagtgaccgccttgctcctgccgctggccttgctgctccacgccgccaggccggacatccagatgacacagagccctagcagcctgtctgccagcgtgggagacagagtgaccatcacatgcaaggccagcgaccacatcaacaactggctggcctggtatcagcagaagcctggcaaggcccctaagctgctgatctacggcgctaccacactggaaacaggcgtgcccagcagattttctggcagcggctctggcaccgacttcaccctgacaatatccagcctccagcctgaggacttcgccacctactactgtcagcagagctggaacaccccttggacattcggccagggcaccaaggtggaaatcaagagactcgaggccgacgtgtcccccaagcctaccatcttcctgccctctatcgccgagacaaagctccagaaggccggcacctacctgtgcctgctggaaaagttcttcccagatgtgattaagatccactggcaggaaaagaagtccaacaccatcctgggcagccaggaaggcaacaccatgaagaccaacgacacctacatgaagttcagctggctgaccgtgcccgagaagtccctggacaaagaacacagatgcatcgtgcggcacgaaaacaacaagaacggcgtggaccaggaaatcatcttcccacccatcaagaccgatgtgattacaatggaccccaaggacaactgctccaaggacgccaacgataccctgctgctccagctgaccaacaccagcgcctactacatgtacttgttgctgctgctgaagtccgtggtgtacttcgccatcatcacatgctgcctgctgcggagaaccgccttctgctgcaacggcgagaagtctagggccaagcgatctggatctggagcaacaaacttctcactactcaaacaagcaggtgacgtggaggagaatcccgggcctactagtatggactggatttggcgcatccttttccttgtcggcgctgctaccggcgcgcattccttcgaagaagttcagctggttgaatctggcggcggactggttcaacctggcggatctctgagactgagctgtgccgcctctggctacacctttagcagctactgggtcaactgggttcgacaggcccctggcaaaggactggaatgggtcgcccaaatctatcccggcgacggcgacaccaactacaacggcaagttcaagggcagattcaccatcagccgggacaacagcaagaacaccctgtacctccagatgaactccctgagagccgaggacaccgccgtgtactattgtgccagatccatcaccaccgtcgtgggctgcgctatggattattggggccagggaaccctggtcaccgtgtcctctacgcgtagccagcctcacaccaagcccagcgtgttcgtgatgaagaacggcaccaacgtggcctgcctcgtgaaagagttctaccccaaggacatcaggatcaacctggtgtccagcaagaagatcaccgagttcgaccccgccatcgtgatctcccccagcggcaagtacaacgccgtgaagctggggaagtacgaggacagcaacagcgtgacctgctccgtgcagcacgacaacaagaccgtgcacagcaccgactttgaagtgaaaaccgactccaccgaccacgtgaagcccaaagagacagagaacaccaagcagcccagcaagagctgccacaagcccaaggccatcgtgcacaccgagaaagtgaacatgatgagcctgaccgtgctgggcttcagaatcctgctgctgaaagtggccggctttaacctgctgatgaccctgcggctgtggtccagctaa

SEQ ID NO: 36106 - DNA, 1866 bp, synthetic construct; identical to SEQ ID NO: 36103
  source 1..1866: mol_type = other DNA

SEQ ID NO: 36107 - DNA, 1878 bp, synthetic construct
  source 1..1878: mol_type = other DNA
atggccttaccagtgaccgccttgctcctgccgctggccttgctgctccacgccgccaggccggacatccagatgacacagagccctagcagcctgtctgccagcgtgggagacagagtgaccatcacatgcaaggccagcgaccacatcaacaactggctggcctggtatcagcagaagcctggcaaggcccctaagctgctgatctacggcgctaccacactggaaacaggcgtgcccagcagattttctggcagcggctctggcaccgacttcaccctgacaatatccagcctccagcctgaggacttcgccacctactactgtcagcagagctggaacaccccttggacattcggccagggcaccaaggtggaaatcaagagactcgagatccagaaccctgatcctgccgtgtaccagctgcgggatagcaagagcagcgacaagagcgtgtgtctgttcaccgacttcgacagccagaccaacgtgtcccagagcaaggactccgacgtgtacatcaccgataagtgcgtgctggacatgcggagcatggacttcaagagcaactccgccgtggcctggtccaacaagtccgatttcgcctgcgccaacgccttcaacaacagcattatccccgaggacacattcttcccaagccccgagagcagctgcggctttaccagcgagagctaccagcagggcgtgctgagcgccaccatcctgtacgagatcctgctgggcaaggccaccctgtacgccgtgctggtgtctgccctggtgctgatggctatggtcaagcggaaggacagccggggacgcgccaagagaagcggatctggcgtgaagcagaccctgaatttcgacctgctgaagctggctggcgacgtggaatccaacccaggccctactagtatggactggatttggcgcatccttttccttgtcggcgctgctaccggcgcgcattccttcgaagaagttcagctggttgaatctggcggcggactggttcaacctggcggatctctgagactgagctgtgccgcctctggctacacctttagcagctactgggtcaactgggttcgacaggcccctggcaaaggactggaatgggtcgcccaaatctatcccggcgacggcgacaccaactacaacggcaagttcaagggcagattcaccatcagccgggacaacagcaagaacaccctgtacctccagatgaactccctgagagccgaggacaccgccgtgtactattgtgccagatccatcaccaccgtcgtgggctgcgctatggattattggggccagggaaccctggtcaccgtgtcctctacgcgtgaggacctgaagaacgtgttcccacctgaggtggccgtgttcgagcctagcgaggccgagatcagccacacccagaaagccaccctcgtgtgcctggctaccggcttctaccccgaccatgtggaactgtcttggtgggtcaacggcaaagaggtgcacagcggcgtgtgtaccgacccccagccactgaaagaacagcccgccctgaacgacagccggtactgcctgagcagcagactgagagtgtccgccaccttctggcagaacccccggaaccacttcagatgccaggtgcagttctacggcctgagcgagaacgacgagtggacccaggacagagccaagcccgtgacccagatcgtgtctgccgaagcctggggcagagccgattgcgacgtgaagctggtggaaaagagcttcgagacagacaccaacctgaacttccagaacctgagcgtgatcggcttcagaatcctgctgctgaaagtggccggctttaacctgctgatgaccctgcggctgtggtccagc

SEQ ID NO: 36108 - DNA, 2271 bp, synthetic construct
  source 1..2271: mol_type = other DNA
atggccttaccagtgaccgccttgctcctgccgctggccttgctgctccacgccgccaggccggaagtgcagctggttgaatctggcggaggactggttcagcctggcggatctctgagactgtcttgtgccgccagcggcttcagcttcagcgacttttggatgagctgggtccgacaggcccctggcaaaggacttgaatgggtcgccacaatcagccaggccggcagcgagaaggactacgtggactctgtgaagggcagattcaccatcagccgggacaacgccaagaagtccctgtacctccagatgaacagcctgagagccgaggacaccgccgtgtactattgtgcctctggcgtgtacagcttcgactacagaggccagggcaccctggtcacagtctcttctggtaccggcggaggcggatctggcggcggaggtagcggtggcggaggatctgaattcgacatccagatgacacagagccctagcagcctgtctgccagcgtgggagacagagtgaccatcacatgcaaggccagcgaccacatcaacaactggctggcctggtatcagcagaagcctggcaaggcccctaagctgctgatctacggcgctaccacactggaaacaggcgtgcccagcagattttctggcagcggctctggcaccgacttcaccctgacaatatccagcctccagcctgaggacttcgccacctactactgtcagcagagctggaacaccccttggacattcggccagggcaccaaggtggaaatcaagagactcgaggacctgaagaacgtgttcccacctgaggtggccgtgttcgagcctagcgaggccgagatcagccacacccagaaagccaccctcgtgtgcctggctaccggcttctaccccgaccatgtggaactgtcttggtgggtcaacggcaaagaggtgcacagcggcgtgtgtaccgacccccagccactgaaagaacagcccgccctgaacgacagccggtactgcctgagcagcagactgagagtgtccgccaccttctggcagaacccccggaaccacttcagatgccaggtgcagttctacggcctgagcgagaacgacgagtggacccaggacagagccaagcccgtgacccagatcgtgtctgccgaagcctggggcagagccgattgcgacgtgaagctggtggaaaagagcttcgagacagacaccaacctgaacttccagaacctgagcgtgatcggcttcagaatcctgctgctgaaagtggccggctttaacctgctgatgaccctgcggctgtggtccagcagggccaagcgatctggatctggagcaacaaacttctcactactcaaacaagcaggtgacgtggaggagaatcccgggcctactagtatggactggatttggcgcatccttttccttgtcggcgctgctaccggcgcgcattccttcgaagaagttcagctggttgaatctggcggcggactggttcaacctggcggatctctgagactgagctgtgccgcctctggctacacctttagcagctactgggtcaactgggttcgacaggcccctggcaaaggactggaatgggtcgcccaaatctatcccggcgacggcgacaccaactacaacggcaagttcaagggcagattcaccatcagccgggacaacagcaagaacaccctgtacctccagatgaactccctgagagccgaggacaccgccgtgtactattgtgccagatccatcaccaccgtcgtgggctgcgctatggattattggggccagggaaccctggtcaccgtgtcctctacgcgtatccagaaccctgatcctgccgtgtaccagctgcgggatagcaagagcagcgacaagagcgtgtgtctgttcaccgacttcgacagccagaccaacgtgtcccagagcaaggactccgacgtgtacatcaccgataagtgcgtgctggacatgcggagcatggacttcaagagcaactccgccgtggcctggtccaacaagtccgatttcgcctgcgccaacgccttcaacaacagcattatccccgaggacacattcttcccaagccccgagagcagctgcggctttaccagcgagagctaccagcagggcgtgctgagcgccaccatcctgtacgagatcctgctgggcaaggccaccctgtacgccgtgctggtgtctgccctggtgctgatggctatggtcaagcggaaggacagccgggga

SEQ ID NO: 36109 - DNA, 2283 bp, synthetic construct
  source 1..2283: mol_type = other DNA
atggccttaccagtgaccgccttgctcctgccgctggccttgctgctccacgccgccaggccggaagtgcagctggttgaatctggcggaggactggttcagcctggcggatctctgagactgtcttgtgccgccagcggcttcagcttcagcgacttttggatgagctgggtccgacaggcccctggcaaaggacttgaatgggtcgccacaatcagccaggccggcagcgagaaggactacgtggactctgtgaagggcagattcaccatcagccgggacaacgccaagaagtccctgtacctccagatgaacagcctgagagccgaggacaccgccgtgtactattgtgcctctggcgtgtacagcttcgactacagaggccagggcaccctggtcacagtctcttctggtaccggcggaggcggatctggcggcggaggtagcggtggcggaggatctgaattcgacatccagatgacacagagccctagcagcctgtctgccagcgtgggagacagagtgaccatcacatgcaaggccagcgaccacatcaacaactggctggcctggtatcagcagaagcctggcaaggcccctaagctgctgatctacggcgctaccacactggaaacaggcgtgcccagcagattttctggcagcggctctggcaccgacttcaccctgacaatatccagcctccagcctgaggacttcgccacctactactgtcagcagagctggaacaccccttggacattcggccagggcaccaaggtggaaatcaagagactcgagatccagaaccctgatcctgccgtgtaccagctgcgggatagcaagagcagcgacaagagcgtgtgtctgttcaccgacttcgacagccagaccaacgtgtcccagagcaaggactccgacgtgtacatcaccgataagtgcgtgctggacatgcggagcatggacttcaagagcaactccgccgtggcctggtccaacaagtccgatttcgcctgcgccaacgccttcaacaacagcattatccccgaggacacattcttcccaagccccgagagcagctgcggctttaccagcgagagctaccagcagggcgtgctgagcgccaccatcctgtacgagatcctgctgggcaaggccaccctgtacgccgtgctggtgtctgccctggtgctgatggctatggtcaagcggaaggacagccggggacgcgccaagagaagcggatctggcgtgaagcagaccctgaatttcgacctgctgaagctggctggcgacgtggaatccaacccaggccctactagtatggactggatttggcgcatccttttccttgtcggcgctgctaccggcgcgcattccttcgaagaagttcagctggttgaatctggcggcggactggttcaacctggcggatctctgagactgagctgtgccgcctctggctacacctttagcagctactgggtcaactgggttcgacaggcccctggcaaaggactggaatgggtcgcccaaatctatcccggcgacggcgacaccaactacaacggcaagttcaagggcagattcaccatcagccgggacaacagcaagaacaccctgtacctccagatgaactccctgagagccgaggacaccgccgtgtactattgtgccagatccatcaccaccgtcgtgggctgcgctatggattattggggccagggaaccctggtcaccgtgtcctctacgcgtgaggacctgaagaacgtgttcccacctgaggtggccgtgttcgagcctagcgaggccgagatcagccacacccagaaagccaccctcgtgtgcctggctaccggcttctaccccgaccatgtggaactgtcttggtgggtcaacggcaaagaggtgcacagcggcgtgtgtaccgacccccagccactgaaagaacagcccgccctgaacgacagccggtactgcctgagcagcagactgagagtgtccgccaccttctggcagaacccccggaaccacttcagatgccaggtgcagttctacggcctgagcgagaacgacgagtggacccaggacagagccaagcccgtgacccagatcgtgtctgccgaagcctggggcagagccgattgcgacgtgaagctggtggaaaagagcttcgagacagacaccaacctgaacttccagaacctgagcgtgatcggcttcagaatcctgctgctgaaagtggccggctttaacctgctgatgaccctgcggctgtggtccagc

SEQ ID NO: 36110 - DNA, 2682 bp, synthetic construct
  source 1..2682: mol_type = other DNA
atggccttaccagtgaccgccttgctcctgccgctggccttgctgctccacgccgccaggccggaagtgcagctggttgaatctggcggaggactggttcagcctggcggatctctgagactgtcttgtgccgccagcggcttcagcttcagcgacttttggatgagctgggtccgacaggcccctggcaaaggacttgaatgggtcgccacaatcagccaggccggcagcgagaaggactacgtggactctgtgaagggcagattcaccatcagccgggacaacgccaagaagtccctgtacctccagatgaacagcctgagagccgaggacaccgccgtgtactattgtgcctctggcgtgtacagcttcgactacagaggccagggcaccctggtcacagtctcttctggtaccggcggaggcggatctggcggcggaggtagcggtggcggaggatctgaattcgacatccagatgacacagagccctagcagcctgtctgccagcgtgggagacagagtgaccatcacatgcaaggccagcgaccacatcaacaactggctggcctggtatcagcagaagcctggcaaggcccctaagctgctgatctacggcgctaccacactggaaacaggcgtgcccagcagattttctggcagcggctctggcaccgacttcaccctgacaatatccagcctccagcctgaggacttcgccacctactactgtcagcagagctggaacaccccttggacattcggccagggcaccaaggtggaaatcaagagactcgaggacctgaagaacgtgttcccacctgaggtggccgtgttcgagcctagcgaggccgagatcagccacacccagaaagccaccctcgtgtgcctggctaccggcttctaccccgaccatgtggaactgtcttggtgggtcaacggcaaagaggtgcacagcggcgtgtgtaccgacccccagccactgaaagaacagcccgccctgaacgacagccggtactgcctgagcagcagactgagagtgtccgccaccttctggcagaacccccggaaccacttcagatgccaggtgcagttctacggcctgagcgagaacgacgagtggacccaggacagagccaagcccgtgacccagatcgtgtctgccgaagcctggggcagagccgattgcgacgtgaagctggtggaaaagagcttcgagacagacaccaacctgaacttccagaacctgagcgtgatcggcttcagaatcctgctgctgaaagtggccggctttaacctgctgatgaccctgcggctgtggtccagcagggccaagcgatctggatctggagcaacaaacttctcactactcaaacaagcaggtgacgtggaggagaatcccgggcctactagtatggactggatttggcgcatccttttccttgtcggcgctgctaccggcgcgcattccgggccccagctccagctgcaagagtctggacctggcctggtcaagcctagcgagacactgagcctgacctgtaccgtgtccggcgatagcatcagcagcggcgattactactggggctggatcagacagcctcctggcaaaggactggaatggatcggccacatctactacagcggcgtgacctactacaaccccagcctgaagtccagagtgaccatcagcgtggacaccagccggaaccagttctccctgaagctgtctagcgtgacagccgccgataccgccgtgtactactgcaccagagaggacagcagcaactggcggagtagaggccagggaacactggtcacagttagctctggatccggcggaggcggaagtggaggcggaggatctggcggcggaggctctttcgaagaagttcagctggttgaatctggcggcggactggttcaacctggcggatctctgagactgagctgtgccgcctctggctacacctttagcagctactgggtcaactgggttcgacaggcccctggcaaaggactggaatgggtcgcccaaatctatcccggcgacggcgacaccaactacaacggcaagttcaagggcagattcaccatcagccgggacaacagcaagaacaccctgtacctccagatgaactccctgagagccgaggacaccgccgtgtactattgtgccagatccatcaccaccgtcgtgggctgcgctatggattattggggccagggaaccctggtcaccgtgtcctctacgcgtatccagaaccctgatcctgccgtgtaccagctgcgggatagcaagagcagcgacaagagcgtgtgtctgttcaccgacttcgacagccagaccaacgtgtcccagagcaaggactccgacgtgtacatcaccgataagtgcgtgctggacatgcggagcatggacttcaagagcaactccgccgtggcctggtccaacaagtccgatttcgcctgcgccaacgccttcaacaacagcattatccccgaggacacattcttcccaagccccgagagcagctgcggctttaccagcgagagctaccagcagggcgtgctgagcgccaccatcctgtacgagatcctgctgggcaaggccaccctgtacgccgtgctggtgtctgccctggtgctgatggctatggtcaagcggaaggacagccgggga

SEQ ID NO: 36111 - DNA, 2694 bp, synthetic construct
  source 1..2694: mol_type = other DNA
atggccttaccagtgaccgccttgctcctgccgctggccttgctgctccacgccgccaggccggaagtgcagctggttgaatctggcggaggactggttcagcctggcggatctctgagactgtcttgtgccgccagcggcttcagcttcagcgacttttggatgagctgggtccgacaggcccctggcaaaggacttgaatgggtcgccacaatcagccaggccggcagcgagaaggactacgtggactctgtgaagggcagattcaccatcagccgggacaacgccaagaagtccctgtacctccagatgaacagcctgagagccgaggacaccgccgtgtactattgtgcctctggcgtgtacagcttcgactacagaggccagggcaccctggtcacagtctcttctggtaccggcggaggcggatctggcggcggaggtagcggtggcggaggatctgaattcgacatccagatgacacagagccctagcagcctgtctgccagcgtgggagacagagtgaccatcacatgcaaggccagcgaccacatcaacaactggctggcctggtatcagcagaagcctggcaaggcccctaagctgctgatctacggcgctaccacactggaaacaggcgtgcccagcagattttctggcagcggctctggcaccgacttcaccctgacaatatccagcctccagcctgaggacttcgccacctactactgtcagcagagctggaacaccccttggacattcggccagggcaccaaggtggaaatcaagagactcgagatccagaaccctgatcctgccgtgtaccagctgcgggatagcaagagcagcgacaagagcgtgtgtctgttcaccgacttcgacagccagaccaacgtgtcccagagcaaggactccgacgtgtacatcaccgataagtgcgtgctggacatgcggagcatggacttcaagagcaactccgccgtggcctggtccaacaagtccgatttcgcctgcgccaacgccttcaacaacagcattatccccgaggacacattcttcccaagccccgagagcagctgcggctttaccagcgagagctaccagcagggcgtgctgagcgccaccatcctgtacgagatcctgctgggcaaggccaccctgtacgccgtgctggtgtctgccctggtgctgatggctatggtcaagcggaaggacagccggggacgcgccaagagaagcggatctggcgtgaagcagaccctgaatttcgacctgctgaagctggctggcgacgtggaatccaacccaggccctactagtatggactggatttggcgcatccttttccttgtcggcgctgctaccggcgcgcattccgggccccagctccagctgcaagagtctggacctggcctggtcaagcctagcgagacactgagcctgacctgtaccgtgtccggcgatagcatcagcagcggcgattactactggggctggatcagacagcctcctggcaaaggactggaatggatcggccacatctactacagcggcgtgacctactacaaccccagcctgaagtccagagtgaccatcagcgtggacaccagccggaaccagttctccctgaagctgtctagcgtgacagccgccgataccgccgtgtactactgcaccagagaggacagcagcaactggcggagtagaggccagggaacactggtcacagttagctctggatccggcggaggcggaagtggaggcggaggatctggcggcggaggctctttcgaagaagttcagctggttgaatctggcggcggactggttcaacctggcggatctctgagactgagctgtgccgcctctggctacacctttagcagctactgggtcaactgggttcgacaggcccctggcaaaggactggaatgggtcgcccaaatctatcccggcgacggcgacaccaactacaacggcaagttcaagggcagattcaccatcagccgggacaacagcaagaacaccctgtacctccagatgaactccctgagagccgaggacaccgccgtgtactattgtgccagatccatcaccaccgtcgtgggctgcgctatggattattggggccagggaaccctggtcaccgtgtcctctacgcgtgaggacctgaagaacgtgttcccacctgaggtggccgtgttcgagcctagcgaggccgagatcagccacacccagaaagccaccctcgtgtgcctggctaccggcttctaccccgaccatgtggaactgtcttggtgggtcaacggcaaagaggtgcacagcggcgtgtgtaccgacccccagccactgaaagaacagcccgccctgaacgacagccggtactgcctgagcagcagactgagagtgtccgccaccttctggcagaacccccggaaccacttcagatgccaggtgcagttctacggcctgagcgagaacgacgagtggacccaggacagagccaagcccgtgacccagatcgtgtctgccgaagcctggggcagagccgattgcgacgtgaagctggtggaaaagagcttcgagacagacaccaacctgaacttccagaacctgagcgtgatcggcttcagaatcctgctgctgaaagtggccggctttaacctgctgatgaccctgcggctgtggtccagc

SEQ ID NO: 36112 - DNA, 2076 bp, synthetic construct
  source 1..2076: mol_type = other DNA
atggccttaccagtgaccgccttgctcctgccgctggccttgctgctccacgccgccaggccggacatccagatgacacagagccctagcagcctgtctgccagcgtgggagacagagtgaccatcacatgcaaggccagcgaccacatcaacaactggctggcctggtatcagcagaagcctggcaaggcccctaagctgctgatctacggcgctaccacactggaaacaggcgtgcccagcagattttctggcagcggctctggcaccgacttcaccctgacaatatccagcctccagcctgaggacttcgccacctactactgtcagcagagctggaacaccccttggacattcggccagggcaccaaggtggaaatcaagagactcgaggacctgaagaacgtgttcccacctgaggtggccgtgttcgagcctagcgaggccgagatcagccacacccagaaagccaccctcgtgtgcctggctaccggcttctaccccgaccatgtggaactgtcttggtgggtcaacggcaaagaggtgcacagcggcgtgtgtaccgacccccagccactgaaagaacagcccgccctgaacgacagccggtactgcctgagcagcagactgagagtgtccgccaccttctggcagaacccccggaaccacttcagatgccaggtgcagttctacggcctgagcgagaacgacgagtggacccaggacagagccaagcccgtgacccagatcgtgtctgccgaagcctggggcagagccgattgcgacgtgaagctggtggaaaagagcttcgagacagacaccaacctgaacttccagaacctgagcgtgatcggcttcagaatcctgctgctgaaagtggccggctttaacctgctgatgaccctgcggctgtggtccagcagggccaagcgatctggatctggagcaacaaacttctcactactcaaacaagcaggtgacgtggaggagaatcccgggcctactagtatggactggatttggcgcatccttttccttgtcggcgctgctaccggcgcccattccgggcccatggaccccgacctggaaatcagagccgccttcctgcggcagagaaacacagccctgagaacagaggtggccgagctggaacaagaggtgcagcggctggaaaacgaggtgtcccagtacgagacaagatacggccctctcggaggcggaaaaggatccggcggcggaggatctggcggaggcggatctgggggcggaggctctttcgaagaagttcagctggttgaatctggcggcggactggttcaacctggcggatctctgagactgagctgtgccgcctctggctacacctttagcagctactgggtcaactgggttcgacaggcccctggcaaaggactggaatgggtcgcccaaatctatcccggcgacggcgacaccaactacaacggcaagttcaagggcagattcaccatcagccgggacaacagcaagaacaccctgtacctccagatgaactccctgagagccgaggacaccgccgtgtactattgtgccagatccatcaccaccgtcgtgggctgcgctatggattattggggccagggaaccctggtcaccgtgtcctctacgcgtatccagaaccctgatcctgccgtgtaccagctgcgggatagcaagagcagcgacaagagcgtgtgtctgttcaccgacttcgacagccagaccaacgtgtcccagagcaaggactccgacgtgtacatcaccgataagtgcgtgctggacatgcggagcatggacttcaagagcaactccgccgtggcctggtccaacaagtccgatttcgcctgcgccaacgccttcaacaacagcattatccccgaggacacattcttcccaagccccgagagcagctgcggctttaccagcgagagctaccagcagggcgtgctgagcgccaccatcctgtacgagatcctgctgggcaaggccaccctgtacgccgtgctggtgtctgccctggtgctgatggctatggtcaagcggaaggacagccgggga

SEQ ID NO: 36113 - DNA, 2088 bp, synthetic construct
  source 1..2088: mol_type = other DNA
atggccttaccagtgaccgccttgctcctgccgctggccttgctgctccacgccgccaggccggacatccagatgacacagagccctagcagcctgtctgccagcgtgggagacagagtgaccatcacatgcaaggccagcgaccacatcaacaactggctggcctggtatcagcagaagcctggcaaggcccctaagctgctgatctacggcgctaccacactggaaacaggcgtgcccagcagattttctggcagcggctctggcaccgacttcaccctgacaatatccagcctccagcctgaggacttcgccacctactactgtcagcagagctggaacaccccttggacattcggccagggcaccaaggtggaaatcaagagactcgagatccagaaccctgatcctgccgtgtaccagctgcgggatagcaagagcagcgacaagagcgtgtgtctgttcaccgacttcgacagccagaccaacgtgtcccagagcaaggactccgacgtgtacatcaccgataagtgcgtgctggacatgcggagcatggacttcaagagcaactccgccgtggcctggtccaacaagtccgatttcgcctgcgccaacgccttcaacaacagcattatccccgaggacacattcttcccaagccccgagagcagctgcggctttaccagcgagagctaccagcagggcgtgctgagcgccaccatcctgtacgagatcctgctgggcaaggccaccctgtacgccgtgctggtgtctgccctggtgctgatggctatggtcaagcggaaggacagccggggacgcgccaagagaagcggatctggcgtgaagcagaccctgaatttcgacctgctgaagctggctggcgacgtggaatccaacccaggccctactagtatggactggatttggcgcatccttttccttgtcggcgctgctaccggcgcccattccgggcccatggaccccgacctggaaatcagagccgccttcctgcggcagagaaacacagccctgagaacagaggtggccgagctggaacaagaggtgcagcggctggaaaacgaggtgtcccagtacgagacaagatacggccctctcggaggcggaaaaggatccggcggcggaggatctggcggaggcggatctgggggcggaggctctttcgaagaagttcagctggttgaatctggcggcggactggttcaacctggcggatctctgagactgagctgtgccgcctctggctacacctttagcagctactgggtcaactgggttcgacaggcccctggcaaaggactggaatgggtcgcccaaatctatcccggcgacggcgacaccaactacaacggcaagttcaagggcagattcaccatcagccgggacaacagcaagaacaccctgtacctccagatgaactccctgagagccgaggacaccgccgtgtactattgtgccagatccatcaccaccgtcgtgggctgcgctatggattattggggccagggaaccctggtcaccgtgtcctctacgcgtgaggacctgaagaacgtgttcccacctgaggtggccgtgttcgagcctagcgaggccgagatcagccacacccagaaagccaccctcgtgtgcctggctaccggcttctaccccgaccatgtggaactgtcttggtgggtcaacggcaaagaggtgcacagcggcgtgtgtaccgacccccagccactgaaagaacagcccgccctgaacgacagccggtactgcctgagcagcagactgagagtgtccgccaccttctggcagaacccccggaaccacttcagatgccaggtgcagttctacggcctgagcgagaacgacgagtggacccaggacagagccaagcccgtgacccagatcgtgtctgccgaagcctggggcagagccgattgcgacgtgaagctggtggaaaagagcttcgagacagacaccaacctgaacttccagaacctgagcgtgatcggcttcagaatcctgctgctgaaagtggccggctttaacctgctgatgaccctgcggctgtggtccagc

SEQ ID NO: 36114 - DNA, 2007 bp, synthetic construct
  source 1..2007: mol_type = other DNA
atggccttaccagtgaccgccttgctcctgccgctggccttgctgctccacgccgccaggccggacatccagatgacacagagccctagcagcctgtctgccagcgtgggagacagagtgaccatcacatgcaaggccagcgaccacatcaacaactggctggcctggtatcagcagaagcctggcaaggcccctaagctgctgatctacggcgctaccacactggaaacaggcgtgcccagcagattttctggcagcggctctggcaccgacttcaccctgacaatatccagcctccagcctgaggacttcgccacctactactgtcagcagagctggaacaccccttggacattcggccagggcaccaaggtggaaatcaagagactcgaggacctgaagaacgtgttcccacctgaggtggccgtgttcgagcctagcgaggccgagatcagccacacccagaaagccaccctcgtgtgcctggctaccggcttctaccccgaccatgtggaactgtcttggtgggtcaacggcaaagaggtgcacagcggcgtgtgtaccgacccccagccactgaaagaacagcccgccctgaacgacagccggtactgcctgagcagcagactgagagtgtccgccaccttctggcagaacccccggaaccacttcagatgccaggtgcagttctacggcctgagcgagaacgacgagtggacccaggacagagccaagcccgtgacccagatcgtgtctgccgaagcctggggcagagccgattgcgacgtgaagctggtggaaaagagcttcgagacagacaccaacctgaacttccagaacctgagcgtgatcggcttcagaatcctgctgctgaaagtggccggctttaacctgctgatgaccctgcggctgtggtccagcagggccaagcgatctggatctggagcaacaaacttctcactactcaaacaagcaggtgacgtggaggagaatcccgggcctactagtatggactggatttggcgcatccttttccttgtcggcgctgctaccggcgcccattccgggcccgaagttgctgccctcgagaaggaggtagcagctttggaaaaagaagtcgcagcccttgagaaagaagttgcggctctggagaagggatccggcggcggaggatctggcggaggcggatctgggggcggaggctctttcgaagaagttcagctggttgaatctggcggcggactggttcaacctggcggatctctgagactgagctgtgccgcctctggctacacctttagcagctactgggtcaactgggttcgacaggcccctggcaaaggactggaatgggtcgcccaaatctatcccggcgacggcgacaccaactacaacggcaagttcaagggcagattcaccatcagccgggacaacagcaagaacaccctgtacctccagatgaactccctgagagccgaggacaccgccgtgtactattgtgccagatccatcaccaccgtcgtgggctgcgctatggattattggggccagggaaccctggtcaccgtgtcctctacgcgtatccagaaccctgatcctgccgtgtaccagctgcgggatagcaagagcagcgacaagagcgtgtgtctgttcaccgacttcgacagccagaccaacgtgtcccagagcaaggactccgacgtgtacatcaccgataagtgcgtgctggacatgcggagcatggacttcaagagcaactccgccgtggcctggtccaacaagtccgatttcgcctgcgccaacgccttcaacaacagcattatccccgaggacacattcttcccaagccccgagagcagctgcggctttaccagcgagagctaccagcagggcgtgctgagcgccaccatcctgtacgagatcctgctgggcaaggccaccctgtacgccgtgctggtgtctgccctggtgctgatggctatggtcaagcggaaggacagccgggga

SEQ ID NO: 36115 - DNA, 2019 bp, synthetic construct
  source 1..2019: mol_type = other DNA
atggccttaccagtgaccgccttgctcctgccgctggccttgctgctccacgccgccaggccggacatccagatgacacagagccctagcagcctgtctgccagcgtgggagacagagtgaccatcacatgcaaggccagcgaccacatcaacaactggctggcctggtatcagcagaagcctggcaaggcccctaagctgctgatctacggcgctaccacactggaaacaggcgtgcccagcagattttctggcagcggctctggcaccgacttcaccctgacaatatccagcctccagcctgaggacttcgccacctactactgtcagcagagctggaacaccccttggacattcggccagggcaccaaggtggaaatcaagagactcgagatccagaaccctgatcctgccgtgtaccagctgcgggatagcaagagcagcgacaagagcgtgtgtctgttcaccgacttcgacagccagaccaacgtgtcccagagcaaggactccgacgtgtacatcaccgataagtgcgtgctggacatgcggagcatggacttcaagagcaactccgccgtggcctggtccaacaagtccgatttcgcctgcgccaacgccttcaacaacagcattatccccgaggacacattcttcccaagccccgagagcagctgcggctttaccagcgagagctaccagcagggcgtgctgagcgccaccatcctgtacgagatcctgctgggcaaggccaccctgtacgccgtgctggtgtctgccctggtgctgatggctatggtcaagcggaaggacagccggggacgcgccaagagaagcggatctggcgtgaagcagaccctgaatttcgacctgctgaagctggctggcgacgtggaatccaacccaggccctactagtatggactggatttggcgcatccttttccttgtcggcgctgctaccggcgcccattccgggcccgaagttgctgccctcgagaaggaggtagcagctttggaaaaagaagtcgcagcccttgagaaagaagttgcggctctggagaagggatccggcggcggaggatctggcggaggcggatctgggggcggaggctctttcgaagaagttcagctggttgaatctggcggcggactggttcaacctggcggatctctgagactgagctgtgccgcctctggctacacctttagcagctactgggtcaactgggttcgacaggcccctggcaaaggactggaatgggtcgcccaaatctatcccggcgacggcgacaccaactacaacggcaagttcaagggcagattcaccatcagccgggacaacagcaagaacaccctgtacctccagatgaactccctgagagccgaggacaccgccgtgtactattgtgccagatccatcaccaccgtcgtgggctgcgctatggattattggggccagggaaccctggtcaccgtgtcctctacgcgtgaggacctgaagaacgtgttcccacctgaggtggccgtgttcgagcctagcgaggccgagatcagccacacccagaaagccaccctcgtgtgcctggctaccggcttctaccccgaccatgtggaactgtcttggtgggtcaacggcaaagaggtgcacagcggcgtgtgtaccgacccccagccactgaaagaacagcccgccctgaacgacagccggtactgcctgagcagcagactgagagtgtccgccaccttctggcagaacccccggaaccacttcagatgccaggtgcagttctacggcctgagcgagaacgacgagtggacccaggacagagccaagcccgtgacccagatcgtgtctgccgaagcctggggcagagccgattgcgacgtgaagctggtggaaaagagcttcgagacagacaccaacctgaacttccagaacctgagcgtgatcggcttcagaatcctgctgctgaaagtggccggctttaacctgctgatgaccctgcggctgtggtccagc

SEQ ID NO: 36116 - DNA, 2277 bp, synthetic construct
  source 1..2277: mol_type = other DNA
atggccttaccagtgaccgccttgctcctgccgctggccttgctgctccacgccgccaggccggacatccagatgacacagagccctagcagcctgtctgccagcgtgggagacagagtgaccatcacatgcaaggccagcgaccacatcaacaactggctggcctggtatcagcagaagcctggcaaggcccctaagctgctgatctacggcgctaccacactggaaacaggcgtgcccagcagattttctggcagcggctctggcaccgacttcaccctgacaatatccagcctccagcctgaggacttcgccacctactactgtcagcagagctggaacaccccttggacattcggccagggcaccaaggtggaaatcaagagactcgaggacctgaagaacgtgttcccacctgaggtggccgtgttcgagcctagcgaggccgagatcagccacacccagaaagccaccctcgtgtgcctggctaccggcttctaccccgaccatgtggaactgtcttggtgggtcaacggcaaagaggtgcacagcggcgtgtgtaccgacccccagccactgaaagaacagcccgccctgaacgacagccggtactgcctgagcagcagactgagagtgtccgccaccttctggcagaacccccggaaccacttcagatgccaggtgcagttctacggcctgagcgagaacgacgagtggacccaggacagagccaagcccgtgacccagatcgtgtctgccgaagcctggggcagagccgattgcgacgtgaagctggtggaaaagagcttcgagacagacaccaacctgaacttccagaacctgagcgtgatcggcttcagaatcctgctgctgaaagtggccggctttaacctgctgatgaccctgcggctgtggtccagcagggccaagcgatctggatctggagcaacaaacttctcactactcaaacaagcaggtgacgtggaggagaatcccgggcctactagtatggactggatttggcgcatccttttccttgtcggcgctgctaccggcgcccattccgggccccaggttcagctgcaagagtctggcggaggacttgctcaagctggcggaagcctgagactgtcttgtgccgcctctggcagaaccttcagcatgggctggtttagacaggcccctggcaaagagagagagttcgtcgccgccatcacatacagcggcggcagcccttactacgcctcttctgtcagaggccggttcaccatcagccgggacaacgccaagaacaccgtgtacctccagatgaacagcctgaagccagaggacaccgccgtgtactactgtgccgccaatccaacctacggcagcgactggaatgccgagaattggggccagggcacccaagtgacagtgtctagtggatccggcggcggaggatctggcggaggcggatctgggggcggaggctctttcgaagaagttcagctggttgaatctggcggcggactggttcaacctggcggatctctgagactgagctgtgccgcctctggctacacctttagcagctactgggtcaactgggttcgacaggcccctggcaaaggactggaatgggtcgcccaaatctatcccggcgacggcgacaccaactacaacggcaagttcaagggcagattcaccatcagccgggacaacagcaagaacaccctgtacctccagatgaactccctgagagccgaggacaccgccgtgtactattgtgccagatccatcaccaccgtcgtgggctgcgctatggattattggggccagggaaccctggtcaccgtgtcctctacgcgtatccagaaccctgatcctgccgtgtaccagctgcgggatagcaagagcagcgacaagagcgtgtgtctgttcaccgacttcgacagccagaccaacgtgtcccagagcaaggactccgacgtgtacatcaccgataagtgcgtgctggacatgcggagcatggacttcaagagcaactccgccgtggcctggtccaacaagtccgatttcgcctgcgccaacgccttcaacaacagcattatccccgaggacacattcttcccaagccccgagagcagctgcggctttaccagcgagagctaccagcagggcgtgctgagcgccaccatcctgtacgagatcctgctgggcaaggccaccctgtacgccgtgctggtgtctgccctggtgctgatggctatggtcaagcggaaggacagccgggga

SEQ ID NO: 36117 - DNA, 2289 bp, synthetic construct
  source 1..2289: mol_type = other DNA
atggccttaccagtgaccgccttgctcctgccgctggccttgctgctccacgccgccaggccggacatccagatgacacagagccctagcagcctgtctgccagcgtgggagacagagtgaccatcacatgcaaggccagcgaccacatcaacaactggctggcctggtatcagcagaagcctggcaaggcccctaagctgctgatctacggcgctaccacactggaaacaggcgtgcccagcagattttctggcagcggctctggcaccgacttcaccctgacaatatccagcctccagcctgaggacttcgccacctactactgtcagcagagctggaacaccccttggacattcggccagggcaccaaggtggaaatcaagagactcgagatccagaaccctgatcctgccgtgtaccagctgcgggatagcaagagcagcgacaagagcgtgtgtctgttcaccgacttcgacagccagaccaacgtgtcccagagcaaggactccgacgtgtacatcaccgataagtgcgtgctggacatgcggagcatggacttcaagagcaactccgccgtggcctggtccaacaagtccgatttcgcctgcgccaacgccttcaacaacagcattatccccgaggacacattcttcccaagccccgagagcagctgcggctttaccagcgagagctaccagcagggcgtgctgagcgccaccatcctgtacgagatcctgctgggcaaggccaccctgtacgccgtgctggtgtctgccctggtgctgatggctatggtcaagcggaaggacagccggggacgcgccaagagaagcggatctggcgtgaagcagaccctgaatttcgacctgctgaagctggctggcgacgtggaatccaacccaggccctactagtatggactggatttggcgcatccttttccttgtcggcgctgctaccggcgcccattccgggccccaggttcagctgcaagagtctggcggaggacttgctcaagctggcggaagcctgagactgtcttgtgccgcctctggcagaaccttcagcatgggctggtttagacaggcccctggcaaagagagagagttcgtcgccgccatcacatacagcggcggcagcccttactacgcctcttctgtcagaggccggttcaccatcagccgggacaacgccaagaacaccgtgtacctccagatgaacagcctgaagccagaggacaccgccgtgtactactgtgccgccaatccaacctacggcagcgactggaatgccgagaattggggccagggcacccaagtgacagtgtctagtggatccggcggcggaggatctggcggaggcggatctgggggcggaggctctttcgaagaagttcagctggttgaatctggcggcggactggttcaacctggcggatctctgagactgagctgtgccgcctctggctacacctttagcagctactgggtcaactgggttcgacaggcccctggcaaaggactggaatgggtcgcccaaatctatcccggcgacggcgacaccaactacaacggcaagttcaagggcagattcaccatcagccgggacaacagcaagaacaccctgtacctccagatgaactccctgagagccgaggacaccgccgtgtactattgtgccagatccatcaccaccgtcgtgggctgcgctatggattattggggccagggaaccctggtcaccgtgtcctctacgcgtgaggacctgaagaacgtgttcccacctgaggtggccgtgttcgagcctagcgaggccgagatcagccacacccagaaagccaccctcgtgtgcctggctaccggcttctaccccgaccatgtggaactgtcttggtgggtcaacggcaaagaggtgcacagcggcgtgtgtaccgacccccagccactgaaagaacagcccgccctgaacgacagccggtactgcctgagcagcagactgagagtgtccgccaccttctggcagaacccccggaaccacttcagatgccaggtgcagttctacggcctgagcgagaacgacgagtggacccaggacagagccaagcccgtgacccagatcgtgtctgccgaagcctggggcagagccgattgcgacgtgaagctggtggaaaagagcttcgagacagacaccaacctgaacttccagaacctgagcgtgatcggcttcagaatcctgctgctgaaagtggccggctttaacctgctgatgaccctgcggctgtggtccagc

SEQ ID NO: 36118 - DNA, 2295 bp, synthetic construct
  source 1..2295: mol_type = other DNA
atggccttaccagtgaccgccttgctcctgccgctggccttgctgctccacgccgccaggccggaagtgcaactggtggaatctggaggctctctggtgcagccagggggaagcctgagactgtcttgtgccgcttccggcttcaccttcgacgactacgccatgagctgggtgcgccaggtgccaggcaaaggcctggaatgggtgtccagcatcaactggagcggcacccacaccgattacgccgactccgtgaaaggcagattcacaatcagcagaaacaacgccaacaataccctgtacctgcagatgaactccctgaagtctgaggatacagcagtgtattattgcgccaagaactggcgggacgccggcaccacttggtttgagaaaagcggctctgccggacagggaacccaagtgacagtgtcctccggtaccggcggaggcggatctggcggcggaggtagcggtggcggaggatctgaattcgacatccagatgacacagagccctagcagcctgtctgccagcgtgggagacagagtgaccatcacatgcaaggccagcgaccacatcaacaactggctggcctggtatcagcagaagcctggcaaggcccctaagctgctgatctacggcgctaccacactggaaacaggcgtgcccagcagattttctggcagcggctctggcaccgacttcaccctgacaatatccagcctccagcctgaggacttcgccacctactactgtcagcagagctggaacaccccttggacattcggccagggcaccaaggtggaaatcaagagactcgaggacctgaagaacgtgttcccacctgaggtggccgtgttcgagcctagcgaggccgagatcagccacacccagaaagccaccctcgtgtgcctggctaccggcttctaccccgaccatgtggaactgtcttggtgggtcaacggcaaagaggtgcacagcggcgtgtgtaccgacccccagccactgaaagaacagcccgccctgaacgacagccggtactgcctgagcagcagactgagagtgtccgccaccttctggcagaacccccggaaccacttcagatgccaggtgcagttctacggcctgagcgagaacgacgagtggacccaggacagagccaagcccgtgacccagatcgtgtctgccgaagcctggggcagagccgattgcgacgtgaagctggtggaaaagagcttcgagacagacaccaacctgaacttccagaacctgagcgtgatcggcttcagaatcctgctgctgaaagtggccggctttaacctgctgatgaccctgcggctgtggtccagcagggccaagcgatctggatctggagcaacaaacttctcactactcaaacaagcaggtgacgtggaggagaatcccgggcctactagtatggactggatttggcgcatccttttccttgtcggcgctgctaccggcgcgcattccttcgaagaagttcagctggttgaatctggcggcggactggttcaacctggcggatctctgagactgagctgtgccgcctctggctacacctttagcagctactgggtcaactgggttcgacaggcccctggcaaaggactggaatgggtcgcccaaatctatcccggcgacggcgacaccaactacaacggcaagttcaagggcagattcaccatcagccgggacaacagcaagaacaccctgtacctccagatgaactccctgagagccgaggacaccgccgtgtactattgtgccagatccatcaccaccgtcgtgggctgcgctatggattattggggccagggaaccctggtcaccgtgtcctctacgcgtatccagaaccctgatcctgccgtgtaccagctgcgggatagcaagagcagcgacaagagcgtgtgtctgttcaccgacttcgacagccagaccaacgtgtcccagagcaaggactccgacgtgtacatcaccgataagtgcgtgctggacatgcggagcatggacttcaagagcaactccgccgtggcctggtccaacaagtccgatttcgcctgcgccaacgccttcaacaacagcattatccccgaggacacattcttcccaagccccgagagcagctgcggctttaccagcgagagctaccagcagggcgtgctgagcgccaccatcctgtacgagatcctgctgggcaaggccaccctgtacgccgtgctggtgtctgccctggtgctgatggctatggtcaagcggaaggacagccgggga

SEQ ID NO: 36119 - DNA, 2307 bp, synthetic construct
  source 1..2307: mol_type = other DNA
atggccttaccagtgaccgccttgctcctgccgctggccttgctgctccacgccgccaggccggaagtgcaactggtggaatctggaggctctctggtgcagccagggggaagcctgagactgtcttgtgccgcttccggcttcaccttcgacgactacgccatgagctgggtgcgccaggtgccaggcaaaggcctggaatgggtgtccagcatcaactggagcggcacccacaccgattacgccgactccgtgaaaggcagattcacaatcagcagaaacaacgccaacaataccctgtacctgcagatgaactccctgaagtctgaggatacagcagtgtattattgcgccaagaactggcgggacgccggcaccacttggtttgagaaaagcggctctgccggacagggaacccaagtgacagtgtcctccggtaccggcggaggcggatctggcggcggaggtagcggtggcggaggatctgaattcgacatccagatgacacagagccctagcagcctgtctgccagcgtgggagacagagtgaccatcacatgcaaggccagcgaccacatcaacaactggctggcctggtatcagcagaagcctggcaaggcccctaagctgctgatctacggcgctaccacactggaaacaggcgtgcccagcagattttctggcagcggctctggcaccgacttcaccctgacaatatccagcctccagcctgaggacttcgccacctactactgtcagcagagctggaacaccccttggacattcggccagggcaccaaggtggaaatcaagagactcgagatccagaaccctgatcctgccgtgtaccagctgcgggatagcaagagcagcgacaagagcgtgtgtctgttcaccgacttcgacagccagaccaacgtgtcccagagcaaggactccgacgtgtacatcaccgataagtgcgtgctggacatgcggagcatggacttcaagagcaactccgccgtggcctggtccaacaagtccgatttcgcctgcgccaacgccttcaacaacagcattatccccgaggacacattcttcccaagccccgagagcagctgcggctttaccagcgagagctaccagcagggcgtgctgagcgccaccatcctgtacgagatcctgctgggcaaggccaccctgtacgccgtgctggtgtctgccctggtgctgatggctatggtcaagcggaaggacagccggggacgcgccaagagaagcggatctggcgtgaagcagaccctgaatttcgacctgctgaagctggctggcgacgtggaatccaacccaggccctactagtatggactggatttggcgcatccttttccttgtcggcgctgctaccggcgcgcattccttcgaagaagttcagctggttgaatctggcggcggactggttcaacctggcggatctctgagactgagctgtgccgcctctggctacacctttagcagctactgggtcaactgggttcgacaggcccctggcaaaggactggaatgggtcgcccaaatctatcccggcgacggcgacaccaactacaacggcaagttcaagggcagattcaccatcagccgggacaacagcaagaacaccctgtacctccagatgaactccctgagagccgaggacaccgccgtgtactattgtgccagatccatcaccaccgtcgtgggctgcgctatggattattggggccagggaaccctggtcaccgtgtcctctacgcgtgaggacctgaagaacgtgttcccacctgaggtggccgtgttcgagcctagcgaggccgagatcagccacacccagaaagccaccctcgtgtgcctggctaccggcttctaccccgaccatgtggaactgtcttggtgggtcaacggcaaagaggtgcacagcggcgtgtgtaccgacccccagccactgaaagaacagcccgccctgaacgacagccggtactgcctgagcagcagactgagagtgtccgccaccttctggcagaacccccggaaccacttcagatgccaggtgcagttctacggcctgagcgagaacgacgagtggacccaggacagagccaagcccgtgacccagatcgtgtctgccgaagcctggggcagagccgattgcgacgtgaagctggtggaaaagagcttcgagacagacaccaacctgaacttccagaacctgagcgtgatcggcttcagaatcctgctgctgaaagtggccggctttaacctgctgatgaccctgcggctgtggtccagc

SEQ ID NO: 36120 - DNA, 2289 bp, synthetic construct
  source 1..2289: mol_type = other DNA
atggccttaccagtgaccgccttgctcctgccgctggccttgctgctccacgccgccaggccggaagttcagctgcttgagtctggcggaggactggttcaacctggcggaagcctgagactgtcttgtgccgccagcggcttcatcttcagcagctacgccatgagctgggtccgacaggctcctggaaagggccaagaatgggtttccggcgttagcggcacaggcgtgaacacctactacgccgatagcgtgaagggcagattcaccatcagccgggacaacagcaagaacaccctgtacctccagatgaacagcctgagagccgaggacaccgccgtgtactattgtgcctctggcaaaggctgggacagcggctcttggtacgaggactatagaggccagggcaccctggtcacagtttcttcaggtaccggcggaggcggatctggcggcggaggtagcggtggcggaggatctgaattcgacatccagatgacacagagccctagcagcctgtctgccagcgtgggagacagagtgaccatcacatgcaaggccagcgaccacatcaacaactggctggcctggtatcagcagaagcctggcaaggcccctaagctgctgatctacggcgctaccacactggaaacaggcgtgcccagcagattttctggcagcggctctggcaccgacttcaccctgacaatatccagcctccagcctgaggacttcgccacctactactgtcagcagagctggaacaccccttggacattcggccagggcaccaaggtggaaatcaagagactcgaggacctgaagaacgtgttcccacctgaggtggccgtgttcgagcctagcgaggccgagatcagccacacccagaaagccaccctcgtgtgcctggctaccggcttctaccccgaccatgtggaactgtcttggtgggtcaacggcaaagaggtgcacagcggcgtgtgtaccgacccccagccactgaaagaacagcccgccctgaacgacagccggtactgcctgagcagcagactgagagtgtccgccaccttctggcagaacccccggaaccacttcagatgccaggtgcagttctacggcctgagcgagaacgacgagtggacccaggacagagccaagcccgtgacccagatcgtgtctgccgaagcctggggcagagccgattgcgacgtgaagctggtggaaaagagcttcgagacagacaccaacctgaacttccagaacctgagcgtgatcggcttcagaatcctgctgctgaaagtggccggctttaacctgctgatgaccctgcggctgtggtccagcagggccaagcgatctggatctggagcaacaaacttctcactactcaaacaagcaggtgacgtggaggagaatcccgggcctactagtatggactggatttggcgcatccttttccttgtcggcgctgctaccggcgcgcattccttcgaagaagttcagctggttgaatctggcggcggactggttcaacctggcggatctctgagactgagctgtgccgcctctggctacacctttagcagctactgggtcaactgggttcgacaggcccctggcaaaggactggaatgggtcgcccaaatctatcccggcgacggcgacaccaactacaacggcaagttcaagggcagattcaccatcagccgggacaacagcaagaacaccctgtacctccagatgaactccctgagagccgaggacaccgccgtgtactattgtgccagatccatcaccaccgtcgtgggctgcgctatggattattggggccagggaaccctggtcaccgtgtcctctacgcgtatccagaaccctgatcctgccgtgtaccagctgcgggatagcaagagcagcgacaagagcgtgtgtctgttcaccgacttcgacagccagaccaacgtgtcccagagcaaggactccgacgtgtacatcaccgataagtgcgtgctggacatgcggagcatggacttcaagagcaactccgccgtggcctggtccaacaagtccgatttcgcctgcgccaacgccttcaacaacagcattatccccgaggacacattcttcccaagccccgagagcagctgcggctttaccagcgagagctaccagcagggcgtgctgagcgccaccatcctgtacgagatcctgctgggcaaggccaccctgtacgccgtgctggtgtctgccctggtgctgatggctatggtcaagcggaaggacagccgggga

SEQ ID NO: 36121 - DNA, 2301 bp, synthetic construct
  source 1..2301: mol_type = other DNA
atggccttaccagtgaccgccttgctcctgccgctggccttgctgctccacgccgccaggccggaagttcagctgcttgagtctggcggaggactggttcaacctggcggaagcctgagactgtcttgtgccgccagcggcttcatcttcagcagctacgccatgagctgggtccgacaggctcctggaaagggccaagaatgggtttccggcgttagcggcacaggcgtgaacacctactacgccgatagcgtgaagggcagattcaccatcagccgggacaacagcaagaacaccctgtacctccagatgaacagcctgagagccgaggacaccgccgtgtactattgtgcctctggcaaaggctgggacagcggctcttggtacgaggactatagaggccagggcaccctggtcacagtttcttcaggtaccggcggaggcggatctggcggcggaggtagcggtggcggaggatctgaattcgacatccagatgacacagagccctagcagcctgtctgccagcgtgggagacagagtgaccatcacatgcaaggccagcgaccacatcaacaactggctggcctggtatcagcagaagcctggcaaggcccctaagctgctgatctacggcgctaccacactggaaacaggcgtgcccagcagattttctggcagcggctctggcaccgacttcaccctgacaatatccagcctccagcctgaggacttcgccacctactactgtcagcagagctggaacaccccttggacattcggccagggcaccaaggtggaaatcaagagactcgagatccagaaccctgatcctgccgtgtaccagctgcgggatagcaagagcagcgacaagagcgtgtgtctgttcaccgacttcgacagccagaccaacgtgtcccagagcaaggactccgacgtgtacatcaccgataagtgcgtgctggacatgcggagcatggacttcaagagcaactccgccgtggcctggtccaacaagtccgatttcgcctgcgccaacgccttcaacaacagcattatccccgaggacacattcttcccaagccccgagagcagctgcggctttaccagcgagagctaccagcagggcgtgctgagcgccaccatcctgtacgagatcctgctgggcaaggccaccctgtacgccgtgctggtgtctgccctggtgctgatggctatggtcaagcggaaggacagccggggacgcgccaagagaagcggatctggcgtgaagcagaccctgaatttcgacctgctgaagctggctggcgacgtggaatccaacccaggccctactagtatggactggatttggcgcatccttttccttgtcggcgctgctaccggcgcgcattccttcgaagaagttcagctggttgaatctggcggcggactggttcaacctggcggatctctgagactgagctgtgccgcctctggctacacctttagcagctactgggtcaactgggttcgacaggcccctggcaaaggactggaatgggtcgcccaaatctatcccggcgacggcgacaccaactacaacggcaagttcaagggcagattcaccatcagccgggacaacagcaagaacaccctgtacctccagatgaactccctgagagccgaggacaccgccgtgtactattgtgccagatccatcaccaccgtcgtgggctgcgctatggattattggggccagggaaccctggtcaccgtgtcctctacgcgtgaggacctgaagaacgtgttcccacctgaggtggccgtgttcgagcctagcgaggccgagatcagccacacccagaaagccaccctcgtgtgcctggctaccggcttctaccccgaccatgtggaactgtcttggtgggtcaacggcaaagaggtgcacagcggcgtgtgtaccgacccccagccactgaaagaacagcccgccctgaacgacagccggtactgcctgagcagcagactgagagtgtccgccaccttctggcagaacccccggaaccacttcagatgccaggtgcagttctacggcctgagcgagaacgacgagtggacccaggacagagccaagcccgtgacccagatcgtgtctgccgaagcctggggcagagccgattgcgacgtgaagctggtggaaaagagcttcgagacagacaccaacctgaacttccagaacctgagcgtgatcggcttcagaatcctgctgctgaaagtggccggctttaacctgctgatgaccctgcggctgtggtccagc

SEQ ID NO: 36122 - DNA, 2193 bp, synthetic construct
  source 1..2193: mol_type = other DNA
atggccttaccagtgaccgccttgctcctgccgctggccttgctgctccacgccgccaggccgatgctgcccgctcctaagaatctggtggtgtccagaatcaccgaggacagcgccagactgtcttggacagctcctgatgccgccttcgacagcttccccatccggtacatcgagacactgatctggggcgaagccatctggctggatgtgcctggaagcgagagaagctacgacctgaccggactgaagcctggcacagagtatgccgtggtcatcaccggcgtgaaaggcggcagattctctagccctctggtggcctctttcaccaccggtaccggcggaggcggatctggcggcggaggtagcggtggcggaggatctgaattcgacatccagatgacacagagccctagcagcctgtctgccagcgtgggagacagagtgaccatcacatgcaaggccagcgaccacatcaacaactggctggcctggtatcagcagaagcctggcaaggcccctaagctgctgatctacggcgctaccacactggaaacaggcgtgcccagcagattttctggcagcggctctggcaccgacttcaccctgacaatatccagcctccagcctgaggacttcgccacctactactgtcagcagagctggaacaccccttggacattcggccagggcaccaaggtggaaatcaagagactcgaggacctgaagaacgtgttcccacctgaggtggccgtgttcgagcctagcgaggccgagatcagccacacccagaaagccaccctcgtgtgcctggctaccggcttctaccccgaccatgtggaactgtcttggtgggtcaacggcaaagaggtgcacagcggcgtgtgtaccgacccccagccactgaaagaacagcccgccctgaacgacagccggtactgcctgagcagcagactgagagtgtccgccaccttctggcagaacccccggaaccacttcagatgccaggtgcagttctacggcctgagcgagaacgacgagtggacccaggacagagccaagcccgtgacccagatcgtgtctgccgaagcctggggcagagccgattgcgacgtgaagctggtggaaaagagcttcgagacagacaccaacctgaacttccagaacctgagcgtgatcggcttcagaatcctgctgctgaaagtggccggctttaacctgctgatgaccctgcggctgtggtccagcagggccaagcgatctggatctggagcaacaaacttctcactactcaaacaagcaggtgacgtggaggagaatcccgggcctactagtatggactggatttggcgcatccttttccttgtcggcgctgctaccggcgcgcattccttcgaagaagttcagctggttgaatctggcggcggactggttcaacctggcggatctctgagactgagctgtgccgcctctggctacacctttagcagctactgggtcaactgggttcgacaggcccctggcaaaggactggaatgggtcgcccaaatctatcccggcgacggcgacaccaactacaacggcaagttcaagggcagattcaccatcagccgggacaacagcaagaacaccctgtacctccagatgaactccctgagagccgaggacaccgccgtgtactattgtgccagatccatcaccaccgtcgtgggctgcgctatggattattggggccagggaaccctggtcaccgtgtcctctacgcgtatccagaaccctgatcctgccgtgtaccagctgcgggatagcaagagcagcgacaagagcgtgtgtctgttcaccgacttcgacagccagaccaacgtgtcccagagcaaggactccgacgtgtacatcaccgataagtgcgtgctggacatgcggagcatggacttcaagagcaactccgccgtggcctggtccaacaagtccgatttcgcctgcgccaacgccttcaacaacagcattatccccgaggacacattcttcccaagccccgagagcagctgcggctttaccagcgagagctaccagcagggcgtgctgagcgccaccatcctgtacgagatcctgctgggcaaggccaccctgtacgccgtgctggtgtctgccctggtgctgatggctatggtcaagcggaaggacagccgggga

SEQ ID NO: 36123 - DNA, 2205 bp, synthetic construct
  source 1..2205: mol_type = other DNA
atggccttaccagtgaccgccttgctcctgccgctggccttgctgctccacgccgccaggccgatgctgcccgctcctaagaatctggtggtgtccagaatcaccgaggacagcgccagactgtcttggacagctcctgatgccgccttcgacagcttccccatccggtacatcgagacactgatctggggcgaagccatctggctggatgtgcctggaagcgagagaagctacgacctgaccggactgaagcctggcacagagtatgccgtggtcatcaccggcgtgaaaggcggcagattctctagccctctggtggcctctttcaccaccggtaccggcggaggcggatctggcggcggaggtagcggtggcggaggatctgaattcgacatccagatgacacagagccctagcagcctgtctgccagcgtgggagacagagtgaccatcacatgcaaggccagcgaccacatcaacaactggctggcctggtatcagcagaagcctggcaaggcccctaagctgctgatctacggcgctaccacactggaaacaggcgtgcccagcagattttctggcagcggctctggcaccgacttcaccctgacaatatccagcctccagcctgaggacttcgccacctactactgtcagcagagctggaacaccccttggacattcggccagggcaccaaggtggaaatcaagagactcgagatccagaaccctgatcctgccgtgtaccagctgcgggatagcaagagcagcgacaagagcgtgtgtctgttcaccgacttcgacagccagaccaacgtgtcccagagcaaggactccgacgtgtacatcaccgataagtgcgtgctggacatgcggagcatggacttcaagagcaactccgccgtggcctggtccaacaagtccgatttcgcctgcgccaacgccttcaacaacagcattatccccgaggacacattcttcccaagccccgagagcagctgcggctttaccagcgagagctaccagcagggcgtgctgagcgccaccatcctgtacgagatcctgctgggcaaggccaccctgtacgccgtgctggtgtctgccctggtgctgatggctatggtcaagcggaaggacagccggggacgcgccaagagaagcggatctggcgtgaagcagaccctgaatttcgacctgctgaagctggctggcgacgtggaatccaacccaggccctactagtatggactggatttggcgcatccttttccttgtcggcgctgctaccggcgcgcattccttcgaagaagttcagctggttgaatctggcggcggactggttcaacctggcggatctctgagactgagctgtgccgcctctggctacacctttagcagctactgggtcaactgggttcgacaggcccctggcaaaggactggaatgggtcgcccaaatctatcccggcgacggcgacaccaactacaacggcaagttcaagggcagattcaccatcagccgggacaacagcaagaacaccctgtacctccagatgaactccctgagagccgaggacaccgccgtgtactattgtgccagatccatcaccaccgtcgtgggctgcgctatggattattggggccagggaaccctggtcaccgtgtcctctacgcgtgaggacctgaagaacgtgttcccacctgaggtggccgtgttcgagcctagcgaggccgagatcagccacacccagaaagccaccctcgtgtgcctggctaccggcttctaccccgaccatgtggaactgtcttggtgggtcaacggcaaagaggtgcacagcggcgtgtgtaccgacccccagccactgaaagaacagcccgccctgaacgacagccggtactgcctgagcagcagactgagagtgtccgccaccttctggcagaacccccggaaccacttcagatgccaggtgcagttctacggcctgagcgagaacgacgagtggacccaggacagagccaagcccgtgacccagatcgtgtctgccgaagcctggggcagagccgattgcgacgtgaagctggtggaaaagagcttcgagacagacaccaacctgaacttccagaacctgagcgtgatcggcttcagaatcctgctgctgaaagtggccggctttaacctgctgatgaccctgcggctgtggtccagc

SEQ ID NO: 36124 - DNA, 2280 bp, synthetic construct
  source 1..2280: mol_type = other DNA
atggccttaccagtgaccgccttgctcctgccgctggccttgctgctccacgccgccaggccggaggtgcagctggttgaatctggcggaggactggttcagcctggcggatctctgagactgtcttgtgccgccagcggcttcaacatcaaggatacctgtatcggctgggttcgcagagcccctggcaaagaggaagaactggtcgccaaaatctgcaagtacagcggccacaccagatacgccgacagcgtgaagggcagattcaccatcagcgccgacaccagcaagaacaccgcctacctccagatgaacagcctgagagccgaggacaccgccgtgtactattgtgccgctgtgtccgtcagagatgggcactacaattactggggccagggcaccaccgtgaccgtttcttcaggtaccggcggaggcggatctggcggcggaggtagcggtggcggaggatctgaattcgacatccagatgacacagagccctagcagcctgtctgccagcgtgggagacagagtgaccatcacatgcaaggccagcgaccacatcaacaactggctggcctggtatcagcagaagcctggcaaggcccctaagctgctgatctacggcgctaccacactggaaacaggcgtgcccagcagattttctggcagcggctctggcaccgacttcaccctgacaatatccagcctccagcctgaggacttcgccacctactactgtcagcagagctggaacaccccttggacattcggccagggcaccaaggtggaaatcaagagactcgaggacctgaagaacgtgttcccacctgaggtggccgtgttcgagcctagcgaggccgagatcagccacacccagaaagccaccctcgtgtgcctggctaccggcttctaccccgaccatgtggaactgtcttggtgggtcaacggcaaagaggtgcacagcggcgtgtgtaccgacccccagccactgaaagaacagcccgccctgaacgacagccggtactgcctgagcagcagactgagagtgtccgccaccttctggcagaacccccggaaccacttcagatgccaggtgcagttctacggcctgagcgagaacgacgagtggacccaggacagagccaagcccgtgacccagatcgtgtctgccgaagcctggggcagagccgattgcgacgtgaagctggtggaaaagagcttcgagacagacaccaacctgaacttccagaacctgagcgtgatcggcttcagaatcctgctgctgaaagtggccggctttaacctgctgatgaccctgcggctgtggtccagcagggccaagcgatctggatctggagcaacaaacttctcactactcaaacaagcaggtgacgtggaggagaatcccgggcctactagtatggactggatttggcgcatccttttccttgtcggcgctgctaccggcgcgcattccttcgaagaagttcagctggttgaatctggcggcggactggttcaacctggcggatctctgagactgagctgtgccgcctctggctacacctttagcagctactgggtcaactgggttcgacaggcccctggcaaaggactggaatgggtcgcccaaatctatcccggcgacggcgacaccaactacaacggcaagttcaagggcagattcaccatcagccgggacaacagcaagaacaccctgtacctccagatgaactccctgagagccgaggacaccgccgtgtactattgtgccagatccatcaccaccgtcgtgggctgcgctatggattattggggccagggaaccctggtcaccgtgtcctctacgcgtatccagaaccctgatcctgccgtgtaccagctgcgggatagcaagagcagcgacaagagcgtgtgtctgttcaccgacttcgacagccagaccaacgtgtcccagagcaaggactccgacgtgtacatcaccgataagtgcgtgctggacatgcggagcatggacttcaagagcaactccgccgtggcctggtccaacaagtccgatttcgcctgcgccaacgccttcaacaacagcattatccccgaggacacattcttcccaagccccgagagcagctgcggctttaccagcgagagctaccagcagggcgtgctgagcgccaccatcctgtacgagatcctgctgggcaaggccaccctgtacgccgtgctggtgtctgccctggtgctgatggctatggtcaagcggaaggacagccgggga

SEQ ID NO: 36125 - DNA, 2292 bp, synthetic construct
  source 1..2292: mol_type = other DNA
atggccttaccagtgaccgccttgctcctgccgctggccttgctgctccacgccgccaggccggaggtgcagctggttgaatctggcggaggactggttcagcctggcggatctctgagactgtcttgtgccgccagcggcttcaacatcaaggatacctgtatcggctgggttcgcagagcccctggcaaagaggaagaactggtcgccaaaatctgcaagtacagcggccacaccagatacgccgacagcgtgaagggcagattcaccatcagcgccgacaccagcaagaacaccgcctacctccagatgaacagcctgagagccgaggacaccgccgtgtactattgtgccgctgtgtccgtcagagatgggcactacaattactggggccagggcaccaccgtgaccgtttcttcaggtaccggcggaggcggatctggcggcggaggtagcggtggcggaggatctgaattcgacatccagatgacacagagccctagcagcctgtctgccagcgtgggagacagagtgaccatcacatgcaaggccagcgaccacatcaacaactggctggcctggtatcagcagaagcctggcaaggcccctaagctgctgatctacggcgctaccacactggaaacaggcgtgcccagcagattttctggcagcggctctggcaccgacttcaccctgacaatatccagcctccagcctgaggacttcgccacctactactgtcagcagagctggaacaccccttggacattcggccagggcaccaaggtggaaatcaagagactcgagatccagaaccctgatcctgccgtgtaccagctgcgggatagcaagagcagcgacaagagcgtgtgtctgttcaccgacttcgacagccagaccaacgtgtcccagagcaaggactccgacgtgtacatcaccgataagtgcgtgctggacatgcggagcatggacttcaagagcaactccgccgtggcctggtccaacaagtccgatttcgcctgcgccaacgccttcaacaacagcattatccccgaggacacattcttcccaagccccgagagcagctgcggctttaccagcgagagctaccagcagggcgtgctgagcgccaccatcctgtacgagatcctgctgggcaaggccaccctgtacgccgtgctggtgtctgccctggtgctgatggctatggtcaagcggaaggacagccggggacgcgccaagagaagcggatctggcgtgaagcagaccctgaatttcgacctgctgaagctggctggcgacgtggaatccaacccaggccctactagtatggactggatttggcgcatccttttccttgtcggcgctgctaccggcgcgcattccttcgaagaagttcagctggttgaatctggcggcggactggttcaacctggcggatctctgagactgagctgtgccgcctctggctacacctttagcagctactgggtcaactgggttcgacaggcccctggcaaaggactggaatgggtcgcccaaatctatcccggcgacggcgacaccaactacaacggcaagttcaagggcagattcaccatcagccgggacaacagcaagaacaccctgtacctccagatgaactccctgagagccgaggacaccgccgtgtactattgtgccagatccatcaccaccgtcgtgggctgcgctatggattattggggccagggaaccctggtcaccgtgtcctctacgcgtgaggacctgaagaacgtgttcccacctgaggtggccgtgttcgagcctagcgaggccgagatcagccacacccagaaagccaccctcgtgtgcctggctaccggcttctaccccgaccatgtggaactgtcttggtgggtcaacggcaaagaggtgcacagcggcgtgtgtaccgacccccagccactgaaagaacagcccgccctgaacgacagccggtactgcctgagcagcagactgagagtgtccgccaccttctggcagaacccccggaaccacttcagatgccaggtgcagttctacggcctgagcgagaacgacgagtggacccaggacagagccaagcccgtgacccagatcgtgtctgccgaagcctggggcagagccgattgcgacgtgaagctggtggaaaagagcttcgagacagacaccaacctgaacttccagaacctgagcgtgatcggcttcagaatcctgctgctgaaagtggccggctttaacctgctgatgaccctgcggctgtggtccagc

SEQ ID NO: 36126 - DNA, 3396 bp, synthetic construct
  source 1..3396: mol_type = other DNA
atggccttaccagtgaccgccttgctcctgccgctggccttgctgctccacgccgccaggccggaagtgcagctggttgaatctggcggaggactggttcaggctggcggatctctgagactgtcttgtgccgccagcggcagaacctttagcatgggctggtttagacaggcccctggcaaagagagagagttcgtcgccgccatcacatactctggcggcagcccttactacgccgactctgtgaagggcagattcaccatcagccgggacaacgccaagaacaccgtgtacctccagatgaacagcctgaagcctgaggacaccgccgtgtactactgcgccgccaatccaacatacggcagcgactggaacgccgagaattggggccagggaacccaagtgacagtgtctagcggtaccggcggaggcggatctggcggcggaggtagcggtggcggaggatctgaattcgacatccagatgacacagagccctagcagcctgtctgccagcgtgggagacagagtgaccatcacatgcaaggccagcgaccacatcaacaactggctggcctggtatcagcagaagcctggcaaggcccctaagctgctgatctacggcgctaccacactggaaacaggcgtgcccagcagattttctggcagcggctctggcaccgacttcaccctgacaatatccagcctccagcctgaggacttcgccacctactactgtcagcagagctggaacaccccttggacattcggccagggcaccaaggtggaaatcaagagactcgaggacctgaagaacgtgttcccacctgaggtggccgtgttcgagcctagcgaggccgagatcagccacacccagaaagccaccctcgtgtgcctggctaccggcttctaccccgaccatgtggaactgtcttggtgggtcaacggcaaagaggtgcacagcggcgtgtgtaccgacccccagccactgaaagaacagcccgccctgaacgacagccggtactgcctgagcagcagactgagagtgtccgccaccttctggcagaacccccggaaccacttcagatgccaggtgcagttctacggcctgagcgagaacgacgagtggacccaggacagagccaagcccgtgacccagatcgtgtctgccgaagcctggggcagagccgattgcgacgtgaagctggtggaaaagagcttcgagacagacaccaacctgaacttccagaacctgagcgtgatcggcttcagaatcctgctgctgaaagtggccggctttaacctgctgatgaccctgcggctgtggtccagcagggccaagcgatctggatctggagcaacaaacttctcactactcaaacaagcaggtgacgtggaggagaatcccgggcctactagtgccaccatggactggatttggcgcatccttttccttgtcggcgctgctaccggcgcccattccgggcccgaagtgcaactggttgaatccggtggcggcctggtgcaagcaggcggatctctcagacttagctgtgccgcctccggcagaaccttcacaatgggatggtttaggcaggctccagggaaagagagagagttcgtcgccgccatctctctgtctcccacactggcctactacgccgactctgtgaaaggccggttcaccatctccagagataatgccaagaacaccgtggtgctgcaaatgaactctctgaaacccgaggatacagccctgtactattgtgccgctgaccggaagtccgtgatgagcatcagacccgattactggggacagggcacacaagtcacagtgtcctctggatccggcggcggaggatctggcggaggcggatctgggggcggaggctctttcgaagaagttcagctggttgaatctggcggcggactggttcaacctggcggatctctgagactgagctgtgccgcctctggctacacctttagcagctactgggtcaactgggttcgacaggcccctggcaaaggactggaatgggtcgcccaaatctatcccggcgacggcgacaccaactacaacggcaagttcaagggcagattcaccatcagccgggacaacagcaagaacaccctgtacctccagatgaactccctgagagccgaggacaccgccgtgtactattgtgccagatccatcaccaccgtcgtgggctgcgctatggattattggggccagggaaccctggtcaccgtgtcctctacgcgtatccagaaccctgatcctgccgtgtaccagctgcgggatagcaagagcagcgacaagagcgtgtgtctgttcaccgacttcgacagccagaccaacgtgtcccagagcaaggactccgacgtgtacatcaccgataagtgcgtgctggacatgcggagcatggacttcaagagcaactccgccgtggcctggtccaacaagtccgatttcgcctgcgccaacgccttcaacaacagcattatccccgaggacacattcttcccaagccccgagagcagctgcggctttaccagcgagagctaccagcagggcgtgctgagcgccaccatcctgtacgagatcctgctgggcaaggccaccctgtacgccgtgctggtgtctgccctggtgctgatggctatggtcaagcggaaggacagccggggacgcgccaagagaagcggatctggcgtgaagcagaccctgaatttcgacctgctgaagctggctggcgacgtggaatccaacccaggcccttctagaggccatatgaccgagtacaagcccacggtgcgcctcgccacccgcgacgacgtccccagggccgtacgcaccctcgccgccgcgttcgccgactaccccgccacgcgccacaccgtcgatccggaccgccacatcgagcgggtcaccgagctgcaagaactcttcctcacgcgcgtcgggctcgacatcggcaaggtgtgggtcgcggacgacggcgccgcggtggcggtctggaccacgccggagagcgtcgaagcgggggcggtgttcgccgagatcggcccgcgcatggccgagttgagcggttcccggctggccgcgcagcaacagatggaaggcctcctggcgccgcaccggcccaaggagcccgcgtggttcctggccaccgtcggcgtctcgcccgaccaccagggcaagggtctgggcagcgccgtcgtgctccccggagtggaggcggccgagcgcgccggggtgcccgccttcctggagacctccgcgccccgcaacctccccttctacgagcggctcggcttcaccgtcaccgccgacgtcgaggtgcccgaaggaccgcgcacctggtgcatgacccgcaagcccggtgcctga

SEQ ID NO: 36127 - DNA, 2310 bp, synthetic construct
  source 1..2310: mol_type = other DNA
atggccttaccagtgaccgccttgctcctgccgctggccttgctgctccacgccgccaggccggaagtgcagctggttgaatctggcggaggactggttcagcctggcggatctctgagactgtcttgtgccgcctctggcttcgccagcgactactatatcatcggctggttcagacaggcccctggcaaagagagagagggcgtcagctgtatcagcagcagatacgccaacaccaactacgccgacagcgtgaagggcagattcaccatcagccgggacaacgccaagaacaccgtgtacctccagatgaacagcctgaagcctgaggacaccgccgtgtactactgtgccgccgacaccagaagatacacctgtcctgacattgccaccatgcaccggaacttcgattcttggggccagggcacactggtcaccgtttcttctggtaccggcggaggcggatctggcggcggaggtagcggtggcggaggatctgaattcgacatccagatgacacagagccctagcagcctgtctgccagcgtgggagacagagtgaccatcacatgcaaggccagcgaccacatcaacaactggctggcctggtatcagcagaagcctggcaaggcccctaagctgctgatctacggcgctaccacactggaaacaggcgtgcccagcagattttctggcagcggctctggcaccgacttcaccctgacaatatccagcctccagcctgaggacttcgccacctactactgtcagcagagctggaacaccccttggacattcggccagggcaccaaggtggaaatcaagagactcgaggacctgaagaacgtgttcccacctgaggtggccgtgttcgagcctagcgaggccgagatcagccacacccagaaagccaccctcgtgtgcctggctaccggcttctaccccgaccatgtggaactgtcttggtgggtcaacggcaaagaggtgcacagcggcgtgtgtaccgacccccagccactgaaagaacagcccgccctgaacgacagccggtactgcctgagcagcagactgagagtgtccgccaccttctggcagaacccccggaaccacttcagatgccaggtgcagttctacggcctgagcgagaacgacgagtggacccaggacagagccaagcccgtgacccagatcgtgtctgccgaagcctggggcagagccgattgcgacgtgaagctggtggaaaagagcttcgagacagacaccaacctgaacttccagaacctgagcgtgatcggcttcagaatcctgctgctgaaagtggccggctttaacctgctgatgaccctgcggctgtggtccagcagggccaagcgatctggatctggagcaacaaacttctcactactcaaacaagcaggtgacgtggaggagaatcccgggcctactagtatggactggatttggcgcatccttttccttgtcggcgctgctaccggcgcgcattccttcgaagaagttcagctggttgaatctggcggcggactggttcaacctggcggatctctgagactgagctgtgccgcctctggctacacctttagcagctactgggtcaactgggttcgacaggcccctggcaaaggactggaatgggtcgcccaaatctatcccggcgacggcgacaccaactacaacggcaagttcaagggcagattcaccatcagccgggacaacagcaagaacaccctgtacctccagatgaactccctgagagccgaggacaccgccgtgtactattgtgccagatccatcaccaccgtcgtgggctgcgctatggattattggggccagggaaccctggtcaccgtgtcctctacgcgtatccagaaccctgatcctgccgtgtaccagctgcgggatagcaagagcagcgacaagagcgtgtgtctgttcaccgacttcgacagccagaccaacgtgtcccagagcaaggactccgacgtgtacatcaccgataagtgcgtgctggacatgcggagcatggacttcaagagcaactccgccgtggcctggtccaacaagtccgatttcgcctgcgccaacgccttcaacaacagcattatccccgaggacacattcttcccaagccccgagagcagctgcggctttaccagcgagagctaccagcagggcgtgctgagcgccaccatcctgtacgagatcctgctgggcaaggccaccctgtacgccgtgctggtgtctgccctggtgctgatggctatggtcaagcggaaggacagccggggataa

SEQ ID NO: 36128 - DNA, 2310 bp, synthetic construct
  source 1..2310: mol_type = other DNA
atggccttaccagtgaccgccttgctcctgccgctggccttgctgctccacgccgccaggccggaagtgcagctggttgaatctggcggaggactggttcagcctggcggatctctgagactgagctgtgaagccagcggcttcgccagcgacgattacatcatcggctggttcagacaggcccctggcaaagagagagagggcgtcagctgcatcagctctaagtacgccaacaccgtgtacaccgacagcgtgaagggcagattcagactgagcagaggcaccgccaagaataccgtgtacctccagatgagcgccctgaagcctgaggataccgccgtgtactactgcgctatggacagccgcagagtgacatgccctgagatcagcaccatgcaccggaacttcgattcttggggccagggcacactggtcacagtgtcatctggtaccggcggaggcggatctggcggcggaggtagcggtggcggaggatctgaattcgacatccagatgacacagagccctagcagcctgtctgccagcgtgggagacagagtgaccatcacatgcaaggccagcgaccacatcaacaactggctggcctggtatcagcagaagcctggcaaggcccctaagctgctgatctacggcgctaccacactggaaacaggcgtgcccagcagattttctggcagcggctctggcaccgacttcaccctgacaatatccagcctccagcctgaggacttcgccacctactactgtcagcagagctggaacaccccttggacattcggccagggcaccaaggtggaaatcaagagactcgaggacctgaagaacgtgttcccacctgaggtggccgtgttcgagcctagcgaggccgagatcagccacacccagaaagccaccctcgtgtgcctggctaccggcttctaccccgaccatgtggaactgtcttggtgggtcaacggcaaagaggtgcacagcggcgtgtgtaccgacccccagccactgaaagaacagcccgccctgaacgacagccggtactgcctgagcagcagactgagagtgtccgccaccttctggcagaacccccggaaccacttcagatgccaggtgcagttctacggcctgagcgagaacgacgagtggacccaggacagagccaagcccgtgacccagatcgtgtctgccgaagcctggggcagagccgattgcgacgtgaagctggtggaaaagagcttcgagacagacaccaacctgaacttccagaacctgagcgtgatcggcttcagaatcctgctgctgaaagtggccggctttaacctgctgatgaccctgcggctgtggtccagcagggccaagcgatctggatctggagcaacaaacttctcactactcaaacaagcaggtgacgtggaggagaatcccgggcctactagtatggactggatttggcgcatccttttccttgtcggcgctgctaccggcgcgcattccttcgaagaagttcagctggttgaatctggcggcggactggttcaacctggcggatctctgagactgagctgtgccgcctctggctacacctttagcagctactgggtcaactgggttcgacaggcccctggcaaaggactggaatgggtcgcccaaatctatcccggcgacggcgacaccaactacaacggcaagttcaagggcagattcaccatcagccgggacaacagcaagaacaccctgtacctccagatgaactccctgagagccgaggacaccgccgtgtactattgtgccagatccatcaccaccgtcgtgggctgcgctatggattattggggccagggaaccctggtcaccgtgtcctctacgcgtatccagaaccctgatcctgccgtgtaccagctgcgggatagcaagagcagcgacaagagcgtgtgtctgttcaccgacttcgacagccagaccaacgtgtcccagagcaaggactccgacgtgtacatcaccgataagtgcgtgctggacatgcggagcatggacttcaagagcaactccgccgtggcctggtccaacaagtccgatttcgcctgcgccaacgccttcaacaacagcattatccccgaggacacattcttcccaagccccgagagcagctgcggctttaccagcgagagctaccagcagggcgtgctgagcgccaccatcctgtacgagatcctgctgggcaaggccaccctgtacgccgtgctggtgtctgccctggtgctgatggctatggtcaagcggaaggacagccggggataa

SEQ ID NO: 36129 - DNA, 2307 bp, synthetic construct
  source 1..2307: mol_type = other DNA
atggccttaccagtgaccgccttgctcctgccgctggccttgctgctccacgccgccaggccggaagtgcagctggttgaatctggcggaggactggttcagcctggcggatctctgagactgtcttgtgccgcctctggcttcgccagcgactactatatcatcggctggttcagacaggcccctggcaaagagagagagggcgtcagctgtatcagcagcagatacgccaacaccaactacgccgacagcgtgaagggcagattcaccatcagccgggacaacgccaagaacaccgtgtacctccagatgaacagcctgaagcctgaggacaccgccgtgtactactgtgccgccgacaccagaagatacacctgtcctgacattgccaccatgcaccggaacttcgattcttggggccagggcacactggtcaccgtttcttctggtaccggcggaggcggatctggcggcggaggtagcggtggcggaggatctgaattcgacatccagatgacacagagccctagcagcctgtctgccagcgtgggagacagagtgaccatcacatgcaaggccagcgaccacatcaacaactggctggcctggtatcagcagaagcctggcaaggcccctaagctgctgatctacggcgctaccacactggaaacaggcgtgcccagcagattttctggcagcggctctggcaccgacttcaccctgacaatatccagcctccagcctgaggacttcgccacctactactgtcagcagagctggaacaccccttggacattcggccagggcaccaaggtggaaatcaagagactcgagatccagaaccctgatcctgccgtgtaccagctgcgggatagcaagagcagcgacaagagcgtgtgtctgttcaccgacttcgacagccagaccaacgtgtcccagagcaaggactccgacgtgtacatcaccgataagtgcgtgctggacatgcggagcatggacttcaagagcaactccgccgtggcctggtccaacaagtccgatttcgcctgcgccaacgccttcaacaacagcattatccccgaggacacattcttcccaagccccgagagcagctgcggctttaccagcgagagctaccagcagggcgtgctgagcgccaccatcctgtacgagatcctgctgggcaaggccaccctgtacgccgtgctggtgtctgccctggtgctgatggctatggtcaagcggaaggacagccggggaagggccaagcgatctggatctggagcaacaaacttctcactactcaaacaagcaggtgacgtggaggagaatcccgggcctactagtatggactggatttggcgcatccttttccttgtcggcgctgctaccggcgcgcattccttcgaagaagttcagctggttgaatctggcggcggactggttcaacctggcggatctctgagactgagctgtgccgcctctggctacacctttagcagctactgggtcaactgggttcgacaggcccctggcaaaggactggaatgggtcgcccaaatctatcccggcgacggcgacaccaactacaacggcaagttcaagggcagattcaccatcagccgggacaacagcaagaacaccctgtacctccagatgaactccctgagagccgaggacaccgccgtgtactattgtgccagatccatcaccaccgtcgtgggctgcgctatggattattggggccagggaaccctggtcaccgtgtcctctacgcgtgacctgaagaacgtgttcccacctgaggtggccgtgttcgagcctagcgaggccgagatcagccacacccagaaagccaccctcgtgtgcctggctaccggcttctaccccgaccatgtggaactgtcttggtgggtcaacggcaaagaggtgcacagcggcgtgtgtaccgacccccagccactgaaagaacagcccgccctgaacgacagccggtactgcctgagcagcagactgagagtgtccgccaccttctggcagaacccccggaaccacttcagatgccaggtgcagttctacggcctgagcgagaacgacgagtggacccaggacagagccaagcccgtgacccagatcgtgtctgccgaagcctggggcagagccgattgcgacgtgaagctggtggaaaagagcttcgagacagacaccaacctgaacttccagaacctgagcgtgatcggcttcagaatcctgctgctgaaagtggccggctttaacctgctgatgaccctgcggctgtggtccagc

SEQ ID NO: 36130 - DNA, 2307 bp, synthetic construct
  source 1..2307: mol_type = other DNA
atggccttaccagtgaccgccttgctcctgccgctggccttgctgctccacgccgccaggccggaagtgcagctggttgaatctggcggaggactggttcagcctggcggatctctgagactgagctgtgaagccagcggcttcgccagcgacgattacatcatcggctggttcagacaggcccctggcaaagagagagagggcgtcagctgcatcagctctaagtacgccaacaccgtgtacaccgacagcgtgaagggcagattcagactgagcagaggcaccgccaagaataccgtgtacctccagatgagcgccctgaagcctgaggataccgccgtgtactactgcgctatggacagccgcagagtgacatgccctgagatcagcaccatgcaccggaacttcgattcttggggccagggcacactggtcacagtgtcatctggtaccggcggaggcggatctggcggcggaggtagcggtggcggaggatctgaattcgacatccagatgacacagagccctagcagcctgtctgccagcgtgggagacagagtgaccatcacatgcaaggccagcgaccacatcaacaactggctggcctggtatcagcagaagcctggcaaggcccctaagctgctgatctacggcgctaccacactggaaacaggcgtgcccagcagattttctggcagcggctctggcaccgacttcaccctgacaatatccagcctccagcctgaggacttcgccacctactactgtcagcagagctggaacaccccttggacattcggccagggcaccaaggtggaaatcaagagactcgagatccagaaccctgatcctgccgtgtaccagctgcgggatagcaagagcagcgacaagagcgtgtgtctgttcaccgacttcgacagccagaccaacgtgtcccagagcaaggactccgacgtgtacatcaccgataagtgcgtgctggacatgcggagcatggacttcaagagcaactccgccgtggcctggtccaacaagtccgatttcgcctgcgccaacgccttcaacaacagcattatccccgaggacacattcttcccaagccccgagagcagctgcggctttaccagcgagagctaccagcagggcgtgctgagcgccaccatcctgtacgagatcctgctgggcaaggccaccctgtacgccgtgctggtgtctgccctggtgctgatggctatggtcaagcggaaggacagccggggaagggccaagcgatctggatctggagcaacaaacttctcactactcaaacaagcaggtgacgtggaggagaatcccgggcctactagtatggactggatttggcgcatccttttccttgtcggcgctgctaccggcgcgcattccttcgaagaagttcagctggttgaatctggcggcggactggttcaacctggcggatctctgagactgagctgtgccgcctctggctacacctttagcagctactgggtcaactgggttcgacaggcccctggcaaaggactggaatgggtcgcccaaatctatcccggcgacggcgacaccaactacaacggcaagttcaagggcagattcaccatcagccgggacaacagcaagaacaccctgtacctccagatgaactccctgagagccgaggacaccgccgtgtactattgtgccagatccatcaccaccgtcgtgggctgcgctatggattattggggccagggaaccctggtcaccgtgtcctctacgcgtgacctgaagaacgtgttcccacctgaggtggccgtgttcgagcctagcgaggccgagatcagccacacccagaaagccaccctcgtgtgcctggctaccggcttctaccccgaccatgtggaactgtcttggtgggtcaacggcaaagaggtgcacagcggcgtgtgtaccgacccccagccactgaaagaacagcccgccctgaacgacagccggtactgcctgagcagcagactgagagtgtccgccaccttctggcagaacccccggaaccacttcagatgccaggtgcagttctacggcctgagcgagaacgacgagtggacccaggacagagccaagcccgtgacccagatcgtgtctgccgaagcctggggcagagccgattgcgacgtgaagctggtggaaaagagcttcgagacagacaccaacctgaacttccagaacctgagcgtgatcggcttcagaatcctgctgctgaaagtggccggctttaacctgctgatgaccctgcggctgtggtccagc

SEQ ID NO: 36131 - DNA, 2280 bp, synthetic construct
  source 1..2280: mol_type = other DNA
atggccttaccagtgaccgccttgctcctgccgctggccttgctgctccacgccgccaggccgcaagtcaaactggaagaaagcggtggcggcctggtgcaacctggcgaatctctgagactgagctgtagcgccagcggctccatcttcaaggtgttcagagtgttcgccatgagctggtacaggcaaggccctggcaagcagagagagctggtcgcctctatcagcagcggcgagacaaccacatacgccgaatctgtgaaaggccggttcaccatcagccgggataatgccaagaataccgcctatctccagatggactccctgaagcctgaagatacagctgtgtactactgcaacgccgaccataccttcaccggcgatttttggggccagggaacccaagtgaccgtgtctagtggtaccggcggaggcggatctggcggcggaggtagcggtggcggaggatctgaattcgacatccagatgacacagagccctagcagcctgtctgccagcgtgggagacagagtgaccatcacatgcaaggccagcgaccacatcaacaactggctggcctggtatcagcagaagcctggcaaggcccctaagctgctgatctacggcgctaccacactggaaacaggcgtgcccagcagattttctggcagcggctctggcaccgacttcaccctgacaatatccagcctccagcctgaggacttcgccacctactactgtcagcagagctggaacaccccttggacattcggccagggcaccaaggtggaaatcaagagactcgagatccagaaccctgatcctgccgtgtaccagctgcgggatagcaagagcagcgacaagagcgtgtgtctgttcaccgacttcgacagccagaccaacgtgtcccagagcaaggactccgacgtgtacatcaccgataagtgcgtgctggacatgcggagcatggacttcaagagcaactccgccgtggcctggtccaacaagtccgatttcgcctgcgccaacgccttcaacaacagcattatccccgaggacacattcttcccaagccccgagagcagctgcggctttaccagcgagagctaccagcagggcgtgctgagcgccaccatcctgtacgagatcctgctgggcaaggccaccctgtacgccgtgctggtgtctgccctggtgctgatggctatggtcaagcggaaggacagccggggaagggccaagcgatctggatctggagcaacaaacttctcactactcaaacaagcaggtgacgtggaggagaatcccgggcctactagtatggactggatttggcgcatccttttccttgtcggcgctgctaccggcgcgcattccttcgaagaagttcagctggttgaatctggcggcggactggttcaacctggcggatctctgagactgagctgtgccgcctctggctacacctttagcagctactgggtcaactgggttcgacaggcccctggcaaaggactggaatgggtcgcccaaatctatcccggcgacggcgacaccaactacaacggcaagttcaagggcagattcaccatcagccgggacaacagcaagaacaccctgtacctccagatgaactccctgagagccgaggacaccgccgtgtactattgtgccagatccatcaccaccgtcgtgggctgcgctatggattattggggccagggaaccctggtcaccgtgtcctctacgcgtgacctgaagaacgtgttcccacctgaggtggccgtgttcgagcctagcgaggccgagatcagccacacccagaaagccaccctcgtgtgcctggctaccggcttctaccccgaccatgtggaactgtcttggtgggtcaacggcaaagaggtgcacagcggcgtgtgtaccgacccccagccactgaaagaacagcccgccctgaacgacagccggtactgcctgagcagcagactgagagtgtccgccaccttctggcagaacccccggaaccacttcagatgccaggtgcagttctacggcctgagcgagaacgacgagtggacccaggacagagccaagcccgtgacccagatcgtgtctgccgaagcctggggcagagccgattgcgacgtgaagctggtggaaaagagcttcgagacagacaccaacctgaacttccagaacctgagcgtgatcggcttcagaatcctgctgctgaaagtggccggctttaacctgctgatgaccctgcggctgtggtccagc

SEQ ID NO: 36132 - DNA, 2286 bp, synthetic construct
  source 1..2286: mol_type = other DNA
atggccttaccagtgaccgccttgctcctgccgctggccttgctgctccacgccgccaggccggacatccagatgacacagagccctagcagcctgtctgccagcgtgggagacagagtgaccatcacatgcaaggccagcgaccacatcaacaactggctggcctggtatcagcagaagcctggcaaggcccctaagctgctgatctacggcgctaccacactggaaacaggcgtgcccagcagattttctggcagcggctctggcaccgacttcaccctgacaatatccagcctccagcctgaggacttcgccacctactactgtcagcagagctggaacaccccttggacattcggccagggcaccaaggtggaaatcaagagactcgaggacctgaagaacgtgttcccacctgaggtggccgtgttcgagcctagcgaggccgagatcagccacacccagaaagccaccctcgtgtgcctggctaccggcttctaccccgaccatgtggaactgtcttggtgggtcaacggcaaagaggtgcacagcggcgtgtgtaccgacccccagccactgaaagaacagcccgccctgaacgacagccggtactgcctgagcagcagactgagagtgtccgccaccttctggcagaacccccggaaccacttcagatgccaggtgcagttctacggcctgagcgagaacgacgagtggacccaggacagagccaagcccgtgacccagatcgtgtctgccgaagcctggggcagagccgattgcgacgtgaagctggtggaaaagagcttcgagacagacaccaacctgaacttccagaacctgagcgtgatcggcttcagaatcctgctgctgaaagtggccggctttaacctgctgatgaccctgcggctgtggtccagcagggccaagcgatctggatctggagcaacaaacttctcactactcaaacaagcaggtgacgtggaggagaatcccgggcctactagtgccaccatggactggatttggcgcatccttttccttgtcggcgctgctaccggcgcccattccgggcccgaagtgcagctggttgaatctggcggaggactggttcaggctggcggatctctgagactgtcttgtgccgccagcggcagaacctttagcatgggctggtttagacaggcccctggcaaagagagagagttcgtcgccgccatcacatactctggcggcagcccttactacgccgactctgtgaagggcagattcaccatcagccgggacaacgccaagaacaccgtgtacctccagatgaacagcctgaagcctgaggacaccgccgtgtactactgcgccgccaatccaacatacggcagcgactggaacgccgagaattggggccagggaacccaagtgacagtgtctagcggatccggcggcggaggatctggcggaggcggatctgggggcggaggctctttcgaagaagttcagctggttgaatctggcggcggactggttcaacctggcggatctctgagactgagctgtgccgcctctggctacacctttagcagctactgggtcaactgggttcgacaggcccctggcaaaggactggaatgggtcgcccaaatctatcccggcgacggcgacaccaactacaacggcaagttcaagggcagattcaccatcagccgggacaacagcaagaacaccctgtacctccagatgaactccctgagagccgaggacaccgccgtgtactattgtgccagatccatcaccaccgtcgtgggctgcgctatggattattggggccagggaaccctggtcaccgtgtcctctacgcgtatccagaaccctgatcctgccgtgtaccagctgcgggatagcaagagcagcgacaagagcgtgtgtctgttcaccgacttcgacagccagaccaacgtgtcccagagcaaggactccgacgtgtacatcaccgataagtgcgtgctggacatgcggagcatggacttcaagagcaactccgccgtggcctggtccaacaagtccgatttcgcctgcgccaacgccttcaacaacagcattatccccgaggacacattcttcccaagccccgagagcagctgcggctttaccagcgagagctaccagcagggcgtgctgagcgccaccatcctgtacgagatcctgctgggcaaggccaccctgtacgccgtgctggtgtctgccctggtgctgatggctatggtcaagcggaaggacagccggggataa

SEQ ID NO: 36133 - DNA, 2289 bp, synthetic construct
  source 1..2289: mol_type = other DNA
atggccttaccagtgaccgccttgctcctgccgctggccttgctgctccacgccgccaggccggacatccagatgacacagagccctagcagcctgtctgccagcgtgggagacagagtgaccatcacatgcaaggccagcgaccacatcaacaactggctggcctggtatcagcagaagcctggcaaggcccctaagctgctgatctacggcgctaccacactggaaacaggcgtgcccagcagattttctggcagcggctctggcaccgacttcaccctgacaatatccagcctccagcctgaggacttcgccacctactactgtcagcagagctggaacaccccttggacattcggccagggcaccaaggtggaaatcaagagactcgaggacctgaagaacgtgttcccacctgaggtggccgtgttcgagcctagcgaggccgagatcagccacacccagaaagccaccctcgtgtgcctggctaccggcttctaccccgaccatgtggaactgtcttggtgggtcaacggcaaagaggtgcacagcggcgtgtgtaccgacccccagccactgaaagaacagcccgccctgaacgacagccggtactgcctgagcagcagactgagagtgtccgccaccttctggcagaacccccggaaccacttcagatgccaggtgcagttctacggcctgagcgagaacgacgagtggacccaggacagagccaagcccgtgacccagatcgtgtctgccgaagcctggggcagagccgattgcgacgtgaagctggtggaaaagagcttcgagacagacaccaacctgaacttccagaacctgagcgtgatcggcttcagaatcctgctgctgaaagtggccggctttaacctgctgatgaccctgcggctgtggtccagcagggccaagcgatctggatctggagcaacaaacttctcactactcaaacaagcaggtgacgtggaggagaatcccgggcctactagtgccaccatggactggatttggcgcatccttttccttgtcggcgctgctaccggcgcccattccgggcccgaagtgcaactggtggaatctgggggcggactggtgcagccaggcggaagtctgaggctgtcttgtgccgcctccggcagcatcttcggcttcaacgacatggcctggtatcggcaggctcccggaaaacagcgcgagctggtggctctgattagcagagtgggcgtgaccagcagcgccgactctgtgaagggcagattcacaatctccagagtgaacgccaaggatacagtgtacctccagatgaactctctgaaacctgaggatacagcagtgtactattgctacatggaccagcggctggacggcagcacactggcctactggggacagggaactcaagtgacagtgtctagcggatccggcggcggaggatctggcggaggcggatctgggggcggaggctctttcgaagaagttcagctggttgaatctggcggcggactggttcaacctggcggatctctgagactgagctgtgccgcctctggctacacctttagcagctactgggtcaactgggttcgacaggcccctggcaaaggactggaatgggtcgcccaaatctatcccggcgacggcgacaccaactacaacggcaagttcaagggcagattcaccatcagccgggacaacagcaagaacaccctgtacctccagatgaactccctgagagccgaggacaccgccgtgtactattgtgccagatccatcaccaccgtcgtgggctgcgctatggattattggggccagggaaccctggtcaccgtgtcctctacgcgtatccagaaccctgatcctgccgtgtaccagctgcgggatagcaagagcagcgacaagagcgtgtgtctgttcaccgacttcgacagccagaccaacgtgtcccagagcaaggactccgacgtgtacatcaccgataagtgcgtgctggacatgcggagcatggacttcaagagcaactccgccgtggcctggtccaacaagtccgatttcgcctgcgccaacgccttcaacaacagcattatccccgaggacacattcttcccaagccccgagagcagctgcggctttaccagcgagagctaccagcagggcgtgctgagcgccaccatcctgtacgagatcctgctgggcaaggccaccctgtacgccgtgctggtgtctgccctggtgctgatggctatggtcaagcggaaggacagccggggataa

SEQ ID NO: 36134 - DNA, 2277 bp, synthetic construct
  source 1..2277: mol_type = other DNA
atggccttaccagtgaccgccttgctcctgccgctggccttgctgctccacgccgccaggccggacatccagatgacacagagccctagcagcctgtctgccagcgtgggagacagagtgaccatcacatgcaaggccagcgaccacatcaacaactggctggcctggtatcagcagaagcctggcaaggcccctaagctgctgatctacggcgctaccacactggaaacaggcgtgcccagcagattttctggcagcggctctggcaccgacttcaccctgacaatatccagcctccagcctgaggacttcgccacctactactgtcagcagagctggaacaccccttggacattcggccagggcaccaaggtggaaatcaagagactcgaggacctgaagaacgtgttcccacctgaggtggccgtgttcgagcctagcgaggccgagatcagccacacccagaaagccaccctcgtgtgcctggctaccggcttctaccccgaccatgtggaactgtcttggtgggtcaacggcaaagaggtgcacagcggcgtgtgtaccgacccccagccactgaaagaacagcccgccctgaacgacagccggtactgcctgagcagcagactgagagtgtccgccaccttctggcagaacccccggaaccacttcagatgccaggtgcagttctacggcctgagcgagaacgacgagtggacccaggacagagccaagcccgtgacccagatcgtgtctgccgaagcctggggcagagccgattgcgacgtgaagctggtggaaaagagcttcgagacagacaccaacctgaacttccagaacctgagcgtgatcggcttcagaatcctgctgctgaaagtggccggctttaacctgctgatgaccctgcggctgtggtccagcagggccaagcgatctggatctggagcaacaaacttctcactactcaaacaagcaggtgacgtggaggagaatcccgggcctactagtgccaccatggactggatttggcgcatccttttccttgtcggcgctgctaccggcgcccattccgggcccgaggtgcagctggttgaatctggcggaggactggttcaggctggcggatctctgagactgtcttgtgccgccagcggctctgtgttcagcggcaatgtgatgggctggtacagacaggcccctggcaaagaaagagagtgggttgccgccattgccagcggcggcagcatctactacagagactctgtgaagggcagattcaccatcagccgggacaacgccaagaacaccgtgtacctccagatgaacagcctgaagcctgaggacaccgccgtgtactactgcaactctcaccctcctacactgccctattggggcctgggaacccaagtgacagtgtcctctggatccggcggcggaggatctggcggaggcggatctgggggcggaggctctttcgaagaagttcagctggttgaatctggcggcggactggttcaacctggcggatctctgagactgagctgtgccgcctctggctacacctttagcagctactgggtcaactgggttcgacaggcccctggcaaaggactggaatgggtcgcccaaatctatcccggcgacggcgacaccaactacaacggcaagttcaagggcagattcaccatcagccgggacaacagcaagaacaccctgtacctccagatgaactccctgagagccgaggacaccgccgtgtactattgtgccagatccatcaccaccgtcgtgggctgcgctatggattattggggccagggaaccctggtcaccgtgtcctctacgcgtatccagaaccctgatcctgccgtgtaccagctgcgggatagcaagagcagcgacaagagcgtgtgtctgttcaccgacttcgacagccagaccaacgtgtcccagagcaaggactccgacgtgtacatcaccgataagtgcgtgctggacatgcggagcatggacttcaagagcaactccgccgtggcctggtccaacaagtccgatttcgcctgcgccaacgccttcaacaacagcattatccccgaggacacattcttcccaagccccgagagcagctgcggctttaccagcgagagctaccagcagggcgtgctgagcgccaccatcctgtacgagatcctgctgggcaaggccaccctgtacgccgtgctggtgtctgccctggtgctgatggctatggtcaagcggaaggacagccggggataa

SEQ ID NO: 36135 - DNA, 2271 bp, synthetic construct
  source 1..2271: mol_type = other DNA
atggccttaccagtgaccgccttgctcctgccgctggccttgctgctccacgccgccaggccggacatccagatgacacagagccctagcagcctgtctgccagcgtgggagacagagtgaccatcacatgcaaggccagcgaccacatcaacaactggctggcctggtatcagcagaagcctggcaaggcccctaagctgctgatctacggcgctaccacactggaaacaggcgtgcccagcagattttctggcagcggctctggcaccgacttcaccctgacaatatccagcctccagcctgaggacttcgccacctactactgtcagcagagctggaacaccccttggacattcggccagggcaccaaggtggaaatcaagagactcgaggacctgaagaacgtgttcccacctgaggtggccgtgttcgagcctagcgaggccgagatcagccacacccagaaagccaccctcgtgtgcctggctaccggcttctaccccgaccatgtggaactgtcttggtgggtcaacggcaaagaggtgcacagcggcgtgtgtaccgacccccagccactgaaagaacagcccgccctgaacgacagccggtactgcctgagcagcagactgagagtgtccgccaccttctggcagaacccccggaaccacttcagatgccaggtgcagttctacggcctgagcgagaacgacgagtggacccaggacagagccaagcccgtgacccagatcgtgtctgccgaagcctggggcagagccgattgcgacgtgaagctggtggaaaagagcttcgagacagacaccaacctgaacttccagaacctgagcgtgatcggcttcagaatcctgctgctgaaagtggccggctttaacctgctgatgaccctgcggctgtggtccagcagggccaagcgatctggatctggagcaacaaacttctcactactcaaacaagcaggtgacgtggaggagaatcccgggcctactagtgccaccatggactggatttggcgcatccttttccttgtcggcgctgctaccggcgcccattccgggcccgaagttcagctgctggaatctggcggaggactcgttcaacctggcggctctctgagactgagctgtgccgcttctggcttcagcttctctagctacgccctgagctgggttcgacaagctcccggaaagggccttgaatgggtgtccagcatcggcgagaatgacggcaccacagactatgccgatgccgtgaaaggccggtttaccatcagcagagacaattccaagaacacgctctatctgcaaatgaactccctgcgcgtggaagatacagccgtgtattattgcgtgaaggacggcatccactggggacagggaaccctggttacagtgtctagcggatccggcggcggaggatctggcggaggcggatctgggggcggaggctctttcgaagaagttcagctggttgaatctggcggcggactggttcaacctggcggatctctgagactgagctgtgccgcctctggctacacctttagcagctactgggtcaactgggttcgacaggcccctggcaaaggactggaatgggtcgcccaaatctatcccggcgacggcgacaccaactacaacggcaagttcaagggcagattcaccatcagccgggacaacagcaagaacaccctgtacctccagatgaactccctgagagccgaggacaccgccgtgtactattgtgccagatccatcaccaccgtcgtgggctgcgctatggattattggggccagggaaccctggtcaccgtgtcctctacgcgtatccagaaccctgatcctgccgtgtaccagctgcgggatagcaagagcagcgacaagagcgtgtgtctgttcaccgacttcgacagccagaccaacgtgtcccagagcaaggactccgacgtgtacatcaccgataagtgcgtgctggacatgcggagcatggacttcaagagcaactccgccgtggcctggtccaacaagtccgatttcgcctgcgccaacgccttcaacaacagcattatccccgaggacacattcttcccaagccccgagagcagctgcggctttaccagcgagagctaccagcagggcgtgctgagcgccaccatcctgtacgagatcctgctgggcaaggccaccctgtacgccgtgctggtgtctgccctggtgctgatggctatggtcaagcggaaggacagccggggataa

SEQ ID NO: 36136 - DNA, 3378 bp, synthetic construct
  source 1..3378: mol_type = other DNA
atgggacccagactgctgttttgggctctgctgtgtctgctcggcacaggacctgttgaagctggcgtgacacagagccccacacacctgattaagaccagaggccagcaggccacactgagatgcagccctatcagcggccacaccagcgtgtactggtatcagcaggctctcggactgggcctccagttcctgctttggtacgacgagggcgaagagagaaaccggggcaacttccctcctcggttttccggcagacagttccccaactacagcagcgagctgaacgtgaacgccctggaactggaagatagcgccctgtacctgtgtgcctcttctcttggtggacctcgcggactggctggactgagaggggatgagcagtttttcggccctggcaccagactgaccgtgctggaaggtaccggcggaggcggatctggcggcggagaattcgacatccagatgacacagagccctagcagcctgtctgccagcgtgggagacagagtgaccatcacatgcaaggccagcgaccacatcaacaactggctggcctggtatcagcagaagcctggcaaggcccctaagctgctgatctacggcgctaccacactggaaacaggcgtgcccagcagattttctggcagcggctctggcaccgacttcaccctgacaatatccagcctccagcctgaggacttcgccacctactactgtcagcagagctggaacaccccttggacattcggccagggcaccaaggtggaaatcaagagactcgaggacctgaagaacgtgttcccacctgaggtggccgtgttcgagcctagcgaggccgagatcagccacacccagaaagccaccctcgtgtgcctggctaccggcttctaccccgaccatgtggaactgtcttggtgggtcaacggcaaagaggtgcacagcggcgtgtgtaccgacccccagccactgaaagaacagcccgccctgaacgacagccggtactgcctgagcagcagactgagagtgtccgccaccttctggcagaacccccggaaccacttcagatgccaggtgcagttctacggcctgagcgagaacgacgagtggacccaggacagagccaagcccgtgacccagatcgtgtctgccgaagcctggggcagagccgattgcgacgtgaagctggtggaaaagagcttcgagacagacaccaacctgaacttccagaacctgagcgtgatcggcttcagaatcctgctgctgaaagtggccggctttaacctgctgatgaccctgcggctgtggtccagcagggccaagcgatctggatctggagcaacaaacttctcactactcaaacaagcaggtgacgtggaggagaatcccgggcctactagtgccaccatggactggatttggcgcatccttttccttgtcggcgctgctaccggcgcccattccgggcccgaagtgcagctggttgaatctggcggaggactggttcaggctggcggatctctgagactgtcttgtgccgccagcggcagaacctttagcatgggctggtttagacaggcccctggcaaagagagagagttcgtcgccgccatcacatactctggcggcagcccttactacgccgactctgtgaagggcagattcaccatcagccgggacaacgccaagaacaccgtgtacctccagatgaacagcctgaagcctgaggacaccgccgtgtactactgcgccgccaatccaacatacggcagcgactggaacgccgagaattggggccagggaacccaagtgacagtgtctagcggatccggcggcggaggatctggcggaggcggatctgggggcggaggctctttcgaagaagttcagctggttgaatctggcggcggactggttcaacctggcggatctctgagactgagctgtgccgcctctggctacacctttagcagctactgggtcaactgggttcgacaggcccctggcaaaggactggaatgggtcgcccaaatctatcccggcgacggcgacaccaactacaacggcaagttcaagggcagattcaccatcagccgggacaacagcaagaacaccctgtacctccagatgaactccctgagagccgaggacaccgccgtgtactattgtgccagatccatcaccaccgtcgtgggctgcgctatggattattggggccagggaaccctggtcaccgtgtcctctacgcgtatccagaaccctgatcctgccgtgtaccagctgcgggatagcaagagcagcgacaagagcgtgtgtctgttcaccgacttcgacagccagaccaacgtgtcccagagcaaggactccgacgtgtacatcaccgataagtgcgtgctggacatgcggagcatggacttcaagagcaactccgccgtggcctggtccaacaagtccgatttcgcctgcgccaacgccttcaacaacagcattatccccgaggacacattcttcccaagccccgagagcagctgcggctttaccagcgagagctaccagcagggcgtgctgagcgccaccatcctgtacgagatcctgctgggcaaggccaccctgtacgccgtgctggtgtctgccctggtgctgatggctatggtcaagcggaaggacagccggggacgcgccaagagaagcggatctggcgtgaagcagaccctgaatttcgacctgctgaagctggctggcgacgtggaatccaacccaggcccttctagaggccatatgaccgagtacaagcccacggtgcgcctcgccacccgcgacgacgtccccagggccgtacgcaccctcgccgccgcgttcgccgactaccccgccacgcgccacaccgtcgatccggaccgccacatcgagcgggtcaccgagctgcaagaactcttcctcacgcgcgtcgggctcgacatcggcaaggtgtgggtcgcggacgacggcgccgcggtggcggtctggaccacgccggagagcgtcgaagcgggggcggtgttcgccgagatcggcccgcgcatggccgagttgagcggttcccggctggccgcgcagcaacagatggaaggcctcctggcgccgcaccggcccaaggagcccgcgtggttcctggccaccgtcggcgtctcgcccgaccaccagggcaagggtctgggcagcgccgtcgtgctccccggagtggaggcggccgagcgcgccggggtgcccgccttcctggagacctccgcgccccgcaacctccccttctacgagcggctcggcttcaccgtcaccgccgacgtcgaggtgcccgaaggaccgcgcacctggtgcatgacccgcaagcccggtgcctga

SEQ ID NO: 36137 - DNA, 3375 bp, synthetic construct
  source 1..3375: mol_type = other DNA
atgggacccagactgctgttttgggctctgctgtgtctgctcggcacaggacctgttgaagctggcgtgacacagagccccacacacctgattaagaccagaggccagcaggccacactgagatgcagccctatcagcggccacaccagcgtgtactggtatcagcaggctctcggactgggcctccagttcctgctttggtacgacgagggcgaagagagaaaccggggcaacttccctcctcggttttccggcagacagttccccaactacagcagcgagctgaacgtgaacgccctggaactggaagatagcgccctgtacctgtgtgccagctctctcggcggagatgaactgggagccgatggcaacgagcagttctttggccctggcaccagactgaccgtgctggaaggtaccggcggaggcggatctggcggcggaagcgaattcgacatccagatgacacagagccctagcagcctgtctgccagcgtgggagacagagtgaccatcacatgcaaggccagcgaccacatcaacaactggctggcctggtatcagcagaagcctggcaaggcccctaagctgctgatctacggcgctaccacactggaaacaggcgtgcccagcagattttctggcagcggctctggcaccgacttcaccctgacaatatccagcctccagcctgaggacttcgccacctactactgtcagcagagctggaacaccccttggacattcggccagggcaccaaggtggaaatcaagagactcgaggacctgaagaacgtgttcccacctgaggtggccgtgttcgagcctagcgaggccgagatcagccacacccagaaagccaccctcgtgtgcctggctaccggcttctaccccgaccatgtggaactgtcttggtgggtcaacggcaaagaggtgcacagcggcgtgtgtaccgacccccagccactgaaagaacagcccgccctgaacgacagccggtactgcctgagcagcagactgagagtgtccgccaccttctggcagaacccccggaaccacttcagatgccaggtgcagttctacggcctgagcgagaacgacgagtggacccaggacagagccaagcccgtgacccagatcgtgtctgccgaagcctggggcagagccgattgcgacgtgaagctggtggaaaagagcttcgagacagacaccaacctgaacttccagaacctgagcgtgatcggcttcagaatcctgctgctgaaagtggccggctttaacctgctgatgaccctgcggctgtggtccagcagggccaagcgatctggatctggagcaacaaacttctcactactcaaacaagcaggtgacgtggaggagaatcccgggcctactagtgccaccatggactggatttggcgcatccttttccttgtcggcgctgctaccggcgcccattccgggcccgaagtgcagctggttgaatctggcggaggactggttcaggctggcggatctctgagactgtcttgtgccgccagcggcagaacctttagcatgggctggtttagacaggcccctggcaaagagagagagttcgtcgccgccatcacatactctggcggcagcccttactacgccgactctgtgaagggcagattcaccatcagccgggacaacgccaagaacaccgtgtacctccagatgaacagcctgaagcctgaggacaccgccgtgtactactgcgccgccaatccaacatacggcagcgactggaacgccgagaattggggccagggaacccaagtgacagtgtctagcggatccggcggcggaggatctggcggaggcggatctgggggcggaggctctttcgaagaagttcagctggttgaatctggcggcggactggttcaacctggcggatctctgagactgagctgtgccgcctctggctacacctttagcagctactgggtcaactgggttcgacaggcccctggcaaaggactggaatgggtcgcccaaatctatcccggcgacggcgacaccaactacaacggcaagttcaagggcagattcaccatcagccgggacaacagcaagaacaccctgtacctccagatgaactccctgagagccgaggacaccgccgtgtactattgtgccagatccatcaccaccgtcgtgggctgcgctatggattattggggccagggaaccctggtcaccgtgtcctctacgcgtatccagaaccctgatcctgccgtgtaccagctgcgggatagcaagagcagcgacaagagcgtgtgtctgttcaccgacttcgacagccagaccaacgtgtcccagagcaaggactccgacgtgtacatcaccgataagtgcgtgctggacatgcggagcatggacttcaagagcaactccgccgtggcctggtccaacaagtccgatttcgcctgcgccaacgccttcaacaacagcattatccccgaggacacattcttcccaagccccgagagcagctgcggctttaccagcgagagctaccagcagggcgtgctgagcgccaccatcctgtacgagatcctgctgggcaaggccaccctgtacgccgtgctggtgtctgccctggtgctgatggctatggtcaagcggaaggacagccggggacgcgccaagagaagcggatctggcgtgaagcagaccctgaatttcgacctgctgaagctggctggcgacgtggaatccaacccaggcccttctagaggccatatgaccgagtacaagcccacggtgcgcctcgccacccgcgacgacgtccccagggccgtacgcaccctcgccgccgcgttcgccgactaccccgccacgcgccacaccgtcgatccggaccgccacatcgagcgggtcaccgagctgcaagaactcttcctcacgcgcgtcgggctcgacatcggcaaggtgtgggtcgcggacgacggcgccgcggtggcggtctggaccacgccggagagcgtcgaagcgggggcggtgttcgccgagatcggcccgcgcatggccgagttgagcggttcccggctggccgcgcagcaacagatggaaggcctcctggcgccgcaccggcccaaggagcccgcgtggttcctggccaccgtcggcgtctcgcccgaccaccagggcaagggtctgggcagcgccgtcgtgctccccggagtggaggcggccgagcgcgccggggtgcccgccttcctggagacctccgcgccccgcaacctccccttctacgagcggctcggcttcaccgtcaccgccgacgtcgaggtgcccgaaggaccgcgcacctggtgcatgacccgcaagcccggtgcctga

SEQ ID NO: 36138 - DNA, 2850 bp, synthetic construct
  source 1..2850: mol_type = other DNA
atggccttaccagtgaccgccttgctcctgccgctggccttgctgctccacgccgccaggccggacatccagatgacacagagccctagcagcctgtctgccagcgtgggagacagagtgaccatcacatgcaaggccagcgaccacatcaacaactggctggcctggtatcagcagaagcctggcaaggcccctaagctgctgatctacggcgctaccacactggaaacaggcgtgcccagcagattttctggcagcggctctggcaccgacttcaccctgacaatatccagcctccagcctgaggacttcgccacctactactgtcagcagagctggaacaccccttggacattcggccagggcaccaaggtggaaatcaagagactcgaggacctgaagaacgtgttcccacctgaggtggccgtgttcgagcctagcgaggccgagatcagccacacccagaaagccaccctcgtgtgcctggctaccggcttctaccccgaccatgtggaactgtcttggtgggtcaacggcaaagaggtgcacagcggcgtgtgtaccgacccccagccactgaaagaacagcccgccctgaacgacagccggtactgcctgagcagcagactgagagtgtccgccaccttctggcagaacccccggaaccacttcagatgccaggtgcagttctacggcctgagcgagaacgacgagtggacccaggacagagccaagcccgtgacccagatcgtgtctgccgaagcctggggcagagccgattgcgacgtgaagctggtggaaaagagcttcgagacagacaccaacctgaacttccagaacctgagcgtgatcggcttcagaatcctgctgctgaaagtggccggctttaacctgctgatgaccctgcggctgtggtccagcagggccaagcgatctggatctggagcaacaaacttctcactactcaaacaagcaggtgacgtggaggagaatcccgggcctactagtgccaccatggactggatttggcgcatccttttccttgtcggcgctgctaccggcgcccattccgggcccatgggaagctggcttgagttctaccacagactcaacgccattgacagcaggctgtgggcacttggcggaagcgaagctgaactcgccgcttttgaaaaagaaattgccgctttcgagtccgagcttcaggcttacaaaggcaaagggaatcctgaggtcgagagcctgagagatcacgctgcccacattagagagtggttgcaggcataccggcacaatggatccggcggcggaggatctggcggaggcggatctgggggcggaggctctttcgaagaagttcagctggttgaatctggcggcggactggttcaacctggcggatctctgagactgagctgtgccgcctctggctacacctttagcagctactgggtcaactgggttcgacaggcccctggcaaaggactggaatgggtcgcccaaatctatcccggcgacggcgacaccaactacaacggcaagttcaagggcagattcaccatcagccgggacaacagcaagaacaccctgtacctccagatgaactccctgagagccgaggacaccgccgtgtactattgtgccagatccatcaccaccgtcgtgggctgcgctatggattattggggccagggaaccctggtcaccgtgtcctctacgcgtatccagaaccctgatcctgccgtgtaccagctgcgggatagcaagagcagcgacaagagcgtgtgtctgttcaccgacttcgacagccagaccaacgtgtcccagagcaaggactccgacgtgtacatcaccgataagtgcgtgctggacatgcggagcatggacttcaagagcaactccgccgtggcctggtccaacaagtccgatttcgcctgcgccaacgccttcaacaacagcattatccccgaggacacattcttcccaagccccgagagcagctgcggctttaccagcgagagctaccagcagggcgtgctgagcgccaccatcctgtacgagatcctgctgggcaaggccaccctgtacgccgtgctggtgtctgccctggtgctgatggctatggtcaagcggaaggacagccggggacgcgccaagagaagcggatctggcgtgaagcagaccctgaatttcgacctgctgaagctggctggcgacgtggaatccaacccaggcccttctagaggccatatgaccgagtacaagcccacggtgcgcctcgccacccgcgacgacgtccccagggccgtacgcaccctcgccgccgcgttcgccgactaccccgccacgcgccacaccgtcgatccggaccgccacatcgagcgggtcaccgagctgcaagaactcttcctcacgcgcgtcgggctcgacatcggcaaggtgtgggtcgcggacgacggcgccgcggtggcggtctggaccacgccggagagcgtcgaagcgggggcggtgttcgccgagatcggcccgcgcatggccgagttgagcggttcccggctggccgcgcagcaacagatggaaggcctcctggcgccgcaccggcccaaggagcccgcgtggttcctggccaccgtcggcgtctcgcccgaccaccagggcaagggtctgggcagcgccgtcgtgctccccggagtggaggcggccgagcgcgccggggtgcccgccttcctggagacctccgcgccccgcaacctccccttctacgagcggctcggcttcaccgtcaccgccgacgtcgaggtgcccgaaggaccgcgcacctggtgcatgacccgcaagcccggtgcctga

SEQ ID NO: 36139 - DNA, 2850 bp, synthetic construct
  source 1..2850: mol_type = other DNA
atggccttaccagtgaccgccttgctcctgccgctggccttgctgctccacgccgccaggccggcatgcatgggcagttggttcgagttctacgaccggctgaatgccatcgacgccagactgtgggctctcggaggatctgaagctgagctggccgccttcgagaaagagatcgccgcctttgagagcgagctgcaagcctacaaaggcaagggcaaccccgaggtggaaaacctgagagtgcacgccgctgccatcagagaatggctccaggcttacagacacaacggtaccggcggaggcggatctggcggcggaggtagcggtggcggaggatctgaattcgacatccagatgacacagagccctagcagcctgtctgccagcgtgggagacagagtgaccatcacatgcaaggccagcgaccacatcaacaactggctggcctggtatcagcagaagcctggcaaggcccctaagctgctgatctacggcgctaccacactggaaacaggcgtgcccagcagattttctggcagcggctctggcaccgacttcaccctgacaatatccagcctccagcctgaggacttcgccacctactactgtcagcagagctggaacaccccttggacattcggccagggcaccaaggtggaaatcaagagactcgaggacctgaagaacgtgttcccacctgaggtggccgtgttcgagcctagcgaggccgagatcagccacacccagaaagccaccctcgtgtgcctggctaccggcttctaccccgaccatgtggaactgtcttggtgggtcaacggcaaagaggtgcacagcggcgtgtgtaccgacccccagccactgaaagaacagcccgccctgaacgacagccggtactgcctgagcagcagactgagagtgtccgccaccttctggcagaacccccggaaccacttcagatgccaggtgcagttctacggcctgagcgagaacgacgagtggacccaggacagagccaagcccgtgacccagatcgtgtctgccgaagcctggggcagagccgattgcgacgtgaagctggtggaaaagagcttcgagacagacaccaacctgaacttccagaacctgagcgtgatcggcttcagaatcctgctgctgaaagtggccggctttaacctgctgatgaccctgcggctgtggtccagcagggccaagcgatctggatctggagcaacaaacttctcactactcaaacaagcaggtgacgtggaggagaatcccgggcctactagtatggactggatttggcgcatccttttccttgtcggcgctgctaccggcgcgcattccttcgaagaagttcagctggttgaatctggcggcggactggttcaacctggcggatctctgagactgagctgtgccgcctctggctacacctttagcagctactgggtcaactgggttcgacaggcccctggcaaaggactggaatgggtcgcccaaatctatcccggcgacggcgacaccaactacaacggcaagttcaagggcagattcaccatcagccgggacaacagcaagaacaccctgtacctccagatgaactccctgagagccgaggacaccgccgtgtactattgtgccagatccatcaccaccgtcgtgggctgcgctatggattattggggccagggaaccctggtcaccgtgtcctctacgcgtatccagaaccctgatcctgccgtgtaccagctgcgggatagcaagagcagcgacaagagcgtgtgtctgttcaccgacttcgacagccagaccaacgtgtcccagagcaaggactccgacgtgtacatcaccgataagtgcgtgctggacatgcggagcatggacttcaagagcaactccgccgtggcctggtccaacaagtccgatttcgcctgcgccaacgccttcaacaacagcattatccccgaggacacattcttcccaagccccgagagcagctgcggctttaccagcgagagctaccagcagggcgtgctgagcgccaccatcctgtacgagatcctgctgggcaaggccaccctgtacgccgtgctggtgtctgccctggtgctgatggctatggtcaagcggaaggacagccggggacgcgccaagagaagcggatctggcgtgaagcagaccctgaatttcgacctgctgaagctggctggcgacgtggaatccaacccaggcccttctagaggccatatgaccgagtacaagcccacggtgcgcctcgccacccgcgacgacgtccccagggccgtacgcaccctcgccgccgcgttcgccgactaccccgccacgcgccacaccgtcgatccggaccgccacatcgagcgggtcaccgagctgcaagaactcttcctcacgcgcgtcgggctcgacatcggcaaggtgtgggtcgcggacgacggcgccgcggtggcggtctggaccacgccggagagcgtcgaagcgggggcggtgttcgccgagatcggcccgcgcatggccgagttgagcggttcccggctggccgcgcagcaacagatggaaggcctcctggcgccgcaccggcccaaggagcccgcgtggttcctggccaccgtcggcgtctcgcccgaccaccagggcaagggtctgggcagcgccgtcgtgctccccggagtggaggcggccgagcgcgccggggtgcccgccttcctggagacctccgcgccccgcaacctccccttctacgagcggctcggcttcaccgtcaccgccgacgtcgaggtgcccgaaggaccgcgcacctggtgcatgacccgcaagcccggtgcctga

SEQ ID NO: 36140 - DNA, 3201 bp, synthetic construct
  source 1..3201: mol_type = other DNA
atggccttaccagtgaccgccttgctcctgccgctggccttgctgctccacgccgccaggccggcatgcatggaccccgacctggaaatcagagccgccttcctgcggcagagaaacacagccctgagaacagaggtggccgagctggaacaagaggtgcagcggctggaaaacgaggtgtcccagtacgagacaagatacggccctctcggaggcggaaaaggtaccggcggaggcggatctggcggcggaggtagcggtggcggaggatctgaattcgacatccagatgacacagagccctagcagcctgtctgccagcgtgggagacagagtgaccatcacatgcaaggccagcgaccacatcaacaactggctggcctggtatcagcagaagcctggcaaggcccctaagctgctgatctacggcgctaccacactggaaacaggcgtgcccagcagattttctggcagcggctctggcaccgacttcaccctgacaatatccagcctccagcctgaggacttcgccacctactactgtcagcagagctggaacaccccttggacattcggccagggcaccaaggtggaaatcaagagactcgaggacctgaagaacgtgttcccacctgaggtggccgtgttcgagcctagcgaggccgagatcagccacacccagaaagccaccctcgtgtgcctggctaccggcttctaccccgaccatgtggaactgtcttggtgggtcaacggcaaagaggtgcacagcggcgtgtgtaccgacccccagccactgaaagaacagcccgccctgaacgacagccggtactgcctgagcagcagactgagagtgtccgccaccttctggcagaacccccggaaccacttcagatgccaggtgcagttctacggcctgagcgagaacgacgagtggacccaggacagagccaagcccgtgacccagatcgtgtctgccgaagcctggggcagagccgattgcgacgtgaagctggtggaaaagagcttcgagacagacaccaacctgaacttccagaacctgagcgtgatcggcttcagaatcctgctgctgaaagtggccggctttaacctgctgatgaccctgcggctgtggtccagcagggccaagcgatctggatctggagcaacaaacttctcactactcaaacaagcaggtgacgtggaggagaatcccgggcctactagtgccaccatggactggatttggcgcatccttttccttgtcggcgctgctaccggcgcccattccgggcccgaagtgcagctggttgaatctggcggaggactggttcaggctggcggatctctgagactgtcttgtgccgccagcggcagaacctttagcatgggctggtttagacaggcccctggcaaagagagagagttcgtcgccgccatcacatactctggcggcagcccttactacgccgactctgtgaagggcagattcaccatcagccgggacaacgccaagaacaccgtgtacctccagatgaacagcctgaagcctgaggacaccgccgtgtactactgcgccgccaatccaacatacggcagcgactggaacgccgagaattggggccagggaacccaagtgacagtgtctagcggatccggcggcggaggatctggcggaggcggatctgggggcggaggctctttcgaagaagttcagctggttgaatctggcggcggactggttcaacctggcggatctctgagactgagctgtgccgcctctggctacacctttagcagctactgggtcaactgggttcgacaggcccctggcaaaggactggaatgggtcgcccaaatctatcccggcgacggcgacaccaactacaacggcaagttcaagggcagattcaccatcagccgggacaacagcaagaacaccctgtacctccagatgaactccctgagagccgaggacaccgccgtgtactattgtgccagatccatcaccaccgtcgtgggctgcgctatggattattggggccagggaaccctggtcaccgtgtcctctacgcgtatccagaaccctgatcctgccgtgtaccagctgcgggatagcaagagcagcgacaagagcgtgtgtctgttcaccgacttcgacagccagaccaacgtgtcccagagcaaggactccgacgtgtacatcaccgataagtgcgtgctggacatgcggagcatggacttcaagagcaactccgccgtggcctggtccaacaagtccgatttcgcctgcgccaacgccttcaacaacagcattatccccgaggacacattcttcccaagccccgagagcagctgcggctttaccagcgagagctaccagcagggcgtgctgagcgccaccatcctgtacgagatcctgctgggcaaggccaccctgtacgccgtgctggtgtctgccctggtgctgatggctatggtcaagcggaaggacagccggggacgcgccaagagaagcggatctggcgtgaagcagaccctgaatttcgacctgctgaagctggctggcgacgtggaatccaacccaggcccttctagaggccatatgaccgagtacaagcccacggtgcgcctcgccacccgcgacgacgtccccagggccgtacgcaccctcgccgccgcgttcgccgactaccccgccacgcgccacaccgtcgatccggaccgccacatcgagcgggtcaccgagctgcaagaactcttcctcacgcgcgtcgggctcgacatcggcaaggtgtgggtcgcggacgacggcgccgcggtggcggtctggaccacgccggagagcgtcgaagcgggggcggtgttcgccgagatcggcccgcgcatggccgagttgagcggttcccggctggccgcgcagcaacagatggaaggcctcctggcgccgcaccggcccaaggagcccgcgtggttcctggccaccgtcggcgtctcgcccgaccaccagggcaagggtctgggcagcgccgtcgtgctccccggagtggaggcggccgagcgcgccggggtgcccgccttcctggagacctccgcgccccgcaacctccccttctacgagcggctcggcttcaccgtcaccgccgacgtcgaggtgcccgaaggaccgcgcacctggtgcatgacccgcaagcccggtgcctga

SEQ ID NO: 36141 - DNA, 2850 bp, synthetic construct
  source 1..2850: mol_type = other DNA
atggccttaccagtgaccgccttgctcctgccgctggccttgctgctccacgccgccaggccggacatccagatgacacagagccctagcagcctgtctgccagcgtgggagacagagtgaccatcacatgcaaggccagcgaccacatcaacaactggctggcctggtatcagcagaagcctggcaaggcccctaagctgctgatctacggcgctaccacactggaaacaggcgtgcccagcagattttctggcagcggctctggcaccgacttcaccctgacaatatccagcctccagcctgaggacttcgccacctactactgtcagcagagctggaacaccccttggacattcggccagggcaccaaggtggaaatcaagagactcgaggacctgaagaacgtgttcccacctgaggtggccgtgttcgagcctagcgaggccgagatcagccacacccagaaagccaccctcgtgtgcctggctaccggcttctaccccgaccatgtggaactgtcttggtgggtcaacggcaaagaggtgcacagcggcgtgtgtaccgacccccagccactgaaagaacagcccgccctgaacgacagccggtactgcctgagcagcagactgagagtgtccgccaccttctggcagaacccccggaaccacttcagatgccaggtgcagttctacggcctgagcgagaacgacgagtggacccaggacagagccaagcccgtgacccagatcgtgtctgccgaagcctggggcagagccgattgcgacgtgaagctggtggaaaagagcttcgagacagacaccaacctgaacttccagaacctgagcgtgatcggcttcagaatcctgctgctgaaagtggccggctttaacctgctgatgaccctgcggctgtggtccagcagggccaagcgatctggatctggagcaacaaacttctcactactcaaacaagcaggtgacgtggaggagaatcccgggcctactagtgccaccatggactggatttggcgcatccttttccttgtcggcgctgctaccggcgcccattccgggcccatgggatcttggagcgagttttacgatcggctgcacgccattcaccaccggctgtatgctctcggaggaagcgaagctgagctggccgcttttgaaaaagaaattgccgctttcgagtccgagcttcaggcttacaaaggcaaagggaatcctgaggtcgaggccctgagagataccgccgccttcatcagaacccggttgcaggcataccggcacaacggatccggcggcggaggatctggcggaggcggatctgggggcggaggctctttcgaagaagttcagctggttgaatctggcggcggactggttcaacctggcggatctctgagactgagctgtgccgcctctggctacacctttagcagctactgggtcaactgggttcgacaggcccctggcaaaggactggaatgggtcgcccaaatctatcccggcgacggcgacaccaactacaacggcaagttcaagggcagattcaccatcagccgggacaacagcaagaacaccctgtacctccagatgaactccctgagagccgaggacaccgccgtgtactattgtgccagatccatcaccaccgtcgtgggctgcgctatggattattggggccagggaaccctggtcaccgtgtcctctacgcgtatccagaaccctgatcctgccgtgtaccagctgcgggatagcaagagcagcgacaagagcgtgtgtctgttcaccgacttcgacagccagaccaacgtgtcccagagcaaggactccgacgtgtacatcaccgataagtgcgtgctggacatgcggagcatggacttcaagagcaactccgccgtggcctggtccaacaagtccgatttcgcctgcgccaacgccttcaacaacagcattatccccgaggacacattcttcccaagccccgagagcagctgcggctttaccagcgagagctaccagcagggcgtgctgagcgccaccatcctgtacgagatcctgctgggcaaggccaccctgtacgccgtgctggtgtctgccctggtgctgatggctatggtcaagcggaaggacagccggggacgcgccaagagaagcggatctggcgtgaagcagaccctgaatttcgacctgctgaagctggctggcgacgtggaatccaacccaggcccttctagaggccatatgaccgagtacaagcccacggtgcgcctcgccacccgcgacgacgtccccagggccgtacgcaccctcgccgccgcgttcgccgactaccccgccacgcgccacaccgtcgatccggaccgccacatcgagcgggtcaccgagctgcaagaactcttcctcacgcgcgtcgggctcgacatcggcaaggtgtgggtcgcggacgacggcgccgcggtggcggtctggaccacgccggagagcgtcgaagcgggggcggtgttcgccgagatcggcccgcgcatggccgagttgagcggttcccggctggccgcgcagcaacagatggaaggcctcctggcgccgcaccggcccaaggagcccgcgtggttcctggccaccgtcggcgtctcgcccgaccaccagggcaagggtctgggcagcgccgtcgtgctccccggagtggaggcggccgagcgcgccggggtgcccgccttcctggagacctccgcgccccgcaacctccccttctacgagcggctcggcttcaccgtcaccgccgacgtcgaggtgcccgaaggaccgcgcacctggtgcatgacccgcaagcccggtgcctga

SEQ ID NO: 36142 - DNA, 3480 bp, synthetic construct
  source 1..3480: mol_type = other DNA
atggccttaccagtgaccgccttgctcctgccgctggccttgctgctccacgccgccaggccggacatccagatgacacagagccctagcagcctgtctgccagcgtgggagacagagtgaccatcacatgcaaggccagcgaccacatcaacaactggctggcctggtatcagcagaagcctggcaaggcccctaagctgctgatctacggcgctaccacactggaaacaggcgtgcccagcagattttctggcagcggctctggcaccgacttcaccctgacaatatccagcctccagcctgaggacttcgccacctactactgtcagcagagctggaacaccccttggacattcggccagggcaccaaggtggaaatcaagagactcgaggacctgaagaacgtgttcccacctgaggtggccgtgttcgagcctagcgaggccgagatcagccacacccagaaagccaccctcgtgtgcctggctaccggcttctaccccgaccatgtggaactgtcttggtgggtcaacggcaaagaggtgcacagcggcgtgtgtaccgacccccagccactgaaagaacagcccgccctgaacgacagccggtactgcctgagcagcagactgagagtgtccgccaccttctggcagaacccccggaaccacttcagatgccaggtgcagttctacggcctgagcgagaacgacgagtggacccaggacagagccaagcccgtgacccagatcgtgtctgccgaagcctggggcagagccgattgcgacgtgaagctggtggaaaagagcttcgagacagacaccaacctgaacttccagaacctgagcgtgatcggcttcagaatcctgctgctgaaagtggccggctttaacctgctgatgaccctgcggctgtggtccagcagggccaagcgatctggatctggagcaacaaacttctcactactcaaacaagcaggtgacgtggaggagaatcccgggcctactagtaccatggactggatttggcgcatccttttccttgtcggcgctgctaccggcgcccattccctgttcaatcaagaggtgcagatccctctgaccgagagctactgtggcccctgtcctaagaactggatctgctacaagaacaactgctaccagttcttcgacgagagcaagaattggtacgagagccaggccagctgcatgagccagaatgccagcctgctgaaggtgtacagcaaagaggaccaggacctgctgaaactggtcaagagcgcccactggatgggccttgtgcacatccccaccaatggctcttggcagtgggaggacggcagcattctgagccctaacctgctgaccatcatcgagatgcagaagggcgactgcgccctgtacgccagcagctttaagggctacatcgagaattgcagcaccccgaacacctacatctgtatgcagagaaccgtttctggcggaggcggctctggaggaggcggaagtggcggcggaggcgacctctttaatcaagaagtccagattccactcaccgaatcctactgcggaccttgtccaaaaaattggatttgttataagaacaactgttatcaattctttgatgagtctaaaaattggtatgagtcccaggcttcctgcatgtctcagaacgcttctctgctgaaagtctactctaaagaagatcaggatctcctgaagctcgtcaagtctgcccattggatggggctcgtccacattcctaccaacggaagctggcaatgggaagatggctccatcctgtctccaaatctgctcacgattattgaaatgcagaaaggggattgtgctctctacgccagctccttcaagggatatattgagaactgtagcacgcccaatacttatatctgtatgcaacggaccgtgggatccggcggcggaggatctggcggaggcggatctgggggcggaggctctttcgaagaagttcagctggttgaatctggcggcggactggttcaacctggcggatctctgagactgagctgtgccgcctctggctacacctttagcagctactgggtcaactgggttcgacaggcccctggcaaaggactggaatgggtcgcccaaatctatcccggcgacggcgacaccaactacaacggcaagttcaagggcagattcaccatcagccgggacaacagcaagaacaccctgtacctccagatgaactccctgagagccgaggacaccgccgtgtactattgtgccagatccatcaccaccgtcgtgggctgcgctatggattattggggccagggaaccctggtcaccgtgtcctctacgcgtatccagaaccctgatcctgccgtgtaccagctgcgggatagcaagagcagcgacaagagcgtgtgtctgttcaccgacttcgacagccagaccaacgtgtcccagagcaaggactccgacgtgtacatcaccgataagtgcgtgctggacatgcggagcatggacttcaagagcaactccgccgtggcctggtccaacaagtccgatttcgcctgcgccaacgccttcaacaacagcattatccccgaggacacattcttcccaagccccgagagcagctgcggctttaccagcgagagctaccagcagggcgtgctgagcgccaccatcctgtacgagatcctgctgggcaaggccaccctgtacgccgtgctggtgtctgccctggtgctgatggctatggtcaagcggaaggacagccggggacgcgccaagagaagcggatctggcgtgaagcagaccctgaatttcgacctgctgaagctggctggcgacgtggaatccaacccaggcccttctagaggccatatgaccgagtacaagcccacggtgcgcctcgccacccgcgacgacgtccccagggccgtacgcaccctcgccgccgcgttcgccgactaccccgccacgcgccacaccgtcgatccggaccgccacatcgagcgggtcaccgagctgcaagaactcttcctcacgcgcgtcgggctcgacatcggcaaggtgtgggtcgcggacgacggcgccgcggtggcggtctggaccacgccggagagcgtcgaagcgggggcggtgttcgccgagatcggcccgcgcatggccgagttgagcggttcccggctggccgcgcagcaacagatggaaggcctcctggcgccgcaccggcccaaggagcccgcgtggttcctggccaccgtcggcgtctcgcccgaccaccagggcaagggtctgggcagcgccgtcgtgctccccggagtggaggcggccgagcgcgccggggtgcccgccttcctggagacctccgcgccccgcaacctccccttctacgagcggctcggcttcaccgtcaccgccgacgtcgaggtgcccgaaggaccgcgcacctggtgcatgacccgcaagcccggtgcctga

SEQ ID NO: 36143 - DNA, 1866 bp, synthetic construct
  source 1..1866: mol_type = other DNA
atggccttaccagtgaccgccttgctcctgccgctggccttgctgctccacgccgccaggccggacatccagatgacacagagccctagcagcctgtctgccagcgtgggagacagagtgaccatcacatgcaaggccagcgaccacatcaacaactggctggcctggtatcagcagaagcctggcaaggcccctaagctgctgatctacggcgctaccacactggaaacaggcgtgcccagcagattttctggcagcggctctggcaccgacttcaccctgacaatatccagcctccagcctgaggacttcgccacctactactgtcagcagagctggaacaccccttggacattcggccagggcaccaaggtggaaatcaagagactcgaggacctgaagaacgtgttcccacctgaggtggccgtgttcgagcctagcgaggccgagatcagccacacccagaaagccaccctcgtgtgcctggctaccggcttctaccccgaccatgtggaactgtcttggtgggtcaacggcaaagaggtgcacagcggcgtgtgtaccgacccccagccactgaaagaacagcccgccctgaacgacagccggtactgcctgagcagcagactgagagtgtccgccaccttctggcagaacccccggaaccacttcagatgccaggtgcagttctacggcctgagcgagaacgacgagtggacccaggacagagccaagcccgtgacccagatcgtgtctgccgaagcctggggcagagccgattgcggctttaccagcgagagctaccagcagggcgtgctgagcgccaccaacctgagcgtgatcggcttcagaatcctgctgctgaaagtggccggctttaacctgctgatgaccctgcggctgtggtccagcagggccaagcgatctggatctggagcaacaaacttctcactactcaaacaagcaggtgacgtggaggagaatcccgggcctactagtatggactggatttggcgcatccttttccttgtcggcgctgctaccggcgcgcattccttcgaagaagttcagctggttgaatctggcggcggactggttcaacctggcggatctctgagactgagctgtgccgcctctggctacacctttagcagctactgggtcaactgggttcgacaggcccctggcaaaggactggaatgggtcgcccaaatctatcccggcgacggcgacaccaactacaacggcaagttcaagggcagattcaccatcagccgggacaacagcaagaacaccctgtacctccagatgaactccctgagagccgaggacaccgccgtgtactattgtgccagatccatcaccaccgtcgtgggctgcgctatggattattggggccagggaaccctggtcaccgtgtcctctacgcgtatccagaaccctgatcctgccgtgtaccagctgcgggatagcaagagcagcgacaagagcgtgtgtctgttcaccgacttcgacagccagaccaacgtgtcccagagcaaggactccgacgtgtacatcaccgataagtgcgtgctggacatgcggagcatggacttcaagagcaactccgccgtggcctggtccaacaagtccgatttcgcctgcgccaacgccttcaacaacagcattatccccgaggacacattcttcccaagccccgagagcagctgcgacgtgaagctggtggaaaagagcttcgagacagacaccaacctgaacttccagatcctgtacgagatcctgctgggcaaggccaccctgtacgccgtgctggtgtctgccctggtgctgatggctatggtcaagcggaaggacagccgggga

SEQ ID NO: 36144 - DNA, 1878 bp, synthetic construct
  source 1..1878: mol_type = other DNA
atggccttaccagtgaccgccttgctcctgccgctggccttgctgctccacgccgccaggccggacatccagatgacacagagccctagcagcctgtctgccagcgtgggagacagagtgaccatcacatgcaaggccagcgaccacatcaacaactggctggcctggtatcagcagaagcctggcaaggcccctaagctgctgatctacggcgctaccacactggaaacaggcgtgcccagcagattttctggcagcggctctggcaccgacttcaccctgacaatatccagcctccagcctgaggacttcgccacctactactgtcagcagagctggaacaccccttggacattcggccagggcaccaaggtggaaatcaagagactcgagatccagaaccctgatcctgccgtgtaccagctgcgggatagcaagagcagcgacaagagcgtgtgtctgttcaccgacttcgacagccagaccaacgtgtcccagagcaaggactccgacgtgtacatcaccgataagtgcgtgctggacatgcggagcatggacttcaagagcaactccgccgtggcctggtccaacaagtccgatttcgcctgcgccaacgccttcaacaacagcattatccccgaggacacattcttcccaagccccgagagcagctgcgacgtgaagctggtggaaaagagcttcgagacagacaccaacctgaacttccagatcctgtacgagatcctgctgggcaaggccaccctgtacgccgtgctggtgtctgccctggtgctgatggctatggtcaagcggaaggacagccggggacgcgccaagagaagcggatctggcgtgaagcagaccctgaatttcgacctgctgaagctggctggcgacgtggaatccaacccaggccctactagtatggactggatttggcgcatccttttccttgtcggcgctgctaccggcgcgcattccttcgaagaagttcagctggttgaatctggcggcggactggttcaacctggcggatctctgagactgagctgtgccgcctctggctacacctttagcagctactgggtcaactgggttcgacaggcccctggcaaaggactggaatgggtcgcccaaatctatcccggcgacggcgacaccaactacaacggcaagttcaagggcagattcaccatcagccgggacaacagcaagaacaccctgtacctccagatgaactccctgagagccgaggacaccgccgtgtactattgtgccagatccatcaccaccgtcgtgggctgcgctatggattattggggccagggaaccctggtcaccgtgtcctctacgcgtgaggacctgaagaacgtgttcccacctgaggtggccgtgttcgagcctagcgaggccgagatcagccacacccagaaagccaccctcgtgtgcctggctaccggcttctaccccgaccatgtggaactgtcttggtgggtcaacggcaaagaggtgcacagcggcgtgtgtaccgacccccagccactgaaagaacagcccgccctgaacgacagccggtactgcctgagcagcagactgagagtgtccgccaccttctggcagaacccccggaaccacttcagatgccaggtgcagttctacggcctgagcgagaacgacgagtggacccaggacagagccaagcccgtgacccagatcgtgtctgccgaagcctggggcagagccgattgcggctttaccagcgagagctaccagcagggcgtgctgagcgccaccaacctgagcgtgatcggcttcagaatcctgctgctgaaagtggccggctttaacctgctgatgaccctgcggctgtggtccagc

SEQ ID NO: 36145 - DNA, 2271 bp, synthetic construct
  source 1..2271: mol_type = other DNA
atggccttaccagtgaccgccttgctcctgccgctggccttgctgctccacgccgccaggccggaagtgcagctggttgaatctggcggaggactggttcagcctggcggatctctgagactgtcttgtgccgccagcggcttcagcttcagcgacttttggatgagctgggtccgacaggcccctggcaaaggacttgaatgggtcgccacaatcagccaggccggcagcgagaaggactacgtggactctgtgaagggcagattcaccatcagccgggacaacgccaagaagtccctgtacctccagatgaacagcctgagagccgaggacaccgccgtgtactattgtgcctctggcgtgtacagcttcgactacagaggccagggcaccctggtcacagtctcttctggtaccggcggaggcggatctggcggcggaggtagcggtggcggaggatctgaattcgacatccagatgacacagagccctagcagcctgtctgccagcgtgggagacagagtgaccatcacatgcaaggccagcgaccacatcaacaactggctggcctggtatcagcagaagcctggcaaggcccctaagctgctgatctacggcgctaccacactggaaacaggcgtgcccagcagattttctggcagcggctctggcaccgacttcaccctgacaatatccagcctccagcctgaggacttcgccacctactactgtcagcagagctggaacaccccttggacattcggccagggcaccaaggtggaaatcaagagactcgaggacctgaagaacgtgttcccacctgaggtggccgtgttcgagcctagcgaggccgagatcagccacacccagaaagccaccctcgtgtgcctggctaccggcttctaccccgaccatgtggaactgtcttggtgggtcaacggcaaagaggtgcacagcggcgtgtgtaccgacccccagccactgaaagaacagcccgccctgaacgacagccggtactgcctgagcagcagactgagagtgtccgccaccttctggcagaacccccggaaccacttcagatgccaggtgcagttctacggcctgagcgagaacgacgagtggacccaggacagagccaagcccgtgacccagatcgtgtctgccgaagcctggggcagagccgattgcggctttaccagcgagagctaccagcagggcgtgctgagcgccaccaacctgagcgtgatcggcttcagaatcctgctgctgaaagtggccggctttaacctgctgatgaccctgcggctgtggtccagcagggccaagcgatctggatctggagcaacaaacttctcactactcaaacaagcaggtgacgtggaggagaatcccgggcctactagtatggactggatttggcgcatccttttccttgtcggcgctgctaccggcgcgcattccttcgaagaagttcagctggttgaatctggcggcggactggttcaacctggcggatctctgagactgagctgtgccgcctctggctacacctttagcagctactgggtcaactgggttcgacaggcccctggcaaaggactggaatgggtcgcccaaatctatcccggcgacggcgacaccaactacaacggcaagttcaagggcagattcaccatcagccgggacaacagcaagaacaccctgtacctccagatgaactccctgagagccgaggacaccgccgtgtactattgtgccagatccatcaccaccgtcgtgggctgcgctatggattattggggccagggaaccctggtcaccgtgtcctctacgcgtatccagaaccctgatcctgccgtgtaccagctgcgggatagcaagagcagcgacaagagcgtgtgtctgttcaccgacttcgacagccagaccaacgtgtcccagagcaaggactccgacgtgtacatcaccgataagtgcgtgctggacatgcggagcatggacttcaagagcaactccgccgtggcctggtccaacaagtccgatttcgcctgcgccaacgccttcaacaacagcattatccccgaggacacattcttcccaagccccgagagcagctgcgacgtgaagctggtggaaaagagcttcgagacagacaccaacctgaacttccagatcctgtacgagatcctgctgggcaaggccaccctgtacgccgtgctggtgtctgccctggtgctgatggctatggtcaagcggaaggacagccgggga

SEQ ID NO: 36146 - DNA, 2283 bp, synthetic construct
  source 1..2283: mol_type = other DNA
atggccttaccagtgaccgccttgctcctgccgctggccttgctgctccacgccgccaggccggaagtgcagctggttgaatctggcggaggactggttcagcctggcggatctctgagactgtcttgtgccgccagcggcttcagcttcagcgacttttggatgagctgggtccgacaggcccctggcaaaggacttgaatgggtcgccacaatcagccaggccggcagcgagaaggactacgtggactctgtgaagggcagattcaccatcagccgggacaacgccaagaagtccctgtacctccagatgaacagcctgagagccgaggacaccgccgtgtactattgtgcctctggcgtgtacagcttcgactacagaggccagggcaccctggtcacagtctcttctggtaccggcggaggcggatctggcggcggaggtagcggtggcggaggatctgaattcgacatccagatgacacagagccctagcagcctgtctgccagcgtgggagacagagtgaccatcacatgcaaggccagcgaccacatcaacaactggctggcctggtatcagcagaagcctggcaaggcccctaagctgctgatctacggcgctaccacactggaaacaggcgtgcccagcagattttctggcagcggctctggcaccgacttcaccctgacaatatccagcctccagcctgaggacttcgccacctactactgtcagcagagctggaacaccccttggacattcggccagggcaccaaggtggaaatcaagagactcgagatccagaaccctgatcctgccgtgtaccagctgcgggatagcaagagcagcgacaagagcgtgtgtctgttcaccgacttcgacagccagaccaacgtgtcccagagcaaggactccgacgtgtacatcaccgataagtgcgtgctggacatgcggagcatggacttcaagagcaactccgccgtggcctggtccaacaagtccgatttcgcctgcgccaacgccttcaacaacagcattatccccgaggacacattcttcccaagccccgagagcagctgcgacgtgaagctggtggaaaagagcttcgagacagacaccaacctgaacttccagatcctgtacgagatcctgctgggcaaggccaccctgtacgccgtgctggtgtctgccctggtgctgatggctatggtcaagcggaaggacagccggggacgcgccaagagaagcggatctggcgtgaagcagaccctgaatttcgacctgctgaagctggctggcgacgtggaatccaacccaggccctactagtatggactggatttggcgcatccttttccttgtcggcgctgctaccggcgcgcattccttcgaagaagttcagctggttgaatctggcggcggactggttcaacctggcggatctctgagactgagctgtgccgcctctggctacacctttagcagctactgggtcaactgggttcgacaggcccctggcaaaggactggaatgggtcgcccaaatctatcccggcgacggcgacaccaactacaacggcaagttcaagggcagattcaccatcagccgggacaacagcaagaacaccctgtacctccagatgaactccctgagagccgaggacaccgccgtgtactattgtgccagatccatcaccaccgtcgtgggctgcgctatggattattggggccagggaaccctggtcaccgtgtcctctacgcgtgaggacctgaagaacgtgttcccacctgaggtggccgtgttcgagcctagcgaggccgagatcagccacacccagaaagccaccctcgtgtgcctggctaccggcttctaccccgaccatgtggaactgtcttggtgggtcaacggcaaagaggtgcacagcggcgtgtgtaccgacccccagccactgaaagaacagcccgccctgaacgacagccggtactgcctgagcagcagactgagagtgtccgccaccttctggcagaacccccggaaccacttcagatgccaggtgcagttctacggcctgagcgagaacgacgagtggacccaggacagagccaagcccgtgacccagatcgtgtctgccgaagcctggggcagagccgattgcggctttaccagcgagagctaccagcagggcgtgctgagcgccaccaacctgagcgtgatcggcttcagaatcctgctgctgaaagtggccggctttaacctgctgatgaccctgcggctgtggtccagc

SEQ ID NO: 36147 - DNA, 2682 bp, synthetic construct
  source 1..2682: mol_type = other DNA
atggccttaccagtgaccgccttgctcctgccgctggccttgctgctccacgccgccaggccggaagtgcagctggttgaatctggcggaggactggttcagcctggcggatctctgagactgtcttgtgccgccagcggcttcagcttcagcgacttttggatgagctgggtccgacaggcccctggcaaaggacttgaatgggtcgccacaatcagccaggccggcagcgagaaggactacgtggactctgtgaagggcagattcaccatcagccgggacaacgccaagaagtccctgtacctccagatgaacagcctgagagccgaggacaccgccgtgtactattgtgcctctggcgtgtacagcttcgactacagaggccagggcaccctggtcacagtctcttctggtaccggcggaggcggatctggcggcggaggtagcggtggcggaggatctgaattcgacatccagatgacacagagccctagcagcctgtctgccagcgtgggagacagagtgaccatcacatgcaaggccagcgaccacatcaacaactggctggcctggtatcagcagaagcctggcaaggcccctaagctgctgatctacggcgctaccacactggaaacaggcgtgcccagcagattttctggcagcggctctggcaccgacttcaccctgacaatatccagcctccagcctgaggacttcgccacctactactgtcagcagagctggaacaccccttggacattcggccagggcaccaaggtggaaatcaagagactcgaggacctgaagaacgtgttcccacctgaggtggccgtgttcgagcctagcgaggccgagatcagccacacccagaaagccaccctcgtgtgcctggctaccggcttctaccccgaccatgtggaactgtcttggtgggtcaacggcaaagaggtgcacagcggcgtgtgtaccgacccccagccactgaaagaacagcccgccctgaacgacagccggtactgcctgagcagcagactgagagtgtccgccaccttctggcagaacccccggaaccacttcagatgccaggtgcagttctacggcctgagcgagaacgacgagtggacccaggacagagccaagcccgtgacccagatcgtgtctgccgaagcctggggcagagccgattgcggctttaccagcgagagctaccagcagggcgtgctgagcgccaccaacctgagcgtgatcggcttcagaatcctgctgctgaaagtggccggctttaacctgctgatgaccctgcggctgtggtccagcagggccaagcgatctggatctggagcaacaaacttctcactactcaaacaagcaggtgacgtggaggagaatcccgggcctactagtatggactggatttggcgcatccttttccttgtcggcgctgctaccggcgcgcattccgggccccagctccagctgcaagagtctggacctggcctggtcaagcctagcgagacactgagcctgacctgtaccgtgtccggcgatagcatcagcagcggcgattactactggggctggatcagacagcctcctggcaaaggactggaatggatcggccacatctactacagcggcgtgacctactacaaccccagcctgaagtccagagtgaccatcagcgtggacaccagccggaaccagttctccctgaagctgtctagcgtgacagccgccgataccgccgtgtactactgcaccagagaggacagcagcaactggcggagtagaggccagggaacactggtcacagttagctctggatccggcggaggcggaagtggaggcggaggatctggcggcggaggctctttcgaagaagttcagctggttgaatctggcggcggactggttcaacctggcggatctctgagactgagctgtgccgcctctggctacacctttagcagctactgggtcaactgggttcgacaggcccctggcaaaggactggaatgggtcgcccaaatctatcccggcgacggcgacaccaactacaacggcaagttcaagggcagattcaccatcagccgggacaacagcaagaacaccctgtacctccagatgaactccctgagagccgaggacaccgccgtgtactattgtgccagatccatcaccaccgtcgtgggctgcgctatggattattggggccagggaaccctggtcaccgtgtcctctacgcgtatccagaaccctgatcctgccgtgtaccagctgcgggatagcaagagcagcgacaagagcgtgtgtctgttcaccgacttcgacagccagaccaacgtgtcccagagcaaggactccgacgtgtacatcaccgataagtgcgtgctggacatgcggagcatggacttcaagagcaactccgccgtggcctggtccaacaagtccgatttcgcctgcgccaacgccttcaacaacagcattatccccgaggacacattcttcccaagccccgagagcagctgcgacgtgaagctggtggaaaagagcttcgagacagacaccaacctgaacttccagatcctgtacgagatcctgctgggcaaggccaccctgtacgccgtgctggtgtctgccctggtgctgatggctatggtcaagcggaaggacagccgggga

SEQ ID NO: 36148 - DNA, 2694 bp, synthetic construct
  source 1..2694: mol_type = other DNA
atggccttaccagtgaccgccttgctcctgccgctggccttgctgctccacgccgccaggccggaagtgcagctggttgaatctggcggaggactggttcagcctggcggatctctgagactgtcttgtgccgccagcggcttcagcttcagcgacttttggatgagctgggtccgacaggcccctggcaaaggacttgaatgggtcgccacaatcagccaggccggcagcgagaaggactacgtggactctgtgaagggcagattcaccatcagccgggacaacgccaagaagtccctgtacctccagatgaacagcctgagagccgaggacaccgccgtgtactattgtgcctctggcgtgtacagcttcgactacagaggccagggcaccctggtcacagtctcttctggtaccggcggaggcggatctggcggcggaggtagcggtggcggaggatctgaattcgacatccagatgacacagagccctagcagcctgtctgccagcgtgggagacagagtgaccatcacatgcaaggccagcgaccacatcaacaactggctggcctggtatcagcagaagcctggcaaggcccctaagctgctgatctacggcgctaccacactggaaacaggcgtgcccagcagattttctggcagcggctctggcaccgacttcaccctgacaatatccagcctccagcctgaggacttcgccacctactactgtcagcagagctggaacaccccttggacattcggccagggcaccaaggtggaaatcaagagactcgagatccagaaccctgatcctgccgtgtaccagctgcgggatagcaagagcagcgacaagagcgtgtgtctgttcaccgacttcgacagccagaccaacgtgtcccagagcaaggactccgacgtgtacatcaccgataagtgcgtgctggacatgcggagcatggacttcaagagcaactccgccgtggcctggtccaacaagtccgatttcgcctgcgccaacgccttcaacaacagcattatccccgaggacacattcttcccaagccccgagagcagctgcgacgtgaagctggtggaaaagagcttcgagacagacaccaacctgaacttccagatcctgtacgagatcctgctgggcaaggccaccctgtacgccgtgctggtgtctgccctggtgctgatggctatggtcaagcggaaggacagccggggacgcgccaagagaagcggatctggcgtgaagcagaccctgaatttcgacctgctgaagctggctggcgacgtggaatccaacccaggccctactagtatggactggatttggcgcatccttttccttgtcggcgctgctaccggcgcgcattccgggccccagctccagctgcaagagtctggacctggcctggtcaagcctagcgagacactgagcctgacctgtaccgtgtccggcgatagcatcagcagcggcgattactactggggctggatcagacagcctcctggcaaaggactggaatggatcggccacatctactacagcggcgtgacctactacaaccccagcctgaagtccagagtgaccatcagcgtggacaccagccggaaccagttctccctgaagctgtctagcgtgacagccgccgataccgccgtgtactactgcaccagagaggacagcagcaactggcggagtagaggccagggaacactggtcacagttagctctggatccggcggaggcggaagtggaggcggaggatctggcggcggaggctctttcgaagaagttcagctggttgaatctggcggcggactggttcaacctggcggatctctgagactgagctgtgccgcctctggctacacctttagcagctactgggtcaactgggttcgacaggcccctggcaaaggactggaatgggtcgcccaaatctatcccggcgacggcgacaccaactacaacggcaagttcaagggcagattcaccatcagccgggacaacagcaagaacaccctgtacctccagatgaactccctgagagccgaggacaccgccgtgtactattgtgccagatccatcaccaccgtcgtgggctgcgctatggattattggggccagggaaccctggtcaccgtgtcctctacgcgtgaggacctgaagaacgtgttcccacctgaggtggccgtgttcgagcctagcgaggccgagatcagccacacccagaaagccaccctcgtgtgcctggctaccggcttctaccccgaccatgtggaactgtcttggtgggtcaacggcaaagaggtgcacagcggcgtgtgtaccgacccccagccactgaaagaacagcccgccctgaacgacagccggtactgcctgagcagcagactgagagtgtccgccaccttctggcagaacccccggaaccacttcagatgccaggtgcagttctacggcctgagcgagaacgacgagtggacccaggacagagccaagcccgtgacccagatcgtgtctgccgaagcctggggcagagccgattgcggctttaccagcgagagctaccagcagggcgtgctgagcgccaccaacctgagcgtgatcggcttcagaatcctgctgctgaaagtggccggctttaacctgctgatgaccctgcggctgtggtccagc

SEQ ID NO: 36149 - DNA, 2178 bp, synthetic construct
  source 1..2178: mol_type = other DNA
atggccttaccagtgaccgccttgctcctgccgctggccttgctgctccacgccgccaggccggacatccagatgacacagagccctagcagcctgtctgccagcgtgggagacagagtgaccatcacatgcaaggccagcgaccacatcaacaactggctggcctggtatcagcagaagcctggcaaggcccctaagctgctgatctacggcgctaccacactggaaacaggcgtgcccagcagattttctggcagcggctctggcaccgacttcaccctgacaatatccagcctccagcctgaggacttcgccacctactactgtcagcagagctggaacaccccttggacattcggccagggcaccaaggtggaaatcaagagactcgaggacctgaagaacgtgttcccacctgaggtggccgtgttcgagcctagcgaggccgagatcagccacacccagaaagccaccctcgtgtgcctggctaccggcttctaccccgaccatgtggaactgtcttggtgggtcaacggcaaagaggtgcacagcggcgtgtgtaccgacccccagccactgaaagaacagcccgccctgaacgacagccggtactgcctgagcagcagactgagagtgtccgccaccttctggcagaacccccggaaccacttcagatgccaggtgcagttctacggcctgagcgagaacgacgagtggacccaggacagagccaagcccgtgacccagatcgtgtctgccgaagcctggggcagagccgatgatgtgattaagatccactggcaggaaaagaagtccaacaccatcctgggcagccaggaaggcaacaccatgaagaccaacgacacctacatgaagttcagctggctgaccgtgcccgagaagtccctggacaaagaacacagatgcatcgtgcggcacgaaaacaacaagaacggcgtggaccaggaaatcatcttcccacccatcaagaccgatgtgattacaatggaccccaaggacaactgctccaaggacgccaacgataccctgctgctccagctgaccaacaccagcgcctactacatgtacttgttgctgctgctgaagtccgtggtgtacttcgccatcatcacatgctgcctgctgatggctatggtcaagcggaaggacagccggggaagggccaagcgatctggatctggagcaacaaacttctcactactcaaacaagcaggtgacgtggaggagaatcccgggcctactagtatggactggatttggcgcatccttttccttgtcggcgctgctaccggcgcgcattccttcgaagaagttcagctggttgaatctggcggcggactggttcaacctggcggatctctgagactgagctgtgccgcctctggctacacctttagcagctactgggtcaactgggttcgacaggcccctggcaaaggactggaatgggtcgcccaaatctatcccggcgacggcgacaccaactacaacggcaagttcaagggcagattcaccatcagccgggacaacagcaagaacaccctgtacctccagatgaactccctgagagccgaggacaccgccgtgtactattgtgccagatccatcaccaccgtcgtgggctgcgctatggattattggggccagggaaccctggtcaccgtgtcctctacgcgtatccagaaccctgatcctgccgtgtaccagctgcgggatagcaagagcagcgacaagagcgtgtgtctgttcaccgacttcgacagccagaccaacgtgtcccagagcaaggactccgacgtgtacatcaccgataagtgcgtgctggacatgcggagcatggacttcaagagcaactccgccgtggcctggtccaacaagtccgatttcgcctgcgccaacgccttcaacaacagcattatccccgaggacacattcttcccaagccccgagagcagcgactccaccgaccacgtgaagcccaaagagacagagaacaccaagcagcccagcaagagctgccacaagcccaaggccatcgtgcacaccgagaaagtgaacatgatgagcctgaccgtgctgggcctgcggatgctgttcgccaaaaccgtggccgtgaacttcctgctgaccgccaagctgttcttcctcctcaccgcc

SEQ ID NO: 36150 - DNA, 2190 bp, synthetic construct
  source 1..2190: mol_type = other DNA
atggccttaccagtgaccgccttgctcctgccgctggccttgctgctccacgccgccaggccggacatccagatgacacagagccctagcagcctgtctgccagcgtgggagacagagtgaccatcacatgcaaggccagcgaccacatcaacaactggctggcctggtatcagcagaagcctggcaaggcccctaagctgctgatctacggcgctaccacactggaaacaggcgtgcccagcagattttctggcagcggctctggcaccgacttcaccctgacaatatccagcctccagcctgaggacttcgccacctactactgtcagcagagctggaacaccccttggacattcggccagggcaccaaggtggaaatcaagagactcgagatccagaaccctgatcctgccgtgtaccagctgcgggatagcaagagcagcgacaagagcgtgtgtctgttcaccgacttcgacagccagaccaacgtgtcccagagcaaggactccgacgtgtacatcaccgataagtgcgtgctggacatgcggagcatggacttcaagagcaactccgccgtggcctggtccaacaagtccgatttcgcctgcgccaacgccttcaacaacagcattatccccgaggacacattcttcccaagccccgagagcagcgactccaccgaccacgtgaagcccaaagagacagagaacaccaagcagcccagcaagagctgccacaagcccaaggccatcgtgcacaccgagaaagtgaacatgatgagcctgaccgtgctgggcctgcggatgctgttcgccaaaaccgtggccgtgaacttcctgctgaccgccaagctgttcttcctcctcaccgcccgcgccaagagaagcggatctggcgtgaagcagaccctgaatttcgacctgctgaagctggctggcgacgtggaatccaacccaggccctactagtatggactggatttggcgcatccttttccttgtcggcgctgctaccggcgcgcattccttcgaagaagttcagctggttgaatctggcggcggactggttcaacctggcggatctctgagactgagctgtgccgcctctggctacacctttagcagctactgggtcaactgggttcgacaggcccctggcaaaggactggaatgggtcgcccaaatctatcccggcgacggcgacaccaactacaacggcaagttcaagggcagattcaccatcagccgggacaacagcaagaacaccctgtacctccagatgaactccctgagagccgaggacaccgccgtgtactattgtgccagatccatcaccaccgtcgtgggctgcgctatggattattggggccagggaaccctggtcaccgtgtcctctacgcgtgaggacctgaagaacgtgttcccacctgaggtggccgtgttcgagcctagcgaggccgagatcagccacacccagaaagccaccctcgtgtgcctggctaccggcttctaccccgaccatgtggaactgtcttggtgggtcaacggcaaagaggtgcacagcggcgtgtgtaccgacccccagccactgaaagaacagcccgccctgaacgacagccggtactgcctgagcagcagactgagagtgtccgccaccttctggcagaacccccggaaccacttcagatgccaggtgcagttctacggcctgagcgagaacgacgagtggacccaggacagagccaagcccgtgacccagatcgtgtctgccgaagcctggggcagagccgatgatgtgattaagatccactggcaggaaaagaagtccaacaccatcctgggcagccaggaaggcaacaccatgaagaccaacgacacctacatgaagttcagctggctgaccgtgcccgagaagtccctggacaaagaacacagatgcatcgtgcggcacgaaaacaacaagaacggcgtggaccaggaaatcatcttcccacccatcaagaccgatgtgattacaatggaccccaaggacaactgctccaaggacgccaacgataccctgctgctccagctgaccaacaccagcgcctactacatgtacttgttgctgctgctgaagtccgtggtgtacttcgccatcatcacatgctgcctgctgatggctatggtcaagcggaaggacagccgggga

SEQ ID NO: 36151 - DNA, 2583 bp, synthetic construct
  source 1..2583: mol_type = other DNA
atggccttaccagtgaccgccttgctcctgccgctggccttgctgctccacgccgccaggccggaagtgcagctggttgaatctggcggaggactggttcagcctggcggatctctgagactgtcttgtgccgccagcggcttcagcttcagcgacttttggatgagctgggtccgacaggcccctggcaaaggacttgaatgggtcgccacaatcagccaggccggcagcgagaaggactacgtggactctgtgaagggcagattcaccatcagccgggacaacgccaagaagtccctgtacctccagatgaacagcctgagagccgaggacaccgccgtgtactattgtgcctctggcgtgtacagcttcgactacagaggccagggcaccctggtcacagtctcttctggtaccggcggaggcggatctggcggcggaggtagcggtggcggaggatctgaattcgacatccagatgacacagagccctagcagcctgtctgccagcgtgggagacagagtgaccatcacatgcaaggccagcgaccacatcaacaactggctggcctggtatcagcagaagcctggcaaggcccctaagctgctgatctacggcgctaccacactggaaacaggcgtgcccagcagattttctggcagcggctctggcaccgacttcaccctgacaatatccagcctccagcctgaggacttcgccacctactactgtcagcagagctggaacaccccttggacattcggccagggcaccaaggtggaaatcaagagactcgaggacctgaagaacgtgttcccacctgaggtggccgtgttcgagcctagcgaggccgagatcagccacacccagaaagccaccctcgtgtgcctggctaccggcttctaccccgaccatgtggaactgtcttggtgggtcaacggcaaagaggtgcacagcggcgtgtgtaccgacccccagccactgaaagaacagcccgccctgaacgacagccggtactgcctgagcagcagactgagagtgtccgccaccttctggcagaacccccggaaccacttcagatgccaggtgcagttctacggcctgagcgagaacgacgagtggacccaggacagagccaagcccgtgacccagatcgtgtctgccgaagcctggggcagagccgatgatgtgattaagatccactggcaggaaaagaagtccaacaccatcctgggcagccaggaaggcaacaccatgaagaccaacgacacctacatgaagttcagctggctgaccgtgcccgagaagtccctggacaaagaacacagatgcatcgtgcggcacgaaaacaacaagaacggcgtggaccaggaaatcatcttcccacccatcaagaccgatgtgattacaatggaccccaaggacaactgctccaaggacgccaacgataccctgctgctccagctgaccaacaccagcgcctactacatgtacttgttgctgctgctgaagtccgtggtgtacttcgccatcatcacatgctgcctgctgatggctatggtcaagcggaaggacagccggggaagggccaagcgatctggatctggagcaacaaacttctcactactcaaacaagcaggtgacgtggaggagaatcccgggcctactagtatggactggatttggcgcatccttttccttgtcggcgctgctaccggcgcgcattccttcgaagaagttcagctggttgaatctggcggcggactggttcaacctggcggatctctgagactgagctgtgccgcctctggctacacctttagcagctactgggtcaactgggttcgacaggcccctggcaaaggactggaatgggtcgcccaaatctatcccggcgacggcgacaccaactacaacggcaagttcaagggcagattcaccatcagccgggacaacagcaagaacaccctgtacctccagatgaactccctgagagccgaggacaccgccgtgtactattgtgccagatccatcaccaccgtcgtgggctgcgctatggattattggggccagggaaccctggtcaccgtgtcctctacgcgtatccagaaccctgatcctgccgtgtaccagctgcgggatagcaagagcagcgacaagagcgtgtgtctgttcaccgacttcgacagccagaccaacgtgtcccagagcaaggactccgacgtgtacatcaccgataagtgcgtgctggacatgcggagcatggacttcaagagcaactccgccgtggcctggtccaacaagtccgatttcgcctgcgccaacgccttcaacaacagcattatccccgaggacacattcttcccaagccccgagagcagcgactccaccgaccacgtgaagcccaaagagacagagaacaccaagcagcccagcaagagctgccacaagcccaaggccatcgtgcacaccgagaaagtgaacatgatgagcctgaccgtgctgggcctgcggatgctgttcgccaaaaccgtggccgtgaacttcctgctgaccgccaagctgttcttcctcctcaccgcc

SEQ ID NO: 36152 - DNA, 2595 bp, synthetic construct
  source 1..2595: mol_type = other DNA
atggccttaccagtgaccgccttgctcctgccgctggccttgctgctccacgccgccaggccggaagtgcagctggttgaatctggcggaggactggttcagcctggcggatctctgagactgtcttgtgccgccagcggcttcagcttcagcgacttttggatgagctgggtccgacaggcccctggcaaaggacttgaatgggtcgccacaatcagccaggccggcagcgagaaggactacgtggactctgtgaagggcagattcaccatcagccgggacaacgccaagaagtccctgtacctccagatgaacagcctgagagccgaggacaccgccgtgtactattgtgcctctggcgtgtacagcttcgactacagaggccagggcaccctggtcacagtctcttctggtaccggcggaggcggatctggcggcggaggtagcggtggcggaggatctgaattcgacatccagatgacacagagccctagcagcctgtctgccagcgtgggagacagagtgaccatcacatgcaaggccagcgaccacatcaacaactggctggcctggtatcagcagaagcctggcaaggcccctaagctgctgatctacggcgctaccacactggaaacaggcgtgcccagcagattttctggcagcggctctggcaccgacttcaccctgacaatatccagcctccagcctgaggacttcgccacctactactgtcagcagagctggaacaccccttggacattcggccagggcaccaaggtggaaatcaagagactcgagatccagaaccctgatcctgccgtgtaccagctgcgggatagcaagagcagcgacaagagcgtgtgtctgttcaccgacttcgacagccagaccaacgtgtcccagagcaaggactccgacgtgtacatcaccgataagtgcgtgctggacatgcggagcatggacttcaagagcaactccgccgtggcctggtccaacaagtccgatttcgcctgcgccaacgccttcaacaacagcattatccccgaggacacattcttcccaagccccgagagcagcgactccaccgaccacgtgaagcccaaagagacagagaacaccaagcagcccagcaagagctgccacaagcccaaggccatcgtgcacaccgagaaagtgaacatgatgagcctgaccgtgctgggcctgcggatgctgttcgccaaaaccgtggccgtgaacttcctgctgaccgccaagctgttcttcctcctcaccgcccgcgccaagagaagcggatctggcgtgaagcagaccctgaatttcgacctgctgaagctggctggcgacgtggaatccaacccaggccctactagtatggactggatttggcgcatccttttccttgtcggcgctgctaccggcgcgcattccttcgaagaagttcagctggttgaatctggcggcggactggttcaacctggcggatctctgagactgagctgtgccgcctctggctacacctttagcagctactgggtcaactgggttcgacaggcccctggcaaaggactggaatgggtcgcccaaatctatcccggcgacggcgacaccaactacaacggcaagttcaagggcagattcaccatcagccgggacaacagcaagaacaccctgtacctccagatgaactccctgagagccgaggacaccgccgtgtactattgtgccagatccatcaccaccgtcgtgggctgcgctatggattattggggccagggaaccctggtcaccgtgtcctctacgcgtgaggacctgaagaacgtgttcccacctgaggtggccgtgttcgagcctagcgaggccgagatcagccacacccagaaagccaccctcgtgtgcctggctaccggcttctaccccgaccatgtggaactgtcttggtgggtcaacggcaaagaggtgcacagcggcgtgtgtaccgacccccagccactgaaagaacagcccgccctgaacgacagccggtactgcctgagcagcagactgagagtgtccgccaccttctggcagaacccccggaaccacttcagatgccaggtgcagttctacggcctgagcgagaacgacgagtggacccaggacagagccaagcccgtgacccagatcgtgtctgccgaagcctggggcagagccgatgatgtgattaagatccactggcaggaaaagaagtccaacaccatcctgggcagccaggaaggcaacaccatgaagaccaacgacacctacatgaagttcagctggctgaccgtgcccgagaagtccctggacaaagaacacagatgcatcgtgcggcacgaaaacaacaagaacggcgtggaccaggaaatcatcttcccacccatcaagaccgatgtgattacaatggaccccaaggacaactgctccaaggacgccaacgataccctgctgctccagctgaccaacaccagcgcctactacatgtacttgttgctgctgctgaagtccgtggtgtacttcgccatcatcacatgctgcctgctgatggctatggtcaagcggaaggacagccgggga

SEQ ID NO: 36153 - DNA, 2994 bp, synthetic construct
  source 1..2994: mol_type = other DNA
atggccttaccagtgaccgccttgctcctgccgctggccttgctgctccacgccgccaggccggaagtgcagctggttgaatctggcggaggactggttcagcctggcggatctctgagactgtcttgtgccgccagcggcttcagcttcagcgacttttggatgagctgggtccgacaggcccctggcaaaggacttgaatgggtcgccacaatcagccaggccggcagcgagaaggactacgtggactctgtgaagggcagattcaccatcagccgggacaacgccaagaagtccctgtacctccagatgaacagcctgagagccgaggacaccgccgtgtactattgtgcctctggcgtgtacagcttcgactacagaggccagggcaccctggtcacagtctcttctggtaccggcggaggcggatctggcggcggaggtagcggtggcggaggatctgaattcgacatccagatgacacagagccctagcagcctgtctgccagcgtgggagacagagtgaccatcacatgcaaggccagcgaccacatcaacaactggctggcctggtatcagcagaagcctggcaaggcccctaagctgctgatctacggcgctaccacactggaaacaggcgtgcccagcagattttctggcagcggctctggcaccgacttcaccctgacaatatccagcctccagcctgaggacttcgccacctactactgtcagcagagctggaacaccccttggacattcggccagggcaccaaggtggaaatcaagagactcgaggacctgaagaacgtgttcccacctgaggtggccgtgttcgagcctagcgaggccgagatcagccacacccagaaagccaccctcgtgtgcctggctaccggcttctaccccgaccatgtggaactgtcttggtgggtcaacggcaaagaggtgcacagcggcgtgtgtaccgacccccagccactgaaagaacagcccgccctgaacgacagccggtactgcctgagcagcagactgagagtgtccgccaccttctggcagaacccccggaaccacttcagatgccaggtgcagttctacggcctgagcgagaacgacgagtggacccaggacagagccaagcccgtgacccagatcgtgtctgccgaagcctggggcagagccgatgatgtgattaagatccactggcaggaaaagaagtccaacaccatcctgggcagccaggaaggcaacaccatgaagaccaacgacacctacatgaagttcagctggctgaccgtgcccgagaagtccctggacaaagaacacagatgcatcgtgcggcacgaaaacaacaagaacggcgtggaccaggaaatcatcttcccacccatcaagaccgatgtgattacaatggaccccaaggacaactgctccaaggacgccaacgataccctgctgctccagctgaccaacaccagcgcctactacatgtacttgttgctgctgctgaagtccgtggtgtacttcgccatcatcacatgctgcctgctgatggctatggtcaagcggaaggacagccggggaagggccaagcgatctggatctggagcaacaaacttctcactactcaaacaagcaggtgacgtggaggagaatcccgggcctactagtatggactggatttggcgcatccttttccttgtcggcgctgctaccggcgcgcattccgggccccagctccagctgcaagagtctggacctggcctggtcaagcctagcgagacactgagcctgacctgtaccgtgtccggcgatagcatcagcagcggcgattactactggggctggatcagacagcctcctggcaaaggactggaatggatcggccacatctactacagcggcgtgacctactacaaccccagcctgaagtccagagtgaccatcagcgtggacaccagccggaaccagttctccctgaagctgtctagcgtgacagccgccgataccgccgtgtactactgcaccagagaggacagcagcaactggcggagtagaggccagggaacactggtcacagttagctctggatccggcggaggcggaagtggaggcggaggatctggcggcggaggctctttcgaagaagttcagctggttgaatctggcggcggactggttcaacctggcggatctctgagactgagctgtgccgcctctggctacacctttagcagctactgggtcaactgggttcgacaggcccctggcaaaggactggaatgggtcgcccaaatctatcccggcgacggcgacaccaactacaacggcaagttcaagggcagattcaccatcagccgggacaacagcaagaacaccctgtacctccagatgaactccctgagagccgaggacaccgccgtgtactattgtgccagatccatcaccaccgtcgtgggctgcgctatggattattggggccagggaaccctggtcaccgtgtcctctacgcgtatccagaaccctgatcctgccgtgtaccagctgcgggatagcaagagcagcgacaagagcgtgtgtctgttcaccgacttcgacagccagaccaacgtgtcccagagcaaggactccgacgtgtacatcaccgataagtgcgtgctggacatgcggagcatggacttcaagagcaactccgccgtggcctggtccaacaagtccgatttcgcctgcgccaacgccttcaacaacagcattatccccgaggacacattcttcccaagccccgagagcagcgactccaccgaccacgtgaagcccaaagagacagagaacaccaagcagcccagcaagagctgccacaagcccaaggccatcgtgcacaccgagaaagtgaacatgatgagcctgaccgtgctgggcctgcggatgctgttcgccaaaaccgtggccgtgaacttcctgctgaccgccaagctgttcttcctcctcaccgcc

SEQ ID NO: 36154 - DNA, 3006 bp, synthetic construct
  source 1..3006: mol_type = other DNA
atggccttaccagtgaccgccttgctcctgccgctggccttgctgctccacgccgccaggccggaagtgcagctggttgaatctggcggaggactggttcagcctggcggatctctgagactgtcttgtgccgccagcggcttcagcttcagcgacttttggatgagctgggtccgacaggcccctggcaaaggacttgaatgggtcgccacaatcagccaggccggcagcgagaaggactacgtggactctgtgaagggcagattcaccatcagccgggacaacgccaagaagtccctgtacctccagatgaacagcctgagagccgaggacaccgccgtgtactattgtgcctctggcgtgtacagcttcgactacagaggccagggcaccctggtcacagtctcttctggtaccggcggaggcggatctggcggcggaggtagcggtggcggaggatctgaattcgacatccagatgacacagagccctagcagcctgtctgccagcgtgggagacagagtgaccatcacatgcaaggccagcgaccacatcaacaactggctggcctggtatcagcagaagcctggcaaggcccctaagctgctgatctacggcgctaccacactggaaacaggcgtgcccagcagattttctggcagcggctctggcaccgacttcaccctgacaatatccagcctccagcctgaggacttcgccacctactactgtcagcagagctggaacaccccttggacattcggccagggcaccaaggtggaaatcaagagactcgagatccagaaccctgatcctgccgtgtaccagctgcgggatagcaagagcagcgacaagagcgtgtgtctgttcaccgacttcgacagccagaccaacgtgtcccagagcaaggactccgacgtgtacatcaccgataagtgcgtgctggacatgcggagcatggacttcaagagcaactccgccgtggcctggtccaacaagtccgatttcgcctgcgccaacgccttcaacaacagcattatccccgaggacacattcttcccaagccccgagagcagcgactccaccgaccacgtgaagcccaaagagacagagaacaccaagcagcccagcaagagctgccacaagcccaaggccatcgtgcacaccgagaaagtgaacatgatgagcctgaccgtgctgggcctgcggatgctgttcgccaaaaccgtggccgtgaacttcctgctgaccgccaagctgttcttcctcctcaccgcccgcgccaagagaagcggatctggcgtgaagcagaccctgaatttcgacctgctgaagctggctggcgacgtggaatccaacccaggccctactagtatggactggatttggcgcatccttttccttgtcggcgctgctaccggcgcgcattccgggccccagctccagctgcaagagtctggacctggcctggtcaagcctagcgagacactgagcctgacctgtaccgtgtccggcgatagcatcagcagcggcgattactactggggctggatcagacagcctcctggcaaaggactggaatggatcggccacatctactacagcggcgtgacctactacaaccccagcctgaagtccagagtgaccatcagcgtggacaccagccggaaccagttctccctgaagctgtctagcgtgacagccgccgataccgccgtgtactactgcaccagagaggacagcagcaactggcggagtagaggccagggaacactggtcacagttagctctggatccggcggaggcggaagtggaggcggaggatctggcggcggaggctctttcgaagaagttcagctggttgaatctggcggcggactggttcaacctggcggatctctgagactgagctgtgccgcctctggctacacctttagcagctactgggtcaactgggttcgacaggcccctggcaaaggactggaatgggtcgcccaaatctatcccggcgacggcgacaccaactacaacggcaagttcaagggcagattcaccatcagccgggacaacagcaagaacaccctgtacctccagatgaactccctgagagccgaggacaccgccgtgtactattgtgccagatccatcaccaccgtcgtgggctgcgctatggattattggggccagggaaccctggtcaccgtgtcctctacgcgtgaggacctgaagaacgtgttcccacctgaggtggccgtgttcgagcctagcgaggccgagatcagccacacccagaaagccaccctcgtgtgcctggctaccggcttctaccccgaccatgtggaactgtcttggtgggtcaacggcaaagaggtgcacagcggcgtgtgtaccgacccccagccactgaaagaacagcccgccctgaacgacagccggtactgcctgagcagcagactgagagtgtccgccaccttctggcagaacccccggaaccacttcagatgccaggtgcagttctacggcctgagcgagaacgacgagtggacccaggacagagccaagcccgtgacccagatcgtgtctgccgaagcctggggcagagccgatgatgtgattaagatccactggcaggaaaagaagtccaacaccatcctgggcagccaggaaggcaacaccatgaagaccaacgacacctacatgaagttcagctggctgaccgtgcccgagaagtccctggacaaagaacacagatgcatcgtgcggcacgaaaacaacaagaacggcgtggaccaggaaatcatcttcccacccatcaagaccgatgtgattacaatggaccccaaggacaactgctccaaggacgccaacgataccctgctgctccagctgaccaacaccagcgcctactacatgtacttgttgctgctgctgaagtccgtggtgtacttcgccatcatcacatgctgcctgctgatggctatggtcaagcggaaggacagccgggga

SEQ ID NO: 36155 - DNA, 2172 bp, synthetic construct
  source 1..2172: mol_type = other DNA
atggccttaccagtgaccgccttgctcctgccgctggccttgctgctccacgccgccaggccggacatccagatgacacagagccctagcagcctgtctgccagcgtgggagacagagtgaccatcacatgcaaggccagcgaccacatcaacaactggctggcctggtatcagcagaagcctggcaaggcccctaagctgctgatctacggcgctaccacactggaaacaggcgtgcccagcagattttctggcagcggctctggcaccgacttcaccctgacaatatccagcctccagcctgaggacttcgccacctactactgtcagcagagctggaacaccccttggacattcggccagggcaccaaggtggaaatcaagagactcgaggacctgaagaacgtgttcccacctgaggtggccgtgttcgagcctagcgaggccgagatcagccacacccagaaagccaccctcgtgtgcctggctaccggcttctaccccgaccatgtggaactgtcttggtgggtcaacggcaaagaggtgcacagcggcgtgtgtaccgacccccagccactgaaagaacagcccgccctgaacgacagccggtactgcctgagcagcagactgagagtgtccgccaccttctggcagaacccccggaaccacttcagatgccaggtgcagttctacggcctgagcgagaacgacgagtggacccaggacagagccaagcccgtgacccagatcgtgtctgccgaagcctggggcagagccgatgatgtgattaagatccactggcaggaaaagaagtccaacaccatcctgggcagccaggaaggcaacaccatgaagaccaacgacacctacatgaagttcagctggctgaccgtgcccgagaagtccctggacaaagaacacagatgcatcgtgcggcacgaaaacaacaagaacggcgtggaccaggaaatcatcttcccacccatcaagaccgatgtgattacaatggaccccaaggacaactgctccaaggacgccaacgataccctgctgctccagctgaccaacaccagcgcctactacatgtacttgttgctgctgctgaagtccgtggtgtacttcgccatcatcacatgctgcctgctgcggagaaccgccttctgctgcaacggcgagaagtctagggccaagcgatctggatctggagcaacaaacttctcactactcaaacaagcaggtgacgtggaggagaatcccgggcctactagtatggactggatttggcgcatccttttccttgtcggcgctgctaccggcgcgcattccttcgaagaagttcagctggttgaatctggcggcggactggttcaacctggcggatctctgagactgagctgtgccgcctctggctacacctttagcagctactgggtcaactgggttcgacaggcccctggcaaaggactggaatgggtcgcccaaatctatcccggcgacggcgacaccaactacaacggcaagttcaagggcagattcaccatcagccgggacaacagcaagaacaccctgtacctccagatgaactccctgagagccgaggacaccgccgtgtactattgtgccagatccatcaccaccgtcgtgggctgcgctatggattattggggccagggaaccctggtcaccgtgtcctctacgcgtatccagaaccctgatcctgccgtgtaccagctgcgggatagcaagagcagcgacaagagcgtgtgtctgttcaccgacttcgacagccagaccaacgtgtcccagagcaaggactccgacgtgtacatcaccgataagtgcgtgctggacatgcggagcatggacttcaagagcaactccgccgtggcctggtccaacaagtccgatttcgcctgcgccaacgccttcaacaacagcattatccccgaggacacattcttcccaagccccgagagcagcgactccaccgaccacgtgaagcccaaagagacagagaacaccaagcagcccagcaagagctgccacaagcccaaggccatcgtgcacaccgagaaagtgaacatgatgagcctgaccgtgctgggcctgcggatgctgttcgccaaaaccgtggccgtgaacttcctgctgaccgccaagctgttcttcctc

SEQ ID NO: 36156 - DNA, 2184 bp, synthetic construct
  source 1..2184: mol_type = other DNA
atggccttaccagtgaccgccttgctcctgccgctggccttgctgctccacgccgccaggccggacatccagatgacacagagccctagcagcctgtctgccagcgtgggagacagagtgaccatcacatgcaaggccagcgaccacatcaacaactggctggcctggtatcagcagaagcctggcaaggcccctaagctgctgatctacggcgctaccacactggaaacaggcgtgcccagcagattttctggcagcggctctggcaccgacttcaccctgacaatatccagcctccagcctgaggacttcgccacctactactgtcagcagagctggaacaccccttggacattcggccagggcaccaaggtggaaatcaagagactcgagatccagaaccctgatcctgccgtgtaccagctgcgggatagcaagagcagcgacaagagcgtgtgtctgttcaccgacttcgacagccagaccaacgtgtcccagagcaaggactccgacgtgtacatcaccgataagtgcgtgctggacatgcggagcatggacttcaagagcaactccgccgtggcctggtccaacaagtccgatttcgcctgcgccaacgccttcaacaacagcattatccccgaggacacattcttcccaagccccgagagcagcgactccaccgaccacgtgaagcccaaagagacagagaacaccaagcagcccagcaagagctgccacaagcccaaggccatcgtgcacaccgagaaagtgaacatgatgagcctgaccgtgctgggcctgcggatgctgttcgccaaaaccgtggccgtgaacttcctgctgaccgccaagctgttcttcctccgcgccaagagaagcggatctggcgtgaagcagaccctgaatttcgacctgctgaagctggctggcgacgtggaatccaacccaggccctactagtatggactggatttggcgcatccttttccttgtcggcgctgctaccggcgcgcattccttcgaagaagttcagctggttgaatctggcggcggactggttcaacctggcggatctctgagactgagctgtgccgcctctggctacacctttagcagctactgggtcaactgggttcgacaggcccctggcaaaggactggaatgggtcgcccaaatctatcccggcgacggcgacaccaactacaacggcaagttcaagggcagattcaccatcagccgggacaacagcaagaacaccctgtacctccagatgaactccctgagagccgaggacaccgccgtgtactattgtgccagatccatcaccaccgtcgtgggctgcgctatggattattggggccagggaaccctggtcaccgtgtcctctacgcgtgaggacctgaagaacgtgttcccacctgaggtggccgtgttcgagcctagcgaggccgagatcagccacacccagaaagccaccctcgtgtgcctggctaccggcttctaccccgaccatgtggaactgtcttggtgggtcaacggcaaagaggtgcacagcggcgtgtgtaccgacccccagccactgaaagaacagcccgccctgaacgacagccggtactgcctgagcagcagactgagagtgtccgccaccttctggcagaacccccggaaccacttcagatgccaggtgcagttctacggcctgagcgagaacgacgagtggacccaggacagagccaagcccgtgacccagatcgtgtctgccgaagcctggggcagagccgatgatgtgattaagatccactggcaggaaaagaagtccaacaccatcctgggcagccaggaaggcaacaccatgaagaccaacgacacctacatgaagttcagctggctgaccgtgcccgagaagtccctggacaaagaacacagatgcatcgtgcggcacgaaaacaacaagaacggcgtggaccaggaaatcatcttcccacccatcaagaccgatgtgattacaatggaccccaaggacaactgctccaaggacgccaacgataccctgctgctccagctgaccaacaccagcgcctactacatgtacttgttgctgctgctgaagtccgtggtgtacttcgccatcatcacatgctgcctgctgcggagaaccgccttctgctgcaacggcgagaagtct

SEQ ID NO: 36157 - DNA, 2577 bp, synthetic construct
  source 1..2577: mol_type = other DNA
atggccttaccagtgaccgccttgctcctgccgctggccttgctgctccacgccgccaggccggaagtgcagctggttgaatctggcggaggactggttcagcctggcggatctctgagactgtcttgtgccgccagcggcttcagcttcagcgacttttggatgagctgggtccgacaggcccctggcaaaggacttgaatgggtcgccacaatcagccaggccggcagcgagaaggactacgtggactctgtgaagggcagattcaccatcagccgggacaacgccaagaagtccctgtacctccagatgaacagcctgagagccgaggacaccgccgtgtactattgtgcctctggcgtgtacagcttcgactacagaggccagggcaccctggtcacagtctcttctggtaccggcggaggcggatctggcggcggaggtagcggtggcggaggatctgaattcgacatccagatgacacagagccctagcagcctgtctgccagcgtgggagacagagtgaccatcacatgcaaggccagcgaccacatcaacaactggctggcctggtatcagcagaagcctggcaaggcccctaagctgctgatctacggcgctaccacactggaaacaggcgtgcccagcagattttctggcagcggctctggcaccgacttcaccctgacaatatccagcctccagcctgaggacttcgccacctactactgtcagcagagctggaacaccccttggacattcggccagggcaccaaggtggaaatcaagagactcgaggacctgaagaacgtgttcccacctgaggtggccgtgttcgagcctagcgaggccgagatcagccacacccagaaagccaccctcgtgtgcctggctaccggcttctaccccgaccatgtggaactgtcttggtgggtcaacggcaaagaggtgcacagcggcgtgtgtaccgacccccagccactgaaagaacagcccgccctgaacgacagccggtactgcctgagcagcagactgagagtgtccgccaccttctggcagaacccccggaaccacttcagatgccaggtgcagttctacggcctgagcgagaacgacgagtggacccaggacagagccaagcccgtgacccagatcgtgtctgccgaagcctggggcagagccgatgatgtgattaagatccactggcaggaaaagaagtccaacaccatcctgggcagccaggaaggcaacaccatgaagaccaacgacacctacatgaagttcagctggctgaccgtgcccgagaagtccctggacaaagaacacagatgcatcgtgcggcacgaaaacaacaagaacggcgtggaccaggaaatcatcttcccacccatcaagaccgatgtgattacaatggaccccaaggacaactgctccaaggacgccaacgataccctgctgctccagctgaccaacaccagcgcctactacatgtacttgttgctgctgctgaagtccgtggtgtacttcgccatcatcacatgctgcctgctgcggagaaccgccttctgctgcaacggcgagaagtctagggccaagcgatctggatctggagcaacaaacttctcactactcaaacaagcaggtgacgtggaggagaatcccgggcctactagtatggactggatttggcgcatccttttccttgtcggcgctgctaccggcgcgcattccttcgaagaagttcagctggttgaatctggcggcggactggttcaacctggcggatctctgagactgagctgtgccgcctctggctacacctttagcagctactgggtcaactgggttcgacaggcccctggcaaaggactggaatgggtcgcccaaatctatcccggcgacggcgacaccaactacaacggcaagttcaagggcagattcaccatcagccgggacaacagcaagaacaccctgtacctccagatgaactccctgagagccgaggacaccgccgtgtactattgtgccagatccatcaccaccgtcgtgggctgcgctatggattattggggccagggaaccctggtcaccgtgtcctctacgcgtatccagaaccctgatcctgccgtgtaccagctgcgggatagcaagagcagcgacaagagcgtgtgtctgttcaccgacttcgacagccagaccaacgtgtcccagagcaaggactccgacgtgtacatcaccgataagtgcgtgctggacatgcggagcatggacttcaagagcaactccgccgtggcctggtccaacaagtccgatttcgcctgcgccaacgccttcaacaacagcattatccccgaggacacattcttcccaagccccgagagcagcgactccaccgaccacgtgaagcccaaagagacagagaacaccaagcagcccagcaagagctgccacaagcccaaggccatcgtgcacaccgagaaagtgaacatgatgagcctgaccgtgctgggcctgcggatgctgttcgccaaaaccgtggccgtgaacttcctgctgaccgccaagctgttcttcctc

SEQ ID NO: 36158 - DNA, 2988 bp, synthetic construct
  source 1..2988: mol_type = other DNA
atggccttaccagtgaccgccttgctcctgccgctggccttgctgctccacgccgccaggccggaagtgcagctggttgaatctggcggaggactggttcagcctggcggatctctgagactgtcttgtgccgccagcggcttcagcttcagcgacttttggatgagctgggtccgacaggcccctggcaaaggacttgaatgggtcgccacaatcagccaggccggcagcgagaaggactacgtggactctgtgaagggcagattcaccatcagccgggacaacgccaagaagtccctgtacctccagatgaacagcctgagagccgaggacaccgccgtgtactattgtgcctctggcgtgtacagcttcgactacagaggccagggcaccctggtcacagtctcttctggtaccggcggaggcggatctggcggcggaggtagcggtggcggaggatctgaattcgacatccagatgacacagagccctagcagcctgtctgccagcgtgggagacagagtgaccatcacatgcaaggccagcgaccacatcaacaactggctggcctggtatcagcagaagcctggcaaggcccctaagctgctgatctacggcgctaccacactggaaacaggcgtgcccagcagattttctggcagcggctctggcaccgacttcaccctgacaatatccagcctccagcctgaggacttcgccacctactactgtcagcagagctggaacaccccttggacattcggccagggcaccaaggtggaaatcaagagactcgaggacctgaagaacgtgttcccacctgaggtggccgtgttcgagcctagcgaggccgagatcagccacacccagaaagccaccctcgtgtgcctggctaccggcttctaccccgaccatgtggaactgtcttggtgggtcaacggcaaagaggtgcacagcggcgtgtgtaccgacccccagccactgaaagaacagcccgccctgaacgacagccggtactgcctgagcagcagactgagagtgtccgccaccttctggcagaacccccggaaccacttcagatgccaggtgcagttctacggcctgagcgagaacgacgagtggacccaggacagagccaagcccgtgacccagatcgtgtctgccgaagcctggggcagagccgatgatgtgattaagatccactggcaggaaaagaagtccaacaccatcctgggcagccaggaaggcaacaccatgaagaccaacgacacctacatgaagttcagctggctgaccgtgcccgagaagtccctggacaaagaacacagatgcatcgtgcggcacgaaaacaacaagaacggcgtggaccaggaaatcatcttcccacccatcaagaccgatgtgattacaatggaccccaaggacaactgctccaaggacgccaacgataccctgctgctccagctgaccaacaccagcgcctactacatgtacttgttgctgctgctgaagtccgtggtgtacttcgccatcatcacatgctgcctgctgcggagaaccgccttctgctgcaacggcgagaagtctagggccaagcgatctggatctggagcaacaaacttctcactactcaaacaagcaggtgacgtggaggagaatcccgggcctactagtatggactggatttggcgcatccttttccttgtcggcgctgctaccggcgcgcattccgggccccagctccagctgcaagagtctggacctggcctggtcaagcctagcgagacactgagcctgacctgtaccgtgtccggcgatagcatcagcagcggcgattactactggggctggatcagacagcctcctggcaaaggactggaatggatcggccacatctactacagcggcgtgacctactacaaccccagcctgaagtccagagtgaccatcagcgtggacaccagccggaaccagttctccctgaagctgtctagcgtgacagccgccgataccgccgtgtactactgcaccagagaggacagcagcaactggcggagtagaggccagggaacactggtcacagttagctctggatccggcggaggcggaagtggaggcggaggatctggcggcggaggctctttcgaagaagttcagctggttgaatctggcggcggactggttcaacctggcggatctctgagactgagctgtgccgcctctggctacacctttagcagctactgggtcaactgggttcgacaggcccctggcaaaggactggaatgggtcgcccaaatctatcccggcgacggcgacaccaactacaacggcaagttcaagggcagattcaccatcagccgggacaacagcaagaacaccctgtacctccagatgaactccctgagagccgaggacaccgccgtgtactattgtgccagatccatcaccaccgtcgtgggctgcgctatggattattggggccagggaaccctggtcaccgtgtcctctacgcgtatccagaaccctgatcctgccgtgtaccagctgcgggatagcaagagcagcgacaagagcgtgtgtctgttcaccgacttcgacagccagaccaacgtgtcccagagcaaggactccgacgtgtacatcaccgataagtgcgtgctggacatgcggagcatggacttcaagagcaactccgccgtggcctggtccaacaagtccgatttcgcctgcgccaacgccttcaacaacagcattatccccgaggacacattcttcccaagccccgagagcagcgactccaccgaccacgtgaagcccaaagagacagagaacaccaagcagcccagcaagagctgccacaagcccaaggccatcgtgcacaccgagaaagtgaacatgatgagcctgaccgtgctgggcctgcggatgctgttcgccaaaaccgtggccgtgaacttcctgctgaccgccaagctgttcttcctc

SEQ ID NO: 36159 - DNA, 1866 bp, synthetic construct
  source 1..1866: mol_type = other DNA
atggccttaccagtgaccgccttgctcctgccgctggccttgctgctccacgccgccaggccggacatccagatgacacagagccctagcagcctgtctgccagcgtgggagacagagtgaccatcacatgcaaggccagcgaccacatcaacaactggctggcctggtatcagcagaagcctggcaaggcccctaagctgctgatctacggcgctaccacactggaaacaggcgtgcccagcagattttctggcagcggctctggcaccgacttcaccctgacaatatccagcctccagcctgaggacttcgccacctactactgtcagcagagctggaacaccccttggacattcggccagggcaccaaggtggaaatcaagagactcgaggacctgaagaacgtgttcccacctgaggtggccgtgttcgagcctagcgaggccgagatcagccacacccagaaagccaccctcgtgtgcctggctaccggcttctaccccgaccatgtggaactgtcttggtgggtcaacggcaaagaggtgcacagcggcgtgtctaccgacccccagccactgaaagaacagcccgccctgaacgacagccggtactgcctgagcagcagactgagagtgtccgccaccttctggcagaacccccggaaccacttcagatgccaggtgcagttctacggcctgagcgagaacgacgagtggacccaggacagagccaagcccgtgacccagatcgtgtctgccgaagcctggggcagagccgattgcgacgtgaagctggtggaaaagagcttcgagacagacaccaacctgaacttccagaacctgagcgtgatcggcttcagaatcctgctgctgaaagtggccggctttaacctgctgatgaccctgcggctgtggtccagcagggccaagcgatctggatctggagcaacaaacttctcactactcaaacaagcaggtgacgtggaggagaatcccgggcctactagtatggactggatttggcgcatccttttccttgtcggcgctgctaccggcgcgcattccttcgaagaagttcagctggttgaatctggcggcggactggttcaacctggcggatctctgagactgagctgtgccgcctctggctacacctttagcagctactgggtcaactgggttcgacaggcccctggcaaaggactggaatgggtcgcccaaatctatcccggcgacggcgacaccaactacaacggcaagttcaagggcagattcaccatcagccgggacaacagcaagaacaccctgtacctccagatgaactccctgagagccgaggacaccgccgtgtactattgtgccagatccatcaccaccgtcgtgggctgcgctatggattattggggccagggaaccctggtcaccgtgtcctctacgcgtatccagaaccctgatcctgccgtgtaccagctgcgggatagcaagagcagcgacaagagcgtgtgtctgttcaccgacttcgacagccagaccaacgtgtcccagagcaaggactccgacgtgtacatcaccgataagaccgtgctggacatgcggagcatggacttcaagagcaactccgccgtggcctggtccaacaagtccgatttcgcctgcgccaacgccttcaacaacagcattatccccgaggacacattcttcccaagccccgagagcagctgcggctttaccagcgagagctaccagcagggcgtgctgagcgccaccatcctgtacgagatcctgctgggcaaggccaccctgtacgccgtgctggtgtctgccctggtgctgatggctatggtcaagcggaaggacagccgggga

SEQ ID NO: 36160 - DNA, 1866 bp, synthetic construct
  source 1..1866: mol_type = other DNA
atggccttaccagtgaccgccttgctcctgccgctggccttgctgctccacgccgccaggccggacatccagatgacacagagccctagcagcctgtctgccagcgtgggagacagagtgaccatcacatgcaaggccagcgaccacatcaacaactggctggcctggtatcagcagaagcctggcaaggcccctaagctgctgatctacggcgctaccacactggaaacaggcgtgcccagcagattttctggcagcggctctggcaccgacttcaccctgacaatatccagcctccagcctgaggacttcgccacctactactgtcagcagagctggaacaccccttggacattcggccagggcaccaaggtggaaatcaagagactcgaggacctgaagaacgtgttcccacctgaggtggccgtgttcgagcctagcgaggccgagatcagccacacccagaaagccaccctcgtgtgcctggctaccggcttctaccccgaccatgtggaactgtcttggtgggtcaacggcaaagaggtgcacagcggcgtgtctaccgacccccagccactgaaagaacagcccgccctgaacgacagccggtactgcctgagcagcagactgagagtgtccgccaccttctggcagaacccccggaaccacttcagatgccaggtgcagttctacggcctgagcgagaacgacgagtggacccaggacagagccaagcccgtgacccagatcgtgtctgccgaagcctggggcagagccgattgcggctttaccagcgagagctaccagcagggcgtgctgagcgccaccaacctgagcgtgatcggcttcagaatcctgctgctgaaagtggccggctttaacctgctgatgaccctgcggctgtggtccagcagggccaagcgatctggatctggagcaacaaacttctcactactcaaacaagcaggtgacgtggaggagaatcccgggcctactagtatggactggatttggcgcatccttttccttgtcggcgctgctaccggcgcgcattccttcgaagaagttcagctggttgaatctggcggcggactggttcaacctggcggatctctgagactgagctgtgccgcctctggctacacctttagcagctactgggtcaactgggttcgacaggcccctggcaaaggactggaatgggtcgcccaaatctatcccggcgacggcgacaccaactacaacggcaagttcaagggcagattcaccatcagccgggacaacagcaagaacaccctgtacctccagatgaactccctgagagccgaggacaccgccgtgtactattgtgccagatccatcaccaccgtcgtgggctgcgctatggattattggggccagggaaccctggtcaccgtgtcctctacgcgtatccagaaccctgatcctgccgtgtaccagctgcgggatagcaagagcagcgacaagagcgtgtgtctgttcaccgacttcgacagccagaccaacgtgtcccagagcaaggactccgacgtgtacatcaccgataagaccgtgctggacatgcggagcatggacttcaagagcaactccgccgtggcctggtccaacaagtccgatttcgcctgcgccaacgccttcaacaacagcattatccccgaggacacattcttcccaagccccgagagcagctgcgacgtgaagctggtggaaaagagcttcgagacagacaccaacctgaacttccagatcctgtacgagatcctgctgggcaaggccaccctgtacgccgtgctggtgtctgccctggtgctgatggctatggtcaagcggaaggacagccgggga

SEQ ID NO: 36161 - DNA, 2178 bp, synthetic construct
  source 1..2178: mol_type = other DNA
atggccttaccagtgaccgccttgctcctgccgctggccttgctgctccacgccgccaggccggacatccagatgacacagagccctagcagcctgtctgccagcgtgggagacagagtgaccatcacatgcaaggccagcgaccacatcaacaactggctggcctggtatcagcagaagcctggcaaggcccctaagctgctgatctacggcgctaccacactggaaacaggcgtgcccagcagattttctggcagcggctctggcaccgacttcaccctgacaatatccagcctccagcctgaggacttcgccacctactactgtcagcagagctggaacaccccttggacattcggccagggcaccaaggtggaaatcaagagactcgaggacctgaagaacgtgttcccacctgaggtggccgtgttcgagcctagcgaggccgagatcagccacacccagaaagccaccctcgtgtgcctggctaccggcttctaccccgaccatgtggaactgtcttggtgggtcaacggcaaagaggtgcacagcggcgtgtctaccgacccccagccactgaaagaacagcccgccctgaacgacagccggtactgcctgagcagcagactgagagtgtccgccaccttctggcagaacccccggaaccacttcagatgccaggtgcagttctacggcctgagcgagaacgacgagtggacccaggacagagccaagcccgtgacccagatcgtgtctgccgaagcctggggcagagccgatgatgtgattaagatccactggcaggaaaagaagtccaacaccatcctgggcagccaggaaggcaacaccatgaagaccaacgacacctacatgaagttcagctggctgaccgtgcccgagaagtccctggacaaagaacacagatgcatcgtgcggcacgaaaacaacaagaacggcgtggaccaggaaatcatcttcccacccatcaagaccgatgtgattacaatggaccccaaggacaactgctccaaggacgccaacgataccctgctgctccagctgaccaacaccagcgcctactacatgtacttgttgctgctgctgaagtccgtggtgtacttcgccatcatcacatgctgcctgctgatggctatggtcaagcggaaggacagccggggaagggccaagcgatctggatctggagcaacaaacttctcactactcaaacaagcaggtgacgtggaggagaatcccgggcctactagtatggactggatttggcgcatccttttccttgtcggcgctgctaccggcgcgcattccttcgaagaagttcagctggttgaatctggcggcggactggttcaacctggcggatctctgagactgagctgtgccgcctctggctacacctttagcagctactgggtcaactgggttcgacaggcccctggcaaaggactggaatgggtcgcccaaatctatcccggcgacggcgacaccaactacaacggcaagttcaagggcagattcaccatcagccgggacaacagcaagaacaccctgtacctccagatgaactccctgagagccgaggacaccgccgtgtactattgtgccagatccatcaccaccgtcgtgggctgcgctatggattattggggccagggaaccctggtcaccgtgtcctctacgcgtatccagaaccctgatcctgccgtgtaccagctgcgggatagcaagagcagcgacaagagcgtgtgtctgttcaccgacttcgacagccagaccaacgtgtcccagagcaaggactccgacgtgtacatcaccgataagaccgtgctggacatgcggagcatggacttcaagagcaactccgccgtggcctggtccaacaagtccgatttcgcctgcgccaacgccttcaacaacagcattatccccgaggacacattcttcccaagccccgagagcagcgactccaccgaccacgtgaagcccaaagagacagagaacaccaagcagcccagcaagagctgccacaagcccaaggccatcgtgcacaccgagaaagtgaacatgatgagcctgaccgtgctgggcctgcggatgctgttcgccaaaaccgtggccgtgaacttcctgctgaccgccaagctgttcttcctcctcaccgcc

SEQ ID NO: 36162 - DNA, 2172 bp, synthetic construct
  source 1..2172: mol_type = other DNA
atggccttaccagtgaccgccttgctcctgccgctggccttgctgctccacgccgccaggccggacatccagatgacacagagccctagcagcctgtctgccagcgtgggagacagagtgaccatcacatgcaaggccagcgaccacatcaacaactggctggcctggtatcagcagaagcctggcaaggcccctaagctgctgatctacggcgctaccacactggaaacaggcgtgcccagcagattttctggcagcggctctggcaccgacttcaccctgacaatatccagcctccagcctgaggacttcgccacctactactgtcagcagagctggaacaccccttggacattcggccagggcaccaaggtggaaatcaagagactcgaggacctgaagaacgtgttcccacctgaggtggccgtgttcgagcctagcgaggccgagatcagccacacccagaaagccaccctcgtgtgcctggctaccggcttctaccccgaccatgtggaactgtcttggtgggtcaacggcaaagaggtgcacagcggcgtgtctaccgacccccagccactgaaagaacagcccgccctgaacgacagccggtactgcctgagcagcagactgagagtgtccgccaccttctggcagaacccccggaaccacttcagatgccaggtgcagttctacggcctgagcgagaacgacgagtggacccaggacagagccaagcccgtgacccagatcgtgtctgccgaagcctggggcagagccgatgatgtgattaagatccactggcaggaaaagaagtccaacaccatcctgggcagccaggaaggcaacaccatgaagaccaacgacacctacatgaagttcagctggctgaccgtgcccgagaagtccctggacaaagaacacagatgcatcgtgcggcacgaaaacaacaagaacggcgtggaccaggaaatcatcttcccacccatcaagaccgatgtgattacaatggaccccaaggacaactgctccaaggacgccaacgataccctgctgctccagctgaccaacaccagcgcctactacatgtacttgttgctgctgctgaagtccgtggtgtacttcgccatcatcacatgctgcctgctgcggagaaccgccttctgctgcaacggcgagaagtctagggccaagcgatctggatctggagcaacaaacttctcactactcaaacaagcaggtgacgtggaggagaatcccgggcctactagtatggactggatttggcgcatccttttccttgtcggcgctgctaccggcgcgcattccttcgaagaagttcagctggttgaatctggcggcggactggttcaacctggcggatctctgagactgagctgtgccgcctctggctacacctttagcagctactgggtcaactgggttcgacaggcccctggcaaaggactggaatgggtcgcccaaatctatcccggcgacggcgacaccaactacaacggcaagttcaagggcagattcaccatcagccgggacaacagcaagaacaccctgtacctccagatgaactccctgagagccgaggacaccgccgtgtactattgtgccagatccatcaccaccgtcgtgggctgcgctatggattattggggccagggaaccctggtcaccgtgtcctctacgcgtatccagaaccctgatcctgccgtgtaccagctgcgggatagcaagagcagcgacaagagcgtgtgtctgttcaccgacttcgacagccagaccaacgtgtcccagagcaaggactccgacgtgtacatcaccgataagaccgtgctggacatgcggagcatggacttcaagagcaactccgccgtggcctggtccaacaagtccgatttcgcctgcgccaacgccttcaacaacagcattatccccgaggacacattcttcccaagccccgagagcagcgactccaccgaccacgtgaagcccaaagagacagagaacaccaagcagcccagcaagagctgccacaagcccaaggccatcgtgcacaccgagaaagtgaacatgatgagcctgaccgtgctgggcctgcggatgctgttcgccaaaaccgtggccgtgaacttcctgctgaccgccaagctgttcttcctc

SEQ ID NO: 36163 - DNA, 2604 bp, synthetic construct
  source 1..2604: mol_type = other DNA
atggccttaccagtgaccgccttgctcctgccgctggccttgctgctccacgccgccaggccgctcgaggaggacctgaagaacgtgttcccacctgaggtggccgtgttcgagcctagcgaggccgagatcagccacacccagaaagccaccctcgtgtgcctggctaccggcttctaccccgaccatgtggaactgtcttggtgggtcaacggcaaagaggtgcacagcggcgtgtgtaccgacccccagccactgaaagaacagcccgccctgaacgacagccggtactgcctgagcagcagactgagagtgtccgccaccttctggcagaacccccggaaccacttcagatgccaggtgcagttctacggcctgagcgagaacgacgagtggacccaggacagagccaagcccgtgacccagatcgtgtctgccgaagcctggggcagagccgattgcggctttaccagcgagagctaccagcagggcgtgctgagcgccaccaacctgagcgtgatcggcttcagaatcctgctgctgaaagtggccggctttaacctgctgatgaccctgcggctgtggtccagcagggccaagcgatctggatctggagcaacaaacttctcactactcaaacaagcaggtgacgtggaggagaatcccgggcctactagcatggccttaccagtgaccgccttgctcctgccgctggccttgctgctccacgccgccaggccggacatccagatgacacagagccctagcagcctgtctgccagcgtgggagacagagtgaccatcacatgcaaggccagcgaccacatcaacaactggctggcctggtatcagcagaagcctggcaaggcccctaagctgctgatctacggcgctaccacactggaaacaggcgtgcccagcagattttctggcagcggctctggcaccgacttcaccctgacaatatccagcctccagcctgaggacttcgccacctactactgtcagcagagctggaacaccccttggacattcggccagggcaccaaggtggaaatcaagagaggcggaggcggaagtggaggcggaggatctggcggcggaggctctgaagttcagctggttgaatctggcggcggactggttcaacctggcggatctctgagactgagctgtgccgcctctggctacacctttagcagctactgggtcaactgggttcgacaggcccctggcaaaggactggaatgggtcgcccaaatctatcccggcgacggcgacaccaactacaacggcaagttcaagggcagattcaccatcagccgggacaacagcaagaacaccctgtacctccagatgaactccctgagagccgaggacaccgccgtgtactattgtgccagatccatcaccaccgtcgtgggctgcgctatggattattggggccagggaaccctggtcaccgtgtcctctacgcgtatccagaaccctgatcctgccgtgtaccagctgcgggatagcaagagcagcgacaagagcgtgtgtctgttcaccgacttcgacagccagaccaacgtgtcccagagcaaggactccgacgtgtacatcaccgataagtgcgtgctggacatgcggagcatggacttcaagagcaactccgccgtggcctggtccaacaagtccgatttcgcctgcgccaacgccttcaacaacagcattatccccgaggacacattcttcccaagccccgagagcagctgcgacgtgaagctggtggaaaagagcttcgagacagacaccaacctgaacttccagatcctgtacgaggtgatcggcttcagaatcctgctgctgaaagtggccggctttaacctgctgatgaccctgcggctgtggtccagccgcgccaagagaagcggatctggcgtgaagcagaccctgaatttcgacctgctgaagctggctggcgacgtggaatccaacccaggcccttctagaggccatatgaccgagtacaagcccacggtgcgcctcgccacccgcgacgacgtccccagggccgtacgcaccctcgccgccgcgttcgccgactaccccgccacgcgccacaccgtcgatccggaccgccacatcgagcgggtcaccgagctgcaagaactcttcctcacgcgcgtcgggctcgacatcggcaaggtgtgggtcgcggacgacggcgccgcggtggcggtctggaccacgccggagagcgtcgaagcgggggcggtgttcgccgagatcggcccgcgcatggccgagttgagcggttcccggctggccgcgcagcaacagatggaaggcctcctggcgccgcaccggcccaaggagcccgcgtggttcctggccaccgtcggcgtctcgcccgaccaccagggcaagggtctgggcagcgccgtcgtgctccccggagtggaggcggccgagcgcgccggggtgcccgccttcctggagacctccgcgccccgcaacctccccttctacgagcggctcggcttcaccgtcaccgccgacgtcgaggtgcccgaaggaccgcgcacctggtgcatgacccgcaagcccggtgcctga

SEQ ID NO: 36164 - DNA, 2604 bp, synthetic construct
  source 1..2604: mol_type = other DNA
atggccttaccagtgaccgccttgctcctgccgctggccttgctgctccacgccgccaggccgctcgagatccagaaccctgatcctgccgtgtaccagctgcgggatagcaagagcagcgacaagagcgtgtgtctgttcaccgacttcgacagccagaccaacgtgtcccagagcaaggactccgacgtgtacatcaccgataagtgcgtgctggacatgcggagcatggacttcaagagcaactccgccgtggcctggtccaacaagtccgatttcgcctgcgccaacgccttcaacaacagcattatccccgaggacacattcttcccaagccccgagagcagctgcgacgtgaagctggtggaaaagagcttcgagacagacaccaacctgaacttccagatcctgtacgaggtgatcggcttcagaatcctgctgctgaaagtggccggctttaacctgctgatgaccctgcggctgtggtccagcagggccaagcgatctggatctggagcaacaaacttctcactactcaaacaagcaggtgacgtggaggagaatcccgggcctactagcatggccttaccagtgaccgccttgctcctgccgctggccttgctgctccacgccgccaggccggacatccagatgacacagagccctagcagcctgtctgccagcgtgggagacagagtgaccatcacatgcaaggccagcgaccacatcaacaactggctggcctggtatcagcagaagcctggcaaggcccctaagctgctgatctacggcgctaccacactggaaacaggcgtgcccagcagattttctggcagcggctctggcaccgacttcaccctgacaatatccagcctccagcctgaggacttcgccacctactactgtcagcagagctggaacaccccttggacattcggccagggcaccaaggtggaaatcaagagaggcggaggcggaagtggaggcggaggatctggcggcggaggctctgaagttcagctggttgaatctggcggcggactggttcaacctggcggatctctgagactgagctgtgccgcctctggctacacctttagcagctactgggtcaactgggttcgacaggcccctggcaaaggactggaatgggtcgcccaaatctatcccggcgacggcgacaccaactacaacggcaagttcaagggcagattcaccatcagccgggacaacagcaagaacaccctgtacctccagatgaactccctgagagccgaggacaccgccgtgtactattgtgccagatccatcaccaccgtcgtgggctgcgctatggattattggggccagggaaccctggtcaccgtgtcctctacgcgtgaggacctgaagaacgtgttcccacctgaggtggccgtgttcgagcctagcgaggccgagatcagccacacccagaaagccaccctcgtgtgcctggctaccggcttctaccccgaccatgtggaactgtcttggtgggtcaacggcaaagaggtgcacagcggcgtgtgtaccgacccccagccactgaaagaacagcccgccctgaacgacagccggtactgcctgagcagcagactgagagtgtccgccaccttctggcagaacccccggaaccacttcagatgccaggtgcagttctacggcctgagcgagaacgacgagtggacccaggacagagccaagcccgtgacccagatcgtgtctgccgaagcctggggcagagccgattgcggctttaccagcgagagctaccagcagggcgtgctgagcgccaccaacctgagcgtgatcggcttcagaatcctgctgctgaaagtggccggctttaacctgctgatgaccctgcggctgtggtccagccgcgccaagagaagcggatctggcgtgaagcagaccctgaatttcgacctgctgaagctggctggcgacgtggaatccaacccaggcccttctagaggccatatgaccgagtacaagcccacggtgcgcctcgccacccgcgacgacgtccccagggccgtacgcaccctcgccgccgcgttcgccgactaccccgccacgcgccacaccgtcgatccggaccgccacatcgagcgggtcaccgagctgcaagaactcttcctcacgcgcgtcgggctcgacatcggcaaggtgtgggtcgcggacgacggcgccgcggtggcggtctggaccacgccggagagcgtcgaagcgggggcggtgttcgccgagatcggcccgcgcatggccgagttgagcggttcccggctggccgcgcagcaacagatggaaggcctcctggcgccgcaccggcccaaggagcccgcgtggttcctggccaccgtcggcgtctcgcccgaccaccagggcaagggtctgggcagcgccgtcgtgctccccggagtggaggcggccgagcgcgccggggtgcccgccttcctggagacctccgcgccccgcaacctccccttctacgagcggctcggcttcaccgtcaccgccgacgtcgaggtgcccgaaggaccgcgcacctggtgcatgacccgcaagcccggtgcctga

SEQ ID NO: 36165 - DNA, 2604 bp, synthetic construct; identical to SEQ ID NO: 36163
  source 1..2604: mol_type = other DNA

SEQ ID NO: 36166 - DNA, 2928 bp, synthetic construct
  source 1..2928: mol_type = other DNA
atggccttaccagtgaccgccttgctcctgccgctggccttgctgctccacgccgccaggccgctcgaggaggacctgaagaacgtgttcccacctgaggtggccgtgttcgagcctagcgaggccgagatcagccacacccagaaagccaccctcgtgtgcctggctaccggcttctaccccgaccatgtggaactgtcttggtgggtcaacggcaaagaggtgcacagcggcgtgtctaccgacccccagccactgaaagaacagcccgccctgaacgacagccggtactgcctgagcagcagactgagagtgtccgccaccttctggcagaacccccggaaccacttcagatgccaggtgcagttctacggcctgagcgagaacgacgagtggacccaggacagagccaagcccgtgacccagatcgtgtctgccgaagcctggggcagagccgatgatgtgattaagatccactggcaggaaaagaagtccaacaccatcctgggcagccaggaaggcaacaccatgaagaccaacgacacctacatgaagttcagctggctgaccgtgcccgagaagtccctggacaaagaacacagatgcatcgtgcggcacgaaaacaacaagaacggcgtggaccaggaaatcatcttcccacccatcaagaccgatgtgattacaatggaccccaaggacaactgctccaaggacgccaacgataccctgctgctccagctgaccaacaccagcgcctactacatgtacttgttgctgctgctgaagtccgtggtgtacttcgccatcatcacatgctgcctgctgatggctatggtcaagcggaaggacagccggggaagggccaagcgatctggatctggagcaacaaacttctcactactcaaacaagcaggtgacgtggaggagaatcccgggcctactagcatggccttaccagtgaccgccttgctcctgccgctggccttgctgctccacgccgccaggccggacatccagatgacacagagccctagcagcctgtctgccagcgtgggagacagagtgaccatcacatgcaaggccagcgaccacatcaacaactggctggcctggtatcagcagaagcctggcaaggcccctaagctgctgatctacggcgctaccacactggaaacaggcgtgcccagcagattttctggcagcggctctggcaccgacttcaccctgacaatatccagcctccagcctgaggacttcgccacctactactgtcagcagagctggaacaccccttggacattcggccagggcaccaaggtggaaatcaagagaggcggaggcggaagtggaggcggaggatctggcggcggaggctctgaagttcagctggttgaatctggcggcggactggttcaacctggcggatctctgagactgagctgtgccgcctctggctacacctttagcagctactgggtcaactgggttcgacaggcccctggcaaaggactggaatgggtcgcccaaatctatcccggcgacggcgacaccaactacaacggcaagttcaagggcagattcaccatcagccgggacaacagcaagaacaccctgtacctccagatgaactccctgagagccgaggacaccgccgtgtactattgtgccagatccatcaccaccgtcgtgggctgcgctatggattattggggccagggaaccctggtcaccgtgtcctctacgcgtatccagaaccctgatcctgccgtgtaccagctgcgggatagcaagagcagcgacaagagcgtgtgtctgttcaccgacttcgacagccagaccaacgtgtcccagagcaaggactccgacgtgtacatcaccgataagaccgtgctggacatgcggagcatggacttcaagagcaactccgccgtggcctggtccaacaagtccgatttcgcctgcgccaacgccttcaacaacagcattatccccgaggacacattcttcccaagccccgagagcagcgactccaccgaccacgtgaagcccaaagagacagagaacaccaagcagcccagcaagagctgccacaagcccaaggccatcgtgcacaccgagaaagtgaacatgatgagcctgaccgtgctgggcctgcggatgctgttcgccaaaaccgtggccgtgaacttcctgctgaccgccaagctgttcttcctcctcaccgcccgcgccaagagaagcggatctggcgtgaagcagaccctgaatttcgacctgctgaagctggctggcgacgtggaatccaacccaggcccttctagaggccatatgaccgagtacaagcccacggtgcgcctcgccacccgcgacgacgtccccagggccgtacgcaccctcgccgccgcgttcgccgactaccccgccacgcgccacaccgtcgatccggaccgccacatcgagcgggtcaccgagctgcaagaactcttcctcacgcgcgtcgggctcgacatcggcaaggtgtgggtcgcggacgacggcgccgcggtggcggtctggaccacgccggagagcgtcgaagcgggggcggtgttcgccgagatcggcccgcgcatggccgagttgagcggttcccggctggccgcgcagcaacagatggaaggcctcctggcgccgcaccggcccaaggagcccgcgtggttcctggccaccgtcggcgtctcgcccgaccaccagggcaagggtctgggcagcgccgtcgtgctccccggagtggaggcggccgagcgcgccggggtgcccgccttcctggagacctccgcgccccgcaacctccccttctacgagcggctcggcttcaccgtcaccgccgacgtcgaggtgcccgaaggaccgcgcacctggtgcatgacccgcaagcccggtgcctga

SEQ ID NO: 36167 - DNA, 2928 bp, synthetic construct
  source 1..2928: mol_type = other DNA
atggccttaccagtgaccgccttgctcctgccgctggccttgctgctccacgccgccaggccgctcgagatccagaaccctgatcctgccgtgtaccagctgcgggatagcaagagcagcgacaagagcgtgtgtctgttcaccgacttcgacagccagaccaacgtgtcccagagcaaggactccgacgtgtacatcaccgataagaccgtgctggacatgcggagcatggacttcaagagcaactccgccgtggcctggtccaacaagtccgatttcgcctgcgccaacgccttcaacaacagcattatccccgaggacacattcttcccaagccccgagagcagcgactccaccgaccacgtgaagcccaaagagacagagaacaccaagcagcccagcaagagctgccacaagcccaaggccatcgtgcacaccgagaaagtgaacatgatgagcctgaccgtgctgggcctgcggatgctgttcgccaaaaccgtggccgtgaacttcctgctgaccgccaagctgttcttcctcctcaccgccagggccaagcgatctggatctggagcaacaaacttctcactactcaaacaagcaggtgacgtggaggagaatcccgggcctactagcatggccttaccagtgaccgccttgctcctgccgctggccttgctgctccacgccgccaggccggacatccagatgacacagagccctagcagcctgtctgccagcgtgggagacagagtgaccatcacatgcaaggccagcgaccacatcaacaactggctggcctggtatcagcagaagcctggcaaggcccctaagctgctgatctacggcgctaccacactggaaacaggcgtgcccagcagattttctggcagcggctctggcaccgacttcaccctgacaatatccagcctccagcctgaggacttcgccacctactactgtcagcagagctggaacaccccttggacattcggccagggcaccaaggtggaaatcaagagaggcggaggcggaagtggaggcggaggatctggcggcggaggctctgaagttcagctggttgaatctggcggcggactggttcaacctggcggatctctgagactgagctgtgccgcctctggctacacctttagcagctactgggtcaactgggttcgacaggcccctggcaaaggactggaatgggtcgcccaaatctatcccggcgacggcgacaccaactacaacggcaagttcaagggcagattcaccatcagccgggacaacagcaagaacaccctgtacctccagatgaactccctgagagccgaggacaccgccgtgtactattgtgccagatccatcaccaccgtcgtgggctgcgctatggattattggggccagggaaccctggtcaccgtgtcctctacgcgtgaggacctgaagaacgtgttcccacctgaggtggccgtgttcgagcctagcgaggccgagatcagccacacccagaaagccaccctcgtgtgcctggctaccggcttctaccccgaccatgtggaactgtcttggtgggtcaacggcaaagaggtgcacagcggcgtgtctaccgacccccagccactgaaagaacagcccgccctgaacgacagccggtactgcctgagcagcagactgagagtgtccgccaccttctggcagaacccccggaaccacttcagatgccaggtgcagttctacggcctgagcgagaacgacgagtggacccaggacagagccaagcccgtgacccagatcgtgtctgccgaagcctggggcagagccgatgatgtgattaagatccactggcaggaaaagaagtccaacaccatcctgggcagccaggaaggcaacaccatgaagaccaacgacacctacatgaagttcagctggctgaccgtgcccgagaagtccctggacaaagaacacagatgcatcgtgcggcacgaaaacaacaagaacggcgtggaccaggaaatcatcttcccacccatcaagaccgatgtgattacaatggaccccaaggacaactgctccaaggacgccaacgataccctgctgctccagctgaccaacaccagcgcctactacatgtacttgttgctgctgctgaagtccgtggtgtacttcgccatcatcacatgctgcctgctgatggctatggtcaagcggaaggacagccggggacgcgccaagagaagcggatctggcgtgaagcagaccctgaatttcgacctgctgaagctggctggcgacgtggaatccaacccaggcccttctagaggccatatgaccgagtacaagcccacggtgcgcctcgccacccgcgacgacgtccccagggccgtacgcaccctcgccgccgcgttcgccgactaccccgccacgcgccacaccgtcgatccggaccgccacatcgagcgggtcaccgagctgcaagaactcttcctcacgcgcgtcgggctcgacatcggcaaggtgtgggtcgcggacgacggcgccgcggtggcggtctggaccacgccggagagcgtcgaagcgggggcggtgttcgccgagatcggcccgcgcatggccgagttgagcggttcccggctggccgcgcagcaacagatggaaggcctcctggcgccgcaccggcccaaggagcccgcgtggttcctggccaccgtcggcgtctcgcccgaccaccagggcaagggtctgggcagcgccgtcgtgctccccggagtggaggcggccgagcgcgccggggtgcccgccttcctggagacctccgcgccccgcaacctccccttctacgagcggctcggcttcaccgtcaccgccgacgtcgaggtgcccgaaggaccgcgcacctggtgcatgacccgcaagcccggtgcctga

SEQ ID NO: 36168 - DNA, 2922 bp, synthetic construct
  source 1..2922: mol_type = other DNA
atggccttaccagtgaccgccttgctcctgccgctggccttgctgctccacgccgccaggccgctcgaggaggacctgaagaacgtgttcccacctgaggtggccgtgttcgagcctagcgaggccgagatcagccacacccagaaagccaccctcgtgtgcctggctaccggcttctaccccgaccatgtggaactgtcttggtgggtcaacggcaaagaggtgcacagcggcgtgtgtaccgacccccagccactgaaagaacagcccgccctgaacgacagccggtactgcctgagcagcagactgagagtgtccgccaccttctggcagaacccccggaaccacttcagatgccaggtgcagttctacggcctgagcgagaacgacgagtggacccaggacagagccaagcccgtgacccagatcgtgtctgccgaagcctggggcagagccgatgatgtgattaagatccactggcaggaaaagaagtccaacaccatcctgggcagccaggaaggcaacaccatgaagaccaacgacacctacatgaagttcagctggctgaccgtgcccgagaagtccctggacaaagaacacagatgcatcgtgcggcacgaaaacaacaagaacggcgtggaccaggaaatcatcttcccacccatcaagaccgatgtgattacaatggaccccaaggacaactgctccaaggacgccaacgataccctgctgctccagctgaccaacaccagcgcctactacatgtacttgttgctgctgctgaagtccgtggtgtacttcgccatcatcacatgctgcctgctgcggagaaccgccttctgctgcaacggcgagaagtctagggccaagcgatctggatctggagcaacaaacttctcactactcaaacaagcaggtgacgtggaggagaatcccgggcctactagcatggccttaccagtgaccgccttgctcctgccgctggccttgctgctccacgccgccaggccggacatccagatgacacagagccctagcagcctgtctgccagcgtgggagacagagtgaccatcacatgcaaggccagcgaccacatcaacaactggctggcctggtatcagcagaagcctggcaaggcccctaagctgctgatctacggcgctaccacactggaaacaggcgtgcccagcagattttctggcagcggctctggcaccgacttcaccctgacaatatccagcctccagcctgaggacttcgccacctactactgtcagcagagctggaacaccccttggacattcggccagggcaccaaggtggaaatcaagagaggcggaggcggaagtggaggcggaggatctggcggcggaggctctgaagttcagctggttgaatctggcggcggactggttcaacctggcggatctctgagactgagctgtgccgcctctggctacacctttagcagctactgggtcaactgggttcgacaggcccctggcaaaggactggaatgggtcgcccaaatctatcccggcgacggcgacaccaactacaacggcaagttcaagggcagattcaccatcagccgggacaacagcaagaacaccctgtacctccagatgaactccctgagagccgaggacaccgccgtgtactattgtgccagatccatcaccaccgtcgtgggctgcgctatggattattggggccagggaaccctggtcaccgtgtcctctacgcgtatccagaaccctgatcctgccgtgtaccagctgcgggatagcaagagcagcgacaagagcgtgtgtctgttcaccgacttcgacagccagaccaacgtgtcccagagcaaggactccgacgtgtacatcaccgataagtgcgtgctggacatgcggagcatggacttcaagagcaactccgccgtggcctggtccaacaagtccgatttcgcctgcgccaacgccttcaacaacagcattatccccgaggacacattcttcccaagccccgagagcagcgactccaccgaccacgtgaagcccaaagagacagagaacaccaagcagcccagcaagagctgccacaagcccaaggccatcgtgcacaccgagaaagtgaacatgatgagcctgaccgtgctgggcctgcggatgctgttcgccaaaaccgtggccgtgaacttcctgctgaccgccaagctgttcttcctccgcgccaagagaagcggatctggcgtgaagcagaccctgaatttcgacctgctgaagctggctggcgacgtggaatccaacccaggcccttctagaggccatatgaccgagtacaagcccacggtgcgcctcgccacccgcgacgacgtccccagggccgtacgcaccctcgccgccgcgttcgccgactaccccgccacgcgccacaccgtcgatccggaccgccacatcgagcgggtcaccgagctgcaagaactcttcctcacgcgcgtcgggctcgacatcggcaaggtgtgggtcgcggacgacggcgccgcggtggcggtctggaccacgccggagagcgtcgaagcgggggcggtgttcgccgagatcggcccgcgcatggccgagttgagcggttcccggctggccgcgcagcaacagatggaaggcctcctggcgccgcaccggcccaaggagcccgcgtggttcctggccaccgtcggcgtctcgcccgaccaccagggcaagggtctgggcagcgccgtcgtgctccccggagtggaggcggccgagcgcgccggggtgcccgccttcctggagacctccgcgccccgcaacctccccttctacgagcggctcggcttcaccgtcaccgccgacgtcgaggtgcccgaaggaccgcgcacctggtgcatgacccgcaagcccggtgcctga

SEQ ID NO: 36169 - DNA, 2922 bp, synthetic construct
  source 1..2922: mol_type = other DNA
atggccttaccagtgaccgccttgctcctgccgctggccttgctgctccacgccgccaggccgctcgagatccagaaccctgatcctgccgtgtaccagctgcgggatagcaagagcagcgacaagagcgtgtgtctgttcaccgacttcgacagccagaccaacgtgtcccagagcaaggactccgacgtgtacatcaccgataagtgcgtgctggacatgcggagcatggacttcaagagcaactccgccgtggcctggtccaacaagtccgatttcgcctgcgccaacgccttcaacaacagcattatccccgaggacacattcttcccaagccccgagagcagcgactccaccgaccacgtgaagcccaaagagacagagaacaccaagcagcccagcaagagctgccacaagcccaaggccatcgtgcacaccgagaaagtgaacatgatgagcctgaccgtgctgggcctgcggatgctgttcgccaaaaccgtggccgtgaacttcctgctgaccgccaagctgttcttcctcagggccaagcgatctggatctggagcaacaaacttctcactactcaaacaagcaggtgacgtggaggagaatcccgggcctactagcatggccttaccagtgaccgccttgctcctgccgctggccttgctgctccacgccgccaggccggacatccagatgacacagagccctagcagcctgtctgccagcgtgggagacagagtgaccatcacatgcaaggccagcgaccacatcaacaactggctggcctggtatcagcagaagcctggcaaggcccctaagctgctgatctacggcgctaccacactggaaacaggcgtgcccagcagattttctggcagcggctctggcaccgacttcaccctgacaatatccagcctccagcctgaggacttcgccacctactactgtcagcagagctggaacaccccttggacattcggccagggcaccaaggtggaaatcaagagaggcggaggcggaagtggaggcggaggatctggcggcggaggctctgaagttcagctggttgaatctggcggcggactggttcaacctggcggatctctgagactgagctgtgccgcctctggctacacctttagcagctactgggtcaactgggttcgacaggcccctggcaaaggactggaatgggtcgcccaaatctatcccggcgacggcgacaccaactacaacggcaagttcaagggcagattcaccatcagccgggacaacagcaagaacaccctgtacctccagatgaactccctgagagccgaggacaccgccgtgtactattgtgccagatccatcaccaccgtcgtgggctgcgctatggattattggggccagggaaccctggtcaccgtgtcctctacgcgtgaggacctgaagaacgtgttcccacctgaggtggccgtgttcgagcctagcgaggccgagatcagccacacccagaaagccaccctcgtgtgcctggctaccggcttctaccccgaccatgtggaactgtcttggtgggtcaacggcaaagaggtgcacagcggcgtgtgtaccgacccccagccactgaaagaacagcccgccctgaacgacagccggtactgcctgagcagcagactgagagtgtccgccaccttctggcagaacccccggaaccacttcagatgccaggtgcagttctacggcctgagcgagaacgacgagtggacccaggacagagccaagcccgtgacccagatcgtgtctgccgaagcctggggcagagccgatgatgtgattaagatccactggcaggaaaagaagtccaacaccatcctgggcagccaggaaggcaacaccatgaagaccaacgacacctacatgaagttcagctggctgaccgtgcccgagaagtccctggacaaagaacacagatgcatcgtgcggcacgaaaacaacaagaacggcgtggaccaggaaatcatcttcccacccatcaagaccgatgtgattacaatggaccccaaggacaactgctccaaggacgccaacgataccctgctgctccagctgaccaacaccagcgcctactacatgtacttgttgctgctgctgaagtccgtggtgtacttcgccatcatcacatgctgcctgctgcggagaaccgccttctgctgcaacggcgagaagtctcgcgccaagagaagcggatctggcgtgaagcagaccctgaatttcgacctgctgaagctggctggcgacgtggaatccaacccaggcccttctagaggccatatgaccgagtacaagcccacggtgcgcctcgccacccgcgacgacgtccccagggccgtacgcaccctcgccgccgcgttcgccgactaccccgccacgcgccacaccgtcgatccggaccgccacatcgagcgggtcaccgagctgcaagaactcttcctcacgcgcgtcgggctcgacatcggcaaggtgtgggtcgcggacgacggcgccgcggtggcggtctggaccacgccggagagcgtcgaagcgggggcggtgttcgccgagatcggcccgcgcatggccgagttgagcggttcccggctggccgcgcagcaacagatggaaggcctcctggcgccgcaccggcccaaggagcccgcgtggttcctggccaccgtcggcgtctcgcccgaccaccagggcaagggtctgggcagcgccgtcgtgctccccggagtggaggcggccgagcgcgccggggtgcccgccttcctggagacctccgcgccccgcaacctccccttctacgagcggctcggcttcaccgtcaccgccgacgtcgaggtgcccgaaggaccgcgcacctggtgcatgacccgcaagcccggtgcctga

SEQ ID NO: 36170 - DNA, 2922 bp, synthetic construct
  source 1..2922: mol_type = other DNA
atggccttaccagtgaccgccttgctcctgccgctggccttgctgctccacgccgccaggccgctcgaggaggacctgaagaacgtgttcccacctgaggtggccgtgttcgagcctagcgaggccgagatcagccacacccagaaagccaccctcgtgtgcctggctaccggcttctaccccgaccatgtggaactgtcttggtgggtcaacggcaaagaggtgcacagcggcgtgtctaccgacccccagccactgaaagaacagcccgccctgaacgacagccggtactgcctgagcagcagactgagagtgtccgccaccttctggcagaacccccggaaccacttcagatgccaggtgcagttctacggcctgagcgagaacgacgagtggacccaggacagagccaagcccgtgacccagatcgtgtctgccgaagcctggggcagagccgatgatgtgattaagatccactggcaggaaaagaagtccaacaccatcctgggcagccaggaaggcaacaccatgaagaccaacgacacctacatgaagttcagctggctgaccgtgcccgagaagtccctggacaaagaacacagatgcatcgtgcggcacgaaaacaacaagaacggcgtggaccaggaaatcatcttcccacccatcaagaccgatgtgattacaatggaccccaaggacaactgctccaaggacgccaacgataccctgctgctccagctgaccaacaccagcgcctactacatgtacttgttgctgctgctgaagtccgtggtgtacttcgccatcatcacatgctgcctgctgcggagaaccgccttctgctgcaacggcgagaagtctagggccaagcgatctggatctggagcaacaaacttctcactactcaaacaagcaggtgacgtggaggagaatcccgggcctactagcatggccttaccagtgaccgccttgctcctgccgctggccttgctgctccacgccgccaggccggacatccagatgacacagagccctagcagcctgtctgccagcgtgggagacagagtgaccatcacatgcaaggccagcgaccacatcaacaactggctggcctggtatcagcagaagcctggcaaggcccctaagctgctgatctacggcgctaccacactggaaacaggcgtgcccagcagattttctggcagcggctctggcaccgacttcaccctgacaatatccagcctccagcctgaggacttcgccacctactactgtcagcagagctggaacaccccttggacattcggccagggcaccaaggtggaaatcaagagaggcggaggcggaagtggaggcggaggatctggcggcggaggctctgaagttcagctggttgaatctggcggcggactggttcaacctggcggatctctgagactgagctgtgccgcctctggctacacctttagcagctactgggtcaactgggttcgacaggcccctggcaaaggactggaatgggtcgcccaaatctatcccggcgacggcgacaccaactacaacggcaagttcaagggcagattcaccatcagccgggacaacagcaagaacaccctgtacctccagatgaactccctgagagccgaggacaccgccgtgtactattgtgccagatccatcaccaccgtcgtgggctgcgctatggattattggggccagggaaccctggtcaccgtgtcctctacgcgtatccagaaccctgatcctgccgtgtaccagctgcgggatagcaagagcagcgacaagagcgtgtgtctgttcaccgacttcgacagccagaccaacgtgtcccagagcaaggactccgacgtgtacatcaccgataagaccgtgctggacatgcggagcatggacttcaagagcaactccgccgtggcctggtccaacaagtccgatttcgcctgcgccaacgccttcaacaacagcattatccccgaggacacattcttcccaagccccgagagcagcgactccaccgaccacgtgaagcccaaagagacagagaacaccaagcagcccagcaagagctgccacaagcccaaggccatcgtgcacaccgagaaagtgaacatgatgagcctgaccgtgctgggcctgcggatgctgttcgccaaaaccgtggccgtgaacttcctgctgaccgccaagctgttcttcctccgcgccaagagaagcggatctggcgtgaagcagaccctgaatttcgacctgctgaagctggctggcgacgtggaatccaacccaggcccttctagaggccatatgaccgagtacaagcccacggtgcgcctcgccacccgcgacgacgtccccagggccgtacgcaccctcgccgccgcgttcgccgactaccccgccacgcgccacaccgtcgatccggaccgccacatcgagcgggtcaccgagctgcaagaactcttcctcacgcgcgtcgggctcgacatcggcaaggtgtgggtcgcggacgacggcgccgcggtggcggtctggaccacgccggagagcgtcgaagcgggggcggtgttcgccgagatcggcccgcgcatggccgagttgagcggttcccggctggccgcgcagcaacagatggaaggcctcctggcgccgcaccggcccaaggagcccgcgtggttcctggccaccgtcggcgtctcgcccgaccaccagggcaagggtctgggcagcgccgtcgtgctccccggagtggaggcggccgagcgcgccggggtgcccgccttcctggagacctccgcgccccgcaacctccccttctacgagcggctcggcttcaccgtcaccgccgacgtcgaggtgcccgaaggaccgcgcacctggtgcatgacccgcaagcccggtgcctga

SEQ ID NO: 36171 - DNA, 2922 bp, synthetic construct
  source 1..2922: mol_type = other DNA
atggccttaccagtgaccgccttgctcctgccgctggccttgctgctccacgccgccaggccgctcgagatccagaaccctgatcctgccgtgtaccagctgcgggatagcaagagcagcgacaagagcgtgtgtctgttcaccgacttcgacagccagaccaacgtgtcccagagcaaggactccgacgtgtacatcaccgataagaccgtgctggacatgcggagcatggacttcaagagcaactccgccgtggcctggtccaacaagtccgatttcgcctgcgccaacgccttcaacaacagcattatccccgaggacacattcttcccaagccccgagagcagcgactccaccgaccacgtgaagcccaaagagacagagaacaccaagcagcccagcaagagctgccacaagcccaaggccatcgtgcacaccgagaaagtgaacatgatgagcctgaccgtgctgggcctgcggatgctgttcgccaaaaccgtggccgtgaacttcctgctgaccgccaagctgttcttcctcagggccaagcgatctggatctggagcaacaaacttctcactactcaaacaagcaggtgacgtggaggagaatcccgggcctactagcatggccttaccagtgaccgccttgctcctgccgctggccttgctgctccacgccgccaggccggacatccagatgacacagagccctagcagcctgtctgccagcgtgggagacagagtgaccatcacatgcaaggccagcgaccacatcaacaactggctggcctggtatcagcagaagcctggcaaggcccctaagctgctgatctacggcgctaccacactggaaacaggcgtgcccagcagattttctggcagcggctctggcaccgacttcaccctgacaatatccagcctccagcctgaggacttcgccacctactactgtcagcagagctggaacaccccttggacattcggccagggcaccaaggtggaaatcaagagaggcggaggcggaagtggaggcggaggatctggcggcggaggctctgaagttcagctggttgaatctggcggcggactggttcaacctggcggatctctgagactgagctgtgccgcctctggctacacctttagcagctactgggtcaactgggttcgacaggcccctggcaaaggactggaatgggtcgcccaaatctatcccggcgacggcgacaccaactacaacggcaagttcaagggcagattcaccatcagccgggacaacagcaagaacaccctgtacctccagatgaactccctgagagccgaggacaccgccgtgtactattgtgccagatccatcaccaccgtcgtgggctgcgctatggattattggggccagggaaccctggtcaccgtgtcctctacgcgtgaggacctgaagaacgtgttcccacctgaggtggccgtgttcgagcctagcgaggccgagatcagccacacccagaaagccaccctcgtgtgcctggctaccggcttctaccccgaccatgtggaactgtcttggtgggtcaacggcaaagaggtgcacagcggcgtgtctaccgacccccagccactgaaagaacagcccgccctgaacgacagccggtactgcctgagcagcagactgagagtgtccgccaccttctggcagaacccccggaaccacttcagatgccaggtgcagttctacggcctgagcgagaacgacgagtggacccaggacagagccaagcccgtgacccagatcgtgtctgccgaagcctggggcagagccgatgatgtgattaagatccactggcaggaaaagaagtccaacaccatcctgggcagccaggaaggcaacaccatgaagaccaacgacacctacatgaagttcagctggctgaccgtgcccgagaagtccctggacaaagaacacagatgcatcgtgcggcacgaaaacaacaagaacggcgtggaccaggaaatcatcttcccacccatcaagaccgatgtgattacaatggaccccaaggacaactgctccaaggacgccaacgataccctgctgctccagctgaccaacaccagcgcctactacatgtacttgttgctgctgctgaagtccgtggtgtacttcgccatcatcacatgctgcctgctgcggagaaccgccttctgctgcaacggcgagaagtctcgcgccaagagaagcggatctggcgtgaagcagaccctgaatttcgacctgctgaagctggctggcgacgtggaatccaacccaggcccttctagaggccatatgaccgagtacaagcccacggtgcgcctcgccacccgcgacgacgtccccagggccgtacgcaccctcgccgccgcgttcgccgactaccccgccacgcgccacaccgtcgatccggaccgccacatcgagcgggtcaccgagctgcaagaactcttcctcacgcgcgtcgggctcgacatcggcaaggtgtgggtcgcggacgacggcgccgcggtggcggtctggaccacgccggagagcgtcgaagcgggggcggtgttcgccgagatcggcccgcgcatggccgagttgagcggttcccggctggccgcgcagcaacagatggaaggcctcctggcgccgcaccggcccaaggagcccgcgtggttcctggccaccgtcggcgtctcgcccgaccaccagggcaagggtctgggcagcgccgtcgtgctccccggagtggaggcggccgagcgcgccggggtgcccgccttcctggagacctccgcgccccgcaacctccccttctacgagcggctcggcttcaccgtcaccgccgacgtcgaggtgcccgaaggaccgcgcacctggtgcatgacccgcaagcccggtgcctga

SEQ ID NO: 36172 - DNA, 2616 bp, synthetic construct
  source 1..2616: mol_type = other DNA
atggccttaccagtgaccgccttgctcctgccgctggccttgctgctccacgccgccaggccgctcgaggaggacctgaagaacgtgttcccacctgaggtggccgtgttcgagcctagcaaggccgagatcgcccacacccagaaagccaccctcgtgtgcctggctaccggcttctaccccgaccatgtggaactgtcttggtgggtcaacggcaaagaggtgcacagcggcgtgtgtaccgacccccagccactgaaagaacagcccgccctgaacgacagccggtactgcctgagcagcagactgagagtgtccgccaccttctggcagaacccccggaaccacttcagatgccaggtgcagttctacggcctgagcgagaacgacgagtggacccaggacagagccaagcccgtgacccagatcgtgtctgccgaagcctggggcagagccgattgcggcatcaccagcgccagctaccaccagggcgtgctgagcgccaccatcctgtacgagatcctgctgggcaaggccaccctgtacgccgtgctggtgtctgccctggtgctgatggctatggtcaagcggaaggacagccggggaagggccaagcgatctggatctggagcaacaaacttctcactactcaaacaagcaggtgacgtggaggagaatcccgggcctactagcatggccttaccagtgaccgccttgctcctgccgctggccttgctgctccacgccgccaggccggacatccagatgacacagagccctagcagcctgtctgccagcgtgggagacagagtgaccatcacatgcaaggccagcgaccacatcaacaactggctggcctggtatcagcagaagcctggcaaggcccctaagctgctgatctacggcgctaccacactggaaacaggcgtgcccagcagattttctggcagcggctctggcaccgacttcaccctgacaatatccagcctccagcctgaggacttcgccacctactactgtcagcagagctggaacaccccttggacattcggccagggcaccaaggtggaaatcaagagaggcggaggcggaagtggaggcggaggatctggcggcggaggctctgaagttcagctggttgaatctggcggcggactggttcaacctggcggatctctgagactgagctgtgccgcctctggctacacctttagcagctactgggtcaactgggttcgacaggcccctggcaaaggactggaatgggtcgcccaaatctatcccggcgacggcgacaccaactacaacggcaagttcaagggcagattcaccatcagccgggacaacagcaagaacaccctgtacctccagatgaactccctgagagccgaggacaccgccgtgtactattgtgccagatccatcaccaccgtcgtgggctgcgctatggattattggggccagggaaccctggtcaccgtgtcctctacgcgtatccagaaccctgatcctgccgtgtaccagctgcgggatagcaagagcagcgacaagagcgtgtgtctgttcaccgacttcgacagccagaccaacgtgtcccagagcaaggactccgacgtgtacatcaccgataagtgcgtgctggacatgcggagcatggacttcaagagcaactccgccgtggcctggtccaacaagtccgatttcgcctgcgccaacgccttcaacaacagcattatccccgaggacacattcttcccaagcagcgacgtgccctgcgacgtgaagctggtggaaaagagcttcgagacagacaccaacctgaacttccagaacctgagcgtgatcggcttcagaatcctgctgctgaaagtggccggctttaacctgctgatgaccctgcggctgtggtccagccgcgccaagagaagcggatctggcgtgaagcagaccctgaatttcgacctgctgaagctggctggcgacgtggaatccaacccaggcccttctagaggccatatgaccgagtacaagcccacggtgcgcctcgccacccgcgacgacgtccccagggccgtacgcaccctcgccgccgcgttcgccgactaccccgccacgcgccacaccgtcgatccggaccgccacatcgagcgggtcaccgagctgcaagaactcttcctcacgcgcgtcgggctcgacatcggcaaggtgtgggtcgcggacgacggcgccgcggtggcggtctggaccacgccggagagcgtcgaagcgggggcggtgttcgccgagatcggcccgcgcatggccgagttgagcggttcccggctggccgcgcagcaacagatggaaggcctcctggcgccgcaccggcccaaggagcccgcgtggttcctggccaccgtcggcgtctcgcccgaccaccagggcaagggtctgggcagcgccgtcgtgctccccggagtggaggcggccgagcgcgccggggtgcccgccttcctggagacctccgcgccccgcaacctccccttctacgagcggctcggcttcaccgtcaccgccgacgtcgaggtgcccgaaggaccgcgcacctggtgcatgacccgcaagcccggtgcctga

SEQ ID NO: 36173 - DNA, 2616 bp, synthetic construct
  source 1..2616: mol_type = other DNA
atggccttaccagtgaccgccttgctcctgccgctggccttgctgctccacgccgccaggccgctcgagatccagaaccctgatcctgccgtgtaccagctgcgggatagcaagagcagcgacaagagcgtgtgtctgttcaccgacttcgacagccagaccaacgtgtcccagagcaaggactccgacgtgtacatcaccgataagtgcgtgctggacatgcggagcatggacttcaagagcaactccgccgtggcctggtccaacaagtccgatttcgcctgcgccaacgccttcaacaacagcattatccccgaggacacattcttcccaagcagcgacgtgccctgcgacgtgaagctggtggaaaagagcttcgagacagacaccaacctgaacttccagaacctgagcgtgatcggcttcagaatcctgctgctgaaagtggccggctttaacctgctgatgaccctgcggctgtggtccagcagggccaagcgatctggatctggagcaacaaacttctcactactcaaacaagcaggtgacgtggaggagaatcccgggcctactagcatggccttaccagtgaccgccttgctcctgccgctggccttgctgctccacgccgccaggccggacatccagatgacacagagccctagcagcctgtctgccagcgtgggagacagagtgaccatcacatgcaaggccagcgaccacatcaacaactggctggcctggtatcagcagaagcctggcaaggcccctaagctgctgatctacggcgctaccacactggaaacaggcgtgcccagcagattttctggcagcggctctggcaccgacttcaccctgacaatatccagcctccagcctgaggacttcgccacctactactgtcagcagagctggaacaccccttggacattcggccagggcaccaaggtggaaatcaagagaggcggaggcggaagtggaggcggaggatctggcggcggaggctctgaagttcagctggttgaatctggcggcggactggttcaacctggcggatctctgagactgagctgtgccgcctctggctacacctttagcagctactgggtcaactgggttcgacaggcccctggcaaaggactggaatgggtcgcccaaatctatcccggcgacggcgacaccaactacaacggcaagttcaagggcagattcaccatcagccgggacaacagcaagaacaccctgtacctccagatgaactccctgagagccgaggacaccgccgtgtactattgtgccagatccatcaccaccgtcgtgggctgcgctatggattattggggccagggaaccctggtcaccgtgtcctctacgcgtgaggacctgaagaacgtgttcccacctgaggtggccgtgttcgagcctagcaaggccgagatcgcccacacccagaaagccaccctcgtgtgcctggctaccggcttctaccccgaccatgtggaactgtcttggtgggtcaacggcaaagaggtgcacagcggcgtgtgtaccgacccccagccactgaaagaacagcccgccctgaacgacagccggtactgcctgagcagcagactgagagtgtccgccaccttctggcagaacccccggaaccacttcagatgccaggtgcagttctacggcctgagcgagaacgacgagtggacccaggacagagccaagcccgtgacccagatcgtgtctgccgaagcctggggcagagccgattgcggcatcaccagcgccagctaccaccagggcgtgctgagcgccaccatcctgtacgagatcctgctgggcaaggccaccctgtacgccgtgctggtgtctgccctggtgctgatggctatggtcaagcggaaggacagccggggacgcgccaagagaagcggatctggcgtgaagcagaccctgaatttcgacctgctgaagctggctggcgacgtggaatccaacccaggcccttctagaggccatatgaccgagtacaagcccacggtgcgcctcgccacccgcgacgacgtccccagggccgtacgcaccctcgccgccgcgttcgccgactaccccgccacgcgccacaccgtcgatccggaccgccacatcgagcgggtcaccgagctgcaagaactcttcctcacgcgcgtcgggctcgacatcggcaaggtgtgggtcgcggacgacggcgccgcggtggcggtctggaccacgccggagagcgtcgaagcgggggcggtgttcgccgagatcggcccgcgcatggccgagttgagcggttcccggctggccgcgcagcaacagatggaaggcctcctggcgccgcaccggcccaaggagcccgcgtggttcctggccaccgtcggcgtctcgcccgaccaccagggcaagggtctgggcagcgccgtcgtgctccccggagtggaggcggccgagcgcgccggggtgcccgccttcctggagacctccgcgccccgcaacctccccttctacgagcggctcggcttcaccgtcaccgccgacgtcgaggtgcccgaaggaccgcgcacctggtgcatgacccgcaagcccggtgcctga

SEQ ID NO: 36174 - DNA, 2295 bp, synthetic construct
  source 1..2295: mol_type = other DNA
atggccttaccagtgaccgccttgctcctgccgctggccttgctgctccacgccgccaggccgctcgagcagagttttgggttgttggaccctaaattgtgctatctgttggacggaatcctgttcatttacggagtgatcctgaccgcattgttcctgcgggttaagttttccagatccgcagacgcacccgcttaccaacaagggcagaaccaactctacaatgaacttaatttggggcggagggaagagtacgacgttctggacaaaaggaggggacgagatcccgagatgggcggaaagcctcagcgaaggaagaatccgcaagaggggctttataacgaactccagaaagataaaatggcagaagcctatagtgagattgggatgaagggagaaaggaggaggggtaaaggtcacgatgggttgtaccaaggattgagcacagccactaaagatacctatgatgcgctccacatgcaggccctgccgccaagaagggccaagcgatctggatctggagcaacaaacttctcactactcaaacaagcaggtgacgtggaggagaatcccgggcctactagcatggccttaccagtgaccgccttgctcctgccgctggccttgctgctccacgccgccaggccggacatccagatgacacagagccctagcagcctgtctgccagcgtgggagacagagtgaccatcacatgcaaggccagcgaccacatcaacaactggctggcctggtatcagcagaagcctggcaaggcccctaagctgctgatctacggcgctaccacactggaaacaggcgtgcccagcagattttctggcagcggctctggcaccgacttcaccctgacaatatccagcctccagcctgaggacttcgccacctactactgtcagcagagctggaacaccccttggacattcggccagggcaccaaggtggaaatcaagagaggcggaggcggaagtggaggcggaggatctggcggcggaggctctgaagttcagctggttgaatctggcggcggactggttcaacctggcggatctctgagactgagctgtgccgcctctggctacacctttagcagctactgggtcaactgggttcgacaggcccctggcaaaggactggaatgggtcgcccaaatctatcccggcgacggcgacaccaactacaacggcaagttcaagggcagattcaccatcagccgggacaacagcaagaacaccctgtacctccagatgaactccctgagagccgaggacaccgccgtgtactattgtgccagatccatcaccaccgtcgtgggctgcgctatggattattggggccagggaaccctggtcaccgtgtcctctacgcgtgagctgggagagcctcagctgtgctatatcctggacgccatcctgtttctgtacggcatcgtgctgaccctgctgtactgccggctgaagatccaagtgcggaaggccgccatcaccagctacgagaaatccgacggcgtgtacaccggcctgagcaccagaaatcaagagacatacgagacactgaagcacgaaaagcctccacaacgcgccaagagaagcggatctggcgtgaagcagaccctgaatttcgacctgctgaagctggctggcgacgtggaatccaacccaggcccttctagaggccatatgaccgagtacaagcccacggtgcgcctcgccacccgcgacgacgtccccagggccgtacgcaccctcgccgccgcgttcgccgactaccccgccacgcgccacaccgtcgatccggaccgccacatcgagcgggtcaccgagctgcaagaactcttcctcacgcgcgtcgggctcgacatcggcaaggtgtgggtcgcggacgacggcgccgcggtggcggtctggaccacgccggagagcgtcgaagcgggggcggtgttcgccgagatcggcccgcgcatggccgagttgagcggttcccggctggccgcgcagcaacagatggaaggcctcctggcgccgcaccggcccaaggagcccgcgtggttcctggccaccgtcggcgtctcgcccgaccaccagggcaagggtctgggcagcgccgtcgtgctccccggagtggaggcggccgagcgcgccggggtgcccgccttcctggagacctccgcgccccgcaacctccccttctacgagcggctcggcttcaccgtcaccgccgacgtcgaggtgcccgaaggaccgcgcacctggtgcatgacccgcaagcccggtgcctga

SEQ ID NO: 36175 - DNA, 2928 bp, synthetic construct; identical to SEQ ID NO: 36166
  source 1..2928: mol_type = other DNA

SEQ ID NO: 36176 - DNA, 2928 bp, synthetic construct; identical to SEQ ID NO: 36167
  source 1..2928: mol_type = other DNA

SEQ ID NO: 36177 - DNA, 2925 bp, synthetic construct
  source 1..2925: mol_type = other DNA
atggccttaccagtgaccgccttgctcctgccgctggccttgctgctccacgccgccaggccgctcgaggaggaggacctgaagaacgtgttcccacctgaggtggccgtgttcgagcctagcgaggccgagatcagccacacccagaaagccaccctcgtgtgcctggctaccggcttctaccccgaccatgtggaactgtcttggtgggtcaacggcaaagaggtgcacagcggcgtgtgtaccgacccccagccactgaaagaacagcccgccctgaacgacagccggtactgcctgagcagcagactgagagtgtccgccaccttctggcagaacccccggaaccacttcagatgccaggtgcagttctacggcctgagcgagaacgacgagtggacccaggacagagccaagcccgtgacccagatcgtgtctgccgaagcctggggcagagccgatgatgtgattaagatccactggcaggaaaagaagtccaacaccatcctgggcagccaggaaggcaacaccatgaagaccaacgacacctacatgaagttcagctggctgaccgtgcccgagaagtccctggacaaagaacacagatgcatcgtgcggcacgaaaacaacaagaacggcgtggaccaggaaatcatcttcccacccatcaagaccgatgtgattacaatggaccccaaggacaactgctccaaggacgccaacgataccctgctgctccagctgaccaacaccagcgcctactacatgtacttgttgctgctgctgaagtccgtggtgtacttcgccatcatcacatgctgcctgctgcggagaaccgccttctgctgcaacggcgagaagtctagggccaagcgatctggatctggagcaacaaacttctcactactcaaacaagcaggtgacgtggaggagaatcccgggcctactagcatggccttaccagtgaccgccttgctcctgccgctggccttgctgctccacgccgccaggccggacatccagatgacacagagccctagcagcctgtctgccagcgtgggagacagagtgaccatcacatgcaaggccagcgaccacatcaacaactggctggcctggtatcagcagaagcctggcaaggcccctaagctgctgatctacggcgctaccacactggaaacaggcgtgcccagcagattttctggcagcggctctggcaccgacttcaccctgacaatatccagcctccagcctgaggacttcgccacctactactgtcagcagagctggaacaccccttggacattcggccagggcaccaaggtggaaatcaagagaggcggaggcggaagtggaggcggaggatctggcggcggaggctctgaagttcagctggttgaatctggcggcggactggttcaacctggcggatctctgagactgagctgtgccgcctctggctacacctttagcagctactgggtcaactgggttcgacaggcccctggcaaaggactggaatgggtcgcccaaatctatcccggcgacggcgacaccaactacaacggcaagttcaagggcagattcaccatcagccgggacaacagcaagaacaccctgtacctccagatgaactccctgagagccgaggacaccgccgtgtactattgtgccagatccatcaccaccgtcgtgggctgcgctatggattattggggccagggaaccctggtcaccgtgtcctctacgcgtatccagaaccctgatcctgccgtgtaccagctgcgggatagcaagagcagcgacaagagcgtgtgtctgttcaccgacttcgacagccagaccaacgtgtcccagagcaaggactccgacgtgtacatcaccgataagtgcgtgctggacatgcggagcatggacttcaagagcaactccgccgtggcctggtccaacaagtccgatttcgcctgcgccaacgccttcaacaacagcattatccccgaggacacattcttcccaagccccgagagcagcgactccaccgaccacgtgaagcccaaagagacagagaacaccaagcagcccagcaagagctgccacaagcccaaggccatcgtgcacaccgagaaagtgaacatgatgagcctgaccgtgctgggcctgcggatgctgttcgccaaaaccgtggccgtgaacttcctgctgaccgccaagctgttcttcctccgcgccaagagaagcggatctggcgtgaagcagaccctgaatttcgacctgctgaagctggctggcgacgtggaatccaacccaggcccttctagaggccatatgaccgagtacaagcccacggtgcgcctcgccacccgcgacgacgtccccagggccgtacgcaccctcgccgccgcgttcgccgactaccccgccacgcgccacaccgtcgatccggaccgccacatcgagcgggtcaccgagctgcaagaactcttcctcacgcgcgtcgggctcgacatcggcaaggtgtgggtcgcggacgacggcgccgcggtggcggtctggaccacgccggagagcgtcgaagcgggggcggtgttcgccgagatcggcccgcgcatggccgagttgagcggttcccggctggccgcgcagcaacagatggaaggcctcctggcgccgcaccggcccaaggagcccgcgtggttcctggccaccgtcggcgtctcgcccgaccaccagggcaagggtctgggcagcgccgtcgtgctccccggagtggaggcggccgagcgcgccggggtgcccgccttcctggagacctccgcgccccgcaacctccccttctacgagcggctcggcttcaccgtcaccgccgacgtcgaggtgcccgaaggaccgcgcacctggtgcatgacccgcaagcccggtgcctga

SEQ ID NO: 36178 - DNA, 2925 bp, synthetic construct
  source 1..2925: mol_type = other DNA
atggccttaccagtgaccgccttgctcctgccgctggccttgctgctccacgccgccaggccgctcgagatccagaaccctgatcctgccgtgtaccagctgcgggatagcaagagcagcgacaagagcgtgtgtctgttcaccgacttcgacagccagaccaacgtgtcccagagcaaggactccgacgtgtacatcaccgataagtgcgtgctggacatgcggagcatggacttcaagagcaactccgccgtggcctggtccaacaagtccgatttcgcctgcgccaacgccttcaacaacagcattatccccgaggacacattcttcccaagccccgagagcagcgactccaccgaccacgtgaagcccaaagagacagagaacaccaagcagcccagcaagagctgccacaagcccaaggccatcgtgcacaccgagaaagtgaacatgatgagcctgaccgtgctgggcctgcggatgctgttcgccaaaaccgtggccgtgaacttcctgctgaccgccaagctgttcttcctcagggccaagcgatctggatctggagcaacaaacttctcactactcaaacaagcaggtgacgtggaggagaatcccgggcctactagcatggccttaccagtgaccgccttgctcctgccgctggccttgctgctccacgccgccaggccggacatccagatgacacagagccctagcagcctgtctgccagcgtgggagacagagtgaccatcacatgcaaggccagcgaccacatcaacaactggctggcctggtatcagcagaagcctggcaaggcccctaagctgctgatctacggcgctaccacactggaaacaggcgtgcccagcagattttctggcagcggctctggcaccgacttcaccctgacaatatccagcctccagcctgaggacttcgccacctactactgtcagcagagctggaacaccccttggacattcggccagggcaccaaggtggaaatcaagagaggcggaggcggaagtggaggcggaggatctggcggcggaggctctgaagttcagctggttgaatctggcggcggactggttcaacctggcggatctctgagactgagctgtgccgcctctggctacacctttagcagctactgggtcaactgggttcgacaggcccctggcaaaggactggaatgggtcgcccaaatctatcccggcgacggcgacaccaactacaacggcaagttcaagggcagattcaccatcagccgggacaacagcaagaacaccctgtacctccagatgaactccctgagagccgaggacaccgccgtgtactattgtgccagatccatcaccaccgtcgtgggctgcgctatggattattggggccagggaaccctggtcaccgtgtcctctacgcgtgaggaggacctgaagaacgtgttcccacctgaggtggccgtgttcgagcctagcgaggccgagatcagccacacccagaaagccaccctcgtgtgcctggctaccggcttctaccccgaccatgtggaactgtcttggtgggtcaacggcaaagaggtgcacagcggcgtgtgtaccgacccccagccactgaaagaacagcccgccctgaacgacagccggtactgcctgagcagcagactgagagtgtccgccaccttctggcagaacccccggaaccacttcagatgccaggtgcagttctacggcctgagcgagaacgacgagtggacccaggacagagccaagcccgtgacccagatcgtgtctgccgaagcctggggcagagccgatgatgtgattaagatccactggcaggaaaagaagtccaacaccatcctgggcagccaggaaggcaacaccatgaagaccaacgacacctacatgaagttcagctggctgaccgtgcccgagaagtccctggacaaagaacacagatgcatcgtgcggcacgaaaacaacaagaacggcgtggaccaggaaatcatcttcccacccatcaagaccgatgtgattacaatggaccccaaggacaactgctccaaggacgccaacgataccctgctgctccagctgaccaacaccagcgcctactacatgtacttgttgctgctgctgaagtccgtggtgtacttcgccatcatcacatgctgcctgctgcggagaaccgccttctgctgcaacggcgagaagtctcgcgccaagagaagcggatctggcgtgaagcagaccctgaatttcgacctgctgaagctggctggcgacgtggaatccaacccaggcccttctagaggccatatgaccgagtacaagcccacggtgcgcctcgccacccgcgacgacgtccccagggccgtacgcaccctcgccgccgcgttcgccgactaccccgccacgcgccacaccgtcgatccggaccgccacatcgagcgggtcaccgagctgcaagaactcttcctcacgcgcgtcgggctcgacatcggcaaggtgtgggtcgcggacgacggcgccgcggtggcggtctggaccacgccggagagcgtcgaagcgggggcggtgttcgccgagatcggcccgcgcatggccgagttgagcggttcccggctggccgcgcagcaacagatggaaggcctcctggcgccgcaccggcccaaggagcccgcgtggttcctggccaccgtcggcgtctcgcccgaccaccagggcaagggtctgggcagcgccgtcgtgctccccggagtggaggcggccgagcgcgccggggtgcccgccttcctggagacctccgcgccccgcaacctccccttctacgagcggctcggcttcaccgtcaccgccgacgtcgaggtgcccgaaggaccgcgcacctggtgcatgacccgcaagcccggtgcctga

SEQ ID NO: 36179 - DNA, 2616 bp, synthetic construct
  source 1..2616: mol_type = other DNA
atggccttaccagtgaccgccttgctcctgccgctggccttgctgctccacgccgccaggccgctcgaggaggacctgaagaacgtgttcccacctgaggtggccgtgttcgagcctagcgaggccgagatcagccacacccagaaagccaccctcgtgtgcctggctaccggcttctaccccgaccatgtggaactgtcttggtgggtcaacggcaaagaggtgcacagcggcgtgtctaccgacccccagccactgaaagaacagcccgccctgaacgacagccggtactgcctgagcagcagactgagagtgtccgccaccttctggcagaacccccggaaccacttcagatgccaggtgcagttctacggcctgagcgagaacgacgagtggacccaggacagagccaagcccgtgacccagatcgtgtctgccgaagcctggggcagagccgattgcggctttaccagcgagagctaccagcagggcgtgctgagcgccaccaacctgagcgtgatcggcttcagaatcctgctgctgaaagtggccggctttaacctgctgatgaccctgcggctgtggtccagcagggccaagcgatctggatctggagcaacaaacttctcactactcaaacaagcaggtgacgtggaggagaatcccgggcctactagcatggccttaccagtgaccgccttgctcctgccgctggccttgctgctccacgccgccaggccggacatccagatgacacagagccctagcagcctgtctgccagcgtgggagacagagtgaccatcacatgcaaggccagcgaccacatcaacaactggctggcctggtatcagcagaagcctggcaaggcccctaagctgctgatctacggcgctaccacactggaaacaggcgtgcccagcagattttctggcagcggctctggcaccgacttcaccctgacaatatccagcctccagcctgaggacttcgccacctactactgtcagcagagctggaacaccccttggacattcggccagggcaccaaggtggaaatcaagagaggcggaggcggaagtggaggcggaggatctggcggcggaggctctgaagttcagctggttgaatctggcggcggactggttcaacctggcggatctctgagactgagctgtgccgcctctggctacacctttagcagctactgggtcaactgggttcgacaggcccctggcaaaggactggaatgggtcgcccaaatctatcccggcgacggcgacaccaactacaacggcaagttcaagggcagattcaccatcagccgggacaacagcaagaacaccctgtacctccagatgaactccctgagagccgaggacaccgccgtgtactattgtgccagatccatcaccaccgtcgtgggctgcgctatggattattggggccagggaaccctggtcaccgtgtcctctacgcgtatccagaaccctgatcctgccgtgtaccagctgcgggatagcaagagcagcgacaagagcgtgtgtctgttcaccgacttcgacagccagaccaacgtgtcccagagcaaggactccgacgtgtacatcaccgataagaccgtgctggacatgcggagcatggacttcaagagcaactccgccgtggcctggtccaacaagtccgatttcgcctgcgccaacgccttcaacaacagcattatccccgaggacacattcttcccaagccccgagagcagctgcgacgtgaagctggtggaaaagagcttcgagacagacaccaacctgaacttccagatcctgtacgagatcctgctgggcaaggccaccctgtacgccgtgctggtgtctgccctggtgctgatggctatggtcaagcggaaggacagccggggacgcgccaagagaagcggatctggcgtgaagcagaccctgaatttcgacctgctgaagctggctggcgacgtggaatccaacccaggcccttctagaggccatatgaccgagtacaagcccacggtgcgcctcgccacccgcgacgacgtccccagggccgtacgcaccctcgccgccgcgttcgccgactaccccgccacgcgccacaccgtcgatccggaccgccacatcgagcgggtcaccgagctgcaagaactcttcctcacgcgcgtcgggctcgacatcggcaaggtgtgggtcgcggacgacggcgccgcggtggcggtctggaccacgccggagagcgtcgaagcgggggcggtgttcgccgagatcggcccgcgcatggccgagttgagcggttcccggctggccgcgcagcaacagatggaaggcctcctggcgccgcaccggcccaaggagcccgcgtggttcctggccaccgtcggcgtctcgcccgaccaccagggcaagggtctgggcagcgccgtcgtgctccccggagtggaggcggccgagcgcgccggggtgcccgccttcctggagacctccgcgccccgcaacctccccttctacgagcggctcggcttcaccgtcaccgccgacgtcgaggtgcccgaaggaccgcgcacctggtgcatgacccgcaagcccggtgcctga

SEQ ID NO: 36180 - DNA, 2616 bp, synthetic construct
  source 1..2616: mol_type = other DNA
atggccttaccagtgaccgccttgctcctgccgctggccttgctgctccacgccgccaggccgctcgagatccagaaccctgatcctgccgtgtaccagctgcgggatagcaagagcagcgacaagagcgtgtgtctgttcaccgacttcgacagccagaccaacgtgtcccagagcaaggactccgacgtgtacatcaccgataagaccgtgctggacatgcggagcatggacttcaagagcaactccgccgtggcctggtccaacaagtccgatttcgcctgcgccaacgccttcaacaacagcattatccccgaggacacattcttcccaagccccgagagcagctgcgacgtgaagctggtggaaaagagcttcgagacagacaccaacctgaacttccagatcctgtacgagatcctgctgggcaaggccaccctgtacgccgtgctggtgtctgccctggtgctgatggctatggtcaagcggaaggacagccggggaagggccaagcgatctggatctggagcaacaaacttctcactactcaaacaagcaggtgacgtggaggagaatcccgggcctactagcatggccttaccagtgaccgccttgctcctgccgctggccttgctgctccacgccgccaggccggacatccagatgacacagagccctagcagcctgtctgccagcgtgggagacagagtgaccatcacatgcaaggccagcgaccacatcaacaactggctggcctggtatcagcagaagcctggcaaggcccctaagctgctgatctacggcgctaccacactggaaacaggcgtgcccagcagattttctggcagcggctctggcaccgacttcaccctgacaatatccagcctccagcctgaggacttcgccacctactactgtcagcagagctggaacaccccttggacattcggccagggcaccaaggtggaaatcaagagaggcggaggcggaagtggaggcggaggatctggcggcggaggctctgaagttcagctggttgaatctggcggcggactggttcaacctggcggatctctgagactgagctgtgccgcctctggctacacctttagcagctactgggtcaactgggttcgacaggcccctggcaaaggactggaatgggtcgcccaaatctatcccggcgacggcgacaccaactacaacggcaagttcaagggcagattcaccatcagccgggacaacagcaagaacaccctgtacctccagatgaactccctgagagccgaggacaccgccgtgtactattgtgccagatccatcaccaccgtcgtgggctgcgctatggattattggggccagggaaccctggtcaccgtgtcctctacgcgtgaggacctgaagaacgtgttcccacctgaggtggccgtgttcgagcctagcgaggccgagatcagccacacccagaaagccaccctcgtgtgcctggctaccggcttctaccccgaccatgtggaactgtcttggtgggtcaacggcaaagaggtgcacagcggcgtgtctaccgacccccagccactgaaagaacagcccgccctgaacgacagccggtactgcctgagcagcagactgagagtgtccgccaccttctggcagaacccccggaaccacttcagatgccaggtgcagttctacggcctgagcgagaacgacgagtggacccaggacagagccaagcccgtgacccagatcgtgtctgccgaagcctggggcagagccgattgcggctttaccagcgagagctaccagcagggcgtgctgagcgccaccaacctgagcgtgatcggcttcagaatcctgctgctgaaagtggccggctttaacctgctgatgaccctgcggctgtggtccagccgcgccaagagaagcggatctggcgtgaagcagaccctgaatttcgacctgctgaagctggctggcgacgtggaatccaacccaggcccttctagaggccatatgaccgagtacaagcccacggtgcgcctcgccacccgcgacgacgtccccagggccgtacgcaccctcgccgccgcgttcgccgactaccccgccacgcgccacaccgtcgatccggaccgccacatcgagcgggtcaccgagctgcaagaactcttcctcacgcgcgtcgggctcgacatcggcaaggtgtgggtcgcggacgacggcgccgcggtggcggtctggaccacgccggagagcgtcgaagcgggggcggtgttcgccgagatcggcccgcgcatggccgagttgagcggttcccggctggccgcgcagcaacagatggaaggcctcctggcgccgcaccggcccaaggagcccgcgtggttcctggccaccgtcggcgtctcgcccgaccaccagggcaagggtctgggcagcgccgtcgtgctccccggagtggaggcggccgagcgcgccggggtgcccgccttcctggagacctccgcgccccgcaacctccccttctacgagcggctcggcttcaccgtcaccgccgacgtcgaggtgcccgaaggaccgcgcacctggtgcatgacccgcaagcccggtgcctga

SEQ ID NO: 36181 - DNA, 2616 bp, synthetic construct
  source 1..2616: mol_type = other DNA
atggccttaccagtgaccgccttgctcctgccgctggccttgctgctccacgccgccaggccgctcgaggaggacctgaagaacgtgttcccacctgaggtggccgtgttcgagcctagcgaggccgagatcagccacacccagaaagccaccctcgtgtgcctggctaccggcttctaccccgaccatgtggaactgtcttggtgggtcaacggcaaagaggtgcacagcggcgtgtgtaccgacccccagccactgaaagaacagcccgccctgaacgacagccggtactgcctgagcagcagactgagagtgtccgccaccttctggcagaacccccggaaccacttcagatgccaggtgcagttctacggcctgagcgagaacgacgagtggacccaggacagagccaagcccgtgacccagatcgtgtctgccgaagcctggggcagagccgattgcgacgtgaagctggtggaaaagagcttcgagacagacaccaacctgaacttccagaacctgagcgtgatcggcttcagaatcctgctgctgaaagtggccggctttaacctgctgatgaccctgcggctgtggtccagcagggccaagcgatctggatctggagcaacaaacttctcactactcaaacaagcaggtgacgtggaggagaatcccgggcctactagcatggccttaccagtgaccgccttgctcctgccgctggccttgctgctccacgccgccaggccggacatccagatgacacagagccctagcagcctgtctgccagcgtgggagacagagtgaccatcacatgcaaggccagcgaccacatcaacaactggctggcctggtatcagcagaagcctggcaaggcccctaagctgctgatctacggcgctaccacactggaaacaggcgtgcccagcagattttctggcagcggctctggcaccgacttcaccctgacaatatccagcctccagcctgaggacttcgccacctactactgtcagcagagctggaacaccccttggacattcggccagggcaccaaggtggaaatcaagagaggcggaggcggaagtggaggcggaggatctggcggcggaggctctgaagttcagctggttgaatctggcggcggactggttcaacctggcggatctctgagactgagctgtgccgcctctggctacacctttagcagctactgggtcaactgggttcgacaggcccctggcaaaggactggaatgggtcgcccaaatctatcccggcgacggcgacaccaactacaacggcaagttcaagggcagattcaccatcagccgggacaacagcaagaacaccctgtacctccagatgaactccctgagagccgaggacaccgccgtgtactattgtgccagatccatcaccaccgtcgtgggctgcgctatggattattggggccagggaaccctggtcaccgtgtcctctacgcgtatccagaaccctgatcctgccgtgtaccagctgcgggatagcaagagcagcgacaagagcgtgtgtctgttcaccgacttcgacagccagaccaacgtgtcccagagcaaggactccgacgtgtacatcaccgataagtgcgtgctggacatgcggagcatggacttcaagagcaactccgccgtggcctggtccaacaagtccgatttcgcctgcgccaacgccttcaacaacagcattatccccgaggacacattcttcccaagccccgagagcagctgcggctttaccagcgagagctaccagcagggcgtgctgagcgccaccatcctgtacgagatcctgctgggcaaggccaccctgtacgccgtgctggtgtctgccctggtgctgatggctatggtcaagcggaaggacagccggggacgcgccaagagaagcggatctggcgtgaagcagaccctgaatttcgacctgctgaagctggctggcgacgtggaatccaacccaggcccttctagaggccatatgaccgagtacaagcccacggtgcgcctcgccacccgcgacgacgtccccagggccgtacgcaccctcgccgccgcgttcgccgactaccccgccacgcgccacaccgtcgatccggaccgccacatcgagcgggtcaccgagctgcaagaactcttcctcacgcgcgtcgggctcgacatcggcaaggtgtgggtcgcggacgacggcgccgcggtggcggtctggaccacgccggagagcgtcgaagcgggggcggtgttcgccgagatcggcccgcgcatggccgagttgagcggttcccggctggccgcgcagcaacagatggaaggcctcctggcgccgcaccggcccaaggagcccgcgtggttcctggccaccgtcggcgtctcgcccgaccaccagggcaagggtctgggcagcgccgtcgtgctccccggagtggaggcggccgagcgcgccggggtgcccgccttcctggagacctccgcgccccgcaacctccccttctacgagcggctcggcttcaccgtcaccgccgacgtcgaggtgcccgaaggaccgcgcacctggtgcatgacccgcaagcccggtgcctga

SEQ ID NO: 36182 - DNA, 2616 bp, synthetic construct
  source 1..2616: mol_type = other DNA
atggccttaccagtgaccgccttgctcctgccgctggccttgctgctccacgccgccaggccgctcgaggaggacctgaagaacgtgttcccacctgaggtggccgtgttcgagcctagcgaggccgagatcagccacacccagaaagccaccctcgtgtgcctggctaccggcttctaccccgaccatgtggaactgtcttggtgggtcaacggcaaagaggtgcacagcggcgtgtctaccgacccccagccactgaaagaacagcccgccctgaacgacagccggtactgcctgagcagcagactgagagtgtccgccaccttctggcagaacccccggaaccacttcagatgccaggtgcagttctacggcctgagcgagaacgacgagtggacccaggacagagccaagcccgtgacccagatcgtgtctgccgaagcctggggcagagccgattgcgacgtgaagctggtggaaaagagcttcgagacagacaccaacctgaacttccagaacctgagcgtgatcggcttcagaatcctgctgctgaaagtggccggctttaacctgctgatgaccctgcggctgtggtccagcagggccaagcgatctggatctggagcaacaaacttctcactactcaaacaagcaggtgacgtggaggagaatcccgggcctactagcatggccttaccagtgaccgccttgctcctgccgctggccttgctgctccacgccgccaggccggacatccagatgacacagagccctagcagcctgtctgccagcgtgggagacagagtgaccatcacatgcaaggccagcgaccacatcaacaactggctggcctggtatcagcagaagcctggcaaggcccctaagctgctgatctacggcgctaccacactggaaacaggcgtgcccagcagattttctggcagcggctctggcaccgacttcaccctgacaatatccagcctccagcctgaggacttcgccacctactactgtcagcagagctggaacaccccttggacattcggccagggcaccaaggtggaaatcaagagaggcggaggcggaagtggaggcggaggatctggcggcggaggctctgaagttcagctggttgaatctggcggcggactggttcaacctggcggatctctgagactgagctgtgccgcctctggctacacctttagcagctactgggtcaactgggttcgacaggcccctggcaaaggactggaatgggtcgcccaaatctatcccggcgacggcgacaccaactacaacggcaagttcaagggcagattcaccatcagccgggacaacagcaagaacaccctgtacctccagatgaactccctgagagccgaggacaccgccgtgtactattgtgccagatccatcaccaccgtcgtgggctgcgctatggattattggggccagggaaccctggtcaccgtgtcctctacgcgtatccagaaccctgatcctgccgtgtaccagctgcgggatagcaagagcagcgacaagagcgtgtgtctgttcaccgacttcgacagccagaccaacgtgtcccagagcaaggactccgacgtgtacatcaccgataagaccgtgctggacatgcggagcatggacttcaagagcaactccgccgtggcctggtccaacaagtccgatttcgcctgcgccaacgccttcaacaacagcattatccccgaggacacattcttcccaagccccgagagcagctgcggctttaccagcgagagctaccagcagggcgtgctgagcgccaccatcctgtacgagatcctgctgggcaaggccaccctgtacgccgtgctggtgtctgccctggtgctgatggctatggtcaagcggaaggacagccggggacgcgccaagagaagcggatctggcgtgaagcagaccctgaatttcgacctgctgaagctggctggcgacgtggaatccaacccaggcccttctagaggccatatgaccgagtacaagcccacggtgcgcctcgccacccgcgacgacgtccccagggccgtacgcaccctcgccgccgcgttcgccgactaccccgccacgcgccacaccgtcgatccggaccgccacatcgagcgggtcaccgagctgcaagaactcttcctcacgcgcgtcgggctcgacatcggcaaggtgtgggtcgcggacgacggcgccgcggtggcggtctggaccacgccggagagcgtcgaagcgggggcggtgttcgccgagatcggcccgcgcatggccgagttgagcggttcccggctggccgcgcagcaacagatggaaggcctcctggcgccgcaccggcccaaggagcccgcgtggttcctggccaccgtcggcgtctcgcccgaccaccagggcaagggtctgggcagcgccgtcgtgctccccggagtggaggcggccgagcgcgccggggtgcccgccttcctggagacctccgcgccccgcaacctccccttctacgagcggctcggcttcaccgtcaccgccgacgtcgaggtgcccgaaggaccgcgcacctggtgcatgacccgcaagcccggtgcctga

SEQ ID NO: 36183 - DNA, 2925 bp, synthetic construct
  source 1..2925: mol_type = other DNA
atggccttaccagtgaccgccttgctcctgccgctggccttgctgctccacgccgccaggccgctcgaggaggaggacctgaagaacgtgttcccacctgaggtggccgtgttcgagcctagcgaggccgagatcagccacacccagaaagccaccctcgtgtgcctggctaccggcttctaccccgaccatgtggaactgtcttggtgggtcaacggcaaagaggtgcacagcggcgtgtctaccgacccccagccactgaaagaacagcccgccctgaacgacagccggtactgcctgagcagcagactgagagtgtccgccaccttctggcagaacccccggaaccacttcagatgccaggtgcagttctacggcctgagcgagaacgacgagtggacccaggacagagccaagcccgtgacccagatcgtgtctgccgaagcctggggcagagccgatgatgtgattaagatccactggcaggaaaagaagtccaacaccatcctgggcagccaggaaggcaacaccatgaagaccaacgacacctacatgaagttcagctggctgaccgtgcccgagaagtccctggacaaagaacacagatgcatcgtgcggcacgaaaacaacaagaacggcgtggaccaggaaatcatcttcccacccatcaagaccgatgtgattacaatggaccccaaggacaactgctccaaggacgccaacgataccctgctgctccagctgaccaacaccagcgcctactacatgtacttgttgctgctgctgaagtccgtggtgtacttcgccatcatcacatgctgcctgctgcggagaaccgccttctgctgcaacggcgagaagtctagggccaagcgatctggatctggagcaacaaacttctcactactcaaacaagcaggtgacgtggaggagaatcccgggcctactagcatggccttaccagtgaccgccttgctcctgccgctggccttgctgctccacgccgccaggccggacatccagatgacacagagccctagcagcctgtctgccagcgtgggagacagagtgaccatcacatgcaaggccagcgaccacatcaacaactggctggcctggtatcagcagaagcctggcaaggcccctaagctgctgatctacggcgctaccacactggaaacaggcgtgcccagcagattttctggcagcggctctggcaccgacttcaccctgacaatatccagcctccagcctgaggacttcgccacctactactgtcagcagagctggaacaccccttggacattcggccagggcaccaaggtggaaatcaagagaggcggaggcggaagtggaggcggaggatctggcggcggaggctctgaagttcagctggttgaatctggcggcggactggttcaacctggcggatctctgagactgagctgtgccgcctctggctacacctttagcagctactgggtcaactgggttcgacaggcccctggcaaaggactggaatgggtcgcccaaatctatcccggcgacggcgacaccaactacaacggcaagttcaagggcagattcaccatcagccgggacaacagcaagaacaccctgtacctccagatgaactccctgagagccgaggacaccgccgtgtactattgtgccagatccatcaccaccgtcgtgggctgcgctatggattattggggccagggaaccctggtcaccgtgtcctctacgcgtatccagaaccctgatcctgccgtgtaccagctgcgggatagcaagagcagcgacaagagcgtgtgtctgttcaccgacttcgacagccagaccaacgtgtcccagagcaaggactccgacgtgtacatcaccgataagaccgtgctggacatgcggagcatggacttcaagagcaactccgccgtggcctggtccaacaagtccgatttcgcctgcgccaacgccttcaacaacagcattatccccgaggacacattcttcccaagccccgagagcagcgactccaccgaccacgtgaagcccaaagagacagagaacaccaagcagcccagcaagagctgccacaagcccaaggccatcgtgcacaccgagaaagtgaacatgatgagcctgaccgtgctgggcctgcggatgctgttcgccaaaaccgtggccgtgaacttcctgctgaccgccaagctgttcttcctccgcgccaagagaagcggatctggcgtgaagcagaccctgaatttcgacctgctgaagctggctggcgacgtggaatccaacccaggcccttctagaggccatatgaccgagtacaagcccacggtgcgcctcgccacccgcgacgacgtccccagggccgtacgcaccctcgccgccgcgttcgccgactaccccgccacgcgccacaccgtcgatccggaccgccacatcgagcgggtcaccgagctgcaagaactcttcctcacgcgcgtcgggctcgacatcggcaaggtgtgggtcgcggacgacggcgccgcggtggcggtctggaccacgccggagagcgtcgaagcgggggcggtgttcgccgagatcggcccgcgcatggccgagttgagcggttcccggctggccgcgcagcaacagatggaaggcctcctggcgccgcaccggcccaaggagcccgcgtggttcctggccaccgtcggcgtctcgcccgaccaccagggcaagggtctgggcagcgccgtcgtgctccccggagtggaggcggccgagcgcgccggggtgcccgccttcctggagacctccgcgccccgcaacctccccttctacgagcggctcggcttcaccgtcaccgccgacgtcgaggtgcccgaaggaccgcgcacctggtgcatgacccgcaagcccggtgcctga

SEQ ID NO: 36184 - DNA, 2616 bp, synthetic construct
  source 1..2616: mol_type = other DNA
atggccttaccagtgaccgccttgctcctgccgctggccttgctgctccacgccgccaggccgctcgaggaggacctgaagaacgtgttcccacctgaggtggccgtgttcgagcctagcgaggccgagatcagccacacccagaaagccaccctcgtgtgcctggctaccggcttctaccccgaccatgtggaactgtcttggtgggtcaacggcaaagaggtgcacagcggcgtgtgtaccgacccccagccactgaaagaacagcccgccctgaacgacagccggtactgcctgagcagcagactgagagtgtccgccaccttctggcagaacccccggaaccacttcagatgccaggtgcagttctacggcctgagcgagaacgacgagtggacccaggacagagccaagcccgtgacccagatcgtgtctgccgaagcctggggcagagccgattgcggctttaccagcgagagctaccagcagggcgtgctgagcgccaccaacctgagcgtgatcggcttcagaatcctgctgctgaaagtggccggctttaacctgctgatgaccctgcggctgtggtccagcagggccaagcgatctggatctggagcaacaaacttctcactactcaaacaagcaggtgacgtggaggagaatcccgggcctactagcatggccttaccagtgaccgccttgctcctgccgctggccttgctgctccacgccgccaggccggacatccagatgacacagagccctagcagcctgtctgccagcgtgggagacagagtgaccatcacatgcaaggccagcgaccacatcaacaactggctggcctggtatcagcagaagcctggcaaggcccctaagctgctgatctacggcgctaccacactggaaacaggcgtgcccagcagattttctggcagcggctctggcaccgacttcaccctgacaatatccagcctccagcctgaggacttcgccacctactactgtcagcagagctggaacaccccttggacattcggccagggcaccaaggtggaaatcaagagaggcggaggcggaagtggaggcggaggatctggcggcggaggctctgaagttcagctggttgaatctggcggcggactggttcaacctggcggatctctgagactgagctgtgccgcctctggctacacctttagcagctactgggtcaactgggttcgacaggcccctggcaaaggactggaatgggtcgcccaaatctatcccggcgacggcgacaccaactacaacggcaagttcaagggcagattcaccatcagccgggacaacagcaagaacaccctgtacctccagatgaactccctgagagccgaggacaccgccgtgtactattgtgccagatccatcaccaccgtcgtgggctgcgctatggattattggggccagggaaccctggtcaccgtgtcctctacgcgtatccagaaccctgatcctgccgtgtaccagctgcgggatagcaagagcagcgacaagagcgtgtgtctgttcaccgacttcgacagccagaccaacgtgtcccagagcaaggactccgacgtgtacatcaccgataagtgcgtgctggacatgcggagcatggacttcaagagcaactccgccgtggcctggtccaacaagtccgatttcgcctgcgccaacgccttcaacaacagcattatccccgaggacacattcttcccaagccccgagagcagctgcgacgtgaagctggtggaaaagagcttcgagacagacaccaacctgaacttccagatcctgtacgagatcctgctgggcaaggccaccctgtacgccgtgctggtgtctgccctggtgctgatggctatggtcaagcggaaggacagccggggacgcgccaagagaagcggatctggcgtgaagcagaccctgaatttcgacctgctgaagctggctggcgacgtggaatccaacccaggcccttctagaggccatatgaccgagtacaagcccacggtgcgcctcgccacccgcgacgacgtccccagggccgtacgcaccctcgccgccgcgttcgccgactaccccgccacgcgccacaccgtcgatccggaccgccacatcgagcgggtcaccgagctgcaagaactcttcctcacgcgcgtcgggctcgacatcggcaaggtgtgggtcgcggacgacggcgccgcggtggcggtctggaccacgccggagagcgtcgaagcgggggcggtgttcgccgagatcggcccgcgcatggccgagttgagcggttcccggctggccgcgcagcaacagatggaaggcctcctggcgccgcaccggcccaaggagcccgcgtggttcctggccaccgtcggcgtctcgcccgaccaccagggcaagggtctgggcagcgccgtcgtgctccccggagtggaggcggccgagcgcgccggggtgcccgccttcctggagacctccgcgccccgcaacctccccttctacgagcggctcggcttcaccgtcaccgccgacgtcgaggtgcccgaaggaccgcgcacctggtgcatgacccgcaagcccggtgcctga

SEQ ID NO: 36185 - DNA, 2703 bp, synthetic construct
  source 1..2703: mol_type = other DNA
atggccttaccagtgaccgccttgctcctgccgctggccttgctgctccacgccgccaggccgctcgaggaggaggacctgaagaacgtgttcccacctgaggtggccgtgttcgagcctagcgaggccgagatcagccacacccagaaagccaccctcgtgtgcctggctaccggcttctaccccgaccatgtggaactgtcttggtgggtcaacggcaaagaggtgcacagcggcgtgtgtaccgacccccagccactgaaagaacagcccgccctgaacgacagccggtactgcctgagcagcagactgagagtgtccgccaccttctggcagaacccccggaaccacttcagatgccaggtgcagttctacggcctgagcgagaacgacgagtggacccaggacagagccaagcccgtgacccagatcgtgtctgccgaagcctggggcagagccgattgcggctttaccagcgagagctaccagcagggcgtgctgagcgccaccaacctgagcgtgatcggcttcagaatcctgctgctgaaagtggccggctttaacctgctgatgaccctgcggctgtggtccagcagggccaagcgatctggatctggagcaacaaacttctcactactcaaacaagcaggtgacgtggaggagaatcccgggcctactagcatggccttaccagtgaccgccttgctcctgccgctggccttgctgctccacgccgccaggccggacatccagatgacacagagccctagcagcctgtctgccagcgtgggagacagagtgaccatcacatgcaaggccagcgaccacatcaacaactggctggcctggtatcagcagaagcctggcaaggcccctaagctgctgatctacggcgctaccacactggaaacaggcgtgcccagcagattttctggcagcggctctggcaccgacttcaccctgacaatatccagcctccagcctgaggacttcgccacctactactgtcagcagagctggaacaccccttggacattcggccagggcaccaaggtggaaatcaagagaggcggaggcggaagtggaggcggaggatctggcggcggaggctctgaagttcagctggttgaatctggcggcggactggttcaacctggcggatctctgagactgagctgtgccgcctctggctacacctttagcagctactgggtcaactgggttcgacaggcccctggcaaaggactggaatgggtcgcccaaatctatcccggcgacggcgacaccaactacaacggcaagttcaagggcagattcaccatcagccgggacaacagcaagaacaccctgtacctccagatgaactccctgagagccgaggacaccgccgtgtactattgtgccagatccatcaccaccgtcgtgggctgcgctatggattattggggccagggaaccctggtcaccgtgtcctctacgcgtggacagcctaaggccaatcctaccgtgacactgttccctccaagcagcgaagaactccaggccaacaaggccacacttgtgtgcctgatctccgacttctaccctggggctgtgacagtggcttggaaggccgatggatctcctgtgaaagccggcgtggaaaccaccaagccatccaagcagagcaacaacaaatacgccgccagctcctacctgagcctgacacctgagcagtggaagtcccacagatcctacagctgccaagtgacccacgaaggcagcaccgtggaaaagacagtggcccctacagagtgcagccccatcaagaccgatgtgattacaatggaccccaaggacaactgctccaaggacgccaacgataccctgctgctccagctgaccaacaccagcgcctactacatgtacttgttgctgctgctgaagtccgtggtgtacttcgccatcatcacatgctgcctgctgcggagaaccgccttctgctgcaacggcgagaagtctcgcgccaagagaagcggatctggcgtgaagcagaccctgaatttcgacctgctgaagctggctggcgacgtggaatccaacccaggcccttctagaggccatatgaccgagtacaagcccacggtgcgcctcgccacccgcgacgacgtccccagggccgtacgcaccctcgccgccgcgttcgccgactaccccgccacgcgccacaccgtcgatccggaccgccacatcgagcgggtcaccgagctgcaagaactcttcctcacgcgcgtcgggctcgacatcggcaaggtgtgggtcgcggacgacggcgccgcggtggcggtctggaccacgccggagagcgtcgaagcgggggcggtgttcgccgagatcggcccgcgcatggccgagttgagcggttcccggctggccgcgcagcaacagatggaaggcctcctggcgccgcaccggcccaaggagcccgcgtggttcctggccaccgtcggcgtctcgcccgaccaccagggcaagggtctgggcagcgccgtcgtgctccccggagtggaggcggccgagcgcgccggggtgcccgccttcctggagacctccgcgccccgcaacctccccttctacgagcggctcggcttcaccgtcaccgccgacgtcgaggtgcccgaaggaccgcgcacctggtgcatgacccgcaagcccggtgcctga

SEQ ID NO: 36186 - DNA, 2703 bp, synthetic construct
  source 1..2703: mol_type = other DNA
atggccttaccagtgaccgccttgctcctgccgctggccttgctgctccacgccgccaggccgctcgagggacagcctaaggccaatcctaccgtgacactgttccctccaagcagcgaagaactccaggccaacaaggccacacttgtgtgcctgatctccgacttctaccctggggctgtgacagtggcttggaaggccgatggatctcctgtgaaagccggcgtggaaaccaccaagccatccaagcagagcaacaacaaatacgccgccagctcctacctgagcctgacacctgagcagtggaagtcccacagatcctacagctgccaagtgacccacgaaggcagcaccgtggaaaagacagtggcccctacagagtgcagccccatcaagaccgatgtgattacaatggaccccaaggacaactgctccaaggacgccaacgataccctgctgctccagctgaccaacaccagcgcctactacatgtacttgttgctgctgctgaagtccgtggtgtacttcgccatcatcacatgctgcctgctgcggagaaccgccttctgctgcaacggcgagaagtctagggccaagcgatctggatctggagcaacaaacttctcactactcaaacaagcaggtgacgtggaggagaatcccgggcctactagcatggccttaccagtgaccgccttgctcctgccgctggccttgctgctccacgccgccaggccggacatccagatgacacagagccctagcagcctgtctgccagcgtgggagacagagtgaccatcacatgcaaggccagcgaccacatcaacaactggctggcctggtatcagcagaagcctggcaaggcccctaagctgctgatctacggcgctaccacactggaaacaggcgtgcccagcagattttctggcagcggctctggcaccgacttcaccctgacaatatccagcctccagcctgaggacttcgccacctactactgtcagcagagctggaacaccccttggacattcggccagggcaccaaggtggaaatcaagagaggcggaggcggaagtggaggcggaggatctggcggcggaggctctgaagttcagctggttgaatctggcggcggactggttcaacctggcggatctctgagactgagctgtgccgcctctggctacacctttagcagctactgggtcaactgggttcgacaggcccctggcaaaggactggaatgggtcgcccaaatctatcccggcgacggcgacaccaactacaacggcaagttcaagggcagattcaccatcagccgggacaacagcaagaacaccctgtacctccagatgaactccctgagagccgaggacaccgccgtgtactattgtgccagatccatcaccaccgtcgtgggctgcgctatggattattggggccagggaaccctggtcaccgtgtcctctacgcgtgaggaggacctgaagaacgtgttcccacctgaggtggccgtgttcgagcctagcgaggccgagatcagccacacccagaaagccaccctcgtgtgcctggctaccggcttctaccccgaccatgtggaactgtcttggtgggtcaacggcaaagaggtgcacagcggcgtgtgtaccgacccccagccactgaaagaacagcccgccctgaacgacagccggtactgcctgagcagcagactgagagtgtccgccaccttctggcagaacccccggaaccacttcagatgccaggtgcagttctacggcctgagcgagaacgacgagtggacccaggacagagccaagcccgtgacccagatcgtgtctgccgaagcctggggcagagccgattgcggctttaccagcgagagctaccagcagggcgtgctgagcgccaccaacctgagcgtgatcggcttcagaatcctgctgctgaaagtggccggctttaacctgctgatgaccctgcggctgtggtccagccgcgccaagagaagcggatctggcgtgaagcagaccctgaatttcgacctgctgaagctggctggcgacgtggaatccaacccaggcccttctagaggccatatgaccgagtacaagcccacggtgcgcctcgccacccgcgacgacgtccccagggccgtacgcaccctcgccgccgcgttcgccgactaccccgccacgcgccacaccgtcgatccggaccgccacatcgagcgggtcaccgagctgcaagaactcttcctcacgcgcgtcgggctcgacatcggcaaggtgtgggtcgcggacgacggcgccgcggtggcggtctggaccacgccggagagcgtcgaagcgggggcggtgttcgccgagatcggcccgcgcatggccgagttgagcggttcccggctggccgcgcagcaacagatggaaggcctcctggcgccgcaccggcccaaggagcccgcgtggttcctggccaccgtcggcgtctcgcccgaccaccagggcaagggtctgggcagcgccgtcgtgctccccggagtggaggcggccgagcgcgccggggtgcccgccttcctggagacctccgcgccccgcaacctccccttctacgagcggctcggcttcaccgtcaccgccgacgtcgaggtgcccgaaggaccgcgcacctggtgcatgacccgcaagcccggtgcctga

SEQ ID NO: 36187 - DNA, 2694 bp, synthetic construct
  source 1..2694: mol_type = other DNA
atggccttaccagtgaccgccttgctcctgccgctggccttgctgctccacgccgccaggccgctcgaggaggcctctacaaagggaccctccgtgtttcctctggctcccagcagcaagtctacaagcggaggaacagccgctctgggctgcctggtcaaggattactttcccgagcctgtgaccgtgtcctggaatagcggagcactgacaagcggcgtgcacacctttccagccgtgctgcaaagcagcggcctgtactctctgagcagcgtggtcacagtgcctagctctagcctgggcacccagacctacatctgcaatgtgaaccacaagcctagcaacaccaaggtggacaagagagtggaacccaagagctgtcccatcaagaccgatgtgattacaatggaccccaaggacaactgctccaaggacgccaacgataccctgctgctccagctgaccaacaccagcgcctactacatgtacttgttgctgctgctgaagtccgtggtgtacttcgccatcatcacatgctgcctgctgcggagaaccgccttctgctgcaacggcgagaagtctagggccaagcgatctggatctggagcaacaaacttctcactactcaaacaagcaggtgacgtggaggagaatcccgggcctactagcatggccttaccagtgaccgccttgctcctgccgctggccttgctgctccacgccgccaggccggacatccagatgacacagagccctagcagcctgtctgccagcgtgggagacagagtgaccatcacatgcaaggccagcgaccacatcaacaactggctggcctggtatcagcagaagcctggcaaggcccctaagctgctgatctacggcgctaccacactggaaacaggcgtgcccagcagattttctggcagcggctctggcaccgacttcaccctgacaatatccagcctccagcctgaggacttcgccacctactactgtcagcagagctggaacaccccttggacattcggccagggcaccaaggtggaaatcaagagaggcggaggcggaagtggaggcggaggatctggcggcggaggctctgaagttcagctggttgaatctggcggcggactggttcaacctggcggatctctgagactgagctgtgccgcctctggctacacctttagcagctactgggtcaactgggttcgacaggcccctggcaaaggactggaatgggtcgcccaaatctatcccggcgacggcgacaccaactacaacggcaagttcaagggcagattcaccatcagccgggacaacagcaagaacaccctgtacctccagatgaactccctgagagccgaggacaccgccgtgtactattgtgccagatccatcaccaccgtcgtgggctgcgctatggattattggggccagggaaccctggtcaccgtgtcctctacgcgtggacagcctaaggccaatcctaccgtgacactgttccctccaagcagcgaagaactccaggccaacaaggccacacttgtgtgcctgatctccgacttctaccctggggctgtgacagtggcttggaaggccgatggatctcctgtgaaagccggcgtggaaaccaccaagccatccaagcagagcaacaacaaatacgccgccagctcctacctgagcctgacacctgagcagtggaagtcccacagatcctacagctgccaagtgacccacgaaggcagcaccgtggaaaagacagtggcccctacagagtgcagcgaagtgaaaaccgactccaccgaccacgtgaagcccaaagagacagagaacaccaagcagcccagcaagagctgccacaagcccaaggccatcgtgcacaccgagaaagtgaacatgatgagcctgaccgtgctgggcctgcggatgctgttcgccaaaaccgtggccgtgaacttcctgctgaccgccaagctgttcttcctccgcgccaagagaagcggatctggcgtgaagcagaccctgaatttcgacctgctgaagctggctggcgacgtggaatccaacccaggcccttctagaggccatatgaccgagtacaagcccacggtgcgcctcgccacccgcgacgacgtccccagggccgtacgcaccctcgccgccgcgttcgccgactaccccgccacgcgccacaccgtcgatccggaccgccacatcgagcgggtcaccgagctgcaagaactcttcctcacgcgcgtcgggctcgacatcggcaaggtgtgggtcgcggacgacggcgccgcggtggcggtctggaccacgccggagagcgtcgaagcgggggcggtgttcgccgagatcggcccgcgcatggccgagttgagcggttcccggctggccgcgcagcaacagatggaaggcctcctggcgccgcaccggcccaaggagcccgcgtggttcctggccaccgtcggcgtctcgcccgaccaccagggcaagggtctgggcagcgccgtcgtgctccccggagtggaggcggccgagcgcgccggggtgcccgccttcctggagacctccgcgccccgcaacctccccttctacgagcggctcggcttcaccgtcaccgccgacgtcgaggtgcccgaaggaccgcgcacctggtgcatgacccgcaagcccggtgcctga

SEQ ID NO: 36188 - DNA, 2628 bp, synthetic construct
  source 1..2628: mol_type = other DNA
atggccttaccagtgaccgccttgctcctgccgctggccttgctgctccacgccgccaggccgctcgaggaggcctctacaaagggaccctccgtgtttcctctggctcccagcagcaagtctacaagcggaggaacagccgctctgggctgcctggtcaaggattactttcccgagcctgtgaccgtgtcctggaatagcggagcactgacaagcggcgtgcacacctttccagccgtgctgcaaagcagcggcctgtactctctgagcagcgtggtcacagtgcctagctctagcctgggcacccagacctacatctgcaatgtgaaccacaagcctagcaacaccaaggtggacaagagagtggaacccaagagctgtggcagagccgattgcggctttaccagcgagagctaccagcagggcgtgctgagcgccaccatcctgtacgagatcctgctgggcaaggccaccctgtacgccgtgctggtgtctgccctggtgctgatggctatggtcaagcggaaggacagccggggaagggccaagcgatctggatctggagcaacaaacttctcactactcaaacaagcaggtgacgtggaggagaatcccgggcctactagcatggccttaccagtgaccgccttgctcctgccgctggccttgctgctccacgccgccaggccggacatccagatgacacagagccctagcagcctgtctgccagcgtgggagacagagtgaccatcacatgcaaggccagcgaccacatcaacaactggctggcctggtatcagcagaagcctggcaaggcccctaagctgctgatctacggcgctaccacactggaaacaggcgtgcccagcagattttctggcagcggctctggcaccgacttcaccctgacaatatccagcctccagcctgaggacttcgccacctactactgtcagcagagctggaacaccccttggacattcggccagggcaccaaggtggaaatcaagagaggcggaggcggaagtggaggcggaggatctggcggcggaggctctgaagttcagctggttgaatctggcggcggactggttcaacctggcggatctctgagactgagctgtgccgcctctggctacacctttagcagctactgggtcaactgggttcgacaggcccctggcaaaggactggaatgggtcgcccaaatctatcccggcgacggcgacaccaactacaacggcaagttcaagggcagattcaccatcagccgggacaacagcaagaacaccctgtacctccagatgaactccctgagagccgaggacaccgccgtgtactattgtgccagatccatcaccaccgtcgtgggctgcgctatggattattggggccagggaaccctggtcaccgtgtcctctacgcgtggacagcctaaggccaatcctaccgtgacactgttccctccaagcagcgaagaactccaggccaacaaggccacacttgtgtgcctgatctccgacttctaccctggggctgtgacagtggcttggaaggccgatggatctcctgtgaaagccggcgtggaaaccaccaagccatccaagcagagcaacaacaaatacgccgccagctcctacctgagcctgacacctgagcagtggaagtcccacagatcctacagctgccaagtgacccacgaaggcagcaccgtggaaaagacagtggcccctacagagtgcagcatccccgaggacacattcttcccaagccccgagagcagctgcgacgtgaagctggtggaaaagagcttcgagacagacaccaacctgaacttccagaacctgagcgtgatcggcttcagaatcctgctgctgaaagtggccggctttaacctgctgatgaccctgcggctgtggtccagccgcgccaagagaagcggatctggcgtgaagcagaccctgaatttcgacctgctgaagctggctggcgacgtggaatccaacccaggcccttctagaggccatatgaccgagtacaagcccacggtgcgcctcgccacccgcgacgacgtccccagggccgtacgcaccctcgccgccgcgttcgccgactaccccgccacgcgccacaccgtcgatccggaccgccacatcgagcgggtcaccgagctgcaagaactcttcctcacgcgcgtcgggctcgacatcggcaaggtgtgggtcgcggacgacggcgccgcggtggcggtctggaccacgccggagagcgtcgaagcgggggcggtgttcgccgagatcggcccgcgcatggccgagttgagcggttcccggctggccgcgcagcaacagatggaaggcctcctggcgccgcaccggcccaaggagcccgcgtggttcctggccaccgtcggcgtctcgcccgaccaccagggcaagggtctgggcagcgccgtcgtgctccccggagtggaggcggccgagcgcgccggggtgcccgccttcctggagacctccgcgccccgcaacctccccttctacgagcggctcggcttcaccgtcaccgccgacgtcgaggtgcccgaaggaccgcgcacctggtgcatgacccgcaagcccggtgcctga

SEQ ID NO: 36189 - DNA, 2628 bp, synthetic construct
  source 1..2628: mol_type = other DNA
atggccttaccagtgaccgccttgctcctgccgctggccttgctgctccacgccgccaggccgctcgaggaggcctctacaaagggaccctccgtgtttcctctggctcccagcagcaagtctacaagcggaggaacagccgctctgggctgcctggtcaaggattactttcccgagcctgtgaccgtgtcctggaatagcggagcactgacaagcggcgtgcacacctttccagccgtgctgcaaagcagcggcctgtactctctgagcagcgtggtcacagtgcctagctctagcctgggcacccagacctacatctgcaatgtgaaccacaagcctagcaacaccaaggtggacaagagagtggaacccaagagctgtatccccgaggacacattcttcccaagccccgagagcagctgcgacgtgaagctggtggaaaagagcttcgagacagacaccaacctgaacttccagaacctgagcgtgatcggcttcagaatcctgctgctgaaagtggccggctttaacctgctgatgaccctgcggctgtggtccagcagggccaagcgatctggatctggagcaacaaacttctcactactcaaacaagcaggtgacgtggaggagaatcccgggcctactagcatggccttaccagtgaccgccttgctcctgccgctggccttgctgctccacgccgccaggccggacatccagatgacacagagccctagcagcctgtctgccagcgtgggagacagagtgaccatcacatgcaaggccagcgaccacatcaacaactggctggcctggtatcagcagaagcctggcaaggcccctaagctgctgatctacggcgctaccacactggaaacaggcgtgcccagcagattttctggcagcggctctggcaccgacttcaccctgacaatatccagcctccagcctgaggacttcgccacctactactgtcagcagagctggaacaccccttggacattcggccagggcaccaaggtggaaatcaagagaggcggaggcggaagtggaggcggaggatctggcggcggaggctctgaagttcagctggttgaatctggcggcggactggttcaacctggcggatctctgagactgagctgtgccgcctctggctacacctttagcagctactgggtcaactgggttcgacaggcccctggcaaaggactggaatgggtcgcccaaatctatcccggcgacggcgacaccaactacaacggcaagttcaagggcagattcaccatcagccgggacaacagcaagaacaccctgtacctccagatgaactccctgagagccgaggacaccgccgtgtactattgtgccagatccatcaccaccgtcgtgggctgcgctatggattattggggccagggaaccctggtcaccgtgtcctctacgcgtggacagcctaaggccaatcctaccgtgacactgttccctccaagcagcgaagaactccaggccaacaaggccacacttgtgtgcctgatctccgacttctaccctggggctgtgacagtggcttggaaggccgatggatctcctgtgaaagccggcgtggaaaccaccaagccatccaagcagagcaacaacaaatacgccgccagctcctacctgagcctgacacctgagcagtggaagtcccacagatcctacagctgccaagtgacccacgaaggcagcaccgtggaaaagacagtggcccctacagagtgcagcggcagagccgattgcggctttaccagcgagagctaccagcagggcgtgctgagcgccaccatcctgtacgagatcctgctgggcaaggccaccctgtacgccgtgctggtgtctgccctggtgctgatggctatggtcaagcggaaggacagccggggacgcgccaagagaagcggatctggcgtgaagcagaccctgaatttcgacctgctgaagctggctggcgacgtggaatccaacccaggcccttctagaggccatatgaccgagtacaagcccacggtgcgcctcgccacccgcgacgacgtccccagggccgtacgcaccctcgccgccgcgttcgccgactaccccgccacgcgccacaccgtcgatccggaccgccacatcgagcgggtcaccgagctgcaagaactcttcctcacgcgcgtcgggctcgacatcggcaaggtgtgggtcgcggacgacggcgccgcggtggcggtctggaccacgccggagagcgtcgaagcgggggcggtgttcgccgagatcggcccgcgcatggccgagttgagcggttcccggctggccgcgcagcaacagatggaaggcctcctggcgccgcaccggcccaaggagcccgcgtggttcctggccaccgtcggcgtctcgcccgaccaccagggcaagggtctgggcagcgccgtcgtgctccccggagtggaggcggccgagcgcgccggggtgcccgccttcctggagacctccgcgccccgcaacctccccttctacgagcggctcggcttcaccgtcaccgccgacgtcgaggtgcccgaaggaccgcgcacctggtgcatgacccgcaagcccggtgcctga

SEQ ID NO: 36190 - DNA, 1866 bp, synthetic construct
  source 1..1866: mol_type = other DNA
atggccttaccagtgaccgccttgctcctgccgctggccttgctgctccacgccgccaggccggacatccagatgacacagagccctagcagcctgtctgccagcgtgggagacagagtgaccatcacatgcaaggccagcgaccacatcaacaactggctggcctggtatcagcagaagcctggcaaggcccctaagctgctgatctacggcgctaccacactggaaacaggcgtgcccagcagattttctggcagcggctctggcaccgacttcaccctgacaatatccagcctccagcctgaggacttcgccacctactactgtcagcagagctggaacaccccttggacattcggccagggcaccaaggtggaaatcaagagactcgaggacctgaagaacgtgttcccacctgaggtggccgtgttcgagcctagcgaggccgagatcagccacacccagaaagccaccctcgtgtgcctggctaccggcttctaccccgaccatgtggaactgtcttggtgggtcaacggcaaagaggtgcacagcggcgtgtgtaccgacccccagccactgaaagaacagcccgccctgaacgacagccggtactgcctgagcagcagactgagagtgtccgccaccttctggcagaacccccggaaccacttcagatgccaggtgcagttctacggcctgagcgagaacgacgagtggacccaggacagagccaagcccgtgacccagatcgtgtctgccgaagcctggggcagagccgatagcggctttaccagcgagagctaccagcagggcgtgctgagcgccaccatcctgtacgagatcctgctgggcaaggccaccctgtacgccgtgctggtgtctgccctggtgctgatggctatggtcaagcggaaggacagccggggaagggccaagcgatctggatctggagcaacaaacttctcactactcaaacaagcaggtgacgtggaggagaatcccgggcctactagtatggactggatttggcgcatccttttccttgtcggcgctgctaccggcgcgcattccttcgaagaagttcagctggttgaatctggcggcggactggttcaacctggcggatctctgagactgagctgtgccgcctctggctacacctttagcagctactgggtcaactgggttcgacaggcccctggcaaaggactggaatgggtcgcccaaatctatcccggcgacggcgacaccaactacaacggcaagttcaagggcagattcaccatcagccgggacaacagcaagaacaccctgtacctccagatgaactccctgagagccgaggacaccgccgtgtactattgtgccagatccatcaccaccgtcgtgggctgcgctatggattattggggccagggaaccctggtcaccgtgtcctctacgcgtatccagaaccctgatcctgccgtgtaccagctgcgggatagcaagagcagcgacaagagcgtgtgtctgttcaccgacttcgacagccagaccaacgtgtcccagagcaaggactccgacgtgtacatcaccgataagtgcgtgctggacatgcggagcatggacttcaagagcaactccgccgtggcctggtccaacaagtccgatttcgcctgcgccaacgccttcaacaacagcattatccccgaggacacattcttcccaagccccgagagcagcagcgacgtgaagctggtggaaaagagcttcgagacagacaccaacctgaacttccagaacctgagcgtgatcggcttcagaatcctgctgctgaaagtggccggctttaacctgctgatgaccctgcggctgtggtccagc

SEQ ID NO: 36191 - DNA, 2706 bp, synthetic construct
  source 1..2706: mol_type = other DNA
atggccttaccagtgaccgccttgctcctgccgctggccttgctgctccacgccgccaggccggaggttcagctgcttgagtctggcggaggactggttcaacctggcggaagcctgagactgtcttgtgccgcctctggcagaaccttcagcatgggctggtatagacaggcccctggcaagggcctcgaatttgtgtctgccatcacatacagcggcggcagcccttactacgccgattctgtgaagggcagattcaccatcagccgggacaacagcaagaacaccgtgtacctccagatgaacagcctgagagccgaggacaccgccgtgtactactgtgccgccaatccaacctacggcagcgactggaatgccgagaattggggccagggcacactggtcacagtgtctagtggtaccggcggaggcggatctggcggcggaggtagcggtggcggaggatctgaattcgacatccagatgacacagagccctagcagcctgtctgccagcgtgggagacagagtgaccatcacatgcaaggccagcgaccacatcaacaactggctggcctggtatcagcagaagcctggcaaggcccctaagctgctgatctacggcgctaccacactggaaacaggcgtgcccagcagattttctggcagcggctctggcaccgacttcaccctgacaatatccagcctccagcctgaggacttcgccacctactactgtcagcagagctggaacaccccttggacattcggccagggcaccaaggtggaaatcaagagactcgagatccagaaccctgatcctgccgtgtaccagctgcgggatagcaagagcagcgacaagagcgtgtgtctgttcaccgacttcgacagccagaccaacgtgtcccagagcaaggactccgacgtgtacatcaccgataagtgcgtgctggacatgcggagcatggacttcaagagcaactccgccgtggcctggtccaacaagtccgatttcgcctgcgccaacgccttcaacaacagcattatccccgaggacacattcttcccaagcagcgacgtgccctgcgacgtgaagctggtggaaaagagcttcgagacagacaccaacctgaacttccagaacctgagcgtgatcggcttcagaatcctgctgctgaaagtggccggctttaacctgctgatgaccctgcggctgtggtccagccgcgccaagagaagcggatctggcgtgaagcagaccctgaatttcgacctgctgaagctggctggcgacgtggaatccaacccaggccctactagtaccatggactggatttggcgcatccttttccttgtcggcgctgctaccggcacccattccgggcccgaagtgcaactggttgaatccggtggcggcctggtgcaacccggcggatctctcagacttagctgtgccgcctccggcagaaccttcacaatgggatggtacaggcaggctccagggaaagagagagagttcgtcgccgccatctctctgtctcccacactggcctactacgccgactctgtgaaaggccggttcaccatctccagagataatagcaagaacaccgtggtgctgcaaatgaactctctgagagccgaggatacagccctgtactattgtgccgctgaccggaagtccgtgatgagcatcagacccgattactggggacagggcacactggtcacagtgtctagtggatccggcggcggaggatctggcggaggcggatctgggggcggaggctctttcgaagaagttcagctggttgaatctggcggcggactggttcaacctggcggatctctgagactgagctgtgccgcctctggctacacctttagcagctactgggtcaactgggttcgacaggcccctggcaaaggactggaatgggtcgcccaaatctatcccggcgacggcgacaccaactacaacggcaagttcaagggcagattcaccatcagccgggacaacagcaagaacaccctgtacctccagatgaactccctgagagccgaggacaccgccgtgtactattgtgccagatccatcaccaccgtcgtgggctgcgctatggattattggggccagggaaccctggtcaccgtgtcctctacgcgtgaggacctgaagaacgtgttcccacctgaggtggccgtgttcgagcctagcaaggccgagatcgcccacacccagaaagccaccctcgtgtgcctggctaccggcttctaccccgaccatgtggaactgtcttggtgggtcaacggcaaagaggtgcacagcggcgtgtgtaccgacccccagccactgaaagaacagcccgccctgaacgacagccggtactgcctgagcagcagactgagagtgtccgccaccttctggcagaacccccggaaccacttcagatgccaggtgcagttctacggcctgagcgagaacgacgagtggacccaggacagagccaagcccgtgacccagatcgtgtctgccgaagcctggggcagagccgattgcggcatcaccagcgccagctaccaccagggcgtgctgagcgccaccatcctgtacgagatcctgctgggcaaggccaccctgtacgccgtgctggtgtctgccctggtgctgatggctatggtcaagcggaaggacagccggggataa

SEQ ID NO: 36192 - DNA, 2706 bp, synthetic construct
  source 1..2706: mol_type = other DNA
atggccttaccagtgaccgccttgctcctgccgctggccttgctgctccacgccgccaggccggaagtgcagctggttgaatctggcggaggactggttcaggctggcggatctctgagactgtcttgtgccgccagcggcagaacctttagcatgggctggtttagacaggcccctggcaaagagagagagttcgtcgccgccatcacatactctggcggcagcccttactacgccgactctgtgaagggcagattcaccatcagccgggacaacgccaagaacaccgtgtacctccagatgaacagcctgaagcctgaggacaccgccgtgtactactgcgccgccaatccaacatacggcagcgactggaacgccgagaattggggccagggaacccaagtgacagtgtctagcggtaccggcggaggcggatctggcggcggaggtagcggtggcggaggatctgaattcgacatccagatgacacagagccctagcagcctgtctgccagcgtgggagacagagtgaccatcacatgcaaggccagcgaccacatcaacaactggctggcctggtatcagcagaagcctggcaaggcccctaagctgctgatctacggcgctaccacactggaaacaggcgtgcccagcagattttctggcagcggctctggcaccgacttcaccctgacaatatccagcctccagcctgaggacttcgccacctactactgtcagcagagctggaacaccccttggacattcggccagggcaccaaggtggaaatcaagagactcgagatccagaaccctgatcctgccgtgtaccagctgcgggatagcaagagcagcgacaagagcgtgtgtctgttcaccgacttcgacagccagaccaacgtgtcccagagcaaggactccgacgtgtacatcaccgataagtgcgtgctggacatgcggagcatggacttcaagagcaactccgccgtggcctggtccaacaagtccgatttcgcctgcgccaacgccttcaacaacagcattatccccgaggacacattcttcccaagcagcgacgtgccctgcgacgtgaagctggtggaaaagagcttcgagacagacaccaacctgaacttccagaacctgagcgtgatcggcttcagaatcctgctgctgaaagtggccggctttaacctgctgatgaccctgcggctgtggtccagccgcgccaagagaagcggatctggcgtgaagcagaccctgaatttcgacctgctgaagctggctggcgacgtggaatccaacccaggccctactagtaccatggactggatttggcgcatccttttccttgtcggcgctgctaccggcgcccattccgggcccgaagtgcaactggttgaatccggtggcggcctggtgcaacccggcggatctctcagacttagctgtgccgcctccggcagaaccttcacaatgggatggtacaggcaggctccagggaaagagagagagttcgtcgccgccatctctctgtctcccacactggcctactacgccgactctgtgaaaggccggttcaccatctccagagataatagcaagaacaccgtggtgctgcaaatgaactctctgagagccgaggatacagccctgtactattgtgccgctgaccggaagtccgtgatgagcatcagacccgattactggggacagggcacactggtcacagtgtctagtggatccggcggcggaggatctggcggaggcggatctgggggcggaggctctttcgaagaagttcagctggttgaatctggcggcggactggttcaacctggcggatctctgagactgagctgtgccgcctctggctacacctttagcagctactgggtcaactgggttcgacaggcccctggcaaaggactggaatgggtcgcccaaatctatcccggcgacggcgacaccaactacaacggcaagttcaagggcagattcaccatcagccgggacaacagcaagaacaccctgtacctccagatgaactccctgagagccgaggacaccgccgtgtactattgtgccagatccatcaccaccgtcgtgggctgcgctatggattattggggccagggaaccctggtcaccgtgtcctctacgcgtgaggacctgaagaacgtgttcccacctgaggtggccgtgttcgagcctagcaaggccgagatcgcccacacccagaaagccaccctcgtgtgcctggctaccggcttctaccccgaccatgtggaactgtcttggtgggtcaacggcaaagaggtgcacagcggcgtgtgtaccgacccccagccactgaaagaacagcccgccctgaacgacagccggtactgcctgagcagcagactgagagtgtccgccaccttctggcagaacccccggaaccacttcagatgccaggtgcagttctacggcctgagcgagaacgacgagtggacccaggacagagccaagcccgtgacccagatcgtgtctgccgaagcctggggcagagccgattgcggcatcaccagcgccagctaccaccagggcgtgctgagcgccaccatcctgtacgagatcctgctgggcaaggccaccctgtacgccgtgctggtgtctgccctggtgctgatggctatggtcaagcggaaggacagccggggataa

SEQ ID NO: 36193 - DNA, 2697 bp, synthetic construct
  source 1..2697: mol_type = other DNA
atggccttaccagtgaccgccttgctcctgccgctggccttgctgctccacgccgccaggccggaagtgcagctggttgaatctggcggaggactggttcaggctggcggatctctgagactgtcttgtgccgccagcggcagaacctttagcatgggctggtttagacaggcccctggcaaagagagagagttcgtcgccgccatcacatactctggcggcagcccttactacgccgactctgtgaagggcagattcaccatcagccgggacaacgccaagaacaccgtgtacctccagatgaacagcctgaagcctgaggacaccgccgtgtactactgcgccgccaatccaacatacggcagcgactggaacgccgagaattggggccagggaacccaagtgacagtgtctagcggtaccggcggaggcggatctggcggcggaggtagcggtggcggaggatctgaattcgacatccagatgacacagagccctagcagcctgtctgccagcgtgggagacagagtgaccatcacatgcaaggccagcgaccacatcaacaactggctggcctggtatcagcagaagcctggcaaggcccctaagctgctgatctacggcgctaccacactggaaacaggcgtgcccagcagattttctggcagcggctctggcaccgacttcaccctgacaatatccagcctccagcctgaggacttcgccacctactactgtcagcagagctggaacaccccttggacattcggccagggcaccaaggtggaaatcaagagactcgaggacctgaagaacgtgttcccacctgaggtggccgtgttcgagcctagcgaggccgagatcagccacacccagaaagccaccctcgtgtgcctggctaccggcttctaccccgaccatgtggaactgtcttggtgggtcaacggcaaagaggtgcacagcggcgtgtgtaccgacccccagccactgaaagaacagcccgccctgaacgacagccggtactgcctgagcagcagactgagagtgtccgccaccttctggcagaacccccggaaccacttcagatgccaggtgcagttctacggcctgagcgagaacgacgagtggacccaggacagagccaagcccgtgacccagatcgtgtctgccgaagcctggggcagagccgattgcggctttaccagcgagagctaccagcagggcgtgctgagcgccaccatcctgtacgagatcctgctgggcaaggccaccctgtacgccgtgctggtgtctgccctggtgctgatggctatggtcaagcggaaggacagccggggaagggccaagcgatctggatctggagcaacaaacttctcactactcaaacaagcaggtgacgtggaggagaatcccgggcctactagtgccaccatggactggatttggcgcatccttttccttgtcggcgctgctaccggcgcccattccgggcccgaagtgcaactggttgaatccggtggcggcctggtgcaagcaggcggatctctcagacttagctgtgccgcctccggcagaaccttcacaatgggatggtttaggcaggctccagggaaagagagagagttcgtcgccgccatctctctgtctcccacactggcctactacgccgactctgtgaaaggccggttcaccatctccagagataatgccaagaacaccgtggtgctgcaaatgaactctctgaaacccgaggatacagccctgtactattgtgccgctgaccggaagtccgtgatgagcatcagacccgattactggggacagggcacacaagtcacagtgtcctctggatccggcggcggaggatctggcggaggcggatctgggggcggaggctctttcgaagaagttcagctggttgaatctggcggcggactggttcaacctggcggatctctgagactgagctgtgccgcctctggctacacctttagcagctactgggtcaactgggttcgacaggcccctggcaaaggactggaatgggtcgcccaaatctatcccggcgacggcgacaccaactacaacggcaagttcaagggcagattcaccatcagccgggacaacagcaagaacaccctgtacctccagatgaactccctgagagccgaggacaccgccgtgtactattgtgccagatccatcaccaccgtcgtgggctgcgctatggattattggggccagggaaccctggtcaccgtgtcctctacgcgtatccagaaccctgatcctgccgtgtaccagctgcgggatagcaagagcagcgacaagagcgtgtgtctgttcaccgacttcgacagccagaccaacgtgtcccagagcaaggactccgacgtgtacatcaccgataagtgcgtgctggacatgcggagcatggacttcaagagcaactccgccgtggcctggtccaacaagtccgatttcgcctgcgccaacgccttcaacaacagcattatccccgaggacacattcttcccaagccccgagagcagctgcgacgtgaagctggtggaaaagagcttcgagacagacaccaacctgaacttccagaacctgagcgtgatcggcttcagaatcctgctgctgaaagtggccggctttaacctgctgatgaccctgcggctgtggtccagctaa

SEQ ID NO: 36194 - DNA, 2310 bp, synthetic construct
  source 1..2310: mol_type = other DNA
atggccttaccagtgaccgccttgctcctgccgctggccttgctgctccacgccgccaggccggaagtgcagctggttgaatctggcggaggactggttcagcctggcggatctctgagactgagctgtgaagccagcggcttcgccagcgacgattacatcatcggctggttcagacaggcccctggcaaagagagagagggcgtcagctgcatcagctctaagtacgccaacaccgtgtacaccgacagcgtgaagggcagattcagactgagcagaggcaccgccaagaataccgtgtacctccagatgagcgccctgaagcctgaggataccgccgtgtactactgcgctatggacagccgcagagtgacatgccctgagatcagcaccatgcaccggaacttcgattcttggggccagggcacactggtcacagtgtcatctggtaccggcggaggcggatctggcggcggaggtagcggtggcggaggatctgaattcgacatccagatgacacagagccctagcagcctgtctgccagcgtgggagacagagtgaccatcacatgcaaggccagcgaccacatcaacaactggctggcctggtatcagcagaagcctggcaaggcccctaagctgctgatctacggcgctaccacactggaaacaggcgtgcccagcagattttctggcagcggctctggcaccgacttcaccctgacaatatccagcctccagcctgaggacttcgccacctactactgtcagcagagctggaacaccccttggacattcggccagggcaccaaggtggaaatcaagagactcgaggacctgaagaacgtgttcccacctgaggtggccgtgttcgagcctagcaaggccgagatcgcccacacccagaaagccaccctcgtgtgcctggctaccggcttctaccccgaccatgtggaactgtcttggtgggtcaacggcaaagaggtgcacagcggcgtgtgtaccgacccccagccactgaaagaacagcccgccctgaacgacagccggtactgcctgagcagcagactgagagtgtccgccaccttctggcagaacccccggaaccacttcagatgccaggtgcagttctacggcctgagcgagaacgacgagtggacccaggacagagccaagcccgtgacccagatcgtgtctgccgaagcctggggcagagccgattgcggcatcaccagcgccagctaccaccagggcgtgctgagcgccaccatcctgtacgagatcctgctgggcaaggccaccctgtacgccgtgctggtgtctgccctggtgctgatggctatggtcaagcggaaggacagccggggaagggccaagcgatctggatctggagcaacaaacttctcactactcaaacaagcaggtgacgtggaggagaatcccgggcctactagtatggactggatttggcgcatccttttccttgtcggcgctgctaccggcgcgcattccttcgaagaagttcagctggttgaatctggcggcggactggttcaacctggcggatctctgagactgagctgtgccgcctctggctacacctttagcagctactgggtcaactgggttcgacaggcccctggcaaaggactggaatgggtcgcccaaatctatcccggcgacggcgacaccaactacaacggcaagttcaagggcagattcaccatcagccgggacaacagcaagaacaccctgtacctccagatgaactccctgagagccgaggacaccgccgtgtactattgtgccagatccatcaccaccgtcgtgggctgcgctatggattattggggccagggaaccctggtcaccgtgtcctctacgcgtatccagaaccctgatcctgccgtgtaccagctgcgggatagcaagagcagcgacaagagcgtgtgtctgttcaccgacttcgacagccagaccaacgtgtcccagagcaaggactccgacgtgtacatcaccgataagtgcgtgctggacatgcggagcatggacttcaagagcaactccgccgtggcctggtccaacaagtccgatttcgcctgcgccaacgccttcaacaacagcattatccccgaggacacattcttcccaagcagcgacgtgccctgcgacgtgaagctggtggaaaagagcttcgagacagacaccaacctgaacttccagaacctgagcgtgatcggcttcagaatcctgctgctgaaagtggccggctttaacctgctgatgaccctgcggctgtggtccagctaa

SEQ ID NO: 36195 - DNA, 2283 bp, synthetic construct
  source 1..2283: mol_type = other DNA
atggccttaccagtgaccgccttgctcctgccgctggccttgctgctccacgccgccaggccggacatccagatgacacagagccctagcagcctgtctgccagcgtgggagacagagtgaccatcacatgcaaggccagcgaccacatcaacaactggctggcctggtatcagcagaagcctggcaaggcccctaagctgctgatctacggcgctaccacactggaaacaggcgtgcccagcagattttctggcagcggctctggcaccgacttcaccctgacaatatccagcctccagcctgaggacttcgccacctactactgtcagcagagctggaacaccccttggacattcggccagggcaccaaggtggaaatcaagagactcgaggacctgaagaacgtgttcccacctgaggtggccgtgttcgagcctagcgaggccgagatcagccacacccagaaagccaccctcgtgtgcctggctaccggcttctaccccgaccatgtggaactgtcttggtgggtcaacggcaaagaggtgcacagcggcgtgtgtaccgacccccagccactgaaagaacagcccgccctgaacgacagccggtactgcctgagcagcagactgagagtgtccgccaccttctggcagaacccccggaaccacttcagatgccaggtgcagttctacggcctgagcgagaacgacgagtggacccaggacagagccaagcccgtgacccagatcgtgtctgccgaagcctggggcagagccgattgcggctttaccagcgagagctaccagcagggcgtgctgagcgccaccatcctgtacgagatcctgctgggcaaggccaccctgtacgccgtgctggtgtctgccctggtgctgatggctatggtcaagcggaaggacagccggggaagggccaagcgatctggatctggagcaacaaacttctcactactcaaacaagcaggtgacgtggaggagaatcccgggcctactagtaccatggactggatttggcgcatccttttccttgtcggcgctgctaccggcgcccattccgggcccgaagtgcaactggttgaatccggtggcggcctggtgcaacccggcggatctctcagacttagctgtgccgcctccggcagaaccttcacaatgggatggtacaggcaggctccagggaaagagagagagttcgtcgccgccatctctctgtctcccacactggcctactacgccgactctgtgaaaggccggttcaccatctccagagataatagcaagaacaccgtggtgctgcaaatgaactctctgagagccgaggatacagccctgtactattgtgccgctgaccggaagtccgtgatgagcatcagacccgattactggggacagggcacactggtcacagtgtctagtggatccggcggcggaggatctggcggaggcggatctgggggcggaggctctttcgaagaagttcagctggttgaatctggcggcggactggttcaacctggcggatctctgagactgagctgtgccgcctctggctacacctttagcagctactgggtcaactgggttcgacaggcccctggcaaaggactggaatgggtcgcccaaatctatcccggcgacggcgacaccaactacaacggcaagttcaagggcagattcaccatcagccgggacaacagcaagaacaccctgtacctccagatgaactccctgagagccgaggacaccgccgtgtactattgtgccagatccatcaccaccgtcgtgggctgcgctatggattattggggccagggaaccctggtcaccgtgtcctctacgcgtatccagaaccctgatcctgccgtgtaccagctgcgggatagcaagagcagcgacaagagcgtgtgtctgttcaccgacttcgacagccagaccaacgtgtcccagagcaaggactccgacgtgtacatcaccgataagtgcgtgctggacatgcggagcatggacttcaagagcaactccgccgtggcctggtccaacaagtccgatttcgcctgcgccaacgccttcaacaacagcattatccccgaggacacattcttcccaagccccgagagcagctgcgacgtgaagctggtggaaaagagcttcgagacagacaccaacctgaacttccagaacctgagcgtgatcggcttcagaatcctgctgctgaaagtggccggctttaacctgctgatgaccctgcggctgtggtccagctaa

SEQ ID NO: 36196 - DNA, 2301 bp, synthetic construct
  source 1..2301: mol_type = other DNA
atggccttaccagtgaccgccttgctcctgccgctggccttgctgctccacgccgccaggccggacatccagatgacacagagccctagcagcctgtctgccagcgtgggagacagagtgaccatcacatgcaaggccagcgaccacatcaacaactggctggcctggtatcagcagaagcctggcaaggcccctaagctgctgatctacggcgctaccacactggaaacaggcgtgcccagcagattttctggcagcggctctggcaccgacttcaccctgacaatatccagcctccagcctgaggacttcgccacctactactgtcagcagagctggaacaccccttggacattcggccagggcaccaaggtggaaatcaagagactcgaggacctgaagaacgtgttcccacctgaggtggccgtgttcgagcctagcgaggccgagatcagccacacccagaaagccaccctcgtgtgcctggctaccggcttctaccccgaccatgtggaactgtcttggtgggtcaacggcaaagaggtgcacagcggcgtgtgtaccgacccccagccactgaaagaacagcccgccctgaacgacagccggtactgcctgagcagcagactgagagtgtccgccaccttctggcagaacccccggaaccacttcagatgccaggtgcagttctacggcctgagcgagaacgacgagtggacccaggacagagccaagcccgtgacccagatcgtgtctgccgaagcctggggcagagccgattgcggctttaccagcgagagctaccagcagggcgtgctgagcgccaccatcctgtacgagatcctgctgggcaaggccaccctgtacgccgtgctggtgtctgccctggtgctgatggctatggtcaagcggaaggacagccggggaagggccaagcgatctggatctggagcaacaaacttctcactactcaaacaagcaggtgacgtggaggagaatcccgggcctactagtaccatggactggatttggcgcatccttttccttgtcggcgctgctaccggcgcccattccgggccccaggtgcagctggttgaatctggcggaggactggttcagcctggcggatctctgagactgtcttgtgccgccagcggcaacatcaacagcagaaactgcatgggctggttcagacaggcccctggcaagggaagagaaggcgtggcagctatcggccaagtgaccggcagaacctactacgtggacagcgtgaagggcagattcaccatcagcctggacaacagcaagaacaccctgtacctccagatgaacagcctgagagccgaggacaccgccgtgtactattgtgctgctgcccctggctgtctgctgtctgcacttagaagcgccgactacagaaactggggccagggcacactggtcaccgtttcttctggatccggcggcggaggatctggcggaggcggatctgggggcggaggctctttcgaagaagttcagctggttgaatctggcggcggactggttcaacctggcggatctctgagactgagctgtgccgcctctggctacacctttagcagctactgggtcaactgggttcgacaggcccctggcaaaggactggaatgggtcgcccaaatctatcccggcgacggcgacaccaactacaacggcaagttcaagggcagattcaccatcagccgggacaacagcaagaacaccctgtacctccagatgaactccctgagagccgaggacaccgccgtgtactattgtgccagatccatcaccaccgtcgtgggctgcgctatggattattggggccagggaaccctggtcaccgtgtcctctacgcgtatccagaaccctgatcctgccgtgtaccagctgcgggatagcaagagcagcgacaagagcgtgtgtctgttcaccgacttcgacagccagaccaacgtgtcccagagcaaggactccgacgtgtacatcaccgataagtgcgtgctggacatgcggagcatggacttcaagagcaactccgccgtggcctggtccaacaagtccgatttcgcctgcgccaacgccttcaacaacagcattatccccgaggacacattcttcccaagccccgagagcagctgcgacgtgaagctggtggaaaagagcttcgagacagacaccaacctgaacttccagaacctgagcgtgatcggcttcagaatcctgctgctgaaagtggccggctttaacctgctgatgaccctgcggctgtggtccagc

SEQ ID NO: 36197 - DNA, 2304 bp, synthetic construct
  source 1..2304: mol_type = other DNA
atggccttaccagtgaccgccttgctcctgccgctggccttgctgctccacgccgccaggccggacatccagatgacacagagccctagcagcctgtctgccagcgtgggagacagagtgaccatcacatgcaaggccagcgaccacatcaacaactggctggcctggtatcagcagaagcctggcaaggcccctaagctgctgatctacggcgctaccacactggaaacaggcgtgcccagcagattttctggcagcggctctggcaccgacttcaccctgacaatatccagcctccagcctgaggacttcgccacctactactgtcagcagagctggaacaccccttggacattcggccagggcaccaaggtggaaatcaagagactcgaggacctgaagaacgtgttcccacctgaggtggccgtgttcgagcctagcgaggccgagatcagccacacccagaaagccaccctcgtgtgcctggctaccggcttctaccccgaccatgtggaactgtcttggtgggtcaacggcaaagaggtgcacagcggcgtgtgtaccgacccccagccactgaaagaacagcccgccctgaacgacagccggtactgcctgagcagcagactgagagtgtccgccaccttctggcagaacccccggaaccacttcagatgccaggtgcagttctacggcctgagcgagaacgacgagtggacccaggacagagccaagcccgtgacccagatcgtgtctgccgaagcctggggcagagccgattgcggctttaccagcgagagctaccagcagggcgtgctgagcgccaccatcctgtacgagatcctgctgggcaaggccaccctgtacgccgtgctggtgtctgccctggtgctgatggctatggtcaagcggaaggacagccggggaagggccaagcgatctggatctggagcaacaaacttctcactactcaaacaagcaggtgacgtggaggagaatcccgggcctactagtaccatggactggatttggcgcatccttttccttgtcggcgctgctaccggcgcccattccgggccccaggtgcagctggttgaatctggcggaggatctgttcaggctggcggctctctgagactgtcttgtggcgcttccggcaacatcagcagcagaaactgcatgggctggttcagacaggcccctggcaaagagagagaaggcgttgccgccatcggacaagtgaccggcagatcctactacgtggacagcgtgaagggcagattcaccatcagcctggacaacgccaagaacaccctgtacctccagatgaacacactgaagcccgaggacaccgccatgtactactgtgctgctgcccctggctgtctgctgtctgcacttagaagcgccgactacagaaactggggccagggaacccaagtgacagtgtctagtggatccggcggcggaggatctggcggaggcggatctgggggcggaggctctttcgaagaagttcagctggttgaatctggcggcggactggttcaacctggcggatctctgagactgagctgtgccgcctctggctacacctttagcagctactgggtcaactgggttcgacaggcccctggcaaaggactggaatgggtcgcccaaatctatcccggcgacggcgacaccaactacaacggcaagttcaagggcagattcaccatcagccgggacaacagcaagaacaccctgtacctccagatgaactccctgagagccgaggacaccgccgtgtactattgtgccagatccatcaccaccgtcgtgggctgcgctatggattattggggccagggaaccctggtcaccgtgtcctctacgcgtatccagaaccctgatcctgccgtgtaccagctgcgggatagcaagagcagcgacaagagcgtgtgtctgttcaccgacttcgacagccagaccaacgtgtcccagagcaaggactccgacgtgtacatcaccgataagtgcgtgctggacatgcggagcatggacttcaagagcaactccgccgtggcctggtccaacaagtccgatttcgcctgcgccaacgccttcaacaacagcattatccccgaggacacattcttcccaagccccgagagcagctgcgacgtgaagctggtggaaaagagcttcgagacagacaccaacctgaacttccagaacctgagcgtgatcggcttcagaatcctgctgctgaaagtggccggctttaacctgctgatgaccctgcggctgtggtccagctaa

SEQ ID NO: 36198 - DNA, 2727 bp, synthetic construct
  source 1..2727: mol_type = other DNA
atggccttaccagtgaccgccttgctcctgccgctggccttgctgctccacgccgccaggccggaagtgcagctggttgaatctggcggaggactggttcaggctggcggatctctgagactgtcttgtgccgccagcggcagaacctttagcatgggctggtttagacaggcccctggcaaagagagagagttcgtcgccgccatcacatactctggcggcagcccttactacgccgactctgtgaagggcagattcaccatcagccgggacaacgccaagaacaccgtgtacctccagatgaacagcctgaagcctgaggacaccgccgtgtactactgcgccgccaatccaacatacggcagcgactggaacgccgagaattggggccagggaacccaagtgacagtgtctagcggtaccggcggaggcggatctggcggcggaggtagcggtggcggaggatctgaattcgacatccagatgacacagagccctagcagcctgtctgccagcgtgggagacagagtgaccatcacatgcaaggccagcgaccacatcaacaactggctggcctggtatcagcagaagcctggcaaggcccctaagctgctgatctacggcgctaccacactggaaacaggcgtgcccagcagattttctggcagcggctctggcaccgacttcaccctgacaatatccagcctccagcctgaggacttcgccacctactactgtcagcagagctggaacaccccttggacattcggccagggcaccaaggtggaaatcaagagactcgagatccagaaccctgatcctgccgtgtaccagctgcgggatagcaagagcagcgacaagagcgtgtgtctgttcaccgacttcgacagccagaccaacgtgtcccagagcaaggactccgacgtgtacatcaccgataagtgcgtgctggacatgcggagcatggacttcaagagcaactccgccgtggcctggtccaacaagtccgatttcgcctgcgccaacgccttcaacaacagcattatccccgaggacacattcttcccaagcagcgacgtgccctgcgacgtgaagctggtggaaaagagcttcgagacagacaccaacctgaacttccagaacctgagcgtgatcggcttcagaatcctgctgctgaaagtggccggctttaacctgctgatgaccctgcggctgtggtccagccgcgccaagagaagcggatctggcgtgaagcagaccctgaatttcgacctgctgaagctggctggcgacgtggaatccaacccaggccctactagtaccatggactggatttggcgcatccttttccttgtcggcgctgctaccggcgcccattccgggccccaggtgcagctggttgaatctggcggaggatctgttcaggctggcggctctctgagactgtcttgtggcgcttccggcaacatcagcagcagaaactgcatgggctggttcagacaggcccctggcaaagagagagaaggcgttgccgccatcggacaagtgaccggcagatcctactacgtggacagcgtgaagggcagattcaccatcagcctggacaacgccaagaacaccctgtacctccagatgaacacactgaagcccgaggacaccgccatgtactactgtgctgctgcccctggctgtctgctgtctgcacttagaagcgccgactacagaaactggggccagggaacccaagtgacagtgtctagtggatccggcggcggaggatctggcggaggcggatctgggggcggaggctctttcgaagaagttcagctggttgaatctggcggcggactggttcaacctggcggatctctgagactgagctgtgccgcctctggctacacctttagcagctactgggtcaactgggttcgacaggcccctggcaaaggactggaatgggtcgcccaaatctatcccggcgacggcgacaccaactacaacggcaagttcaagggcagattcaccatcagccgggacaacagcaagaacaccctgtacctccagatgaactccctgagagccgaggacaccgccgtgtactattgtgccagatccatcaccaccgtcgtgggctgcgctatggattattggggccagggaaccctggtcaccgtgtcctctacgcgtgaggacctgaagaacgtgttcccacctgaggtggccgtgttcgagcctagcaaggccgagatcgcccacacccagaaagccaccctcgtgtgcctggctaccggcttctaccccgaccatgtggaactgtcttggtgggtcaacggcaaagaggtgcacagcggcgtgtgtaccgacccccagccactgaaagaacagcccgccctgaacgacagccggtactgcctgagcagcagactgagagtgtccgccaccttctggcagaacccccggaaccacttcagatgccaggtgcagttctacggcctgagcgagaacgacgagtggacccaggacagagccaagcccgtgacccagatcgtgtctgccgaagcctggggcagagccgattgcggcatcaccagcgccagctaccaccagggcgtgctgagcgccaccatcctgtacgagatcctgctgggcaaggccaccctgtacgccgtgctggtgtctgccctggtgctgatggctatggtcaagcggaaggacagccggggataa

SEQ ID NO: 36199 - DNA, 2718 bp, synthetic construct
  source 1..2718: mol_type = other DNA
atggccttaccagtgaccgccttgctcctgccgctggccttgctgctccacgccgccaggccgcaggtgcagctggttgaatctggcggaggatctgttcaggctggcggctctctgagactgtcttgtggcgcttccggcaacatcagcagcagaaactgcatgggctggttcagacaggcccctggcaaagagagagaaggcgttgccgccatcggacaagtgaccggcagatcctactacgtggacagcgtgaagggcagattcaccatcagcctggacaacgccaagaacaccctgtacctccagatgaacacactgaagcccgaggacaccgccatgtactactgtgctgctgcccctggctgtctgctgtctgcacttagaagcgccgactacagaaactggggccagggaacccaagtgacagtgtctagtggtaccggcggaggcggatctggcggcggaggtagcggtggcggaggatctgaattcgacatccagatgacacagagccctagcagcctgtctgccagcgtgggagacagagtgaccatcacatgcaaggccagcgaccacatcaacaactggctggcctggtatcagcagaagcctggcaaggcccctaagctgctgatctacggcgctaccacactggaaacaggcgtgcccagcagattttctggcagcggctctggcaccgacttcaccctgacaatatccagcctccagcctgaggacttcgccacctactactgtcagcagagctggaacaccccttggacattcggccagggcaccaaggtggaaatcaagagactcgaggacctgaagaacgtgttcccacctgaggtggccgtgttcgagcctagcgaggccgagatcagccacacccagaaagccaccctcgtgtgcctggctaccggcttctaccccgaccatgtggaactgtcttggtgggtcaacggcaaagaggtgcacagcggcgtgtgtaccgacccccagccactgaaagaacagcccgccctgaacgacagccggtactgcctgagcagcagactgagagtgtccgccaccttctggcagaacccccggaaccacttcagatgccaggtgcagttctacggcctgagcgagaacgacgagtggacccaggacagagccaagcccgtgacccagatcgtgtctgccgaagcctggggcagagccgattgcggctttaccagcgagagctaccagcagggcgtgctgagcgccaccatcctgtacgagatcctgctgggcaaggccaccctgtacgccgtgctggtgtctgccctggtgctgatggctatggtcaagcggaaggacagccggggaagggccaagcgatctggatctggagcaacaaacttctcactactcaaacaagcaggtgacgtggaggagaatcccgggcctactagtgccaccatggactggatttggcgcatccttttccttgtcggcgctgctaccggcgcccattccgggcccgaagtgcaactggttgaatccggtggcggcctggtgcaagcaggcggatctctcagacttagctgtgccgcctccggcagaaccttcacaatgggatggtttaggcaggctccagggaaagagagagagttcgtcgccgccatctctctgtctcccacactggcctactacgccgactctgtgaaaggccggttcaccatctccagagataatgccaagaacaccgtggtgctgcaaatgaactctctgaaacccgaggatacagccctgtactattgtgccgctgaccggaagtccgtgatgagcatcagacccgattactggggacagggcacacaagtcacagtgtcctctggatccggcggcggaggatctggcggaggcggatctgggggcggaggctctttcgaagaagttcagctggttgaatctggcggcggactggttcaacctggcggatctctgagactgagctgtgccgcctctggctacacctttagcagctactgggtcaactgggttcgacaggcccctggcaaaggactggaatgggtcgcccaaatctatcccggcgacggcgacaccaactacaacggcaagttcaagggcagattcaccatcagccgggacaacagcaagaacaccctgtacctccagatgaactccctgagagccgaggacaccgccgtgtactattgtgccagatccatcaccaccgtcgtgggctgcgctatggattattggggccagggaaccctggtcaccgtgtcctctacgcgtatccagaaccctgatcctgccgtgtaccagctgcgggatagcaagagcagcgacaagagcgtgtgtctgttcaccgacttcgacagccagaccaacgtgtcccagagcaaggactccgacgtgtacatcaccgataagtgcgtgctggacatgcggagcatggacttcaagagcaactccgccgtggcctggtccaacaagtccgatttcgcctgcgccaacgccttcaacaacagcattatccccgaggacacattcttcccaagccccgagagcagctgcgacgtgaagctggtggaaaagagcttcgagacagacaccaacctgaacttccagaacctgagcgtgatcggcttcagaatcctgctgctgaaagtggccggctttaacctgctgatgaccctgcggctgtggtccagctaa

SEQ ID NO: 36200 - DNA, 2307 bp, synthetic construct
  source 1..2307: mol_type = other DNA
atggccttaccagtgaccgccttgctcctgccgctggccttgctgctccacgccgccaggccgcaggtgcagctggttgaatctggcggaggatctgttcaggctggcggctctctgagactgtcttgtggcgcttccggcaacatcagcagcagaaactgcatgggctggttcagacaggcccctggcaaagagagagaaggcgttgccgccatcggacaagtgaccggcagatcctactacgtggacagcgtgaagggcagattcaccatcagcctggacaacgccaagaacaccctgtacctccagatgaacacactgaagcccgaggacaccgccatgtactactgtgctgctgcccctggctgtctgctgtctgcacttagaagcgccgactacagaaactggggccagggaacccaagtgacagtgtctagtggtaccggcggaggcggatctggcggcggaggtagcggtggcggaggatctgaattcgacatccagatgacacagagccctagcagcctgtctgccagcgtgggagacagagtgaccatcacatgcaaggccagcgaccacatcaacaactggctggcctggtatcagcagaagcctggcaaggcccctaagctgctgatctacggcgctaccacactggaaacaggcgtgcccagcagattttctggcagcggctctggcaccgacttcaccctgacaatatccagcctccagcctgaggacttcgccacctactactgtcagcagagctggaacaccccttggacattcggccagggcaccaaggtggaaatcaagagactcgaggacctgaagaacgtgttcccacctgaggtggccgtgttcgagcctagcgaggccgagatcagccacacccagaaagccaccctcgtgtgcctggctaccggcttctaccccgaccatgtggaactgtcttggtgggtcaacggcaaagaggtgcacagcggcgtgtgtaccgacccccagccactgaaagaacagcccgccctgaacgacagccggtactgcctgagcagcagactgagagtgtccgccaccttctggcagaacccccggaaccacttcagatgccaggtgcagttctacggcctgagcgagaacgacgagtggacccaggacagagccaagcccgtgacccagatcgtgtctgccgaagcctggggcagagccgattgcggctttaccagcgagagctaccagcagggcgtgctgagcgccaccatcctgtacgagatcctgctgggcaaggccaccctgtacgccgtgctggtgtctgccctggtgctgatggctatggtcaagcggaaggacagccggggaagggccaagcgatctggatctggagcaacaaacttctcactactcaaacaagcaggtgacgtggaggagaatcccgggcctactagtgccaccatggactggatttggcgcatccttttccttgtcggcgctgctaccggcgcccattccttcgaagaagttcagctggttgaatctggcggcggactggttcaacctggcggatctctgagactgagctgtgccgcctctggctacacctttagcagctactgggtcaactgggttcgacaggcccctggcaaaggactggaatgggtcgcccaaatctatcccggcgacggcgacaccaactacaacggcaagttcaagggcagattcaccatcagccgggacaacagcaagaacaccctgtacctccagatgaactccctgagagccgaggacaccgccgtgtactattgtgccagatccatcaccaccgtcgtgggctgcgctatggattattggggccagggaaccctggtcaccgtgtcctctacgcgtatccagaaccctgatcctgccgtgtaccagctgcgggatagcaagagcagcgacaagagcgtgtgtctgttcaccgacttcgacagccagaccaacgtgtcccagagcaaggactccgacgtgtacatcaccgataagtgcgtgctggacatgcggagcatggacttcaagagcaactccgccgtggcctggtccaacaagtccgatttcgcctgcgccaacgccttcaacaacagcattatccccgaggacacattcttcccaagccccgagagcagctgcgacgtgaagctggtggaaaagagcttcgagacagacaccaacctgaacttccagaacctgagcgtgatcggcttcagaatcctgctgctgaaagtggccggctttaacctgctgatgaccctgcggctgtggtccagctaa

SEQ ID NO: 36201 - DNA, 2307 bp, synthetic construct
  source 1..2307: mol_type = other DNA
atggccttaccagtgaccgccttgctcctgccgctggccttgctgctccacgccgccaggccgcaagttcagctggtggaaagcggtggtggcgttgtgcaacctggtggaagtctgaggctgagctgtgccgcttctggcctgagctttagcacctacactgtggcctggttcaggcaggctcccggaaagggtcttgaaggcgtggccgccattccttacaccagccagcacatggtgtacacagacagcgtcagaggccggttcaccatcagcagagacaactccaagaatacgctctatctccagatgaactctctgcgcgccgaagatacagccgtgtattactgcgccaccgacagacggcctggcacctctatgctggctatcaacggctacaacagatggggacagggaaccaccgtgaccgtgtcatctggtaccggcggaggcggatctggcggcggaggtagcggtggcggaggatctgaattcgacatccagatgacacagagccctagcagcctgtctgccagcgtgggagacagagtgaccatcacatgcaaggccagcgaccacatcaacaactggctggcctggtatcagcagaagcctggcaaggcccctaagctgctgatctacggcgctaccacactggaaacaggcgtgcccagcagattttctggcagcggctctggcaccgacttcaccctgacaatatccagcctccagcctgaggacttcgccacctactactgtcagcagagctggaacaccccttggacattcggccagggcaccaaggtggaaatcaagagactcgaggacctgaagaacgtgttcccacctgaggtggccgtgttcgagcctagcgaggccgagatcagccacacccagaaagccaccctcgtgtgcctggctaccggcttctaccccgaccatgtggaactgtcttggtgggtcaacggcaaagaggtgcacagcggcgtgtgtaccgacccccagccactgaaagaacagcccgccctgaacgacagccggtactgcctgagcagcagactgagagtgtccgccaccttctggcagaacccccggaaccacttcagatgccaggtgcagttctacggcctgagcgagaacgacgagtggacccaggacagagccaagcccgtgacccagatcgtgtctgccgaagcctggggcagagccgattgcggctttaccagcgagagctaccagcagggcgtgctgagcgccaccatcctgtacgagatcctgctgggcaaggccaccctgtacgccgtgctggtgtctgccctggtgctgatggctatggtcaagcggaaggacagccggggaagggccaagcgatctggatctggagcaacaaacttctcactactcaaacaagcaggtgacgtggaggagaatcccgggcctactagtgccaccatggactggatttggcgcatccttttccttgtcggcgctgctaccggcgcccattccttcgaagaagttcagctggttgaatctggcggcggactggttcaacctggcggatctctgagactgagctgtgccgcctctggctacacctttagcagctactgggtcaactgggttcgacaggcccctggcaaaggactggaatgggtcgcccaaatctatcccggcgacggcgacaccaactacaacggcaagttcaagggcagattcaccatcagccgggacaacagcaagaacaccctgtacctccagatgaactccctgagagccgaggacaccgccgtgtactattgtgccagatccatcaccaccgtcgtgggctgcgctatggattattggggccagggaaccctggtcaccgtgtcctctacgcgtatccagaaccctgatcctgccgtgtaccagctgcgggatagcaagagcagcgacaagagcgtgtgtctgttcaccgacttcgacagccagaccaacgtgtcccagagcaaggactccgacgtgtacatcaccgataagtgcgtgctggacatgcggagcatggacttcaagagcaactccgccgtggcctggtccaacaagtccgatttcgcctgcgccaacgccttcaacaacagcattatccccgaggacacattcttcccaagccccgagagcagctgcgacgtgaagctggtggaaaagagcttcgagacagacaccaacctgaacttccagaacctgagcgtgatcggcttcagaatcctgctgctgaaagtggccggctttaacctgctgatgaccctgcggctgtggtccagctaa

SEQ ID NO: 36202 - DNA, 2304 bp, synthetic construct
  source 1..2304: mol_type = other DNA
atggccttaccagtgaccgccttgctcctgccgctggccttgctgctccacgccgccaggccggacatccagatgacacagagccctagcagcctgtctgccagcgtgggagacagagtgaccatcacatgcaaggccagcgaccacatcaacaactggctggcctggtatcagcagaagcctggcaaggcccctaagctgctgatctacggcgctaccacactggaaacaggcgtgcccagcagattttctggcagcggctctggcaccgacttcaccctgacaatatccagcctccagcctgaggacttcgccacctactactgtcagcagagctggaacaccccttggacattcggccagggcaccaaggtggaaatcaagagactcgaggacctgaagaacgtgttcccacctgaggtggccgtgttcgagcctagcgaggccgagatcagccacacccagaaagccaccctcgtgtgcctggctaccggcttctaccccgaccatgtggaactgtcttggtgggtcaacggcaaagaggtgcacagcggcgtgtgtaccgacccccagccactgaaagaacagcccgccctgaacgacagccggtactgcctgagcagcagactgagagtgtccgccaccttctggcagaacccccggaaccacttcagatgccaggtgcagttctacggcctgagcgagaacgacgagtggacccaggacagagccaagcccgtgacccagatcgtgtctgccgaagcctggggcagagccgattgcggctttaccagcgagagctaccagcagggcgtgctgagcgccaccatcctgtacgagatcctgctgggcaaggccaccctgtacgccgtgctggtgtctgccctggtgctgatggctatggtcaagcggaaggacagccggggaagggccaagcgatctggatctggagcaacaaacttctcactactcaaacaagcaggtgacgtggaggagaatcccgggcctactagtaccatggactggatttggcgcatccttttccttgtcggcgctgctaccggcgcccattccgggccccaagttcagctggtggaaagcggtggtggcgttgtgcaacctggtggaagtctgaggctgagctgtgccgcttctggcctgagctttagcacctacactgtggcctggttcaggcaggctcccggaaagggtcttgaaggcgtggccgccattccttacaccagccagcacatggtgtacacagacagcgtcagaggccggttcaccatcagcagagacaactccaagaatacgctctatctccagatgaactctctgcgcgccgaagatacagccgtgtattactgcgccaccgacagacggcctggcacctctatgctggctatcaacggctacaacagatggggacagggaaccaccgtgaccgtgtcatctggatccggcggcggaggatctggcggaggcggatctgggggcggaggctctttcgaagaagttcagctggttgaatctggcggcggactggttcaacctggcggatctctgagactgagctgtgccgcctctggctacacctttagcagctactgggtcaactgggttcgacaggcccctggcaaaggactggaatgggtcgcccaaatctatcccggcgacggcgacaccaactacaacggcaagttcaagggcagattcaccatcagccgggacaacagcaagaacaccctgtacctccagatgaactccctgagagccgaggacaccgccgtgtactattgtgccagatccatcaccaccgtcgtgggctgcgctatggattattggggccagggaaccctggtcaccgtgtcctctacgcgtatccagaaccctgatcctgccgtgtaccagctgcgggatagcaagagcagcgacaagagcgtgtgtctgttcaccgacttcgacagccagaccaacgtgtcccagagcaaggactccgacgtgtacatcaccgataagtgcgtgctggacatgcggagcatggacttcaagagcaactccgccgtggcctggtccaacaagtccgatttcgcctgcgccaacgccttcaacaacagcattatccccgaggacacattcttcccaagccccgagagcagctgcgacgtgaagctggtggaaaagagcttcgagacagacaccaacctgaacttccagaacctgagcgtgatcggcttcagaatcctgctgctgaaagtggccggctttaacctgctgatgaccctgcggctgtggtccagctaa

SEQ ID NO: 36203 - DNA, 2310 bp, synthetic construct
  source 1..2310: mol_type = other DNA
atggccttaccagtgaccgccttgctcctgccgctggccttgctgctccacgccgccaggccggacatccagatgacacagagccctagcagcctgtctgccagcgtgggagacagagtgaccatcacatgcaaggccagcgaccacatcaacaactggctggcctggtatcagcagaagcctggcaaggcccctaagctgctgatctacggcgctaccacactggaaacaggcgtgcccagcagattttctggcagcggctctggcaccgacttcaccctgacaatatccagcctccagcctgaggacttcgccacctactactgtcagcagagctggaacaccccttggacattcggccagggcaccaaggtggaaatcaagagactcgaggacctgaagaacgtgttcccacctgaggtggccgtgttcgagcctagcgaggccgagatcagccacacccagaaagccaccctcgtgtgcctggctaccggcttctaccccgaccatgtggaactgtcttggtgggtcaacggcaaagaggtgcacagcggcgtgtgtaccgacccccagccactgaaagaacagcccgccctgaacgacagccggtactgcctgagcagcagactgagagtgtccgccaccttctggcagaacccccggaaccacttcagatgccaggtgcagttctacggcctgagcgagaacgacgagtggacccaggacagagccaagcccgtgacccagatcgtgtctgccgaagcctggggcagagccgattgcggctttaccagcgagagctaccagcagggcgtgctgagcgccaccatcctgtacgagatcctgctgggcaaggccaccctgtacgccgtgctggtgtctgccctggtgctgatggctatggtcaagcggaaggacagccggggaagggccaagcgatctggatctggagcaacaaacttctcactactcaaacaagcaggtgacgtggaggagaatcccgggcctactagtaccatggactggatttggcgcatccttttccttgtcggcgctgctaccggcgcccattccgggcccgaggtgcagctggttgaatctggcggaggatctgttcaggctggcggctctctgagactgtcttgtgccgccagcggctacacctacagcatcaactgcatgggctggttcagacaggcccctggcaaagagagagaaggcgttgccgccatctctaccggcggaggcagaaccgattaccgggattctgtgaagggcagattcaccatcagccaggacaacgccaagaacaccgtgtacctccagatgaacagcctgaagcctgaggacaccgccatgtactactgtgccggcaagaccacctatcctggctacggatgtggcctgggcagaagcgcctacaattattggggccagggcacccaagtgaccgtgtcatctggatccggcggcggaggatctggcggaggcggatctgggggcggaggctctttcgaagaagttcagctggttgaatctggcggcggactggttcaacctggcggatctctgagactgagctgtgccgcctctggctacacctttagcagctactgggtcaactgggttcgacaggcccctggcaaaggactggaatgggtcgcccaaatctatcccggcgacggcgacaccaactacaacggcaagttcaagggcagattcaccatcagccgggacaacagcaagaacaccctgtacctccagatgaactccctgagagccgaggacaccgccgtgtactattgtgccagatccatcaccaccgtcgtgggctgcgctatggattattggggccagggaaccctggtcaccgtgtcctctacgcgtatccagaaccctgatcctgccgtgtaccagctgcgggatagcaagagcagcgacaagagcgtgtgtctgttcaccgacttcgacagccagaccaacgtgtcccagagcaaggactccgacgtgtacatcaccgataagtgcgtgctggacatgcggagcatggacttcaagagcaactccgccgtggcctggtccaacaagtccgatttcgcctgcgccaacgccttcaacaacagcattatccccgaggacacattcttcccaagccccgagagcagctgcgacgtgaagctggtggaaaagagcttcgagacagacaccaacctgaacttccagaacctgagcgtgatcggcttcagaatcctgctgctgaaagtggccggctttaacctgctgatgaccctgcggctgtggtccagctaa

SEQ ID NO: 36204 - DNA, 1866 bp, synthetic construct
  source 1..1866: mol_type = other DNA
atggccttaccagtgaccgccttgctcctgccgctggccttgctgctccacgccgccaggccggacatccagatgacacagagccctagcagcctgtctgccagcgtgggagacagagtgaccatcacatgcaaggccagcgaccacatcaacaactggctggcctggtatcagcagaagcctggcaaggcccctaagctgctgatctacggcgctaccacactggaaacaggcgtgcccagcagattttctggcagcggctctggcaccgacttcaccctgacaatatccagcctccagcctgaggacttcgccacctactactgtcagcagagctggaacaccccttggacattcggccagggcaccaaggtggaaatcaagagactcgaggacctgaagcacgtgttcccacctgaggtggccgtgttcgagcctagcgacgccgagatctggcacacccagaaagccaccctcgtgtgcctggctaccggcttctaccccgaccatgtggaactgtcttggtgggtcaacggcaaagaggtgcacagcggcgtgtctaccgacccccagccactgaaagaacagcccgccctgaacgacagccggtactgcctgagcagcagactgagagtgtccgccaccttctggcagaacccccggaaccacttcagatgccaggtgcagttctacggcctgagcgagaacgacgagtggacccaggacagagccaagcccgtgacccagatcgtgtctgccgaagcctggggcagagccgattgcggctttaccagcgagagctaccagcagggcgtgctgagcgccaccatcctgtacgagatcctgctgggcaaggccaccctgtacgccgtgctggtgtctgccctggtgctgatggctatggtcaagcggaaggacagccggggaagggccaagcgatctggatctggagcaacaaacttctcactactcaaacaagcaggtgacgtggaggagaatcccgggcctactagtatggactggatttggcgcatccttttccttgtcggcgctgctaccggcgcgcattccttcgaagaagttcagctggttgaatctggcggcggactggttcaacctggcggatctctgagactgagctgtgccgcctctggctacacctttagcagctactgggtcaactgggttcgacaggcccctggcaaaggactggaatgggtcgcccaaatctatcccggcgacggcgacaccaactacaacggcaagttcaagggcagattcaccatcagccgggacaacagcaagaacaccctgtacctccagatgaactccctgagagccgaggacaccgccgtgtactattgtgccagatccatcaccaccgtcgtgggctgcgctatggattattggggccagggaaccctggtcaccgtgtcctctacgcgtatccagaaccctgatcctgccgtgtaccagctgcgggatagcaagagcagcgacaagagcgtgtgtctgttcaccgacttcgacagccagaccaacgtgtcccagagcaaggactccgacgtgtacatcaccgataagaccgtgctggacatgcggagcatggacttcaagagcaactccgccgtggcctggtccagcaagtccgatttcgcctgcgccaacgccttcaacaacagcattatccccgaggacacattcttcccaagccccgagatggcctgcgacgtgaagctggtggaaaagagcttcgagacagacaccaacctgaacttccagaacctgctcgtgatctggctgagaatcctgctgctgaaagtggccggctttaacctgctgatgaccctgcggctgtggtccagc

SEQ ID NO: 36205 - DNA, 1866 bp, synthetic construct
  source 1..1866: mol_type = other DNA
atggccttaccagtgaccgccttgctcctgccgctggccttgctgctccacgccgccaggccggacatccagatgacacagagccctagcagcctgtctgccagcgtgggagacagagtgaccatcacatgcaaggccagcgaccacatcaacaactggctggcctggtatcagcagaagcctggcaaggcccctaagctgctgatctacggcgctaccacactggaaacaggcgtgcccagcagattttctggcagcggctctggcaccgacttcaccctgacaatatccagcctccagcctgaggacttcgccacctactactgtcagcagagctggaacaccccttggacattcggccagggcaccaaggtggaaatcaagagactcgaggacctgaagcacgtgttcccacctgaggtggccgtgttcgagcctagcgacgccgagatctggcacacccagaaagccaccctcgtgtgcctggctaccggcttctaccccgaccatgtggaactgtcttggtgggtcaacggcaaagaggtgcacagcggcgtgtctaccgacccccagccactgaaagaacagcccgccctgaacgacagccggtactgcctgagcagcagactgagagtgtccgccaccttctggcagaacccccggaaccacttcagatgccaggtgcagttctacggcctgagcgagaacgacgagtggacccaggacagagccaagcccgtgacccagatcgtgtctgccgaagcctggggcagagccgattgcggctttaccagcgagagctaccagcagggcgtgctgagcgccaccatcctgtacgagatcctgctgggcaaggccaccctgtacgccgtgctggtgtctgccctggtgctgatggctatggtcaagcggaaggacagccggggaagggccaagcgatctggatctggagcaacaaacttctcactactcaaacaagcaggtgacgtggaggagaatcccgggcctactagtatggactggatttggcgcatccttttccttgtcggcgctgctaccggcgcgcattccttcgaagaagttcagctggttgaatctggcggcggactggttcaacctggcggatctctgagactgagctgtgccgcctctggctacacctttagcagctactgggtcaactgggttcgacaggcccctggcaaaggactggaatgggtcgcccaaatctatcccggcgacggcgacaccaactacaacggcaagttcaagggcagattcaccatcagccgggacaacagcaagaacaccctgtacctccagatgaactccctgagagccgaggacaccgccgtgtactattgtgccagatccatcaccaccgtcgtgggctgcgctatggattattggggccagggaaccctggtcaccgtgtcctctacgcgtatccagaaccctgatcctgccgtgtaccagctgcgggatagcaagagcagcgacaagagcgtgtgtctgttcaccgacttcgacagccagaccaacgtgtcccagagcaaggactccgacgtgtacatcaccgataagaccgtgctggacatgcggagcatggacttcaagagcaactccgccgtggcctggtccaccaagtccgatttcgcctgcgccaacgccttcaacaacagcattatccccgaggacacattcttcccaagccccgaggtggtgtgcgacgtgaagctggtggaaaagagcttcgagacagacaccaacctgaacttccagaacctggtggtgatcggcgccagaatcctgctgctgaaagtggccggctttaacctgctgatgaccctgcggctgtggtccagc

SEQ ID NO: 36206 - DNA, 1866 bp, synthetic construct
  source 1..1866: mol_type = other DNA
atggccttaccagtgaccgccttgctcctgccgctggccttgctgctccacgccgccaggccggacatccagatgacacagagccctagcagcctgtctgccagcgtgggagacagagtgaccatcacatgcaaggccagcgaccacatcaacaactggctggcctggtatcagcagaagcctggcaaggcccctaagctgctgatctacggcgctaccacactggaaacaggcgtgcccagcagattttctggcagcggctctggcaccgacttcaccctgacaatatccagcctccagcctgaggacttcgccacctactactgtcagcagagctggaacaccccttggacattcggccagggcaccaaggtggaaatcaagagactcgaggacctgaagaacgtgttcccacctgaggtggccgtgttcgagcctagcaaggccgagatcagcagaacccagaaagccaccctcgtgtgcctggctaccggcttctaccctcctcatgtggaactgtcttggtgggtcaacggcaaagaggtgcacgacggcgtgtgtaccgacccccagccactgaaagaacagcccgccctgaacgacagccggtactgcctgagcagcagactgagagtgtccgccaccttctggcagaacccccggaaccacttcagatgccaggtgcagttctacggcctgagcgagaacgacgagtggacccaggacagagccaagcccgtgacccagatcgtgtctgccgaagcctggggcagagccgattgcggctttaccagcgagagctaccagcagggcgtgctgagcgccaccatcctgtacgagatcctgctgggcaaggccaccctgtacgccgtgctggtgtctgccctggtgctgatggctatggtcaagcggaaggacagccggggaagggccaagcgatctggatctggagcaacaaacttctcactactcaaacaagcaggtgacgtggaggagaatcccgggcctactagtatggactggatttggcgcatccttttccttgtcggcgctgctaccggcgcgcattccttcgaagaagttcagctggttgaatctggcggcggactggttcaacctggcggatctctgagactgagctgtgccgcctctggctacacctttagcagctactgggtcaactgggttcgacaggcccctggcaaaggactggaatgggtcgcccaaatctatcccggcgacggcgacaccaactacaacggcaagttcaagggcagattcaccatcagccgggacaacagcaagaacaccctgtacctccagatgaactccctgagagccgaggacaccgccgtgtactattgtgccagatccatcaccaccgtcgtgggctgcgctatggattattggggccagggaaccctggtcaccgtgtcctctacgcgtatccagaaccctgatcctgccgtgtaccagctgcgggatagcaagagcagcgacaagttcgtgtgtctgttcaccgacttcgacagccagatcaacgtgtcccagagcaaggactccgacgtgtacatcaccgataagtgcgtgctggacatgcggagcatggacttcaagagcaactccgccgtggcctggtccaacaagtccgatttcacctgcgccaacgccttcaacaacagcattatccccgaggacacattcttcccaagccccgagagcagctgcgacgtgaagctggtggaaaagagcttcgagacagacaccaacctgaacttccagaacctgagcgtgatcggcttcagaatcctgctgctgaaagtggccggctttaacctgctgatgaccctgcggctgtggtccagc

SEQ ID NO: 36207 - DNA, 2292 bp, synthetic construct
  source 1..2292: mol_type = other DNA
atggccttaccagtgaccgccttgctcctgccgctggccttgctgctccacgccgccaggccggacatccagatgacacagagccctagcagcctgtctgccagcgtgggagacagagtgaccatcacatgcaaggccagcgaccacatcaacaactggctggcctggtatcagcagaagcctggcaaggcccctaagctgctgatctacggcgctaccacactggaaacaggcgtgcccagcagattttctggcagcggctctggcaccgacttcaccctgacaatatccagcctccagcctgaggacttcgccacctactactgtcagcagagctggaacaccccttggacattcggccagggcaccaaggtggaaatcaagagactcgaggacctgaagaacgtgttcccacctgaggtggccgtgttcgagcctagcgaggccgagatcagccacacccagaaagccaccctcgtgtgcctggctaccggcttctaccccgaccatgtggaactgtcttggtgggtcaacggcaaagaggtgcacagcggcgtgtgtaccgacccccagccactgaaagaacagcccgccctgaacgacagccggtactgcctgagcagcagactgagagtgtccgccaccttctggcagaacccccggaaccacttcagatgccaggtgcagttctacggcctgagcgagaacgacgagtggacccaggacagagccaagcccgtgacccagatcgtgtctgccgaagcctggggcagagccgattgcggctttaccagcgagagctaccagcagggcgtgctgagcgccaccatcctgtacgagatcctgctgggcaaggccaccctgtacgccgtgctggtgtctgccctggtgctgatggctatggtcaagcggaaggacagccggggaagggccaagcgatctggatctggagcaacaaacttctcactactcaaacaagcaggtgacgtggaggagaatcccgggcctactagtaccatggactggatttggcgcatccttttccttgtcggcgctgctaccggcgcccattccgggccccaggtgcagctccaagaaagcggacccggactggttaagccctctcagaccctgtctctgacctgcacagttagcggagccagcattaccacaggcgagtattattggaattggtttcggcagccaccaggcaaggggcttgagtggatgggtgctattgctgcctctggcagcaccacctactctcccagctttgagagcagaacctccatcagccgggacacctccaaaaaccagttctctctgaagctgtcctccgtgaccgctgctgacaccgccgtctattattgtggccggtctttcggcgtggcagctgtgaccacaggacagaacagaggccagggaacacttgtgaccgtgtcctctggatccggcggcggaggatctggcggaggcggatctgggggcggaggctctttcgaagaagttcagctggttgaatctggcggcggactggttcaacctggcggatctctgagactgagctgtgccgcctctggctacacctttagcagctactgggtcaactgggttcgacaggcccctggcaaaggactggaatgggtcgcccaaatctatcccggcgacggcgacaccaactacaacggcaagttcaagggcagattcaccatcagccgggacaacagcaagaacaccctgtacctccagatgaactccctgagagccgaggacaccgccgtgtactattgtgccagatccatcaccaccgtcgtgggctgcgctatggattattggggccagggaaccctggtcaccgtgtcctctacgcgtatccagaaccctgatcctgccgtgtaccagctgcgggatagcaagagcagcgacaagagcgtgtgtctgttcaccgacttcgacagccagaccaacgtgtcccagagcaaggactccgacgtgtacatcaccgataagtgcgtgctggacatgcggagcatggacttcaagagcaactccgccgtggcctggtccaacaagtccgatttcgcctgcgccaacgccttcaacaacagcattatccccgaggacacattcttcccaagccccgagagcagctgcgacgtgaagctggtggaaaagagcttcgagacagacaccaacctgaacttccagaacctgagcgtgatcggcttcagaatcctgctgctgaaagtggccggctttaacctgctgatgaccctgcggctgtggtccagc

SEQ ID NO: 36208 - DNA, 2715 bp, synthetic construct
  source 1..2715: mol_type = other DNA
atggccttaccagtgaccgccttgctcctgccgctggccttgctgctccacgccgccaggccgcaggttcagctgcaagagtctggccctggcctggtcaagcctagccaaacactgagcctgacctgtaccgtgtctggcggctctatcaccaccggcgagttctactggaactggttcagacagcctcctggcaaaggactggaatggatgggagccattgccgccagcggcagcacaacatacagccctagcttcgagagccggaccagcatcagcagagacaccagcaagaatcagttcagcctgaagctgagcagcgtgacagccgccgatacagccgtgtattactgcggcagatcctttggagtggccgccgtgacaaccggccagaatagaggacagggcaccctggtcacagtgtctagcggtaccggcggaggcggatctggcggcggaggtagcggtggcggaggatctgaattcgacatccagatgacacagagccctagcagcctgtctgccagcgtgggagacagagtgaccatcacatgcaaggccagcgaccacatcaacaactggctggcctggtatcagcagaagcctggcaaggcccctaagctgctgatctacggcgctaccacactggaaacaggcgtgcccagcagattttctggcagcggctctggcaccgacttcaccctgacaatatccagcctccagcctgaggacttcgccacctactactgtcagcagagctggaacaccccttggacattcggccagggcaccaaggtggaaatcaagagactcgagatccagaaccctgatcctgccgtgtaccagctgcgggatagcaagagcagcgacaagagcgtgtgtctgttcaccgacttcgacagccagaccaacgtgtcccagagcaaggactccgacgtgtacatcaccgataagtgcgtgctggacatgcggagcatggacttcaagagcaactccgccgtggcctggtccaacaagtccgatttcgcctgcgccaacgccttcaacaacagcattatccccgaggacacattcttcccaagcagcgacgtgccctgcgacgtgaagctggtggaaaagagcttcgagacagacaccaacctgaacttccagaacctgagcgtgatcggcttcagaatcctgctgctgaaagtggccggctttaacctgctgatgaccctgcggctgtggtccagccgcgccaagagaagcggatctggcgtgaagcagaccctgaatttcgacctgctgaagctggctggcgacgtggaatccaacccaggccctactagtaccatggactggatttggcgcatccttttccttgtcggcgctgctaccggcgcccattccgggcccgaagtgcaactggttgaatccggtggcggcctggtgcaacccggcggatctctcagacttagctgtgccgcctccggcagaaccttcacaatgggatggtacaggcaggctccagggaaagagagagagttcgtcgccgccatctctctgtctcccacactggcctactacgccgactctgtgaaaggccggttcaccatctccagagataatagcaagaacaccgtggtgctgcaaatgaactctctgagagccgaggatacagccctgtactattgtgccgctgaccggaagtccgtgatgagcatcagacccgattactggggacagggcacactggtcacagtgtctagtggatccggcggcggaggatctggcggaggcggatctgggggcggaggctctttcgaagaagttcagctggttgaatctggcggcggactggttcaacctggcggatctctgagactgagctgtgccgcctctggctacacctttagcagctactgggtcaactgggttcgacaggcccctggcaaaggactggaatgggtcgcccaaatctatcccggcgacggcgacaccaactacaacggcaagttcaagggcagattcaccatcagccgggacaacagcaagaacaccctgtacctccagatgaactccctgagagccgaggacaccgccgtgtactattgtgccagatccatcaccaccgtcgtgggctgcgctatggattattggggccagggaaccctggtcaccgtgtcctctacgcgtgaggacctgaagaacgtgttcccacctgaggtggccgtgttcgagcctagcaaggccgagatcgcccacacccagaaagccaccctcgtgtgcctggctaccggcttctaccccgaccatgtggaactgtcttggtgggtcaacggcaaagaggtgcacagcggcgtgtgtaccgacccccagccactgaaagaacagcccgccctgaacgacagccggtactgcctgagcagcagactgagagtgtccgccaccttctggcagaacccccggaaccacttcagatgccaggtgcagttctacggcctgagcgagaacgacgagtggacccaggacagagccaagcccgtgacccagatcgtgtctgccgaagcctggggcagagccgattgcggcatcaccagcgccagctaccaccagggcgtgctgagcgccaccatcctgtacgagatcctgctgggcaaggccaccctgtacgccgtgctggtgtctgccctggtgctgatggctatggtcaagcggaaggacagccgggga

SEQ ID NO: 36209 - DNA, 2304 bp, synthetic construct
  source 1..2304: mol_type = other DNA
atggccttaccagtgaccgccttgctcctgccgctggccttgctgctccacgccgccaggccgcaggttcagctgcaagagtctggccctggcctggtcaagcctagccaaacactgagcctgacctgtaccgtgtctggcggctctatcaccaccggcgagttctactggaactggttcagacagcctcctggcaaaggactggaatggatgggagccattgccgccagcggcagcacaacatacagccctagcttcgagagccggaccagcatcagcagagacaccagcaagaatcagttcagcctgaagctgagcagcgtgacagccgccgatacagccgtgtattactgcggcagatcctttggagtggccgccgtgacaaccggccagaatagaggacagggcaccctggtcacagtgtctagcggtaccggcggaggcggatctggcggcggaggtagcggtggcggaggatctgaattcgacatccagatgacacagagccctagcagcctgtctgccagcgtgggagacagagtgaccatcacatgcaaggccagcgaccacatcaacaactggctggcctggtatcagcagaagcctggcaaggcccctaagctgctgatctacggcgctaccacactggaaacaggcgtgcccagcagattttctggcagcggctctggcaccgacttcaccctgacaatatccagcctccagcctgaggacttcgccacctactactgtcagcagagctggaacaccccttggacattcggccagggcaccaaggtggaaatcaagagactcgagatccagaaccctgatcctgccgtgtaccagctgcgggatagcaagagcagcgacaagagcgtgtgtctgttcaccgacttcgacagccagaccaacgtgtcccagagcaaggactccgacgtgtacatcaccgataagtgcgtgctggacatgcggagcatggacttcaagagcaactccgccgtggcctggtccaacaagtccgatttcgcctgcgccaacgccttcaacaacagcattatccccgaggacacattcttcccaagcagcgacgtgccctgcgacgtgaagctggtggaaaagagcttcgagacagacaccaacctgaacttccagaacctgagcgtgatcggcttcagaatcctgctgctgaaagtggccggctttaacctgctgatgaccctgcggctgtggtccagccgcgccaagagaagcggatctggcgtgaagcagaccctgaatttcgacctgctgaagctggctggcgacgtggaatccaacccaggccctactagtaccatggactggatttggcgcatccttttccttgtcggcgctgctaccggcgcccattccttcgaagaagttcagctggttgaatctggcggcggactggttcaacctggcggatctctgagactgagctgtgccgcctctggctacacctttagcagctactgggtcaactgggttcgacaggcccctggcaaaggactggaatgggtcgcccaaatctatcccggcgacggcgacaccaactacaacggcaagttcaagggcagattcaccatcagccgggacaacagcaagaacaccctgtacctccagatgaactccctgagagccgaggacaccgccgtgtactattgtgccagatccatcaccaccgtcgtgggctgcgctatggattattggggccagggaaccctggtcaccgtgtcctctacgcgtgaggacctgaagaacgtgttcccacctgaggtggccgtgttcgagcctagcaaggccgagatcgcccacacccagaaagccaccctcgtgtgcctggctaccggcttctaccccgaccatgtggaactgtcttggtgggtcaacggcaaagaggtgcacagcggcgtgtgtaccgacccccagccactgaaagaacagcccgccctgaacgacagccggtactgcctgagcagcagactgagagtgtccgccaccttctggcagaacccccggaaccacttcagatgccaggtgcagttctacggcctgagcgagaacgacgagtggacccaggacagagccaagcccgtgacccagatcgtgtctgccgaagcctggggcagagccgattgcggcatcaccagcgccagctaccaccagggcgtgctgagcgccaccatcctgtacgagatcctgctgggcaaggccaccctgtacgccgtgctggtgtctgccctggtgctgatggctatggtcaagcggaaggacagccgggga

SEQ ID NO: 36210 - DNA, 2703 bp, synthetic construct
  source 1..2703: mol_type = other DNA
atggccttaccagtgaccgccttgctcctgccgctggccttgctgctccacgccgccaggccggaagtgcagctggttgaatctggcggaggactggttcaggctggcggatctctgagactgtcttgtgccgccagcggcagaacctttagcatgggctggtttagacaggcccctggcaaagagagagagttcgtcgccgccatcacatactctggcggcagcccttactacgccgactctgtgaagggcagattcaccatcagccgggacaacgccaagaacaccgtgtacctccagatgaacagcctgaagcctgaggacaccgccgtgtactactgcgccgccaatccaacatacggcagcgactggaacgccgagaattggggccagggaacccaagtgacagtgtctagcggtaccggcggaggcggatctggcggcggaggtagcggtggcggaggatctgaattcgacatccagatgacacagagccctagcagcctgtctgccagcgtgggagacagagtgaccatcacatgcaaggccagcgaccacatcaacaactggctggcctggtatcagcagaagcctggcaaggcccctaagctgctgatctacggcgctaccacactggaaacaggcgtgcccagcagattttctggcagcggctctggcaccgacttcaccctgacaatatccagcctccagcctgaggacttcgccacctactactgtcagcagagctggaacaccccttggacattcggccagggcaccaaggtggaaatcaagagactcgaggacctgaagaacgtgttcccacctgaggtggccgtgttcgagcctagcgaggccgagatcagccacacccagaaagccaccctcgtgtgcctggctaccggcttctaccccgaccatgtggaactgtcttggtgggtcaacggcaaagaggtgcacagcggcgtgtgtaccgacccccagccactgaaagaacagcccgccctgaacgacagccggtactgcctgagcagcagactgagagtgtccgccaccttctggcagaacccccggaaccacttcagatgccaggtgcagttctacggcctgagcgagaacgacgagtggacccaggacagagccaagcccgtgacccagatcgtgtctgccgaagcctggggcagagccgattgcggctttaccagcgagagctaccagcagggcgtgctgagcgccaccatcctgtacgagatcctgctgggcaaggccaccctgtacgccgtgctggtgtctgccctggtgctgatggctatggtcaagcggaaggacagccggggaagggccaagcgatctggatctggagcaacaaacttctcactactcaaacaagcaggtgacgtggaggagaatcccgggcctactagtaccatggactggatttggcgcatccttttccttgtcggcgctgctaccggcgcccattccgggccccaggtgcagctccaagaaagcggacccggactggttaagccctctcagaccctgtctctgacctgcacagttagcggagccagcattaccacaggcgagtattattggaattggtttcggcagccaccaggcaaggggcttgagtggatgggtgctattgctgcctctggcagcaccacctactctcccagctttgagagcagaacctccatcagccgggacacctccaaaaaccagttctctctgaagctgtcctccgtgaccgctgctgacaccgccgtctattattgtggccggtctttcggcgtggcagctgtgaccacaggacagaacagaggccagggaacacttgtgaccgtgtcctctggatccggcggcggaggatctggcggaggcggatctgggggcggaggctctttcgaagaagttcagctggttgaatctggcggcggactggttcaacctggcggatctctgagactgagctgtgccgcctctggctacacctttagcagctactgggtcaactgggttcgacaggcccctggcaaaggactggaatgggtcgcccaaatctatcccggcgacggcgacaccaactacaacggcaagttcaagggcagattcaccatcagccgggacaacagcaagaacaccctgtacctccagatgaactccctgagagccgaggacaccgccgtgtactattgtgccagatccatcaccaccgtcgtgggctgcgctatggattattggggccagggaaccctggtcaccgtgtcctctacgcgtatccagaaccctgatcctgccgtgtaccagctgcgggatagcaagagcagcgacaagagcgtgtgtctgttcaccgacttcgacagccagaccaacgtgtcccagagcaaggactccgacgtgtacatcaccgataagtgcgtgctggacatgcggagcatggacttcaagagcaactccgccgtggcctggtccaacaagtccgatttcgcctgcgccaacgccttcaacaacagcattatccccgaggacacattcttcccaagccccgagagcagctgcgacgtgaagctggtggaaaagagcttcgagacagacaccaacctgaacttccagaacctgagcgtgatcggcttcagaatcctgctgctgaaagtggccggctttaacctgctgatgaccctgcggctgtggtccagc

SEQ ID NO: 36211 - DNA, 2724 bp, synthetic construct
  source 1..2724: mol_type = other DNA
atggccttaccagtgaccgccttgctcctgccgctggccttgctgctccacgccgccaggccggaagtgcagctggttgaatctggcggaggactggttcaggctggcggatctctgagactgtcttgtgccgccagcggcagaacctttagcatgggctggtttagacaggcccctggcaaagagagagagttcgtcgccgccatcacatactctggcggcagcccttactacgccgactctgtgaagggcagattcaccatcagccgggacaacgccaagaacaccgtgtacctccagatgaacagcctgaagcctgaggacaccgccgtgtactactgcgccgccaatccaacatacggcagcgactggaacgccgagaattggggccagggaacccaagtgacagtgtctagcggtaccggcggaggcggatctggcggcggaggtagcggtggcggaggatctgaattcgacatccagatgacacagagccctagcagcctgtctgccagcgtgggagacagagtgaccatcacatgcaaggccagcgaccacatcaacaactggctggcctggtatcagcagaagcctggcaaggcccctaagctgctgatctacggcgctaccacactggaaacaggcgtgcccagcagattttctggcagcggctctggcaccgacttcaccctgacaatatccagcctccagcctgaggacttcgccacctactactgtcagcagagctggaacaccccttggacattcggccagggcaccaaggtggaaatcaagagactcgagatccagaaccctgatcctgccgtgtaccagctgcgggatagcaagagcagcgacaagagcgtgtgtctgttcaccgacttcgacagccagaccaacgtgtcccagagcaaggactccgacgtgtacatcaccgataagtgcgtgctggacatgcggagcatggacttcaagagcaactccgccgtggcctggtccaacaagtccgatttcgcctgcgccaacgccttcaacaacagcattatccccgaggacacattcttcccaagcagcgacgtgccctgcgacgtgaagctggtggaaaagagcttcgagacagacaccaacctgaacttccagaacctgagcgtgatcggcttcagaatcctgctgctgaaagtggccggctttaacctgctgatgaccctgcggctgtggtccagccgcgccaagagaagcggatctggcgtgaagcagaccctgaatttcgacctgctgaagctggctggcgacgtggaatccaacccaggccctactagtaccatggactggatttggcgcatccttttccttgtcggcgctgctaccggcgcccattccgggccccaggtgcagctggttgaatctggcggaggactggttcagcctggcggatctctgagactgtcttgtgccgccagcggcaacatcaacagcagaaactgcatgggctggttcagacaggcccctggcaagggaagagaaggcgtggcagctatcggccaagtgaccggcagaacctactacgtggacagcgtgaagggcagattcaccatcagcctggacaacagcaagaacaccctgtacctccagatgaacagcctgagagccgaggacaccgccgtgtactattgtgctgctgcccctggctgtctgctgtctgcacttagaagcgccgactacagaaactggggccagggcacactggtcaccgtttcttctggatccggcggcggaggatctggcggaggcggatctgggggcggaggctctttcgaagaagttcagctggttgaatctggcggcggactggttcaacctggcggatctctgagactgagctgtgccgcctctggctacacctttagcagctactgggtcaactgggttcgacaggcccctggcaaaggactggaatgggtcgcccaaatctatcccggcgacggcgacaccaactacaacggcaagttcaagggcagattcaccatcagccgggacaacagcaagaacaccctgtacctccagatgaactccctgagagccgaggacaccgccgtgtactattgtgccagatccatcaccaccgtcgtgggctgcgctatggattattggggccagggaaccctggtcaccgtgtcctctacgcgtgaggacctgaagaacgtgttcccacctgaggtggccgtgttcgagcctagcaaggccgagatcgcccacacccagaaagccaccctcgtgtgcctggctaccggcttctaccccgaccatgtggaactgtcttggtgggtcaacggcaaagaggtgcacagcggcgtgtgtaccgacccccagccactgaaagaacagcccgccctgaacgacagccggtactgcctgagcagcagactgagagtgtccgccaccttctggcagaacccccggaaccacttcagatgccaggtgcagttctacggcctgagcgagaacgacgagtggacccaggacagagccaagcccgtgacccagatcgtgtctgccgaagcctggggcagagccgattgcggcatcaccagcgccagctaccaccagggcgtgctgagcgccaccatcctgtacgagatcctgctgggcaaggccaccctgtacgccgtgctggtgtctgccctggtgctgatggctatggtcaagcggaaggacagccgggga

SEQ ID NO: 36212 - DNA, 2712 bp, synthetic construct
  source 1..2712: mol_type = other DNA
atggccttaccagtgaccgccttgctcctgccgctggccttgctgctccacgccgccaggccggaagtgcagctggttgaatctggcggaggactggttcaggctggcggatctctgagactgtcttgtgccgccagcggcagaacctttagcatgggctggtttagacaggcccctggcaaagagagagagttcgtcgccgccatcacatactctggcggcagcccttactacgccgactctgtgaagggcagattcaccatcagccgggacaacgccaagaacaccgtgtacctccagatgaacagcctgaagcctgaggacaccgccgtgtactactgcgccgccaatccaacatacggcagcgactggaacgccgagaattggggccagggaacccaagtgacagtgtctagcggtaccggcggaggcggatctggcggcggaggtagcggtggcggaggatctgaattcgacatccagatgacacagagccctagcagcctgtctgccagcgtgggagacagagtgaccatcacatgcaaggccagcgaccacatcaacaactggctggcctggtatcagcagaagcctggcaaggcccctaagctgctgatctacggcgctaccacactggaaacaggcgtgcccagcagattttctggcagcggctctggcaccgacttcaccctgacaatatccagcctccagcctgaggacttcgccacctactactgtcagcagagctggaacaccccttggacattcggccagggcaccaaggtggaaatcaagagactcgaggacctgaagaacgtgttcccacctgaggtggccgtgttcgagcctagcgaggccgagatcagccacacccagaaagccaccctcgtgtgcctggctaccggcttctaccccgaccatgtggaactgtcttggtgggtcaacggcaaagaggtgcacagcggcgtgtgtaccgacccccagccactgaaagaacagcccgccctgaacgacagccggtactgcctgagcagcagactgagagtgtccgccaccttctggcagaacccccggaaccacttcagatgccaggtgcagttctacggcctgagcgagaacgacgagtggacccaggacagagccaagcccgtgacccagatcgtgtctgccgaagcctggggcagagccgattgcggctttaccagcgagagctaccagcagggcgtgctgagcgccaccatcctgtacgagatcctgctgggcaaggccaccctgtacgccgtgctggtgtctgccctggtgctgatggctatggtcaagcggaaggacagccggggaagggccaagcgatctggatctggagcaacaaacttctcactactcaaacaagcaggtgacgtggaggagaatcccgggcctactagtaccatggactggatttggcgcatccttttccttgtcggcgctgctaccggcgcccattccgggccccaggtgcagctggttgaatctggcggaggactggttcagcctggcggatctctgagactgtcttgtgccgccagcggcaacatcaacagcagaaactgcatgggctggttcagacaggcccctggcaagggaagagaaggcgtggcagctatcggccaagtgaccggcagaacctactacgtggacagcgtgaagggcagattcaccatcagcctggacaacagcaagaacaccctgtacctccagatgaacagcctgagagccgaggacaccgccgtgtactattgtgctgctgcccctggctgtctgctgtctgcacttagaagcgccgactacagaaactggggccagggcacactggtcaccgtttcttctggatccggcggcggaggatctggcggaggcggatctgggggcggaggctctttcgaagaagttcagctggttgaatctggcggcggactggttcaacctggcggatctctgagactgagctgtgccgcctctggctacacctttagcagctactgggtcaactgggttcgacaggcccctggcaaaggactggaatgggtcgcccaaatctatcccggcgacggcgacaccaactacaacggcaagttcaagggcagattcaccatcagccgggacaacagcaagaacaccctgtacctccagatgaactccctgagagccgaggacaccgccgtgtactattgtgccagatccatcaccaccgtcgtgggctgcgctatggattattggggccagggaaccctggtcaccgtgtcctctacgcgtatccagaaccctgatcctgccgtgtaccagctgcgggatagcaagagcagcgacaagagcgtgtgtctgttcaccgacttcgacagccagaccaacgtgtcccagagcaaggactccgacgtgtacatcaccgataagtgcgtgctggacatgcggagcatggacttcaagagcaactccgccgtggcctggtccaacaagtccgatttcgcctgcgccaacgccttcaacaacagcattatccccgaggacacattcttcccaagccccgagagcagctgcgacgtgaagctggtggaaaagagcttcgagacagacaccaacctgaacttccagaacctgagcgtgatcggcttcagaatcctgctgctgaaagtggccggctttaacctgctgatgaccctgcggctgtggtccagc

SEQ ID NO: 36213 - DNA, 2712 bp, synthetic construct
  source 1..2712: mol_type = other DNA
atggccttaccagtgaccgccttgctcctgccgctggccttgctgctccacgccgccaggccggaagtgcaactggttgaatccggtggcggcctggtgcaagcaggcggatctctcagacttagctgtgccgcctccggcagaaccttcacaatgggatggtttaggcaggctccagggaaagagagagagttcgtcgccgccatctctctgtctcccacactggcctactacgccgactctgtgaaaggccggttcaccatctccagagataatgccaagaacaccgtggtgctgcaaatgaactctctgaaacccgaggatacagccctgtactattgtgccgctgaccggaagtccgtgatgagcatcagacccgattactggggacagggcacacaagtcacagtgtcctctggtaccggcggaggcggatctggcggcggaggtagcggtggcggaggatctgaattcgacatccagatgacacagagccctagcagcctgtctgccagcgtgggagacagagtgaccatcacatgcaaggccagcgaccacatcaacaactggctggcctggtatcagcagaagcctggcaaggcccctaagctgctgatctacggcgctaccacactggaaacaggcgtgcccagcagattttctggcagcggctctggcaccgacttcaccctgacaatatccagcctccagcctgaggacttcgccacctactactgtcagcagagctggaacaccccttggacattcggccagggcaccaaggtggaaatcaagagactcgaggacctgaagaacgtgttcccacctgaggtggccgtgttcgagcctagcgaggccgagatcagccacacccagaaagccaccctcgtgtgcctggctaccggcttctaccccgaccatgtggaactgtcttggtgggtcaacggcaaagaggtgcacagcggcgtgtgtaccgacccccagccactgaaagaacagcccgccctgaacgacagccggtactgcctgagcagcagactgagagtgtccgccaccttctggcagaacccccggaaccacttcagatgccaggtgcagttctacggcctgagcgagaacgacgagtggacccaggacagagccaagcccgtgacccagatcgtgtctgccgaagcctggggcagagccgattgcggctttaccagcgagagctaccagcagggcgtgctgagcgccaccatcctgtacgagatcctgctgggcaaggccaccctgtacgccgtgctggtgtctgccctggtgctgatggctatggtcaagcggaaggacagccggggaagggccaagcgatctggatctggagcaacaaacttctcactactcaaacaagcaggtgacgtggaggagaatcccgggcctactagtaccatggactggatttggcgcatccttttccttgtcggcgctgctaccggcgcccattccgggccccaggtgcagctggttgaatctggcggaggactggttcagcctggcggatctctgagactgtcttgtgccgccagcggcaacatcaacagcagaaactgcatgggctggttcagacaggcccctggcaagggaagagaaggcgtggcagctatcggccaagtgaccggcagaacctactacgtggacagcgtgaagggcagattcaccatcagcctggacaacagcaagaacaccctgtacctccagatgaacagcctgagagccgaggacaccgccgtgtactattgtgctgctgcccctggctgtctgctgtctgcacttagaagcgccgactacagaaactggggccagggcacactggtcaccgtttcttctggatccggcggcggaggatctggcggaggcggatctgggggcggaggctctttcgaagaagttcagctggttgaatctggcggcggactggttcaacctggcggatctctgagactgagctgtgccgcctctggctacacctttagcagctactgggtcaactgggttcgacaggcccctggcaaaggactggaatgggtcgcccaaatctatcccggcgacggcgacaccaactacaacggcaagttcaagggcagattcaccatcagccgggacaacagcaagaacaccctgtacctccagatgaactccctgagagccgaggacaccgccgtgtactattgtgccagatccatcaccaccgtcgtgggctgcgctatggattattggggccagggaaccctggtcaccgtgtcctctacgcgtatccagaaccctgatcctgccgtgtaccagctgcgggatagcaagagcagcgacaagagcgtgtgtctgttcaccgacttcgacagccagaccaacgtgtcccagagcaaggactccgacgtgtacatcaccgataagtgcgtgctggacatgcggagcatggacttcaagagcaactccgccgtggcctggtccaacaagtccgatttcgcctgcgccaacgccttcaacaacagcattatccccgaggacacattcttcccaagccccgagagcagctgcgacgtgaagctggtggaaaagagcttcgagacagacaccaacctgaacttccagaacctgagcgtgatcggcttcagaatcctgctgctgaaagtggccggctttaacctgctgatgaccctgcggctgtggtccagc

SEQ ID NO: 36214 - DNA, 2724 bp, synthetic construct
  source 1..2724: mol_type = other DNA
atggccttaccagtgaccgccttgctcctgccgctggccttgctgctccacgccgccaggccgcaggttcagctgcaagagtctggccctggcctggtcaagcctagccaaacactgagcctgacctgtaccgtgtctggcggctctatcaccaccggcgagttctactggaactggttcagacagcctcctggcaaaggactggaatggatgggagccattgccgccagcggcagcacaacatacagccctagcttcgagagccggaccagcatcagcagagacaccagcaagaatcagttcagcctgaagctgagcagcgtgacagccgccgatacagccgtgtattactgcggcagatcctttggagtggccgccgtgacaaccggccagaatagaggacagggcaccctggtcacagtgtctagcggtaccggcggaggcggatctggcggcggaggtagcggtggcggaggatctgaattcgacatccagatgacacagagccctagcagcctgtctgccagcgtgggagacagagtgaccatcacatgcaaggccagcgaccacatcaacaactggctggcctggtatcagcagaagcctggcaaggcccctaagctgctgatctacggcgctaccacactggaaacaggcgtgcccagcagattttctggcagcggctctggcaccgacttcaccctgacaatatccagcctccagcctgaggacttcgccacctactactgtcagcagagctggaacaccccttggacattcggccagggcaccaaggtggaaatcaagagactcgaggacctgaagaacgtgttcccacctgaggtggccgtgttcgagcctagcgaggccgagatcagccacacccagaaagccaccctcgtgtgcctggctaccggcttctaccccgaccatgtggaactgtcttggtgggtcaacggcaaagaggtgcacagcggcgtgtgtaccgacccccagccactgaaagaacagcccgccctgaacgacagccggtactgcctgagcagcagactgagagtgtccgccaccttctggcagaacccccggaaccacttcagatgccaggtgcagttctacggcctgagcgagaacgacgagtggacccaggacagagccaagcccgtgacccagatcgtgtctgccgaagcctggggcagagccgattgcggctttaccagcgagagctaccagcagggcgtgctgagcgccaccatcctgtacgagatcctgctgggcaaggccaccctgtacgccgtgctggtgtctgccctggtgctgatggctatggtcaagcggaaggacagccggggaagggccaagcgatctggatctggagcaacaaacttctcactactcaaacaagcaggtgacgtggaggagaatcccgggcctactagtaccatggactggatttggcgcatccttttccttgtcggcgctgctaccggcgcccattccgggccccaggtgcagctggttgaatctggcggaggactggttcagcctggcggatctctgagactgtcttgtgccgccagcggcaacatcaacagcagaaactgcatgggctggttcagacaggcccctggcaagggaagagaaggcgtggcagctatcggccaagtgaccggcagaacctactacgtggacagcgtgaagggcagattcaccatcagcctggacaacagcaagaacaccctgtacctccagatgaacagcctgagagccgaggacaccgccgtgtactattgtgctgctgcccctggctgtctgctgtctgcacttagaagcgccgactacagaaactggggccagggcacactggtcaccgtttcttctggatccggcggcggaggatctggcggaggcggatctgggggcggaggctctttcgaagaagttcagctggttgaatctggcggcggactggttcaacctggcggatctctgagactgagctgtgccgcctctggctacacctttagcagctactgggtcaactgggttcgacaggcccctggcaaaggactggaatgggtcgcccaaatctatcccggcgacggcgacaccaactacaacggcaagttcaagggcagattcaccatcagccgggacaacagcaagaacaccctgtacctccagatgaactccctgagagccgaggacaccgccgtgtactattgtgccagatccatcaccaccgtcgtgggctgcgctatggattattggggccagggaaccctggtcaccgtgtcctctacgcgtatccagaaccctgatcctgccgtgtaccagctgcgggatagcaagagcagcgacaagagcgtgtgtctgttcaccgacttcgacagccagaccaacgtgtcccagagcaaggactccgacgtgtacatcaccgataagtgcgtgctggacatgcggagcatggacttcaagagcaactccgccgtggcctggtccaacaagtccgatttcgcctgcgccaacgccttcaacaacagcattatccccgaggacacattcttcccaagccccgagagcagctgcgacgtgaagctggtggaaaagagcttcgagacagacaccaacctgaacttccagaacctgagcgtgatcggcttcagaatcctgctgctgaaagtggccggctttaacctgctgatgaccctgcggctgtggtccagc

SEQ ID NO: 36215 - DNA, 1461 bp, synthetic construct
  source 1..1461: mol_type = other DNA
atggccttaccagtgaccgccttgctcctgccgctggccttgctgctccacgccgccaggccggacatccagatgacacagagccctagcagcctgtctgccagcgtgggagacagagtgaccatcacatgcaaggccagcgaccacatcaacaactggctggcctggtatcagcagaagcctggcaaggcccctaagctgctgatctacggcgctaccacactggaaacaggcgtgcccagcagattttctggcagcggctctggcaccgacttcaccctgacaatatccagcctccagcctgaggacttcgccacctactactgtcagcagagctggaacaccccttggacattcggccagggcaccaaggtggaaatcaagagaggcggaggcggaagtggaggcggaggatctggcggcggaggctctgaagttcagctggttgaatctggcggcggactggttcaacctggcggatctctgagactgagctgtgccgcctctggctacgcctttagcaactactgggtcaactgggttcgacaggcccctggcaaaggactggaatgggtcgcccaaatctatcccggcgacggcgacaccaactacaacggcaagttcaagggcagattcaccatcagccgggacaacagcaagaacaccctgtacctccagatgaactccctgagagccgaggacaccgccgtgtactattgtgccagatccatcaccaccgtcgtgggctgcgctatggattattggggccagggaaccctggtcaccgtgtcctctacgcgtaaaattgaagttatgtatcctcctccttacctagacaatgagaagagcaatggaaccattatccatgtgaaagggaaacacctttgtccaagtcccctatttcccggaccttctaagcccttttgggtgctggtggtggttgggggagtcctggcttgctatagcttgctagtaacagtggcctttattattttctgggtgaggagtaagaggagcaggctcctgcacagtgactacatgaacatgactccacgccgccccggacccacccgcaagcattaccagccctatgccccaccacgcgacttcgcagcctatcgctccagagtgaagttcagcaggagcgcagacgcccccgcgtaccagcagggccagaaccagctctataacgagctcaatctaggacgaagagaggagtacgatgttttggacaagagacgtggccgggaccctgagatggggggaaagccgagaaggaagaaccctcaggaaggcctgtacaatgaactgcagaaagataagatggcggaggcctacagtgagattgggatgaaaggcgagcgccggaggggcaaggggcacgatggcctttaccagggtctcagtacagccaccaaggacacctacgacgcccttcacatgcaggccctgccccctcgc

SEQ ID NO: 36216 - DNA, 1479 bp, synthetic construct
  source 1..1479: mol_type = other DNA
atggccttaccagtgaccgccttgctcctgccgctggccttgctgctccacgccgccaggccggacatccagatgacacagagccctagcagcctgtctgccagcgtgggagacagagtgaccatcacatgcaaggccagcgaccacatcaacaactggctggcctggtatcagcagaagcctggcaaggcccctaagctgctgatctacggcgctaccacactggaaacaggcgtgcccagcagattttctggcagcggctctggcaccgacttcaccctgacaatatccagcctccagcctgaggacttcgccacctactactgtcagcagagctggaacaccccttggacattcggccagggcaccaaggtggaaatcaagagaggcggaggcggaagtggaggcggaggatctggcggcggaggctctgaagttcagctggttgaatctggcggcggactggttcaacctggcggatctctgagactgagctgtgccgcctctggctacgcctttagcaactactgggtcaactgggttcgacaggcccctggcaaaggactggaatgggtcgcccaaatctatcccggcgacggcgacaccaactacaacggcaagttcaagggcagattcaccatcagccgggacaacagcaagaacaccctgtacctccagatgaactccctgagagccgaggacaccgccgtgtactattgtgccagatccatcaccaccgtcgtgggctgcgctatggattattggggccagggaaccctggtcaccgtgtcctctacgcgtgcgaagcccaccacgacgccagcgccgcgaccaccaacaccggcgcccaccatcgcgtcgcagcccctgtccctgcgcccagaggcgtgccggccagcggcggggggcgcagtgcacacgagggggctggacttcgcctgtgacatctacatctgggcgcccttggccgggacttgtggggtccttctcctgtcactggttatcaccctttactgcaaacggggcagaaagaaactcctgtatatattcaaacaaccatttatgagaccagtacaaactactcaagaggaagatggctgtagctgccgatttccagaagaagaagaaggaggatgtgaactgagagtgaagttcagcaggagcgcagacgcccccgcgtaccagcagggccagaaccagctctataacgagctgaatctaggacgaagagaggagtacgatgttttggacaagagacgtggccgggaccctgagatggggggaaagccgagaaggaagaaccctcaggaaggcctgtacaatgaactgcagaaagataagatggcggaggcctacagtgagattgggatgaaaggcgagcgccggaggggcaaggggcacgatggcctttaccagggtctcagtacagccaccaaggacacctacgacgcccttcacatgcaggccctgccccctcgc

SEQ ID NO: 36217 - DNA, 1479 bp, synthetic construct
  source 1..1479: mol_type = other DNA
atggccttaccagtgaccgccttgctcctgccgctggccttgctgctccacgccgccaggccggaagttcagctggttgaatctggcggcggactggttcaacctggcggatctctgagactgagctgtgccgcctctggctacgcctttagcaactactgggtcaactgggttcgacaggcccctggcaaaggactggaatgggtcgcccaaatctatcccggcgacggcgacaccaactacaacggcaagttcaagggcagattcaccatcagccgggacaacagcaagaacaccctgtacctccagatgaactccctgagagccgaggacaccgccgtgtactattgtgccagatccatcaccaccgtcgtgggctgcgctatggattattggggccagggaaccctggtcaccgtgtcctctggcggaggcggaagtggaggcggaggatctggcggcggaggctctgacatccagatgacacagagccctagcagcctgtctgccagcgtgggagacagagtgaccatcacatgcaaggccagcgaccacatcaacaactggctggcctggtatcagcagaagcctggcaaggcccctaagctgctgatctacggcgctaccacactggaaacaggcgtgcccagcagattttctggcagcggctctggcaccgacttcaccctgacaatatccagcctccagcctgaggacttcgccacctactactgtcagcagagctggaacaccccttggacattcggccagggcaccaaggtggaaatcaagagaacgcgtgcgaagcccaccacgacgccagcgccgcgaccaccaacaccggcgcccaccatcgcgtcgcagcccctgtccctgcgcccagaggcgtgccggccagcggcggggggcgcagtgcacacgagggggctggacttcgcctgtgacatctacatctgggcgcccttggccgggacttgtggggtccttctcctgtcactggttatcaccctttactgcaaacggggcagaaagaaactcctgtatatattcaaacaaccatttatgagaccagtacaaactactcaagaggaagatggctgtagctgccgatttccagaagaagaagaaggaggatgtgaactgagagtgaagttcagcaggagcgcagacgcccccgcgtaccagcagggccagaaccagctctataacgagctgaatctaggacgaagagaggagtacgatgttttggacaagagacgtggccgggaccctgagatggggggaaagccgagaaggaagaaccctcaggaaggcctgtacaatgaactgcagaaagataagatggcggaggcctacagtgagattgggatgaaaggcgagcgccggaggggcaaggggcacgatggcctttaccagggtctcagtacagccaccaaggacacctacgacgcccttcacatgcaggccctgccccctcgc

SEQ ID NO: 36218 - DNA, 1878 bp, synthetic construct
  source 1..1878: mol_type = other DNA
atggccttaccagtgaccgccttgctcctgccgctggccttgctgctccacgccgccaggccggacatccagatgacacagagccctagcagcctgtctgccagcgtgggagacagagtgaccatcacatgcaaggccagcgaccacatcaacaactggctggcctggtatcagcagaagcctggcaaggcccctaagctgctgatctacggcgctaccacactggaaacaggcgtgcccagcagattttctggcagcggctctggcaccgacttcaccctgacaatatccagcctccagcctgaggacttcgccacctactactgtcagcagagctggaacaccccttggacattcggccagggcaccaaggtggaaatcaagagactcgagatccagaaccctgatcctgccgtgtaccagctgcgggatagcaagagcagcgacaagagcgtgtgtctgttcaccgacttcgacagccagaccaacgtgtcccagagcaaggactccgacgtgtacatcaccgataagtgcgtgctggacatgcggagcatggacttcaagagcaactccgccgtggcctggtccaacaagtccgatttcgcctgcgccaacgccttcaacaacagcattatccccgaggacacattcttcccaagcagcgacgtgccctgcgacgtgaagctggtggaaaagagcttcgagacagacaccaacctgaacttccagaacctgagcgtgatcggcttcagaatcctgctgctgaaagtggccggctttaacctgctgatgaccctgcggctgtggtccagccgcgccaagagaagcggatctggcgtgaagcagaccctgaatttcgacctgctgaagctggctggcgacgtggaatccaacccaggccctactagtatggactggatttggcgcatccttttccttgtcggcgctgctaccggcgcgcattccttcgaagaagttcagctggttgaatctggcggcggactggttcaacctggcggatctctgagactgagctgtgccgcctctggctacgcctttagcaactactgggtcaactgggttcgacaggcccctggcaaaggactggaatgggtcgcccaaatctatcccggcgacggcgacaccaactacaacggcaagttcaagggcagattcaccatcagccgggacaacagcaagaacaccctgtacctccagatgaactccctgagagccgaggacaccgccgtgtactattgtgccagatccatcaccaccgtcgtgggctgcgctatggattattggggccagggaaccctggtcaccgtgtcctctacgcgtgaggacctgaagaacgtgttcccacctgaggtggccgtgttcgagcctagcaaggccgagatcgcccacacccagaaagccaccctcgtgtgcctggctaccggcttctaccccgaccatgtggaactgtcttggtgggtcaacggcaaagaggtgcacagcggcgtgtgtaccgacccccagccactgaaagaacagcccgccctgaacgacagccggtactgcctgagcagcagactgagagtgtccgccaccttctggcagaacccccggaaccacttcagatgccaggtgcagttctacggcctgagcgagaacgacgagtggacccaggacagagccaagcccgtgacccagatcgtgtctgccgaagcctggggcagagccgattgcggcatcaccagcgccagctaccaccagggcgtgctgagcgccaccatcctgtacgagatcctgctgggcaaggccaccctgtacgccgtgctggtgtctgccctggtgctgatggctatggtcaagcggaaggacagccgggga

SEQ ID NO: 36219 - DNA, 1866 bp, synthetic construct
  source 1..1866: mol_type = other DNA
atggccttaccagtgaccgccttgctcctgccgctggccttgctgctccacgccgccaggccggacatccagatgacacagagccctagcagcctgtctgccagcgtgggagacagagtgaccatcacatgcaaggccagcgaccacatcaacaactggctggcctggtatcagcagaagcctggcaaggcccctaagctgctgatctacggcgctaccacactggaaacaggcgtgcccagcagattttctggcagcggctctggcaccgacttcaccctgacaatatccagcctccagcctgaggacttcgccacctactactgtcagcagagctggaacaccccttggacattcggccagggcaccaaggtggaaatcaagagactcgaggacctgaagaacgtgttcccacctgaggtggccgtgttcgagcctagcaaggccgagatcgcccacacccagaaagccaccctcgtgtgcctggctaccggcttctaccccgaccatgtggaactgtcttggtgggtcaacggcaaagaggtgcacagcggcgtgtgtaccgacccccagccactgaaagaacagcccgccctgaacgacagccggtactgcctgagcagcagactgagagtgtccgccaccttctggcagaacccccggaaccacttcagatgccaggtgcagttctacggcctgagcgagaacgacgagtggacccaggacagagccaagcccgtgacccagatcgtgtctgccgaagcctggggcagagccgattgcggcatcaccagcgccagctaccaccagggcgtgctgagcgccaccatcctgtacgagatcctgctgggcaaggccaccctgtacgccgtgctggtgtctgccctggtgctgatggctatggtcaagcggaaggacagccggggaagggccaagcgatctggatctggagcaacaaacttctcactactcaaacaagcaggtgacgtggaggagaatcccgggcctactagtatggactggatttggcgcatccttttccttgtcggcgctgctaccggcgcgcattccttcgaagaagttcagctggttgaatctggcggcggactggttcaacctggcggatctctgagactgagctgtgccgcctctggctacgcctttagcaactactgggtcaactgggttcgacaggcccctggcaaaggactggaatgggtcgcccaaatctatcccggcgacggcgacaccaactacaacggcaagttcaagggcagattcaccatcagccgggacaacagcaagaacaccctgtacctccagatgaactccctgagagccgaggacaccgccgtgtactattgtgccagatccatcaccaccgtcgtgggctgcgctatggattattggggccagggaaccctggtcaccgtgtcctctacgcgtatccagaaccctgatcctgccgtgtaccagctgcgggatagcaagagcagcgacaagagcgtgtgtctgttcaccgacttcgacagccagaccaacgtgtcccagagcaaggactccgacgtgtacatcaccgataagtgcgtgctggacatgcggagcatggacttcaagagcaactccgccgtggcctggtccaacaagtccgatttcgcctgcgccaacgccttcaacaacagcattatccccgaggacacattcttcccaagcagcgacgtgccctgcgacgtgaagctggtggaaaagagcttcgagacagacaccaacctgaacttccagaacctgagcgtgatcggcttcagaatcctgctgctgaaagtggccggctttaacctgctgatgaccctgcggctgtggtccagc

SEQ ID NO: 36220 - DNA, 1866 bp, synthetic construct
  source 1..1866: mol_type = other DNA
atggccttaccagtgaccgccttgctcctgccgctggccttgctgctccacgccgccaggccggacatccagatgacacagagccctagcagcctgtctgccagcgtgggagacagagtgaccatcacatgcaaggccagcgaccacatcaacaactggctggcctggtatcagcagaagcctggcaaggcccctaagctgctgatctacggcgctaccacactggaaacaggcgtgcccagcagattttctggcagcggctctggcaccgacttcaccctgacaatatccagcctccagcctgaggacttcgccacctactactgtcagcagagctggaacaccccttggacattcggccagggcaccaaggtggaaatcaagagactcgaggacctgaagaacgtgttcccacctgaggtggccgtgttcgagcctagcgaggccgagatcagccacacccagaaagccaccctcgtgtgcctggctaccggcttctaccccgaccatgtggaactgtcttggtgggtcaacggcaaagaggtgcacagcggcgtgtgtaccgacccccagccactgaaagaacagcccgccctgaacgacagccggtactgcctgagcagcagactgagagtgtccgccaccttctggcagaacccccggaaccacttcagatgccaggtgcagttctacggcctgagcgagaacgacgagtggacccaggacagagccaagcccgtgacccagatcgtgtctgccgaagcctggggcagagccgattgcggctttaccagcgagagctaccagcagggcgtgctgagcgccaccatcctgtacgagatcctgctgggcaaggccaccctgtacgccgtgctggtgtctgccctggtgctgatggctatggtcaagcggaaggacagccggggaagggccaagcgatctggatctggagcaacaaacttctcactactcaaacaagcaggtgacgtggaggagaatcccgggcctactagtatggactggatttggcgcatccttttccttgtcggcgctgctaccggcgcgcattccttcgaagaagttcagctggttgaatctggcggcggactggttcaacctggcggatctctgagactgagctgtgccgcctctggctacgcctttagcaactactgggtcaactgggttcgacaggcccctggcaaaggactggaatgggtcgcccaaatctatcccggcgacggcgacaccaactacaacggcaagttcaagggcagattcaccatcagccgggacaacagcaagaacaccctgtacctccagatgaactccctgagagccgaggacaccgccgtgtactattgtgccagatccatcaccaccgtcgtgggctgcgctatggattattggggccagggaaccctggtcaccgtgtcctctacgcgtatccagaaccctgatcctgccgtgtaccagctgcgggatagcaagagcagcgacaagagcgtgtgtctgttcaccgacttcgacagccagaccaacgtgtcccagagcaaggactccgacgtgtacatcaccgataagtgcgtgctggacatgcggagcatggacttcaagagcaactccgccgtggcctggtccaacaagtccgatttcgcctgcgccaacgccttcaacaacagcattatccccgaggacacattcttcccaagccccgagagcagctgcgacgtgaagctggtggaaaagagcttcgagacagacaccaacctgaacttccagaacctgagcgtgatcggcttcagaatcctgctgctgaaagtggccggctttaacctgctgatgaccctgcggctgtggtccagc

SEQ ID NO: 36221 - DNA, 1878 bp, synthetic construct
  source 1..1878: mol_type = other DNA
atggccttaccagtgaccgccttgctcctgccgctggccttgctgctccacgccgccaggccggacatccagatgacacagagccctagcagcctgtctgccagcgtgggagacagagtgaccatcacatgcaaggccagcgaccacatcaacaactggctggcctggtatcagcagaagcctggcaaggcccctaagctgctgatctacggcgctaccacactggaaacaggcgtgcccagcagattttctggcagcggctctggcaccgacttcaccctgacaatatccagcctccagcctgaggacttcgccacctactactgtcagcagagctggaacaccccttggacattcggccagggcaccaaggtggaaatcaagagactcgagatccagaaccctgatcctgccgtgtaccagctgcgggatagcaagagcagcgacaagagcgtgtgtctgttcaccgacttcgacagccagaccaacgtgtcccagagcaaggactccgacgtgtacatcaccgataagtgcgtgctggacatgcggagcatggacttcaagagcaactccgccgtggcctggtccaacaagtccgatttcgcctgcgccaacgccttcaacaacagcattatccccgaggacacattcttcccaagccccgagagcagctgcgacgtgaagctggtggaaaagagcttcgagacagacaccaacctgaacttccagaacctgagcgtgatcggcttcagaatcctgctgctgaaagtggccggctttaacctgctgatgaccctgcggctgtggtccagccgcgccaagagaagcggatctggcgtgaagcagaccctgaatttcgacctgctgaagctggctggcgacgtggaatccaacccaggccctactagtatggactggatttggcgcatccttttccttgtcggcgctgctaccggcgcgcattccttcgaagaagttcagctggttgaatctggcggcggactggttcaacctggcggatctctgagactgagctgtgccgcctctggctacgcctttagcaactactgggtcaactgggttcgacaggcccctggcaaaggactggaatgggtcgcccaaatctatcccggcgacggcgacaccaactacaacggcaagttcaagggcagattcaccatcagccgggacaacagcaagaacaccctgtacctccagatgaactccctgagagccgaggacaccgccgtgtactattgtgccagatccatcaccaccgtcgtgggctgcgctatggattattggggccagggaaccctggtcaccgtgtcctctacgcgtgaggacctgaagaacgtgttcccacctgaggtggccgtgttcgagcctagcgaggccgagatcagccacacccagaaagccaccctcgtgtgcctggctaccggcttctaccccgaccatgtggaactgtcttggtgggtcaacggcaaagaggtgcacagcggcgtgtgtaccgacccccagccactgaaagaacagcccgccctgaacgacagccggtactgcctgagcagcagactgagagtgtccgccaccttctggcagaacccccggaaccacttcagatgccaggtgcagttctacggcctgagcgagaacgacgagtggacccaggacagagccaagcccgtgacccagatcgtgtctgccgaagcctggggcagagccgattgcggctttaccagcgagagctaccagcagggcgtgctgagcgccaccatcctgtacgagatcctgctgggcaaggccaccctgtacgccgtgctggtgtctgccctggtgctgatggctatggtcaagcggaaggacagccgggga

SEQ ID NO: 36222 - DNA, 1914 bp, synthetic construct
  source 1..1914: mol_type = other DNA
atggccttaccagtgaccgccttgctcctgccgctggccttgctgctccacgccgccaggccgctcgaggaggacctgaagaacgtgttcccacctgaggtggccgtgttcgagcctagcaaggccgagatcgcccacacccagaaagccaccctcgtgtgcctggctaccggcttctaccccgaccatgtggaactgtcttggtgggtcaacggcaaagaggtgcacagcggcgtgtgtaccgacccccagccactgaaagaacagcccgccctgaacgacagccggtactgcctgagcagcagactgagagtgtccgccaccttctggcagaacccccggaaccacttcagatgccaggtgcagttctacggcctgagcgagaacgacgagtggacccaggacagagccaagcccgtgacccagatcgtgtctgccgaagcctggggcagagccgattgcggcatcaccagcgccagctaccaccagggcgtgctgagcgccaccatcctgtacgagatcctgctgggcaaggccaccctgtacgccgtgctggtgtctgccctggtgctgatggctatggtcaagcggaaggacagccggggaagggccaagcgatctggatctggagcaacaaacttctcactactcaaacaagcaggtgacgtggaggagaatcccgggcctactagcatggccttaccagtgaccgccttgctcctgccgctggccttgctgctccacgccgccaggccggacatccagatgacacagagccctagcagcctgtctgccagcgtgggagacagagtgaccatcacatgcaaggccagcgaccacatcaacaactggctggcctggtatcagcagaagcctggcaaggcccctaagctgctgatctacggcgctaccacactggaaacaggcgtgcccagcagattttctggcagcggctctggcaccgacttcaccctgacaatatccagcctccagcctgaggacttcgccacctactactgtcagcagagctggaacaccccttggacattcggccagggcaccaaggtggaaatcaagagaggcggaggcggaagtggaggcggaggatctggcggcggaggctctgaagttcagctggttgaatctggcggcggactggttcaacctggcggatctctgagactgagctgtgccgcctctggctacgcctttagcaactactgggtcaactgggttcgacaggcccctggcaaaggactggaatgggtcgcccaaatctatcccggcgacggcgacaccaactacaacggcaagttcaagggcagattcaccatcagccgggacaacagcaagaacaccctgtacctccagatgaactccctgagagccgaggacaccgccgtgtactattgtgccagatccatcaccaccgtcgtgggctgcgctatggattattggggccagggaaccctggtcaccgtgtcctctacgcgtatccagaaccctgatcctgccgtgtaccagctgcgggatagcaagagcagcgacaagagcgtgtgtctgttcaccgacttcgacagccagaccaacgtgtcccagagcaaggactccgacgtgtacatcaccgataagtgcgtgctggacatgcggagcatggacttcaagagcaactccgccgtggcctggtccaacaagtccgatttcgcctgcgccaacgccttcaacaacagcattatccccgaggacacattcttcccaagcagcgacgtgccctgcgacgtgaagctggtggaaaagagcttcgagacagacaccaacctgaacttccagaacctgagcgtgatcggcttcagaatcctgctgctgaaagtggccggctttaacctgctgatgaccctgcggctgtggtccagc

SEQ ID NO: 36223 - DNA, 1935 bp, synthetic construct
  source 1..1935: mol_type = other DNA
atggccttaccagtgaccgccttgctcctgccgctggccttgctgctccacgccgccaggccgctcgagggctccggcgatcgccctgatcctgccgtgtaccagctgcgggatagcaagagcagcgacaagagcgtgtgtctgttcaccgacttcgacagccagaccaacgtgtcccagagcaaggactccgacgtgtacatcaccgataagtgcgtgctggacatgcggagcatggacttcaagagcaactccgccgtggcctggtccaacaagtccgatttcgcctgcgccaacgccttcaacaacagcattatccccgaggacacattcttcccaagccccgagagcagctgcgacgtgaagctggtggaaaagagcttcgagacagacaccaacctgaacttccagaacctgagcgtgatcggcttcagaatcctgctgctgaaagtggccggctttaacctgctgatgaccctgcggctgtggtccagctctagtcgcgccaagagaagcggatctggcgtgaagcagaccctgaatttcgacctgctgaagctggctggcgacgtggaatccaacccaggccccactagcatggccttaccagtgaccgccttgctcctgccgctggccttgctgctccacgccgccaggccggacatccagatgacacagagccctagcagcctgtctgccagcgtgggagacagagtgaccatcacatgcaaggccagcgaccacatcaacaactggctggcctggtatcagcagaagcctggcaaggcccctaagctgctgatctacggcgctaccacactggaaacaggcgtgcccagcagattttctggcagcggctctggcaccgacttcaccctgacaatatccagcctccagcctgaggacttcgccacctactactgtcagcagagctggaacaccccttggacattcggccagggcaccaaggtggaaatcaagagaggcggaggcggaagtggaggcggaggatctggcggcggaggctctgaagttcagctggttgaatctggcggcggactggttcaacctggcggatctctgagactgagctgtgccgcctctggctacgcctttagcaactactgggtcaactgggttcgacaggcccctggcaaaggactggaatgggtcgcccaaatctatcccggcgacggcgacaccaactacaacggcaagttcaagggcagattcaccatcagccgggacaacagcaagaacaccctgtacctccagatgaactccctgagagccgaggacaccgccgtgtactattgtgccagatccatcaccaccgtcgtgggctgcgctatggattattggggccagggaaccctggtcaccgtgtcctctacgcgtgaggacctgaagaacgtgttcccacctgaggtggccgtgttcgagcctagcgaggccgagatcagccacacccagaaagccaccctcgtgtgcctggctaccggcttctaccccgaccatgtggaactgtcttggtgggtcaacggcaaagaggtgcacagcggcgtgtgtaccgacccccagccactgaaagaacagcccgccctgaacgacagccggtactgcctgagcagcagactgagagtgtccgccaccttctggcagaacccccggaaccacttcagatgccaggtgcagttctacggcctgagcgagaacgacgagtggacccaggacagagccaagcccgtgacccagatcgtgtctgccgaagcctggggcagagccgattgcggctttaccagcgagagctaccagcagggcgtgctgagcgccaccatcctgtacgagatcctgctgggcaaggccaccctgtacgccgtgctggtgtctgccctggtgctgatggctatggtcaagcggaaggacagccgggga

SEQ ID NO: 36224 - DNA, 1866 bp, synthetic construct
  source 1..1866: mol_type = other DNA
atggccttaccagtgaccgccttgctcctgccgctggccttgctgctccacgccgccaggccggacatccagatgacacagagccctagcagcctgtctgccagcgtgggagacagagtgaccatcacatgcaaggccagcgaccacatcaacaactggctggcctggtatcagcagaagcctggcaaggcccctaagctgctgatctacggcgctaccacactggaaacaggcgtgcccagcagattttctggcagcggctctggcaccgacttcaccctgacaatatccagcctccagcctgaggacttcgccacctactactgtcagcagagctggaacaccccttggacattcggccagggcaccaaggtggaaatcaagagactcgaggacctgaagaacgtgttcccacctgaggtggccgtgttcgagcctagcgaggccgagatcagccacacccagaaagccaccctcgtgtgcctggctaccggcttctaccccgaccatgtggaactgtcttggtgggtcaacggcaaagaggtgcacagcggcgtgtctaccgacccccagccactgaaagaacagcccgccctgaacgacagccggtactgcctgagcagcagactgagagtgtccgccaccttctggcagaacccccggaaccacttcagatgccaggtgcagttctacggcctgagcgagaacgacgagtggacccaggacagagccaagcccgtgacccagatcgtgtctgccgaagcctggggcagagccgattgcggctttaccagcgagagctaccagcagggcgtgctgagcgccaccatcctgtacgagatcctgctgggcaaggccaccctgtacgccgtgctggtgtctgccctggtgctgatggctatggtcaagcggaaggacagccggggaagggccaagcgatctggatctggagcaacaaacttctcactactcaaacaagcaggtgacgtggaggagaatcccgggcctactagtatggactggatttggcgcatccttttccttgtcggcgctgctaccggcgcgcattccttcgaagaagttcagctggttgaatctggcggcggactggttcaacctggcggatctctgagactgagctgtgccgcctctggctacgcctttagcaactactgggtcaactgggttcgacaggcccctggcaaaggactggaatgggtcgcccaaatctatcccggcgacggcgacaccaactacaacggcaagttcaagggcagattcaccatcagccgggacaacagcaagaacaccctgtacctccagatgaactccctgagagccgaggacaccgccgtgtactattgtgccagatccatcaccaccgtcgtgggctgcgctatggattattggggccagggaaccctggtcaccgtgtcctctacgcgtatccagaaccctgatcctgccgtgtaccagctgcgggatagcaagagcagcgacaagagcgtgtgtctgttcaccgacttcgacagccagaccaacgtgtcccagagcaaggactccgacgtgtacatcaccgataagaccgtgctggacatgcggagcatggacttcaagagcaactccgccgtggcctggtccaacaagtccgatttcgcctgcgccaacgccttcaacaacagcattatccccgaggacacattcttcccaagccccgagagcagctgcgacgtgaagctggtggaaaagagcttcgagacagacaccaacctgaacttccagaacctgagcgtgatcggcttcagaatcctgctgctgaaagtggccggctttaacctgctgatgaccctgcggctgtggtccagc

SEQ ID NO: 36225 - DNA, 1890 bp, synthetic construct
  source 1..1890: mol_type = other DNA
atggccttaccagtgaccgccttgctcctgccgctggccttgctgctccacgccgccaggccggacatccagatgacacagagccctagcagcctgtctgccagcgtgggagacagagtgaccatcacatgcaaggccagcgaccacatcaacaactggctggcctggtatcagcagaagcctggcaaggcccctaagctgctgatctacggcgctaccacactggaaacaggcgtgcccagcagattttctggcagcggctctggcaccgacttcaccctgacaatatccagcctccagcctgaggacttcgccacctactactgtcagcagagctggaacaccccttggacattcggccagggcaccaaggtggaaatcaagagactcgaggacaagcagctggacgccgacgtgtcccccaagcctaccatcttcctgccctctatcgccgagacaaagctccagaaggccggcacctacctgtgcctgctggaaaagttcttcccagatgtgattaagatccactggcaggaaaagaagtccaacaccatcctgggcagccaggaaggcaacaccatgaagaccaacgacacctacatgaagttcagctggctgaccgtgcccgagaagtccctggacaaagaacacagatgcatcgtgcggcacgaaaacaacaagaacggcgtggaccaggaaatcatcttcccacccatcaagaccgatgtgattacaatggaccccaaggacaactgctccaaggacgccaacgataccctgctgctccagctgaccaacaccagcgcctactacatgtacttgttgctgctgctgaagtccgtggtgtacttcgccatcatcacatgctgcctgctgcggagaaccgccttctgctgcaacggcgagaagtctagggccaagcgatctggatctggagcaacaaacttctcactactcaaacaagcaggtgacgtggaggagaatcccgggcctactagtatggactggatttggcgcatccttttccttgtcggcgctgctaccggcgcgcattccttcgaagaagttcagctggttgaatctggcggcggactggttcaacctggcggatctctgagactgagctgtgccgcctctggctacgcctttagcaactactgggtcaactgggttcgacaggcccctggcaaaggactggaatgggtcgcccaaatctatcccggcgacggcgacaccaactacaacggcaagttcaagggcagattcaccatcagccgggacaacagcaagaacaccctgtacctccagatgaactccctgagagccgaggacaccgccgtgtactattgtgccagatccatcaccaccgtcgtgggctgcgctatggattattggggccagggaaccctggtcaccgtgtcctctacgcgtagccagcctcacaccaagcccagcgtgttcgtgatgaagaacggcaccaacgtggcctgcctcgtgaaagagttctaccccaaggacatcaggatcaacctggtgtccagcaagaagatcaccgagttcgaccccgccatcgtgatctcccccagcggcaagtacaacgccgtgaagctggggaagtacgaggacagcaacagcgtgacctgctccgtgcagcacgacaacaagaccgtgcacagcaccgactttgaagtgaaaaccgactccaccgaccacgtgaagcccaaagagacagagaacaccaagcagcccagcaagagctgccacaagcccaaggccatcgtgcacaccgagaaagtgaacatgatgagcctgaccgtgctgggcctgcggatgctgttcgccaaaaccgtggccgtgaacttcctgctgaccgccaagctgttcttcctc

SEQ ID NO: 36226 - DNA, 1890 bp, synthetic construct
  source 1..1890: mol_type = other DNA
atggccttaccagtgaccgccttgctcctgccgctggccttgctgctccacgccgccaggccggacatccagatgacacagagccctagcagcctgtctgccagcgtgggagacagagtgaccatcacatgcaaggccagcgaccacatcaacaactggctggcctggtatcagcagaagcctggcaaggcccctaagctgctgatctacggcgctaccacactggaaacaggcgtgcccagcagattttctggcagcggctctggcaccgacttcaccctgacaatatccagcctccagcctgaggacttcgccacctactactgtcagcagagctggaacaccccttggacattcggccagggcaccaaggtggaaatcaagagactcgagagccagcctcacaccaagcccagcgtgttcgtgatgaagaacggcaccaacgtggcctgcctcgtgaaagagttctaccccaaggacatcaggatcaacctggtgtccagcaagaagatcaccgagttcgaccccgccatcgtgatctcccccagcggcaagtacaacgccgtgaagctggggaagtacgaggacagcaacagcgtgacctgctccgtgcagcacgacaacaagaccgtgcacagcaccgactttgaagtgaaaaccgactccaccgaccacgtgaagcccaaagagacagagaacaccaagcagcccagcaagagctgccacaagcccaaggccatcgtgcacaccgagaaagtgaacatgatgagcctgaccgtgctgggcctgcggatgctgttcgccaaaaccgtggccgtgaacttcctgctgaccgccaagctgttcttcctcagggccaagcgatctggatctggagcaacaaacttctcactactcaaacaagcaggtgacgtggaggagaatcccgggcctactagtatggactggatttggcgcatccttttccttgtcggcgctgctaccggcgcgcattccttcgaagaagttcagctggttgaatctggcggcggactggttcaacctggcggatctctgagactgagctgtgccgcctctggctacgcctttagcaactactgggtcaactgggttcgacaggcccctggcaaaggactggaatgggtcgcccaaatctatcccggcgacggcgacaccaactacaacggcaagttcaagggcagattcaccatcagccgggacaacagcaagaacaccctgtacctccagatgaactccctgagagccgaggacaccgccgtgtactattgtgccagatccatcaccaccgtcgtgggctgcgctatggattattggggccagggaaccctggtcaccgtgtcctctacgcgtgacaagcagctggacgccgacgtgtcccccaagcctaccatcttcctgccctctatcgccgagacaaagctccagaaggccggcacctacctgtgcctgctggaaaagttcttcccagatgtgattaagatccactggcaggaaaagaagtccaacaccatcctgggcagccaggaaggcaacaccatgaagaccaacgacacctacatgaagttcagctggctgaccgtgcccgagaagtccctggacaaagaacacagatgcatcgtgcggcacgaaaacaacaagaacggcgtggaccaggaaatcatcttcccacccatcaagaccgatgtgattacaatggaccccaaggacaactgctccaaggacgccaacgataccctgctgctccagctgaccaacaccagcgcctactacatgtacttgttgctgctgctgaagtccgtggtgtacttcgccatcatcacatgctgcctgctgcggagaaccgccttctgctgcaacggcgagaagtct

SEQ ID NO: 36227 - DNA, 1935 bp, synthetic construct
  source 1..1935: mol_type = other DNA
atggccttaccagtgaccgccttgctcctgccgctggccttgctgctccacgccgccaggccgctcgaggacaagcagctggacgccgacgtgtcccccaagcctaccatcttcctgccctctatcgccgagacaaagctccagaaggccggcacctacctgtgcctgctggaaaagttcttcccagatgtgattaagatccactggcaggaaaagaagtccaacaccatcctgggcagccaggaaggcaacaccatgaagaccaacgacacctacatgaagttcagctggctgaccgtgcccgagaagtccctggacaaagaacacagatgcatcgtgcggcacgaaaacaacaagaacggcgtggaccaggaaatcatcttcccacccatcaagaccgatgtgattacaatggaccccaaggacaactgctccaaggacgccaacgataccctgctgctccagctgaccaacaccagcgcctactacatgtacttgttgctgctgctgaagtccgtggtgtacttcgccatcatcacatgctgcctgctgcggagaaccgccttctgctgcaacggcgagaagtctagggccaagcgatctggatctggagcaacaaacttctcactactcaaacaagcaggtgacgtggaggagaatcccgggcctactagcatggccttaccagtgaccgccttgctcctgccgctggccttgctgctccacgccgccaggccggacatccagatgacacagagccctagcagcctgtctgccagcgtgggagacagagtgaccatcacatgcaaggccagcgaccacatcaacaactggctggcctggtatcagcagaagcctggcaaggcccctaagctgctgatctacggcgctaccacactggaaacaggcgtgcccagcagattttctggcagcggctctggcaccgacttcaccctgacaatatccagcctccagcctgaggacttcgccacctactactgtcagcagagctggaacaccccttggacattcggccagggcaccaaggtggaaatcaagagaggcggaggcggaagtggaggcggaggatctggcggcggaggctctgaagttcagctggttgaatctggcggcggactggttcaacctggcggatctctgagactgagctgtgccgcctctggctacgcctttagcaactactgggtcaactgggttcgacaggcccctggcaaaggactggaatgggtcgcccaaatctatcccggcgacggcgacaccaactacaacggcaagttcaagggcagattcaccatcagccgggacaacagcaagaacaccctgtacctccagatgaactccctgagagccgaggacaccgccgtgtactattgtgccagatccatcaccaccgtcgtgggctgcgctatggattattggggccagggaaccctggtcaccgtgtcctctacgcgtagccagcctcacaccaagcccagcgtgttcgtgatgaagaacggcaccaacgtggcctgcctcgtgaaagagttctaccccaaggacatcaggatcaacctggtgtccagcaagaagatcaccgagttcgaccccgccatcgtgatctcccccagcggcaagtacaacgccgtgaagctggggaagtacgaggacagcaacagcgtgacctgctccgtgcagcacgacaacaagaccgtgcacagcaccgactttgaagtgaaaaccgactccaccgaccacgtgaagcccaaagagacagagaacaccaagcagcccagcaagagctgccacaagcccaaggccatcgtgcacaccgagaaagtgaacatgatgagcctgaccgtgctgggcctgcggatgctgttcgccaaaaccgtggccgtgaacttcctgctgaccgccaagctgttcttcctc

SEQ ID NO: 36228 - DNA, 2397 bp, synthetic construct
  source 1..2397: mol_type = other DNA
atggccttaccagtgaccgccttgctcctgccgctggccttgctgctccacgccgccaggccggacatccagatgacacagagccctagcagcctgtctgccagcgtgggagacagagtgaccatcacatgcaaggccagcgaccacatcaacaactggctggcctggtatcagcagaagcctggcaaggcccctaagctgctgatctacggcgctaccacactggaaacaggcgtgcccagcagattttctggcagcggctctggcaccgacttcaccctgacaatatccagcctccagcctgaggacttcgccacctactactgtcagcagagctggaacaccccttggacattcggccagggcaccaaggtggaaatcaagagaggacagcctaaggccaatcctaccgtgacactgttccctccaagcagcgaagaactccaggccaacaaggccacacttgtgtgcctgatctccgacttctaccctggggctgtgacagtggcttggaaggccgatggatctcctgtgaaagccggcgtggaaaccaccaagccatccaagcagagcaacaacaaatacgccgccagctcctacctgagcctgacacctgagcagtggaagtcccacagatcctacagctgccaagtgacccacgaaggcagcaccgtggaaaagacagtggcccctacagagtgcagcggatcccagagcttcggcctgctggaccccaagctgtgctacctgctggatggcatcctgttcatctacggcgtgatcctgaccgccctgttcctgagagtgaagttcagcagaagcgccgacgcccctgcctaccagcagggacagaaccaactgtacaacgagctgaacctgggcagacgggaagagtacgacgtgctggacaagcggagaggcagggaccctgagatgggcggaaagccccagcggagaaagaacccccaggaaggactgtataacgaactccagaaagacaagatggccgaagcctacagcgagatcggcatgaagggcgagcggagaagaggcaagggccacgatggcctgtaccagggcctgagcaccgccaccaaggacacctatgacgccctgcacatgcaggccctgcctccaagaagggccaagcgatctggatctggagcaacaaacttctcactactcaaacaagcaggtgacgtggaggagaatcccgggcctactagtatggactggatttggcgcatccttttccttgtcggcgctgctaccggcgcgcattccttcgaagaagttcagctggttgaatctggcggcggactggttcaacctggcggatctctgagactgagctgtgccgcctctggctacgcctttagcaactactgggtcaactgggttcgacaggcccctggcaaaggactggaatgggtcgcccaaatctatcccggcgacggcgacaccaactacaacggcaagttcaagggcagattcaccatcagccgggacaacagcaagaacaccctgtacctccagatgaactccctgagagccgaggacaccgccgtgtactattgtgccagatccatcaccaccgtcgtgggctgcgctatggattattggggccagggaaccctggtcaccgtgtcctctgcctctacaaagggaccctccgtgtttcctctggctcccagcagcaagtctacaagcggaggaacagccgctctgggctgcctggtcaaggattactttcccgagcctgtgaccgtgtcctggaatagcggagcactgacaagcggcgtgcacacctttccagccgtgctgcaaagcagcggcctgtactctctgagcagcgtggtcacagtgcctagctctagcctgggcacccagacctacatctgcaatgtgaaccacaagcctagcaacaccaaggtggacaagagagtggaacccaagagctgtggtacccagagttttgggttgttggaccctaaattgtgctatctgttggacggaatcctgttcatttacggagtgatcctgaccgcattgttcctgcgggttaagttttccagatccgcagacgcacccgcttaccaacaagggcagaaccaactctacaatgaacttaatttggggcggagggaagagtacgacgttctggacaaaaggaggggacgagatcccgagatgggcggaaagcctcagcgaaggaagaatccgcaagaggggctttataacgaactccagaaagataaaatggcagaagcctatagtgagattgggatgaagggagaaaggaggaggggtaaaggtcacgatgggttgtaccaaggattgagcacagccactaaagatacctatgatgcgctccacatgcaggccctgccgccaaga

SEQ ID NO: 36229 - DNA, 2454 bp, synthetic construct
  source 1..2454: mol_type = other DNA
atggccttaccagtgaccgccttgctcctgccgctggccttgctgctccacgccgccaggccggacatccagatgacacagagccctagcagcctgtctgccagcgtgggagacagagtgaccatcacatgcaaggccagcgaccacatcaacaactggctggcctggtatcagcagaagcctggcaaggcccctaagctgctgatctacggcgctaccacactggaaacaggcgtgcccagcagattttctggcagcggctctggcaccgacttcaccctgacaatatccagcctccagcctgaggacttcgccacctactactgtcagcagagctggaacaccccttggacattcggccagggcaccaaggtggaaatcaagagactcgaggacctgaagaacgtgttcccacctgaggtggccgtgttcgagcctagcgaggccgagatcagccacacccagaaagccaccctcgtgtgcctggctaccggcttctaccccgaccatgtggaactgtcttggtgggtcaacggcaaagaggtgcacagcggcgtgtctaccgacccccagccactgaaagaacagcccgccctgaacgacagccggtactgcctgagcagcagactgagagtgtccgccaccttctggcagaacccccggaaccacttcagatgccaggtgcagttctacggcctgagcgagaacgacgagtggacccaggacagagccaagcccgtgacccagatcgtgtctgccgaagcctggggcagagccgattgcggatcccagagcttcggcctgctggaccccaagctgtgctacctgctggatggcatcctgttcatctacggcgtgatcctgaccgccctgttcctgagagtgaagttcagcagaagcgccgacgcccctgcctaccagcagggacagaaccaactgtacaacgagctgaacctgggcagacgggaagagtacgacgtgctggacaagcggagaggcagggaccctgagatgggcggaaagccccagcggagaaagaacccccaggaaggactgtataacgaactccagaaagacaagatggccgaagcctacagcgagatcggcatgaagggcgagcggagaagaggcaagggccacgatggcctgtaccagggcctgagcaccgccaccaaggacacctatgacgccctgcacatgcaggccctgcctccaagaagggccaagcgatctggatctggagcaacaaacttctcactactcaaacaagcaggtgacgtggaggagaatcccgggcctactagtatggactggatttggcgcatccttttccttgtcggcgctgctaccggcgcgcattccttcgaagaagttcagctggttgaatctggcggcggactggttcaacctggcggatctctgagactgagctgtgccgcctctggctacgcctttagcaactactgggtcaactgggttcgacaggcccctggcaaaggactggaatgggtcgcccaaatctatcccggcgacggcgacaccaactacaacggcaagttcaagggcagattcaccatcagccgggacaacagcaagaacaccctgtacctccagatgaactccctgagagccgaggacaccgccgtgtactattgtgccagatccatcaccaccgtcgtgggctgcgctatggattattggggccagggaaccctggtcaccgtgtcctctacgcgtatccagaaccctgatcctgccgtgtaccagctgcgggatagcaagagcagcgacaagagcgtgtgtctgttcaccgacttcgacagccagaccaacgtgtcccagagcaaggactccgacgtgtacatcaccgataagaccgtgctggacatgcggagcatggacttcaagagcaactccgccgtggcctggtccaacaagtccgatttcgcctgcgccaacgccttcaacaacagcattatccccgaggacacattcttcccaagccccgagagcagctgcggtacccagagttttgggttgttggaccctaaattgtgctatctgttggacggaatcctgttcatttacggagtgatcctgaccgcattgttcctgcgggttaagttttccagatccgcagacgcacccgcttaccaacaagggcagaaccaactctacaatgaacttaatttggggcggagggaagagtacgacgttctggacaaaaggaggggacgagatcccgagatgggcggaaagcctcagcgaaggaagaatccgcaagaggggctttataacgaactccagaaagataaaatggcagaagcctatagtgagattgggatgaagggagaaaggaggaggggtaaaggtcacgatgggttgtaccaaggattgagcacagccactaaagatacctatgatgcgctccacatgcaggccctgccgccaaga

SEQ ID NO: 36230 - DNA, 2580 bp, synthetic construct
  source 1..2580: mol_type = other DNA
atggccttaccagtgaccgccttgctcctgccgctggccttgctgctccacgccgccaggccggacatccagatgacacagagccctagcagcctgtctgccagcgtgggagacagagtgaccatcacatgcaaggccagcgaccacatcaacaactggctggcctggtatcagcagaagcctggcaaggcccctaagctgctgatctacggcgctaccacactggaaacaggcgtgcccagcagattttctggcagcggctctggcaccgacttcaccctgacaatatccagcctccagcctgaggacttcgccacctactactgtcagcagagctggaacaccccttggacattcggccagggcaccaaggtggaaatcaagagactcgaggaggacctgaagaacgtgttcccacctgaggtggccgtgttcgagcctagcgaggccgagatcagccacacccagaaagccaccctcgtgtgcctggctaccggcttctaccccgaccatgtggaactgtcttggtgggtcaacggcaaagaggtgcacagcggcgtgtctaccgacccccagccactgaaagaacagcccgccctgaacgacagccggtactgcctgagcagcagactgagagtgtccgccaccttctggcagaacccccggaaccacttcagatgccaggtgcagttctacggcctgagcgagaacgacgagtggacccaggacagagccaagcccgtgacccagatcgtgtctgccgaagcctggggcagagccgattgcggatcccagagcttcggcctgctggaccccaagctgtgctacctgctggatggcatcctgttcatctacggcgtgatcctgaccgccctgttcctgagagtgaagttcagcagaagcgccgacgcccctgcctaccagcagggacagaaccaactgtacaacgagctgaacctgggcagacgggaagagtacgacgtgctggacaagcggagaggcagggaccctgagatgggcggaaagccccagcggagaaagaacccccaggaaggactgtataacgaactccagaaagacaagatggccgaagcctacagcgagatcggcatgaagggcgagcggagaagaggcaagggccacgatggcctgtaccagggcctgagcaccgccaccaaggacacctatgacgccctgcacatgcaggccctgcctccaagaagggccaagcgatctggatctggagcaacaaacttctcactactcaaacaagcaggtgacgtggaggagaatcccgggcctactagtatggactggatttggcgcatccttttccttgtcggcgctgctaccggcgcgcattccttcgaagaagttcagctggttgaatctggcggcggactggttcaacctggcggatctctgagactgagctgtgccgcctctggctacgcctttagcaactactgggtcaactgggttcgacaggcccctggcaaaggactggaatgggtcgcccaaatctatcccggcgacggcgacaccaactacaacggcaagttcaagggcagattcaccatcagccgggacaacagcaagaacaccctgtacctccagatgaactccctgagagccgaggacaccgccgtgtactattgtgccagatccatcaccaccgtcgtgggctgcgctatggattattggggccagggaaccctggtcaccgtgtcctctacgcgtatccagaaccctgatcctgccgtgtaccagctgcgggatagcaagagcagcgacaagagcgtgtgtctgttcaccgacttcgacagccagaccaacgtgtcccagagcaaggactccgacgtgtacatcaccgataagaccgtgctggacatgcggagcatggacttcaagagcaactccgccgtggcctggtccaacaagtccgatttcgcctgcgccaacgccttcaacaacagcattatccccgaggacacattcttcccaagccccgagagcagctgcggtacccagagttttgggttgttggaccctaaattgtgctatctgttggacggaatcctgttcatttacggagtgatcctgaccgcattgttcctgaggagcaagcggtcacggctgctccacagcgattacatgaatatgacaccacgaagaccgggtcctactcgcaaacactaccaaccctacgcacctccccgcgactttgcagcgtaccgatctcgggttaagttttccagatccgcagacgcacccgcttaccaacaagggcagaaccaactctacaatgaacttaatttggggcggagggaagagtacgacgttctggacaaaaggaggggacgagatcccgagatgggcggaaagcctcagcgaaggaagaatccgcaagaggggctttataacgaactccagaaagataaaatggcagaagcctatagtgagattgggatgaagggagaaaggaggaggggtaaaggtcacgatgggttgtaccaaggattgagcacagccactaaagatacctatgatgcgctccacatgcaggccctgccgccaaga

SEQ ID NO: 36231 - DNA, 2709 bp, synthetic construct
  source 1..2709: mol_type = other DNA
atggccttaccagtgaccgccttgctcctgccgctggccttgctgctccacgccgccaggccggacatccagatgacacagagccctagcagcctgtctgccagcgtgggagacagagtgaccatcacatgcaaggccagcgaccacatcaacaactggctggcctggtatcagcagaagcctggcaaggcccctaagctgctgatctacggcgctaccacactggaaacaggcgtgcccagcagattttctggcagcggctctggcaccgacttcaccctgacaatatccagcctccagcctgaggacttcgccacctactactgtcagcagagctggaacaccccttggacattcggccagggcaccaaggtggaaatcaagagactcgaggaggacctgaagaacgtgttcccacctgaggtggccgtgttcgagcctagcgaggccgagatcagccacacccagaaagccaccctcgtgtgcctggctaccggcttctaccccgaccatgtggaactgtcttggtgggtcaacggcaaagaggtgcacagcggcgtgtctaccgacccccagccactgaaagaacagcccgccctgaacgacagccggtactgcctgagcagcagactgagagtgtccgccaccttctggcagaacccccggaaccacttcagatgccaggtgcagttctacggcctgagcgagaacgacgagtggacccaggacagagccaagcccgtgacccagatcgtgtctgccgaagcctggggcagagccgattgcggatcccagagcttcggcctgctggaccccaagctgtgctacctgctggatggcatcctgttcatctacggcgtgatcctgaccgccctgttcctgaaacggggcagaaagaaactcctgtatatattcaaacaaccatttatgagaccagtacaaactactcaagaggaagatggctgtagctgccgatttccagaagaagaagaaggaggatgtgaactgagagtgaagttcagcagaagcgccgacgcccctgcctaccagcagggacagaaccaactgtacaacgagctgaacctgggcagacgggaagagtacgacgtgctggacaagcggagaggcagggaccctgagatgggcggaaagccccagcggagaaagaacccccaggaaggactgtataacgaactccagaaagacaagatggccgaagcctacagcgagatcggcatgaagggcgagcggagaagaggcaagggccacgatggcctgtaccagggcctgagcaccgccaccaaggacacctatgacgccctgcacatgcaggccctgcctccaagaagggccaagcgatctggatctggagcaacaaacttctcactactcaaacaagcaggtgacgtggaggagaatcccgggcctactagtatggactggatttggcgcatccttttccttgtcggcgctgctaccggcgcgcattccttcgaagaagttcagctggttgaatctggcggcggactggttcaacctggcggatctctgagactgagctgtgccgcctctggctacgcctttagcaactactgggtcaactgggttcgacaggcccctggcaaaggactggaatgggtcgcccaaatctatcccggcgacggcgacaccaactacaacggcaagttcaagggcagattcaccatcagccgggacaacagcaagaacaccctgtacctccagatgaactccctgagagccgaggacaccgccgtgtactattgtgccagatccatcaccaccgtcgtgggctgcgctatggattattggggccagggaaccctggtcaccgtgtcctctacgcgtatccagaaccctgatcctgccgtgtaccagctgcgggatagcaagagcagcgacaagagcgtgtgtctgttcaccgacttcgacagccagaccaacgtgtcccagagcaaggactccgacgtgtacatcaccgataagaccgtgctggacatgcggagcatggacttcaagagcaactccgccgtggcctggtccaacaagtccgatttcgcctgcgccaacgccttcaacaacagcattatccccgaggacacattcttcccaagccccgagagcagctgcggtacccagagttttgggttgttggaccctaaattgtgctatctgttggacggaatcctgttcatttacggagtgatcctgaccgcattgttcctgaagagaggccggaagaagctgctgtacatcttcaagcagcctttcatgcggcccgtgcagaccacccaggaagaggacggctgctcctgccggttccccgaggaagaagaaggcggctgcgagctgcgggttaagttttccagatccgcagacgcacccgcttaccaacaagggcagaaccaactctacaatgaacttaatttggggcggagggaagagtacgacgttctggacaaaaggaggggacgagatcccgagatgggcggaaagcctcagcgaaggaagaatccgcaagaggggctttataacgaactccagaaagataaaatggcagaagcctatagtgagattgggatgaagggagaaaggaggaggggtaaaggtcacgatgggttgtaccaaggattgagcacagccactaaagatacctatgatgcgctccacatgcaggccctgccgccaaga

SEQ ID NO: 36232 - DNA, 1770 bp, synthetic construct
  source 1..1770: mol_type = other DNA
atggccttaccagtgaccgccttgctcctgccgctggccttgctgctccacgccgccaggccggacatccagatgacacagagccctagcagcctgtctgccagcgtgggagacagagtgaccatcacatgcaaggccagcgaccacatcaacaactggctggcctggtatcagcagaagcctggcaaggcccctaagctgctgatctacggcgctaccacactggaaacaggcgtgcccagcagattttctggcagcggctctggcaccgacttcaccctgacaatatccagcctccagcctgaggacttcgccacctactactgtcagcagagctggaacaccccttggacattcggccagggcaccaaggtggaaatcaagagactcgagcagagcttcggcctgctggaccccaagctgtgctacctgctggatggcatcctgttcatctacggcgtgatcctgaccgccctgttcctgagagtgaagttcagcagaagcgccgacgcccctgcctaccagcagggacagaaccaactgtacaacgagctgaacctgggcagacgggaagagtacgacgtgctggacaagcggagaggcagggaccctgagatgggcggaaagccccagcggagaaagaacccccaggaaggactgtataacgaactccagaaagacaagatggccgaagcctacagcgagatcggcatgaagggcgagcggagaagaggcaagggccacgatggcctgtaccagggcctgagcaccgccaccaaggacacctatgacgccctgcacatgcaggccctgcctccaagaagggccaagcgatctggatctggagcaacaaacttctcactactcaaacaagcaggtgacgtggaggagaatcccgggcctactagtatggactggatttggcgcatccttttccttgtcggcgctgctaccggcgcgcattccttcgaagaagttcagctggttgaatctggcggcggactggttcaacctggcggatctctgagactgagctgtgccgcctctggctacgcctttagcaactactgggtcaactgggttcgacaggcccctggcaaaggactggaatgggtcgcccaaatctatcccggcgacggcgacaccaactacaacggcaagttcaagggcagattcaccatcagccgggacaacagcaagaacaccctgtacctccagatgaactccctgagagccgaggacaccgccgtgtactattgtgccagatccatcaccaccgtcgtgggctgcgctatggattattggggccagggaaccctggtcaccgtgtcctctacgcgtcagagttttgggttgttggaccctaaattgtgctatctgttggacggaatcctgttcatttacggagtgatcctgaccgcattgttcctgcgggttaagttttccagatccgcagacgcacccgcttaccaacaagggcagaaccaactctacaatgaacttaatttggggcggagggaagagtacgacgttctggacaaaaggaggggacgagatcccgagatgggcggaaagcctcagcgaaggaagaatccgcaagaggggctttataacgaactccagaaagataaaatggcagaagcctatagtgagattgggatgaagggagaaaggaggaggggtaaaggtcacgatgggttgtaccaaggattgagcacagccactaaagatacctatgatgcgctccacatgcaggccctgccgccaaga

SEQ ID NO: 36233 - DNA, 1944 bp, synthetic construct
  source 1..1944: mol_type = other DNA
atggccttaccagtgaccgccttgctcctgccgctggccttgctgctccacgccgccaggccggacatccagatgacacagagccctagcagcctgtctgccagcgtgggagacagagtgaccatcacatgcaaggccagcgaccacatcaacaactggctggcctggtatcagcagaagcctggcaaggcccctaagctgctgatctacggcgctaccacactggaaacaggcgtgcccagcagattttctggcagcggctctggcaccgacttcaccctgacaatatccagcctccagcctgaggacttcgccacctactactgtcagcagagctggaacaccccttggacattcggccagggcaccaaggtggaaatcaagagactcgagggacagcctaaggccaatcctaccgtgacactgttccctccaagcagcgaagaactccaggccaacaaggccacacttgtgtgcctgatctccgacttctaccctggggctgtgacagtggcttggaaggccgatggatctcctgtgaaagccggcgtggaaaccaccaagccatccaagcagagcaacaacaaatacgccgccagctcctacctgagcctgacacctgagcagtggaagtcccacagatcctacagctgccaagtgacccacgaaggcagcaccgtggaaaagacagtggcccctacagagtgcagccccatcaagaccgatgtgattacaatggaccccaaggacaactgctccaaggacgccaacgataccctgctgctccagctgaccaacaccagcgcctactacatgtacttgttgctgctgctgaagtccgtggtgtacttcgccatcatcacatgctgcctgctgcggagaaccgccttctgctgcaacggcgagaagtctagggccaagcgatctggatctggagcaacaaacttctcactactcaaacaagcaggtgacgtggaggagaatcccgggcctactagtatggactggatttggcgcatccttttccttgtcggcgctgctaccggcgcgcattccttcgaagaagttcagctggttgaatctggcggcggactggttcaacctggcggatctctgagactgagctgtgccgcctctggctacgcctttagcaactactgggtcaactgggttcgacaggcccctggcaaaggactggaatgggtcgcccaaatctatcccggcgacggcgacaccaactacaacggcaagttcaagggcagattcaccatcagccgggacaacagcaagaacaccctgtacctccagatgaactccctgagagccgaggacaccgccgtgtactattgtgccagatccatcaccaccgtcgtgggctgcgctatggattattggggccagggaaccctggtcaccgtgtcctctacgcgtgcctctacaaagggaccctccgtgtttcctctggctcccagcagcaagtctacaagcggaggaacagccgctctgggctgcctggtcaaggattactttcccgagcctgtgaccgtgtcctggaatagcggagcactgacaagcggcgtgcacacctttccagccgtgctgcaaagcagcggcctgtactctctgagcagcgtggtcacagtgcctagctctagcctgggcacccagacctacatctgcaatgtgaaccacaagcctagcaacaccaaggtggacaagagagtggaacccaagagctgtgaagtgaaaaccgactccaccgaccacgtgaagcccaaagagacagagaacaccaagcagcccagcaagagctgccacaagcccaaggccatcgtgcacaccgagaaagtgaacatgatgagcctgaccgtgctgggcctgcggatgctgttcgccaaaaccgtggccgtgaacttcctgctgaccgccaagctgttcttcctc

SEQ ID NO: 36234 - DNA, 1878 bp, synthetic construct
  source 1..1878: mol_type = other DNA
atggccttaccagtgaccgccttgctcctgccgctggccttgctgctccacgccgccaggccggacatccagatgacacagagccctagcagcctgtctgccagcgtgggagacagagtgaccatcacatgcaaggccagcgaccacatcaacaactggctggcctggtatcagcagaagcctggcaaggcccctaagctgctgatctacggcgctaccacactggaaacaggcgtgcccagcagattttctggcagcggctctggcaccgacttcaccctgacaatatccagcctccagcctgaggacttcgccacctactactgtcagcagagctggaacaccccttggacattcggccagggcaccaaggtggaaatcaagagactcgagggacagcctaaggccaatcctaccgtgacactgttccctccaagcagcgaagaactccaggccaacaaggccacacttgtgtgcctgatctccgacttctaccctggggctgtgacagtggcttggaaggccgatggatctcctgtgaaagccggcgtggaaaccaccaagccatccaagcagagcaacaacaaatacgccgccagctcctacctgagcctgacacctgagcagtggaagtcccacagatcctacagctgccaagtgacccacgaaggcagcaccgtggaaaagacagtggcccctacagagtgcagcggcagagccgattgcggcatcaccagcgccagctaccaccagggcgtgctgagcgccaccatcctgtacgagatcctgctgggcaaggccaccctgtacgccgtgctggtgtctgccctggtgctgatggctatggtcaagcggaaggacagccggggaagggccaagcgatctggatctggagcaacaaacttctcactactcaaacaagcaggtgacgtggaggagaatcccgggcctactagtatggactggatttggcgcatccttttccttgtcggcgctgctaccggcgcgcattccttcgaagaagttcagctggttgaatctggcggcggactggttcaacctggcggatctctgagactgagctgtgccgcctctggctacgcctttagcaactactgggtcaactgggttcgacaggcccctggcaaaggactggaatgggtcgcccaaatctatcccggcgacggcgacaccaactacaacggcaagttcaagggcagattcaccatcagccgggacaacagcaagaacaccctgtacctccagatgaactccctgagagccgaggacaccgccgtgtactattgtgccagatccatcaccaccgtcgtgggctgcgctatggattattggggccagggaaccctggtcaccgtgtcctctacgcgtgcctctacaaagggaccctccgtgtttcctctggctcccagcagcaagtctacaagcggaggaacagccgctctgggctgcctggtcaaggattactttcccgagcctgtgaccgtgtcctggaatagcggagcactgacaagcggcgtgcacacctttccagccgtgctgcaaagcagcggcctgtactctctgagcagcgtggtcacagtgcctagctctagcctgggcacccagacctacatctgcaatgtgaaccacaagcctagcaacaccaaggtggacaagagagtggaacccaagagctgtatccccgaggacacattcttcccaagcagcgacgtgccctgcgacgtgaagctggtggaaaagagcttcgagacagacaccaacctgaacttccagaacctgagcgtgatcggcttcagaatcctgctgctgaaagtggccggctttaacctgctgatgaccctgcggctgtggtccagc

SEQ ID NO: 36235 - DNA, 1878 bp, synthetic construct
  source 1..1878: mol_type = other DNA
atggccttaccagtgaccgccttgctcctgccgctggccttgctgctccacgccgccaggccggacatccagatgacacagagccctagcagcctgtctgccagcgtgggagacagagtgaccatcacatgcaaggccagcgaccacatcaacaactggctggcctggtatcagcagaagcctggcaaggcccctaagctgctgatctacggcgctaccacactggaaacaggcgtgcccagcagattttctggcagcggctctggcaccgacttcaccctgacaatatccagcctccagcctgaggacttcgccacctactactgtcagcagagctggaacaccccttggacattcggccagggcaccaaggtggaaatcaagagactcgagggacagcctaaggccaatcctaccgtgacactgttccctccaagcagcgaagaactccaggccaacaaggccacacttgtgtgcctgatctccgacttctaccctggggctgtgacagtggcttggaaggccgatggatctcctgtgaaagccggcgtggaaaccaccaagccatccaagcagagcaacaacaaatacgccgccagctcctacctgagcctgacacctgagcagtggaagtcccacagatcctacagctgccaagtgacccacgaaggcagcaccgtggaaaagacagtggcccctacagagtgcagcggcagagccgattgcggctttaccagcgagagctaccagcagggcgtgctgagcgccaccatcctgtacgagatcctgctgggcaaggccaccctgtacgccgtgctggtgtctgccctggtgctgatggctatggtcaagcggaaggacagccggggaagggccaagcgatctggatctggagcaacaaacttctcactactcaaacaagcaggtgacgtggaggagaatcccgggcctactagtatggactggatttggcgcatccttttccttgtcggcgctgctaccggcgcgcattccttcgaagaagttcagctggttgaatctggcggcggactggttcaacctggcggatctctgagactgagctgtgccgcctctggctacgcctttagcaactactgggtcaactgggttcgacaggcccctggcaaaggactggaatgggtcgcccaaatctatcccggcgacggcgacaccaactacaacggcaagttcaagggcagattcaccatcagccgggacaacagcaagaacaccctgtacctccagatgaactccctgagagccgaggacaccgccgtgtactattgtgccagatccatcaccaccgtcgtgggctgcgctatggattattggggccagggaaccctggtcaccgtgtcctctacgcgtgcctctacaaagggaccctccgtgtttcctctggctcccagcagcaagtctacaagcggaggaacagccgctctgggctgcctggtcaaggattactttcccgagcctgtgaccgtgtcctggaatagcggagcactgacaagcggcgtgcacacctttccagccgtgctgcaaagcagcggcctgtactctctgagcagcgtggtcacagtgcctagctctagcctgggcacccagacctacatctgcaatgtgaaccacaagcctagcaacaccaaggtggacaagagagtggaacccaagagctgtatccccgaggacacattcttcccaagccccgagagcagctgcgacgtgaagctggtggaaaagagcttcgagacagacaccaacctgaacttccagaacctgagcgtgatcggcttcagaatcctgctgctgaaagtggccggctttaacctgctgatgaccctgcggctgtggtccagc

SEQ ID NO: 36236 - DNA, 1356 bp, synthetic construct
  source 1..1356: mol_type = other DNA
atggccttaccagtgaccgccttgctcctgccgctggccttgctgctccacgccgccaggccggacatccagatgacacagagccctagcagcctgtctgccagcgtgggagacagagtgaccatcacatgcaaggccagcgaccacatcaacaactggctggcctggtatcagcagaagcctggcaaggcccctaagctgctgatctacggcgctaccacactggaaacaggcgtgcccagcagattttctggcagcggctctggcaccgacttcaccctgacaatatccagcctccagcctgaggacttcgccacctactactgtcagcagagctggaacaccccttggacattcggccagggcaccaaggtggaaatcaagagaggcggaggcggaagtggaggcggaggatctggcggcggaggctctgaagttcagctggttgaatctggcggcggactggttcaacctggcggatctctgagactgagctgtgccgcctctggctacgcctttagcaactactgggtcaactgggttcgacaggcccctggcaaaggactggaatgggtcgcccaaatctatcccggcgacggcgacaccaactacaacggcaagttcaagggcagattcaccatcagccgggacaacagcaagaacaccctgtacctccagatgaactccctgagagccgaggacaccgccgtgtactattgtgccagatccatcaccaccgtcgtgggctgcgctatggattattggggccagggaaccctggtcaccgtgtcctctacgcgtgacggtaacgaggagatgggaggaatcactcaaaccccttacaaagtctcaatttcaggaacaactgttatccttacatgtccccagtatcctggcagcgagatcctttggcagcataacgacaagaatatagggggagatgaagacgataagaatatcggatctgacgaggatcacttgagcctgaaagagttctccgagcttgaacaaagcggatattatgtgtgctatccgcgcgggtcaaagccggaagacgctaacttttacctttatctccgagccagagtgtgcgaaaattgcatggaaatggacgttatgtccgttgctacaatagttatcgtagatatatgcatcacgggtggactgcttctgctggtttattattggtccaagaatagaaaggccaaagctaaacccgtgaccagaggcgctggcgcaggcggaaggcaaaggggacaaaacaaagaacggccaccaccagtgccaaatccagattatgagcctattcggaaaggacagagggacctgtactctggcctgaatcagagaagaatc

SEQ ID NO: 36237 - DNA, 1251 bp, synthetic construct
  source 1..1251: mol_type = other DNA
atggccttaccagtgaccgccttgctcctgccgctggccttgctgctccacgccgccaggccggacatccagatgacacagagccctagcagcctgtctgccagcgtgggagacagagtgaccatcacatgcaaggccagcgaccacatcaacaactggctggcctggtatcagcagaagcctggcaaggcccctaagctgctgatctacggcgctaccacactggaaacaggcgtgcccagcagattttctggcagcggctctggcaccgacttcaccctgacaatatccagcctccagcctgaggacttcgccacctactactgtcagcagagctggaacaccccttggacattcggccagggcaccaaggtggaaatcaagagaggcggaggcggaagtggaggcggaggatctggcggcggaggctctgaagttcagctggttgaatctggcggcggactggttcaacctggcggatctctgagactgagctgtgccgcctctggctacgcctttagcaactactgggtcaactgggttcgacaggcccctggcaaaggactggaatgggtcgcccaaatctatcccggcgacggcgacaccaactacaacggcaagttcaagggcagattcaccatcagccgggacaacagcaagaacaccctgtacctccagatgaactccctgagagccgaggacaccgccgtgtactattgtgccagatccatcaccaccgtcgtgggctgcgctatggattattggggccagggaaccctggtcaccgtgtcctctacgcgtttcaagatccccatcgaggaactggaagatcgggtgttcgtgaactgcaacacctctatcacctgggtggaaggcaccgtgggaacactgctgagcgacatcaccagactggacctcggcaagcggattctggaccctcggggcatctacagatgcaacggcaccgacatctacaaggacaaagaaagcaccgtgcaggtccactacagaatgtgccagtcctgcgtggaactggaccctgctacagtggccggcatcatcgtgaccgatgtgatcgctactctgctgctggctctgggagtgttctgcttcgccggacacgaaacaggcagactgtctggcgctgccgatacacaggccctgctgagaaacgaccaagtgtatcagcccctgcgcgacagagatgatgcccagtattctcacctcggcggcaactgggctagaaacaag

SEQ ID NO: 36238 - DNA, 1281 bp, synthetic construct
  source 1..1281: mol_type = other DNA
atggccttaccagtgaccgccttgctcctgccgctggccttgctgctccacgccgccaggccggacatccagatgacacagagccctagcagcctgtctgccagcgtgggagacagagtgaccatcacatgcaaggccagcgaccacatcaacaactggctggcctggtatcagcagaagcctggcaaggcccctaagctgctgatctacggcgctaccacactggaaacaggcgtgcccagcagattttctggcagcggctctggcaccgacttcaccctgacaatatccagcctccagcctgaggacttcgccacctactactgtcagcagagctggaacaccccttggacattcggccagggcaccaaggtggaaatcaagagaggcggaggcggaagtggaggcggaggatctggcggcggaggctctgaagttcagctggttgaatctggcggcggactggttcaacctggcggatctctgagactgagctgtgccgcctctggctacgcctttagcaactactgggtcaactgggttcgacaggcccctggcaaaggactggaatgggtcgcccaaatctatcccggcgacggcgacaccaactacaacggcaagttcaagggcagattcaccatcagccgggacaacagcaagaacaccctgtacctccagatgaactccctgagagccgaggacaccgccgtgtactattgtgccagatccatcaccaccgtcgtgggctgcgctatggattattggggccagggaaccctggtcaccgtgtcctctacgcgtcagagcatcaagggcaaccacctggtcaaggtgtacgactaccaagaggacggcagcgtgctgctgacatgtgatgccgaggccaagaacatcacctggtttaaggacggcaagatgatcggcttcctgaccgaggacaagaagaagtggaacctgggcagcaacgctaaggaccccagaggcatgtatcagtgcaagggcagccagaacaagagcaagcccctccaggtgtactaccggatgtgccagaactgcatcgagctgaacgccgctaccatcagcggctttctgttcgccgagatcgtgtccatcttcgtgctggccgtgggcgtgtactttatcgctggacaggatggcgtgcggcagagcagagcttccgataagcaaaccctgctgcctaacgaccagctgtaccagcctctgaaggacagagaggacgaccagtacagccacctccagggcaatcagctgagaagaaac

SEQ ID NO: 36239 - DNA, 1230 bp, synthetic construct
  source 1..1230: mol_type = other DNA
atggccttaccagtgaccgccttgctcctgccgctggccttgctgctccacgccgccaggccggacatccagatgacacagagccctagcagcctgtctgccagcgtgggagacagagtgaccatcacatgcaaggccagcgaccacatcaacaactggctggcctggtatcagcagaagcctggcaaggcccctaagctgctgatctacggcgctaccacactggaaacaggcgtgcccagcagattttctggcagcggctctggcaccgacttcaccctgacaatatccagcctccagcctgaggacttcgccacctactactgtcagcagagctggaacaccccttggacattcggccagggcaccaaggtggaaatcaagagaggcggaggcggaagtggaggcggaggatctggcggcggaggctctgaagttcagctggttgaatctggcggcggactggttcaacctggcggatctctgagactgagctgtgccgcctctggctacgcctttagcaactactgggtcaactgggttcgacaggcccctggcaaaggactggaatgggtcgcccaaatctatcccggcgacggcgacaccaactacaacggcaagttcaagggcagattcaccatcagccgggacaacagcaagaacaccctgtacctccagatgaactccctgagagccgaggacaccgccgtgtactattgtgccagatccatcaccaccgtcgtgggctgcgctatggattattggggccagggaaccctggtcaccgtgtcctctacgcgtcagagttttgggttgttggaccctaaattgtgctatctgttggacggaatcctgttcatttacggagtgatcctgaccgcattgttcctgcgggttaagttttccagatccgcagacgcacccgcttaccaacaagggcagaaccaactctacaatgaacttaatttggggcggagggaagagtacgacgttctggacaaaaggaggggacgagatcccgagatgggcggaaagcctcagcgaaggaagaatccgcaagaggggctttataacgaactccagaaagataaaatggcagaagcctatagtgagattgggatgaagggagaaaggaggaggggtaaaggtcacgatgggttgtaccaaggattgagcacagccactaaagatacctatgatgcgctccacatgcaggccctgccgccaaga

SEQ ID NO: 36240 - DNA, 1515 bp, synthetic construct
  source 1..1515: mol_type = other DNA
atggccttaccagtgaccgccttgctcctgccgctggccttgctgctccacgccgccaggccggacatccagatgacacagagccctagcagcctgtctgccagcgtgggagacagagtgaccatcacatgcaaggccagcgaccacatcaacaactggctggcctggtatcagcagaagcctggcaaggcccctaagctgctgatctacggcgctaccacactggaaacaggcgtgcccagcagattttctggcagcggctctggcaccgacttcaccctgacaatatccagcctccagcctgaggacttcgccacctactactgtcagcagagctggaacaccccttggacattcggccagggcaccaaggtggaaatcaagagaggcggaggcggaagtggaggcggaggatctggcggcggaggctctgaagttcagctggttgaatctggcggcggactggttcaacctggcggatctctgagactgagctgtgccgcctctggctacgcctttagcaactactgggtcaactgggttcgacaggcccctggcaaaggactggaatgggtcgcccaaatctatcccggcgacggcgacaccaactacaacggcaagttcaagggcagattcaccatcagccgggacaacagcaagaacaccctgtacctccagatgaactccctgagagccgaggacaccgccgtgtactattgtgccagatccatcaccaccgtcgtgggctgcgctatggattattggggccagggaaccctggtcaccgtgtcctctacgcgtggaatgaggactgaggatcttcccaaagctgtcgtctttctcgaaccccaatggtatcgggtgctcgaaaaagactctgtgacactgaaatgccaaggggcctactctcccgaggacaactccacacagtggtttcataatgagtccctcatcagctctcaggccagctcttatttcattgatgccgctacagtggacgactccggcgagtatcggtgtcagaccaatctgtctacactgtctgaccccgtgcagcttgaggtccacattggatggttgctcttgcaagccccacgctgggttttcaaagaggaagatccaatccatctgcggtgccacagctggaaaaacaccgctctccacaaagtcacatacctgcaaaatggcaaaggacgcaaatacttccatcacaattccgatttttacattccgaaggctaccctgaaagacagcggcagctatttctgccggggactcgtcggctccaagaatgtgtcctccgaaaccgtgaatatcacgattacccaaggactggctgtgcctacaatctctagcttctttccgcctggataccaagtctccttctgtcttgtgatggtcctcctgtttgctgtggacacaggactgtacttttccgtgaaaacgaacatccgcagctccacacgcgattggaaagatcacaagtttaaatggcgcaaagatccccaggacaag

SEQ ID NO: 36241 - DNA, 1440 bp, synthetic construct
  source 1..1440: mol_type = other DNA
atggccttaccagtgaccgccttgctcctgccgctggccttgctgctccacgccgccaggccggacatccagatgacacagagccctagcagcctgtctgccagcgtgggagacagagtgaccatcacatgcaaggccagcgaccacatcaacaactggctggcctggtatcagcagaagcctggcaaggcccctaagctgctgatctacggcgctaccacactggaaacaggcgtgcccagcagattttctggcagcggctctggcaccgacttcaccctgacaatatccagcctccagcctgaggacttcgccacctactactgtcagcagagctggaacaccccttggacattcggccagggcaccaaggtggaaatcaagagaggcggaggcggaagtggaggcggaggatctggcggcggaggctctgaagttcagctggttgaatctggcggcggactggttcaacctggcggatctctgagactgagctgtgccgcctctggctacgcctttagcaactactgggtcaactgggttcgacaggcccctggcaaaggactggaatgggtcgcccaaatctatcccggcgacggcgacaccaactacaacggcaagttcaagggcagattcaccatcagccgggacaacagcaagaacaccctgtacctccagatgaactccctgagagccgaggacaccgccgtgtactattgtgccagatccatcaccaccgtcgtgggctgcgctatggattattggggccagggaaccctggtcaccgtgtcctctacgcgtggaatgaggactgaggatcttcccaaagctgtcgtctttctcgaaccccaatggtatcgggtgctcgaaaaagactctgtgacactgaaatgccaaggggcctactctcccgaggacaactccacacagtggtttcataatgagtccctcatcagctctcaggccagctcttatttcattgatgccgctacagtggacgactccggcgagtatcggtgtcagaccaatctgtctacactgtctgaccccgtgcagcttgaggtccacattggatggttgctcttgcaagccccacgctgggttttcaaagaggaagatccaatccatctgcggtgccacagctggaaaaacaccgctctccacaaagtcacatacctgcaaaatggcaaaggacgcaaatacttccatcacaattccgatttttacattccgaaggctaccctgaaagacagcggcagctatttctgccggggactcgtcggctccaagaatgtgtcctccgaaaccgtgaatatcacgattacccaaggactggctgtgcctacaatctctagcttctttccgcctggataccaagtctccttctgtcttgtgatggtcctcctgtttgctgtggacacaggactgtacttttccgtg

SEQ ID NO: 36242 - DNA, 1443 bp, synthetic construct
  source 1..1443: mol_type = other DNA
atggccttaccagtgaccgccttgctcctgccgctggccttgctgctccacgccgccaggccggacatccagatgacacagagccctagcagcctgtctgccagcgtgggagacagagtgaccatcacatgcaaggccagcgaccacatcaacaactggctggcctggtatcagcagaagcctggcaaggcccctaagctgctgatctacggcgctaccacactggaaacaggcgtgcccagcagattttctggcagcggctctggcaccgacttcaccctgacaatatccagcctccagcctgaggacttcgccacctactactgtcagcagagctggaacaccccttggacattcggccagggcaccaaggtggaaatcaagagaggcggaggcggaagtggaggcggaggatctggcggcggaggctctgaagttcagctggttgaatctggcggcggactggttcaacctggcggatctctgagactgagctgtgccgcctctggctacgcctttagcaactactgggtcaactgggttcgacaggcccctggcaaaggactggaatgggtcgcccaaatctatcccggcgacggcgacaccaactacaacggcaagttcaagggcagattcaccatcagccgggacaacagcaagaacaccctgtacctccagatgaactccctgagagccgaggacaccgccgtgtactattgtgccagatccatcaccaccgtcgtgggctgcgctatggattattggggccagggaaccctggtcaccgtgtcctctacgcgtggaatgaggactgaggatcttcccaaagctgtcgtctttctcgaaccccaatggtatcgggtgctcgaaaaagactctgtgacactgaaatgccaaggggcctactctcccgaggacaactccacacagtggtttcataatgagtccctcatcagctctcaggccagctcttatttcattgatgccgctacagtggacgactccggcgagtatcggtgtcagaccaatctgtctacactgtctgaccccgtgcagcttgaggtccacattggatggttgctcttgcaagccccacgctgggttttcaaagaggaagatccaatccatctgcggtgccacagctggaaaaacaccgctctccacaaagtcacatacctgcaaaatggcaaaggacgcaaatacttccatcacaattccgatttttacattccgaaggctaccctgaaagacagcggcagctatttctgccggggactcgtcggctccaagaatgtgtcctccgaaaccgtgaatatcacgattacccaaggactggctgtgcctacaatctctagcttctttccgcctggataccaagtctccttctgtcttgtgatggtcctcctgtttgctgtggacacaggactgtacttttccgtgaaa

SEQ ID NO: 36243 - DNA, 2175 bp, synthetic construct
  source 1..2175: mol_type = other DNA
atggccttaccagtgaccgccttgctcctgccgctggccttgctgctccacgccgccaggccggacatccagatgacacagagccctagcagcctgtctgccagcgtgggagacagagtgaccatcacatgcaaggccagcgaccacatcaacaactggctggcctggtatcagcagaagcctggcaaggcccctaagctgctgatctacggcgctaccacactggaaacaggcgtgcccagcagattttctggcagcggctctggcaccgacttcaccctgacaatatccagcctccagcctgaggacttcgccacctactactgtcagcagagctggaacaccccttggacattcggccagggcaccaaggtggaaatcaagagactcgagggacagcctaaggccaatcctaccgtgacactgttccctccaagcagcgaagaactccaggccaacaaggccacacttgtgtgcctgatctccgacttctaccctggggctgtgacagtggcttggaaggccgatggatctcctgtgaaagccggcgtggaaaccaccaagccatccaagcagagcaacaacaaatacgccgccagctcctacctgagcctgacacctgagcagtggaagtcccacagatcctacagctgccaagtgacccacgaaggcagcaccgtggaaaagacagtggcccctacagagtgcagcggatcccagagcttcggcctgctggaccccaagctgtgctacctgctggatggcatcctgttcatctacggcgtgatcctgaccgccctgttcctgagagtgaagttcagcagaagcgccgacgcccctgcctaccagcagggacagaaccaactgtacaacgagctgaacctgggcagacgggaagagtacgacgtgctggacaagcggagaggcagggaccctgagatgggcggaaagccccagcggagaaagaacccccaggaaggactgtataacgaactccagaaagacaagatggccgaagcctacagcgagatcggcatgaagggcgagcggagaagaggcaagggccacgatggcctgtaccagggcctgagcaccgccaccaaggacacctatgacgccctgcacatgcaggccctgcctccaagaagggccaagcgatctggatctggagcaacaaacttctcactactcaaacaagcaggtgacgtggaggagaatcccgggcctactagtatggactggatttggcgcatccttttccttgtcggcgctgctaccggcgcgcattccttcgaagaagttcagctggttgaatctggcggcggactggttcaacctggcggatctctgagactgagctgtgccgcctctggctacgcctttagcaactactgggtcaactgggttcgacaggcccctggcaaaggactggaatgggtcgcccaaatctatcccggcgacggcgacaccaactacaacggcaagttcaagggcagattcaccatcagccgggacaacagcaagaacaccctgtacctccagatgaactccctgagagccgaggacaccgccgtgtactattgtgccagatccatcaccaccgtcgtgggctgcgctatggattattggggccagggaaccctggtcaccgtgtcctctacgcgtgcctctacaaagggaccctccgtgtttcctctggctcccagcagcaagtctacaagcggaggaacagccgctctgggctgcctggtcaaggattactttcccgagcctgtgaccgtgtcctggaatagcggagcactgacaagcggcgtgcacacctttccagccgtgctgcaaagcagcggcctgtactctctgagcagcgtggtcacagtgcctagctctagcctgggcacccagacctacatctgcaatgtgaaccacaagcctagcaacaccaaggtggacaagagagtggaacccaagagctgtggtaccatcactcaaggtttggcagtgtcaaccatctcatcattctttccacctggctaccaagtgtccttctgcctggtcatggtgctgctgttcgccgtggataccggcctgtacttcagcgtcaagaccaacatccggtccagcaccagagactggaaggaccacaagttcaagtggcggaaggaccctcaggacaag

SEQ ID NO: 36244 - DNA, 2220 bp, synthetic construct
  source 1..2220: mol_type = other DNA
atggccttaccagtgaccgccttgctcctgccgctggccttgctgctccacgccgccaggccggacatccagatgacacagagccctagcagcctgtctgccagcgtgggagacagagtgaccatcacatgcaaggccagcgaccacatcaacaactggctggcctggtatcagcagaagcctggcaaggcccctaagctgctgatctacggcgctaccacactggaaacaggcgtgcccagcagattttctggcagcggctctggcaccgacttcaccctgacaatatccagcctccagcctgaggacttcgccacctactactgtcagcagagctggaacaccccttggacattcggccagggcaccaaggtggaaatcaagagactcgaggacctgaagaacgtgttcccacctgaggtggccgtgttcgagcctagcgaggccgagatcagccacacccagaaagccaccctcgtgtgcctggctaccggcttctaccccgaccatgtggaactgtcttggtgggtcaacggcaaagaggtgcacagcggcgtgtctaccgacccccagccactgaaagaacagcccgccctgaacgacagccggtactgcctgagcagcagactgagagtgtccgccaccttctggcagaacccccggaaccacttcagatgccaggtgcagttctacggcctgagcgagaacgacgagtggacccaggacagagccaagcccgtgacccagatcgtgtctgccgaagcctggggcagagccgattgcggatcccagagcttcggcctgctggaccccaagctgtgctacctgctggatggcatcctgttcatctacggcgtgatcctgaccgccctgttcctgagagtgaagttcagcagaagcgccgacgcccctgcctaccagcagggacagaaccaactgtacaacgagctgaacctgggcagacgggaagagtacgacgtgctggacaagcggagaggcagggaccctgagatgggcggaaagccccagcggagaaagaacccccaggaaggactgtataacgaactccagaaagacaagatggccgaagcctacagcgagatcggcatgaagggcgagcggagaagaggcaagggccacgatggcctgtaccagggcctgagcaccgccaccaaggacacctatgacgccctgcacatgcaggccctgcctccaagaagggccaagcgatctggatctggagcaacaaacttctcactactcaaacaagcaggtgacgtggaggagaatcccgggcctactagtatggactggatttggcgcatccttttccttgtcggcgctgctaccggcgcgcattccttcgaagaagttcagctggttgaatctggcggcggactggttcaacctggcggatctctgagactgagctgtgccgcctctggctacgcctttagcaactactgggtcaactgggttcgacaggcccctggcaaaggactggaatgggtcgcccaaatctatcccggcgacggcgacaccaactacaacggcaagttcaagggcagattcaccatcagccgggacaacagcaagaacaccctgtacctccagatgaactccctgagagccgaggacaccgccgtgtactattgtgccagatccatcaccaccgtcgtgggctgcgctatggattattggggccagggaaccctggtcaccgtgtcctctacgcgtatccagaaccctgatcctgccgtgtaccagctgcgggatagcaagagcagcgacaagagcgtgtgtctgttcaccgacttcgacagccagaccaacgtgtcccagagcaaggactccgacgtgtacatcaccgataagaccgtgctggacatgcggagcatggacttcaagagcaactccgccgtggcctggtccaacaagtccgatttcgcctgcgccaacgccttcaacaacagcattatccccgaggacacattcttcccaagccccgagagcagctgcggtaccatcactcaaggtttggcagtgtcaaccatctcatcattctttccacctggctaccaagtgtccttctgcctggtcatggtgctgctgttcgccgtggataccggcctgtacttcagcgtcaagaccaacatccggtccagcaccagagactggaaggaccacaagttcaagtggcggaaggaccctcaggacaag

SEQ ID NO: 36245 - DNA, 2145 bp, synthetic construct
  source 1..2145: mol_type = other DNA
atggccttaccagtgaccgccttgctcctgccgctggccttgctgctccacgccgccaggccggacatccagatgacacagagccctagcagcctgtctgccagcgtgggagacagagtgaccatcacatgcaaggccagcgaccacatcaacaactggctggcctggtatcagcagaagcctggcaaggcccctaagctgctgatctacggcgctaccacactggaaacaggcgtgcccagcagattttctggcagcggctctggcaccgacttcaccctgacaatatccagcctccagcctgaggacttcgccacctactactgtcagcagagctggaacaccccttggacattcggccagggcaccaaggtggaaatcaagagactcgaggacctgaagaacgtgttcccacctgaggtggccgtgttcgagcctagcgaggccgagatcagccacacccagaaagccaccctcgtgtgcctggctaccggcttctaccccgaccatgtggaactgtcttggtgggtcaacggcaaagaggtgcacagcggcgtgtctaccgacccccagccactgaaagaacagcccgccctgaacgacagccggtactgcctgagcagcagactgagagtgtccgccaccttctggcagaacccccggaaccacttcagatgccaggtgcagttctacggcctgagcgagaacgacgagtggacccaggacagagccaagcccgtgacccagatcgtgtctgccgaagcctggggcagagccgattgcggatcccagagcttcggcctgctggaccccaagctgtgctacctgctggatggcatcctgttcatctacggcgtgatcctgaccgccctgttcctgagagtgaagttcagcagaagcgccgacgcccctgcctaccagcagggacagaaccaactgtacaacgagctgaacctgggcagacgggaagagtacgacgtgctggacaagcggagaggcagggaccctgagatgggcggaaagccccagcggagaaagaacccccaggaaggactgtataacgaactccagaaagacaagatggccgaagcctacagcgagatcggcatgaagggcgagcggagaagaggcaagggccacgatggcctgtaccagggcctgagcaccgccaccaaggacacctatgacgccctgcacatgcaggccctgcctccaagaagggccaagcgatctggatctggagcaacaaacttctcactactcaaacaagcaggtgacgtggaggagaatcccgggcctactagtatggactggatttggcgcatccttttccttgtcggcgctgctaccggcgcgcattccttcgaagaagttcagctggttgaatctggcggcggactggttcaacctggcggatctctgagactgagctgtgccgcctctggctacgcctttagcaactactgggtcaactgggttcgacaggcccctggcaaaggactggaatgggtcgcccaaatctatcccggcgacggcgacaccaactacaacggcaagttcaagggcagattcaccatcagccgggacaacagcaagaacaccctgtacctccagatgaactccctgagagccgaggacaccgccgtgtactattgtgccagatccatcaccaccgtcgtgggctgcgctatggattattggggccagggaaccctggtcaccgtgtcctctacgcgtatccagaaccctgatcctgccgtgtaccagctgcgggatagcaagagcagcgacaagagcgtgtgtctgttcaccgacttcgacagccagaccaacgtgtcccagagcaaggactccgacgtgtacatcaccgataagaccgtgctggacatgcggagcatggacttcaagagcaactccgccgtggcctggtccaacaagtccgatttcgcctgcgccaacgccttcaacaacagcattatccccgaggacacattcttcccaagccccgagagcagctgcggtaccatcactcaaggtttggcagtgtcaaccatctcatcattctttccacctggctaccaagtgtccttctgcctggtcatggtgctgctgttcgccgtggataccggcctgtacttcagcgtc

SEQ ID NO: 36246 - DNA, 2148 bp, synthetic construct
  source 1..2148: mol_type = other DNA
atggccttaccagtgaccgccttgctcctgccgctggccttgctgctccacgccgccaggccggacatccagatgacacagagccctagcagcctgtctgccagcgtgggagacagagtgaccatcacatgcaaggccagcgaccacatcaacaactggctggcctggtatcagcagaagcctggcaaggcccctaagctgctgatctacggcgctaccacactggaaacaggcgtgcccagcagattttctggcagcggctctggcaccgacttcaccctgacaatatccagcctccagcctgaggacttcgccacctactactgtcagcagagctggaacaccccttggacattcggccagggcaccaaggtggaaatcaagagactcgaggacctgaagaacgtgttcccacctgaggtggccgtgttcgagcctagcgaggccgagatcagccacacccagaaagccaccctcgtgtgcctggctaccggcttctaccccgaccatgtggaactgtcttggtgggtcaacggcaaagaggtgcacagcggcgtgtctaccgacccccagccactgaaagaacagcccgccctgaacgacagccggtactgcctgagcagcagactgagagtgtccgccaccttctggcagaacccccggaaccacttcagatgccaggtgcagttctacggcctgagcgagaacgacgagtggacccaggacagagccaagcccgtgacccagatcgtgtctgccgaagcctggggcagagccgattgcggatcccagagcttcggcctgctggaccccaagctgtgctacctgctggatggcatcctgttcatctacggcgtgatcctgaccgccctgttcctgagagtgaagttcagcagaagcgccgacgcccctgcctaccagcagggacagaaccaactgtacaacgagctgaacctgggcagacgggaagagtacgacgtgctggacaagcggagaggcagggaccctgagatgggcggaaagccccagcggagaaagaacccccaggaaggactgtataacgaactccagaaagacaagatggccgaagcctacagcgagatcggcatgaagggcgagcggagaagaggcaagggccacgatggcctgtaccagggcctgagcaccgccaccaaggacacctatgacgccctgcacatgcaggccctgcctccaagaagggccaagcgatctggatctggagcaacaaacttctcactactcaaacaagcaggtgacgtggaggagaatcccgggcctactagtatggactggatttggcgcatccttttccttgtcggcgctgctaccggcgcgcattccttcgaagaagttcagctggttgaatctggcggcggactggttcaacctggcggatctctgagactgagctgtgccgcctctggctacgcctttagcaactactgggtcaactgggttcgacaggcccctggcaaaggactggaatgggtcgcccaaatctatcccggcgacggcgacaccaactacaacggcaagttcaagggcagattcaccatcagccgggacaacagcaagaacaccctgtacctccagatgaactccctgagagccgaggacaccgccgtgtactattgtgccagatccatcaccaccgtcgtgggctgcgctatggattattggggccagggaaccctggtcaccgtgtcctctacgcgtatccagaaccctgatcctgccgtgtaccagctgcgggatagcaagagcagcgacaagagcgtgtgtctgttcaccgacttcgacagccagaccaacgtgtcccagagcaaggactccgacgtgtacatcaccgataagaccgtgctggacatgcggagcatggacttcaagagcaactccgccgtggcctggtccaacaagtccgatttcgcctgcgccaacgccttcaacaacagcattatccccgaggacacattcttcccaagccccgagagcagctgcggtaccatcactcaaggtttggcagtgtcaaccatctcatcattctttccacctggctaccaagtgtccttctgcctggtcatggtgctgctgttcgccgtggataccggcctgtacttcagcgtcaag

SEQ ID NO: 36247 - DNA, 2151 bp, synthetic construct
  source 1..2151: mol_type = other DNA
atggccttaccagtgaccgccttgctcctgccgctggccttgctgctccacgccgccaggccggacatccagatgacacagagccctagcagcctgtctgccagcgtgggagacagagtgaccatcacatgcaaggccagcgaccacatcaacaactggctggcctggtatcagcagaagcctggcaaggcccctaagctgctgatctacggcgctaccacactggaaacaggcgtgcccagcagattttctggcagcggctctggcaccgacttcaccctgacaatatccagcctccagcctgaggacttcgccacctactactgtcagcagagctggaacaccccttggacattcggccagggcaccaaggtggaaatcaagagactcgaggacctgaagaacgtgttcccacctgaggtggccgtgttcgagcctagcgaggccgagatcagccacacccagaaagccaccctcgtgtgcctggctaccggcttctaccccgaccatgtggaactgtcttggtgggtcaacggcaaagaggtgcacagcggcgtgtctaccgacccccagccactgaaagaacagcccgccctgaacgacagccggtactgcctgagcagcagactgagagtgtccgccaccttctggcagaacccccggaaccacttcagatgccaggtgcagttctacggcctgagcgagaacgacgagtggacccaggacagagccaagcccgtgacccagatcgtgtctgccgaagcctggggcagagccgattgcggatcccagagcttcggcctgctggaccccaagctgtgctacctgctggatggcatcctgttcatctacggcgtgatcctgaccgccctgttcctgagagtgaagttcagcagaagcgccgacgcccctgcctaccagcagggacagaaccaactgtacaacgagctgaacctgggcagacgggaagagtacgacgtgctggacaagcggagaggcagggaccctgagatgggcggaaagccccagcggagaaagaacccccaggaaggactgtataacgaactccagaaagacaagatggccgaagcctacagcgagatcggcatgaagggcgagcggagaagaggcaagggccacgatggcctgtaccagggcctgagcaccgccaccaaggacacctatgacgccctgcacatgcaggccctgcctccaagaagggccaagcgatctggatctggagcaacaaacttctcactactcaaacaagcaggtgacgtggaggagaatcccgggcctactagtatggactggatttggcgcatccttttccttgtcggcgctgctaccggcgcgcattccttcgaagaagttcagctggttgaatctggcggcggactggttcaacctggcggatctctgagactgagctgtgccgcctctggctacgcctttagcaactactgggtcaactgggttcgacaggcccctggcaaaggactggaatgggtcgcccaaatctatcccggcgacggcgacaccaactacaacggcaagttcaagggcagattcaccatcagccgggacaacagcaagaacaccctgtacctccagatgaactccctgagagccgaggacaccgccgtgtactattgtgccagatccatcaccaccgtcgtgggctgcgctatggattattggggccagggaaccctggtcaccgtgtcctctacgcgtatccagaaccctgatcctgccgtgtaccagctgcgggatagcaagagcagcgacaagagcgtgtgtctgttcaccgacttcgacagccagaccaacgtgtcccagagcaaggactccgacgtgtacatcaccgataagaccgtgctggacatgcggagcatggacttcaagagcaactccgccgtggcctggtccaacaagtccgatttcgcctgcgccaacgccttcaacaacagcattatccccgaggacacattcttcccaagccccgagagcagctgcggtaccatcactcaaggtttggcagtgtcaaccatctcatcattctttccacctggctaccaagtgtccttctgcctggtcatggtgctgctgttcgccgtggataccggcctgtacttcagcgtcaagacc

SEQ ID NO: 36248 - DNA, 1962 bp, synthetic construct
  source 1..1962: mol_type = other DNA
atggccttaccagtgaccgccttgctcctgccgctggccttgctgctccacgccgccaggccggacatccagatgacacagagccctagcagcctgtctgccagcgtgggagacagagtgaccatcacatgcaaggccagcgaccacatcaacaactggctggcctggtatcagcagaagcctggcaaggcccctaagctgctgatctacggcgctaccacactggaaacaggcgtgcccagcagattttctggcagcggctctggcaccgacttcaccctgacaatatccagcctccagcctgaggacttcgccacctactactgtcagcagagctggaacaccccttggacattcggccagggcaccaaggtggaaatcaagagactcgagggacagcctaaggccaatcctaccgtgacactgttccctccaagcagcgaagaactccaggccaacaaggccacacttgtgtgcctgatctccgacttctaccctggggctgtgacagtggcttggaaggccgatggatctcctgtgaaagccggcgtggaaaccaccaagccatccaagcagagcaacaacaaatacgccgccagctcctacctgagcctgacacctgagcagtggaagtcccacagatcctacagctgccaagtgacccacgaaggcagcaccgtggaaaagacagtggcccctacagagtgcagcggatccctgggagagcctcagctgtgctatatcctggacgccatcctgtttctgtacggcatcgtgctgaccctgctgtactgccggctgaagatccaagtgcggaaggccgccatcaccagctacgagaaatccgacggcgtgtacaccggcctgagcaccagaaatcaagagacatacgagacactgaagcacgaaaagcctccacaaagggccaagcgatctggatctggagcaacaaacttctcactactcaaacaagcaggtgacgtggaggagaatcccgggcctactagtatggactggatttggcgcatccttttccttgtcggcgctgctaccggcgcgcattccttcgaagaagttcagctggttgaatctggcggcggactggttcaacctggcggatctctgagactgagctgtgccgcctctggctacgcctttagcaactactgggtcaactgggttcgacaggcccctggcaaaggactggaatgggtcgcccaaatctatcccggcgacggcgacaccaactacaacggcaagttcaagggcagattcaccatcagccgggacaacagcaagaacaccctgtacctccagatgaactccctgagagccgaggacaccgccgtgtactattgtgccagatccatcaccaccgtcgtgggctgcgctatggattattggggccagggaaccctggtcaccgtgtcctctacgcgtgcctctacaaagggaccctccgtgtttcctctggctcccagcagcaagtctacaagcggaggaacagccgctctgggctgcctggtcaaggattactttcccgagcctgtgaccgtgtcctggaatagcggagcactgacaagcggcgtgcacacctttccagccgtgctgcaaagcagcggcctgtactctctgagcagcgtggtcacagtgcctagctctagcctgggcacccagacctacatctgcaatgtgaaccacaagcctagcaacaccaaggtggacaagagagtggaacccaagagctgtggtaccctcggagaaccacagctctgttacattctggatgctatcctgttcctctatgggatcgtcctgacactcctgtattgcagactcaaaattcaagttcgcaaagccgccattacctcttacgagaagagtgatggggtgtacacaggactgtctacccggaatcaagaaacctacgaaaccctcaaacatgagaagccacctcagtaa

SEQ ID NO: 36249 - DNA, 1869 bp, synthetic construct
  source 1..1869: mol_type = other DNA
atggccttaccagtgaccgccttgctcctgccgctggccttgctgctccacgccgccaggccggacatccagatgacacagagccctagcagcctgtctgccagcgtgggagacagagtgaccatcacatgcaaggccagcgaccacatcaacaactggctggcctggtatcagcagaagcctggcaaggcccctaagctgctgatctacggcgctaccacactggaaacaggcgtgcccagcagattttctggcagcggctctggcaccgacttcaccctgacaatatccagcctccagcctgaggacttcgccacctactactgtcagcagagctggaacaccccttggacattcggccagggcaccaaggtggaaatcaagagactcgaggacctgaagaacgtgttcccacctgaggtggccgtgttcgagcctagcgaggccgagatcagccacacccagaaagccaccctcgtgtgcctggctaccggcttctaccccgaccatgtggaactgtcttggtgggtcaacggcaaagaggtgcacagcggcgtgtgtaccgacccccagccactgaaagaacagcccgccctgaacgacagccggtactgcctgagcagcagactgagagtgtccgccaccttctggcagaacccccggaaccacttcagatgccaggtgcagttctacggcctgagcgagaacgacgagtggacccaggacagagccaagcccgtgacccagatcgtgtctgccgaagcctggggcagagccgattgcggctttaccagcgagagctaccagcagggcgtgctgagcgcctactacatgtacttgttgctgctgctgaagtccgtggtgtacttcgccatcatcacatgctgcctgctgcggagaaccgccttctgctgcaacggcgagaagtctagggccaagcgatctggatctggagcaacaaacttctcactactcaaacaagcaggtgacgtggaggagaatcccgggcctactagtatggactggatttggcgcatccttttccttgtcggcgctgctaccggcgcgcattccttcgaagaagttcagctggttgaatctggcggcggactggttcaacctggcggatctctgagactgagctgtgccgcctctggctacgcctttagcaactactgggtcaactgggttcgacaggcccctggcaaaggactggaatgggtcgcccaaatctatcccggcgacggcgacaccaactacaacggcaagttcaagggcagattcaccatcagccgggacaacagcaagaacaccctgtacctccagatgaactccctgagagccgaggacaccgccgtgtactattgtgccagatccatcaccaccgtcgtgggctgcgctatggattattggggccagggaaccctggtcaccgtgtcctctacgcgtatccagaaccctgatcctgccgtgtaccagctgcgggatagcaagagcagcgacaagagcgtgtgtctgttcaccgacttcgacagccagaccaacgtgtcccagagcaaggactccgacgtgtacatcaccgataagtgcgtgctggacatgcggagcatggacttcaagagcaactccgccgtggcctggtccaacaagtccgatttcgcctgcgccaacgccttcaacaacagcattatccccgaggacacattcttcccaagccccgagagcagctgcgacgtgaagctggtggaaaagagcttcgagacagacaccaacctgaacttccagaacctgagcgtgatcggcttcagaatcctgctgctgaaagtggccggctttaacctgctgatgaccctgcggctgtggtccagc

SEQ ID NO: 36250 - DNA, 1890 bp, synthetic construct
  source 1..1890: mol_type = other DNA
atggccttaccagtgaccgccttgctcctgccgctggccttgctgctccacgccgccaggccggacatccagatgacacagagccctagcagcctgtctgccagcgtgggagacagagtgaccatcacatgcaaggccagcgaccacatcaacaactggctggcctggtatcagcagaagcctggcaaggcccctaagctgctgatctacggcgctaccacactggaaacaggcgtgcccagcagattttctggcagcggctctggcaccgacttcaccctgacaatatccagcctccagcctgaggacttcgccacctactactgtcagcagagctggaacaccccttggacattcggccagggcaccaaggtggaaatcaagagactcgaggacaagcagctggacgccgacgtgtcccccaagcctaccatcttcctgccctctatcgccgagacaaagctccagaaggccggcacctacctgtgcctgctggaaaagttcttcccagatgtgattaagatccactggcaggaaaagaagtccaacaccatcctgggcagccaggaaggcaacaccatgaagaccaacgacacctacatgaagttcagctggctgaccgtgcccgagaagtccctggacaaagaacacagatgcatcgtgcggcacgaaaacaacaagaacggcgtggaccaggaaatcatcttcccacccatcaagaccgatgtgattacaatggaccccaaggacaactgctccaaggacgccaacgataccctgctgctccagctgaccaacaccagcgcctactacatgtacgagatcctgctgggcaaggccaccctgtacgccgtgctggtgtctgccctggtgctgatggctatggtcaagcggaaggacagccggggaagggccaagcgatctggatctggagcaacaaacttctcactactcaaacaagcaggtgacgtggaggagaatcccgggcctactagtatggactggatttggcgcatccttttccttgtcggcgctgctaccggcgcgcattccttcgaagaagttcagctggttgaatctggcggcggactggttcaacctggcggatctctgagactgagctgtgccgcctctggctacgcctttagcaactactgggtcaactgggttcgacaggcccctggcaaaggactggaatgggtcgcccaaatctatcccggcgacggcgacaccaactacaacggcaagttcaagggcagattcaccatcagccgggacaacagcaagaacaccctgtacctccagatgaactccctgagagccgaggacaccgccgtgtactattgtgccagatccatcaccaccgtcgtgggctgcgctatggattattggggccagggaaccctggtcaccgtgtcctctacgcgtagccagcctcacaccaagcccagcgtgttcgtgatgaagaacggcaccaacgtggcctgcctcgtgaaagagttctaccccaaggacatcaggatcaacctggtgtccagcaagaagatcaccgagttcgaccccgccatcgtgatctcccccagcggcaagtacaacgccgtgaagctggggaagtatgaggacagcaacagcgtgacctgctccgtgcagcacgacaacaagaccgtgcacagcaccgactttgaagtgaaaaccgactccaccgaccacgtgaagcccaaagagacagagaacaccaagcagcccagcaagagctgccacaagcccaaggccatcgtgcacaccgagaaagtgaacatgatgagcctgaccgtgatcggcttcagaatcctgctgctgaaagtggccggctttaacctgctgatgaccctgcggctgtggtccagctaa

SEQ ID NO: 36251 - DNA, 1890 bp, synthetic construct
  source 1..1890: mol_type = other DNA
atggccttaccagtgaccgccttgctcctgccgctggccttgctgctccacgccgccaggccggacatccagatgacacagagccctagcagcctgtctgccagcgtgggagacagagtgaccatcacatgcaaggccagcgaccacatcaacaactggctggcctggtatcagcagaagcctggcaaggcccctaagctgctgatctacggcgctaccacactggaaacaggcgtgcccagcagattttctggcagcggctctggcaccgacttcaccctgacaatatccagcctccagcctgaggacttcgccacctactactgtcagcagagctggaacaccccttggacattcggccagggcaccaaggtggaaatcaagagactcgaggacaagcagctggacgccgacgtgtcccccaagcctaccatcttcctgccctctatcgccgagacaaagctccagaaggccggcacctacctgtgcctgctggaaaagttcttcccagatgtgattaagatccactggcaggaaaagaagtccaacaccatcctgggcagccaggaaggcaacaccatgaagaccaacgacacctacatgaagttcagctggctgaccgtgcccgagaagtccctggacaaagaacacagatgcatcgtgcggcacgaaaacaacaagaacggcgtggaccaggaaatcatcttcccacccatcaagaccgatgtgattacaatggaccccaaggacaactgctccaaggacgccaacgataccctgctgctccagctgaccaacaccagcgccaccatcctgtacgagatcctgctgggcaaggccaccctgtacgccgtgctggtgtctgccctggtgctgatggctatggtcaagcggaaggacagccggggaagggccaagcgatctggatctggagcaacaaacttctcactactcaaacaagcaggtgacgtggaggagaatcccgggcctactagtatggactggatttggcgcatccttttccttgtcggcgctgctaccggcgcgcattccttcgaagaagttcagctggttgaatctggcggcggactggttcaacctggcggatctctgagactgagctgtgccgcctctggctacgcctttagcaactactgggtcaactgggttcgacaggcccctggcaaaggactggaatgggtcgcccaaatctatcccggcgacggcgacaccaactacaacggcaagttcaagggcagattcaccatcagccgggacaacagcaagaacaccctgtacctccagatgaactccctgagagccgaggacaccgccgtgtactattgtgccagatccatcaccaccgtcgtgggctgcgctatggattattggggccagggaaccctggtcaccgtgtcctctacgcgtagccagcctcacaccaagcccagcgtgttcgtgatgaagaacggcaccaacgtggcctgcctcgtgaaagagttctaccccaaggacatcaggatcaacctggtgtccagcaagaagatcaccgagttcgaccccgccatcgtgatctcccccagcggcaagtacaacgccgtgaagctggggaagtatgaggacagcaacagcgtgacctgctccgtgcagcacgacaacaagaccgtgcacagcaccgactttgaagtgaaaaccgactccaccgaccacgtgaagcccaaagagacagagaacaccaagcagcccagcaagagctgccacaagcccaaggccatcgtgcacaccgagaaagtgaacatgatgagcctgaccgtgatcggcttcagaatcctgctgctgaaagtggccggctttaacctgctgatgaccctgcggctgtggtccagctaa

SEQ ID NO: 36252 - DNA, 1890 bp, synthetic construct
  source 1..1890: mol_type = other DNA
atggccttaccagtgaccgccttgctcctgccgctggccttgctgctccacgccgccaggccggacatccagatgacacagagccctagcagcctgtctgccagcgtgggagacagagtgaccatcacatgcaaggccagcgaccacatcaacaactggctggcctggtatcagcagaagcctggcaaggcccctaagctgctgatctacggcgctaccacactggaaacaggcgtgcccagcagattttctggcagcggctctggcaccgacttcaccctgacaatatccagcctccagcctgaggacttcgccacctactactgtcagcagagctggaacaccccttggacattcggccagggcaccaaggtggaaatcaagagactcgaggacaagcagctggacgccgacgtgtcccccaagcctaccatcttcctgccctctatcgccgagacaaagctccagaaggccggcacctacctgtgcctgctggaaaagttcttcccagatgtgattaagatccactggcaggaaaagaagtccaacaccatcctgggcagccaggaaggcaacaccatgaagaccaacgacacctacatgaagttcagctggctgaccgtgcccgagaagtccctggacaaagaacacagatgcatcgtgcggcacgaaaacaacaagaacggcgtggaccaggaaatcatcttcccacccatcaagaccgatgtgattacaatggaccccaaggacaactgctccaaggacgccaacgataccctgctgctccagctgaccaacaccagcgcctactacatgtacgagatcctgctgggcaaggccaccctgtacgccgtgctggtgtctgccctggtgctgatggctatggtcaagcggaaggacagccggggaagggccaagcgatctggatctggagcaacaaacttctcactactcaaacaagcaggtgacgtggaggagaatcccgggcctactagtatggactggatttggcgcatccttttccttgtcggcgctgctaccggcgcgcattccttcgaagaagttcagctggttgaatctggcggcggactggttcaacctggcggatctctgagactgagctgtgccgcctctggctacgcctttagcaactactgggtcaactgggttcgacaggcccctggcaaaggactggaatgggtcgcccaaatctatcccggcgacggcgacaccaactacaacggcaagttcaagggcagattcaccatcagccgggacaacagcaagaacaccctgtacctccagatgaactccctgagagccgaggacaccgccgtgtactattgtgccagatccatcaccaccgtcgtgggctgcgctatggattattggggccagggaaccctggtcaccgtgtcctctacgcgtagccagcctcacaccaagcccagcgtgttcgtgatgaagaacggcaccaacgtggcctgcctcgtgaaagagttctaccccaaggacatcaggatcaacctggtgtccagcaagaagatcaccgagttcgaccccgccatcgtgatctcccccagcggcaagtacaacgccgtgaagctggggaagtacgaggacagcaacagcgtgacctgctccgtgcagcacgacaacaagaccgtgcacagcaccgactttgaagtgaaaaccgactccaccgaccacgtgaagcccaaagagacagagaacaccaagcagcccagcaagagctgccacaagcccaaggccatcgtgcacaccgagaaagtgaacatgatgagcctgaccgtgctgggcttcagaatcctgctgctgaaagtggccggctttaacctgctgatgaccctgcggctgtggtccagctaa

SEQ ID NO: 36253 - DNA, 1890 bp, synthetic construct
  source 1..1890: mol_type = other DNA
atggccttaccagtgaccgccttgctcctgccgctggccttgctgctccacgccgccaggccggacatccagatgacacagagccctagcagcctgtctgccagcgtgggagacagagtgaccatcacatgcaaggccagcgaccacatcaacaactggctggcctggtatcagcagaagcctggcaaggcccctaagctgctgatctacggcgctaccacactggaaacaggcgtgcccagcagattttctggcagcggctctggcaccgacttcaccctgacaatatccagcctccagcctgaggacttcgccacctactactgtcagcagagctggaacaccccttggacattcggccagggcaccaaggtggaaatcaagagactcgaggacaagcagctggacgccgacgtgtcccccaagcctaccatcttcctgccctctatcgccgagacaaagctccagaaggccggcacctacctgtgcctgctggaaaagttcttcccagatgtgattaagatccactggcaggaaaagaagtccaacaccatcctgggcagccaggaaggcaacaccatgaagaccaacgacacctacatgaagttcagctggctgaccgtgcccgagaagtccctggacaaagaacacagatgcatcgtgcggcacgaaaacaacaagaacggcgtggaccaggaaatcatcttcccacccatcaagaccgatgtgattacaatggaccccaaggacaactgctccaaggacgccaacgataccctgctgctccagctgaccaacaccagcgccaccatcctgtacgagatcctgctgggcaaggccaccctgtacgccgtgctggtgtctgccctggtgctgatggctatggtcaagcggaaggacagccggggaagggccaagcgatctggatctggagcaacaaacttctcactactcaaacaagcaggtgacgtggaggagaatcccgggcctactagtatggactggatttggcgcatccttttccttgtcggcgctgctaccggcgcgcattccttcgaagaagttcagctggttgaatctggcggcggactggttcaacctggcggatctctgagactgagctgtgccgcctctggctacgcctttagcaactactgggtcaactgggttcgacaggcccctggcaaaggactggaatgggtcgcccaaatctatcccggcgacggcgacaccaactacaacggcaagttcaagggcagattcaccatcagccgggacaacagcaagaacaccctgtacctccagatgaactccctgagagccgaggacaccgccgtgtactattgtgccagatccatcaccaccgtcgtgggctgcgctatggattattggggccagggaaccctggtcaccgtgtcctctacgcgtagccagcctcacaccaagcccagcgtgttcgtgatgaagaacggcaccaacgtggcctgcctcgtgaaagagttctaccccaaggacatcaggatcaacctggtgtccagcaagaagatcaccgagttcgaccccgccatcgtgatctcccccagcggcaagtacaacgccgtgaagctggggaagtacgaggacagcaacagcgtgacctgctccgtgcagcacgacaacaagaccgtgcacagcaccgactttgaagtgaaaaccgactccaccgaccacgtgaagcccaaagagacagagaacaccaagcagcccagcaagagctgccacaagcccaaggccatcgtgcacaccgagaaagtgaacatgatgagcctgaccgtgctgggcttcagaatcctgctgctgaaagtggccggctttaacctgctgatgaccctgcggctgtggtccagctaa

SEQ ID NO: 36254 - DNA, 1872 bp, synthetic construct
  source 1..1872: mol_type = other DNA
atggccttaccagtgaccgccttgctcctgccgctggccttgctgctccacgccgccaggccggacatccagatgacacagagccctagcagcctgtctgccagcgtgggagacagagtgaccatcacatgcaaggccagcgaccacatcaacaactggctggcctggtatcagcagaagcctggcaaggcccctaagctgctgatctacggcgctaccacactggaaacaggcgtgcccagcagattttctggcagcggctctggcaccgacttcaccctgacaatatccagcctccagcctgaggacttcgccacctactactgtcagcagagctggaacaccccttggacattcggccagggcaccaaggtggaaatcaagagactcgaggacctgaagaacgtgttcccacctgaggtggccgtgttcgagcctagcgaggccgagatcagccacacccagaaagccaccctcgtgtgcctggctaccggcttctaccccgaccatgtggaactgtcttggtgggtcaacggcaaagaggtgcacagcggcgtgtgtaccgacccccagccactgaaagaacagcccgccctgaacgacagccggtactgcctgagcagcagactgagagtgtccgccaccttctggcagaacccccggaaccacttcagatgccaggtgcagttctacggcctgagcgagaacgacgagtggacccaggacagagccaagcccgtgacccagatcgtgtctgccgaagcctggggcagagccgattgcggctttaccagcgagagctaccagcagggcgtgctgagcgccaccatcctgtacttgttgctgctgctgaagtccgtggtgtacttcgccatcatcacatgctgcctgctgcggagaaccgccttctgctgcaacggcgagaagtctagggccaagcgatctggatctggagcaacaaacttctcactactcaaacaagcaggtgacgtggaggagaatcccgggcctactagtatggactggatttggcgcatccttttccttgtcggcgctgctaccggcgcgcattccttcgaagaagttcagctggttgaatctggcggcggactggttcaacctggcggatctctgagactgagctgtgccgcctctggctacgcctttagcaactactgggtcaactgggttcgacaggcccctggcaaaggactggaatgggtcgcccaaatctatcccggcgacggcgacaccaactacaacggcaagttcaagggcagattcaccatcagccgggacaacagcaagaacaccctgtacctccagatgaactccctgagagccgaggacaccgccgtgtactattgtgccagatccatcaccaccgtcgtgggctgcgctatggattattggggccagggaaccctggtcaccgtgtcctctacgcgtatccagaaccctgatcctgccgtgtaccagctgcgggatagcaagagcagcgacaagagcgtgtgtctgttcaccgacttcgacagccagaccaacgtgtcccagagcaaggactccgacgtgtacatcaccgataagtgcgtgctggacatgcggagcatggacttcaagagcaactccgccgtggcctggtccaacaagtccgatttcgcctgcgccaacgccttcaacaacagcattatccccgaggacacattcttcccaagccccgagagcagctgcgacgtgaagctggtggaaaagagcttcgagacagacaccaacctgaacttccagaacctgagcgtgatcggcctgcggatgctgttcgccaaaaccgtggccgtgaacttcctgctgaccgccaagctgttcttcctctaa

SEQ ID NO: 36255 - DNA, 1959 bp, synthetic construct
  source 1..1959: mol_type = other DNA
atggccttaccagtgaccgccttgctcctgccgctggccttgctgctccacgccgccaggccggacatccagatgacacagagccctagcagcctgtctgccagcgtgggagacagagtgaccatcacatgcaaggccagcgaccacatcaacaactggctggcctggtatcagcagaagcctggcaaggcccctaagctgctgatctacggcgctaccacactggaaacaggcgtgcccagcagattttctggcagcggctctggcaccgacttcaccctgacaatatccagcctccagcctgaggacttcgccacctactactgtcagcagagctggaacaccccttggacattcggccagggcaccaaggtggaaatcaagagactcgaggacctgaagaacgtgttcccacctgaggtggccgtgttcgagcctagcgaggccgagatcagccacacccagaaagccaccctcgtgtgcctggctaccggcttctaccccgaccatgtggaactgtcttggtgggtcaacggcaaagaggtgcacagcggcgtgtctaccgacccccagccactgaaagaacagcccgccctgaacgacagccggtactgcctgagcagcagactgagagtgtccgccaccttctggcagaacccccggaaccacttcagatgccaggtgcagttctacggcctgagcgagaacgacgagtggacccaggacagagccaagcccgtgacccagatcgtgtctgccgaagcctggggcagagccgattgcggatcctccaaggacgccaacgataccctgctgctccagctgaccaacaccagcgcctactacatgtacttgttgctgctgctgaagtccgtggtgtacttcgccatcatcacatgctgcctgctgcggagaaccgccttctgctgcaacggcgagaagtctagggccaagcgatctggatctggagcaacaaacttctcactactcaaacaagcaggtgacgtggaggagaatcccgggcctactagtatggactggatttggcgcatccttttccttgtcggcgctgctaccggcgcgcattccttcgaagaagttcagctggttgaatctggcggcggactggttcaacctggcggatctctgagactgagctgtgccgcctctggctacgcctttagcaactactgggtcaactgggttcgacaggcccctggcaaaggactggaatgggtcgcccaaatctatcccggcgacggcgacaccaactacaacggcaagttcaagggcagattcaccatcagccgggacaacagcaagaacaccctgtacctccagatgaactccctgagagccgaggacaccgccgtgtactattgtgccagatccatcaccaccgtcgtgggctgcgctatggattattggggccagggaaccctggtcaccgtgtcctctacgcgtatccagaaccctgatcctgccgtgtaccagctgcgggatagcaagagcagcgacaagagcgtgtgtctgttcaccgacttcgacagccagaccaacgtgtcccagagcaaggactccgacgtgtacatcaccgataagaccgtgctggacatgcggagcatggacttcaagagcaactccgccgtggcctggtccaacaagtccgatttcgcctgcgccaacgccttcaacaacagcattatccccgaggacacattcttcccaagccccgagagcagctgcggtaccgaagtgaaaaccgactccaccgaccacgtgaagcccaaagagacagagaacaccaagcagcccagcaagagctgccacaagcccaaggccatcgtgcacaccgagaaagtgaacatgatgagcctgaccgtgctgggcctgcggatgctgttcgccaaaaccgtggccgtgaacttcctgctgaccgccaagctgttcttcctctaa

SEQ ID NO: 36256 - DNA, 1869 bp, synthetic construct
  source 1..1869: mol_type = other DNA
atggccttaccagtgaccgccttgctcctgccgctggccttgctgctccacgccgccaggccggacatccagatgacacagagccctagcagcctgtctgccagcgtgggagacagagtgaccatcacatgcaaggccagcgaccacatcaacaactggctggcctggtatcagcagaagcctggcaaggcccctaagctgctgatctacggcgctaccacactggaaacaggcgtgcccagcagattttctggcagcggctctggcaccgacttcaccctgacaatatccagcctccagcctgaggacttcgccacctactactgtcagcagagctggaacaccccttggacattcggccagggcaccaaggtggaaatcaagagactcgaggacctgaagaacgtgttcccacctgaggtggccgtgttcgagcctagcgaggccgagatcagccacacccagaaagccaccctcgtgtgcctggctaccggcttctaccccgaccatgtggaactgtcttggtgggtcaacggcaaagaggtgcacagcggcgtgtgtaccgacccccagccactgaaagaacagcccgccctgaacgacagccggtactgcctgagcagcagactgagagtgtccgccaccttctggcagaacccccggaaccacttcagatgccaggtgcagttctacggcctgagcgagaacgacgagtggacccaggacagagccaagcccgtgacccagatcgtgtctgccgaagcctggggcagagccgattgcgacgtgaagctggtggaaaagagcttcgagacagacaccaacctgaacttccagaacctgagcgtgatcggcttcagaatcctgctgctgaaagtggccggctttaacctgctgatgaccctgcggctgtggtccagcagggccaagcgatctggatctggagcaacaaacttctcactactcaaacaagcaggtgacgtggaggagaatcccgggcctactagtatggactggatttggcgcatccttttccttgtcggcgctgctaccggcgcgcattccttcgaagaagttcagctggttgaatctggcggcggactggttcaacctggcggatctctgagactgagctgtgccgcctctggctacgcctttagcaactactgggtcaactgggttcgacaggcccctggcaaaggactggaatgggtcgcccaaatctatcccggcgacggcgacaccaactacaacggcaagttcaagggcagattcaccatcagccgggacaacagcaagaacaccctgtacctccagatgaactccctgagagccgaggacaccgccgtgtactattgtgccagatccatcaccaccgtcgtgggctgcgctatggattattggggccagggaaccctggtcaccgtgtcctctacgcgtatccagaaccctgatcctgccgtgtaccagctgcgggatagcaagagcagcgacaagagcgtgtgtctgttcaccgacttcgacagccagaccaacgtgtcccagagcaaggactccgacgtgtacatcaccgataagtgcgtgctggacatgcggagcatggacttcaagagcaactccgccgtggcctggtccaacaagtccgatttcgcctgcgccaacgccttcaacaacagcattatccccgaggacacattcttcccaagccccgagagcagctgcggctttaccagcgagagctaccagcagggcgtgctgagcgccaccatcctgtacgagatcctgctgggcaaggccaccctgtacgccgtgctggtgtctgccctggtgctgatggctatggtcaagcggaaggacagccggggataa

SEQ ID NO: 36257 - DNA, 1869 bp, synthetic construct
  source 1..1869: mol_type = other DNA
atggccttaccagtgaccgccttgctcctgccgctggccttgctgctccacgccgccaggccggacatccagatgacacagagccctagcagcctgtctgccagcgtgggagacagagtgaccatcacatgcaaggccagcgaccacatcaacaactggctggcctggtatcagcagaagcctggcaaggcccctaagctgctgatctacggcgctaccacactggaaacaggcgtgcccagcagattttctggcagcggctctggcaccgacttcaccctgacaatatccagcctccagcctgaggacttcgccacctactactgtcagcagagctggaacaccccttggacattcggccagggcaccaaggtggaaatcaagagactcgaggacctgaagaacgtgttcccacctgaggtggccgtgttcgagcctagcgaggccgagatcagccacacccagaaagccaccctcgtgtgcctggctaccggcttctaccccgaccatgtggaactgtcttggtgggtcaacggcaaagaggtgcacagcggcgtgtgtaccgacccccagccactgaaagaacagcccgccctgaacgacagccggtactgcctgagcagcagactgagagtgtccgccaccttctggcagaacccccggaaccacttcagatgccaggtgcagttctacggcctgagcgagaacgacgagtggacccaggacagagccaagcccgtgacccagatcgtgtctgccgaagcctggggcagagccgattgcggctttaccagcgagagctaccagcagggcgtgctgagcgccaccaacctgagcgtgatcggcttcagaatcctgctgctgaaagtggccggctttaacctgctgatgaccctgcggctgtggtccagcagggccaagcgatctggatctggagcaacaaacttctcactactcaaacaagcaggtgacgtggaggagaatcccgggcctactagtatggactggatttggcgcatccttttccttgtcggcgctgctaccggcgcgcattccttcgaagaagttcagctggttgaatctggcggcggactggttcaacctggcggatctctgagactgagctgtgccgcctctggctacgcctttagcaactactgggtcaactgggttcgacaggcccctggcaaaggactggaatgggtcgcccaaatctatcccggcgacggcgacaccaactacaacggcaagttcaagggcagattcaccatcagccgggacaacagcaagaacaccctgtacctccagatgaactccctgagagccgaggacaccgccgtgtactattgtgccagatccatcaccaccgtcgtgggctgcgctatggattattggggccagggaaccctggtcaccgtgtcctctacgcgtatccagaaccctgatcctgccgtgtaccagctgcgggatagcaagagcagcgacaagagcgtgtgtctgttcaccgacttcgacagccagaccaacgtgtcccagagcaaggactccgacgtgtacatcaccgataagtgcgtgctggacatgcggagcatggacttcaagagcaactccgccgtggcctggtccaacaagtccgatttcgcctgcgccaacgccttcaacaacagcattatccccgaggacacattcttcccaagccccgagagcagctgcgacgtgaagctggtggaaaagagcttcgagacagacaccaacctgaacttccagatcctgtacgagatcctgctgggcaaggccaccctgtacgccgtgctggtgtctgccctggtgctgatggctatggtcaagcggaaggacagccggggataa

SEQ ID NO: 36258 - DNA, 1869 bp, synthetic construct; identical to SEQ ID NO: 36256
  source 1..1869: mol_type = other DNA

SEQ ID NO: 36259 - DNA, 1869 bp, synthetic construct; identical to SEQ ID NO: 36257
  source 1..1869: mol_type = other DNA

SEQ ID NO: 36260 - DNA, 1866 bp, synthetic construct
  source 1..1866: mol_type = other DNA
atggccttaccagtgaccgccttgctcctgccgctggccttgctgctccacgccgccaggccggacatccagatgacacagagccctagcagcctgtctgccagcgtgggagacagagtgaccatcacatgcaaggccagcgaccacatcaacaactggctggcctggtatcagcagaagcctggcaaggcccctaagctgctgatctacggcgctaccacactggaaacaggcgtgcccagcagattttctggcagcggctctggcaccgacttcaccctgacaatatccagcctccagcctgaggacttcgccacctactactgtcagcagagctggaacaccccttggacattcggccagggcaccaaggtggaaatcaagagactcgaggacctgaagaacgtgttcccacctgaggtggccgtgttcgagcctagcgaggccgagatcagccacacccagaaagccaccctcgtgtgcctggctaccggcttctaccccgaccatgtggaactgtcttggtgggtcaacggcaaagaggtgcacagcggcgtgtgtaccgacccccagccactgaaagaacagcccgccctgaacgacagccggtactgcctgagcagcagactgagagtgtccgccaccttctggcagaacccccggaaccacttcagatgccaggtgcagttctacggcctgagcgagaacgacgagtggacccaggacagagccaagcccgtgacccagatcgtgtctgccgaagcctggggcagagccgattgcgacgtgaagctggtggaaaagagcttcgagacagacaccaacctgaacttccagaacctgagcgtgatcggcttcagaatcctgctgctgaaagtggccggctttaacctgctgatgaccctgcggctgtggtccagcagggccaagcgatctggatctggagcaacaaacttctcactactcaaacaagcaggtgacgtggaggagaatcccgggcctactagtatggactggatttggcgcatccttttccttgtcggcgctgctaccggcgcgcattccttcgaagaagttcagctggttgaatctggcggcggactggttcaacctggcggatctctgagactgagctgtgccgcctctggctacgcctttagcaactactgggtcaactgggttcgacaggcccctggcaaaggactggaatgggtcgcccaaatctatcccggcgacggcgacaccaactacaacggcaagttcaagggcagattcaccatcagccgggacaacagcaagaacaccctgtacctccagatgaactccctgagagccgaggacaccgccgtgtactattgtgccagatccatcaccaccgtcgtgggctgcgctatggattattggggccagggaaccctggtcaccgtgtcctctacgcgtatccagaaccctgatcctgccgtgtaccagctgcgggatagcaagagcagcgacaagagcgtgtgtctgttcaccgacttcgacagccagaccaacgtgtcccagagcaaggactccgacgtgtacatcaccgataagtgcgtgctggacatgcggagcatggacttcaagagcaactccgccgtggcctggtccaacaagtccgatttcgcctgcgccaacgccttcaacaacagcattatccccgaggacacattcttcccaagccccgagagcagctgcggctttaccagcgagagctaccagcagggcgtgctgagcgccaccatcctgtacgagatcctgctgggcaaggccaccctgtacgccgtgctggtgtctgccctggtgctgatggctatggtcaagcggaaggacagccgggga

SEQ ID NO: 36261 - DNA, 1878 bp, synthetic construct
  source 1..1878: mol_type = other DNA
atggccttaccagtgaccgccttgctcctgccgctggccttgctgctccacgccgccaggccggacatccagatgacacagagccctagcagcctgtctgccagcgtgggagacagagtgaccatcacatgcaaggccagcgaccacatcaacaactggctggcctggtatcagcagaagcctggcaaggcccctaagctgctgatctacggcgctaccacactggaaacaggcgtgcccagcagattttctggcagcggctctggcaccgacttcaccctgacaatatccagcctccagcctgaggacttcgccacctactactgtcagcagagctggaacaccccttggacattcggccagggcaccaaggtggaaatcaagagactcgaggccgacgtgtcccccaagcctaccatcttcctgccctctatcgccgagacaaagctccagaaggccggcacctacctgtgcctgctggaaaagttcttcccagatgtgattaagatccactggcaggaaaagaagtccaacaccatcctgggcagccaggaaggcaacaccatgaagaccaacgacacctacatgaagttcagctggctgaccgtgcccgagaagtccctggacaaagaacacagatgcatcgtgcggcacgaaaacaacaagaacggcgtggaccaggaaatcatcttcccacccatcaagaccgatgtgattacaatggaccccaaggacaactgctccaaggacgccaacgataccctgctgctccagctgaccaacaccagcgcctactacatgtacttgttgctgctgctgaagtccgtggtgtacttcgccatcatcacatgctgcctgctgcggagaaccgccttctgctgcaacggcgagaagtctagggccaagcgatctggatctggagcaacaaacttctcactactcaaacaagcaggtgacgtggaggagaatcccgggcctactagtatggactggatttggcgcatccttttccttgtcggcgctgctaccggcgcgcattccttcgaagaagttcagctggttgaatctggcggcggactggttcaacctggcggatctctgagactgagctgtgccgcctctggctacgcctttagcaactactgggtcaactgggttcgacaggcccctggcaaaggactggaatgggtcgcccaaatctatcccggcgacggcgacaccaactacaacggcaagttcaagggcagattcaccatcagccgggacaacagcaagaacaccctgtacctccagatgaactccctgagagccgaggacaccgccgtgtactattgtgccagatccatcaccaccgtcgtgggctgcgctatggattattggggccagggaaccctggtcaccgtgtcctctacgcgtagccagcctcacaccaagcccagcgtgttcgtgatgaagaacggcaccaacgtggcctgcctcgtgaaagagttctaccccaaggacatcaggatcaacctggtgtccagcaagaagatcaccgagttcgaccccgccatcgtgatctcccccagcggcaagtacaacgccgtgaagctggggaagtatgaggacagcaacagcgtgacctgctccgtgcagcacgacaacaagaccgtgcacagcaccgactttgaagtgaaaaccgactccaccgaccacgtgaagcccaaagagacagagaacaccaagcagcccagcaagagctgccacaagcccaaggccatcgtgcacaccgagaaagtgaacatgatgagcctgaccgtgatcggcttcagaatcctgctgctgaaagtggccggctttaacctgctgatgaccctgcggctgtggtccagctaa

SEQ ID NO: 36262 - DNA, 1878 bp, synthetic construct
  source 1..1878: mol_type = other DNA
atggccttaccagtgaccgccttgctcctgccgctggccttgctgctccacgccgccaggccggacatccagatgacacagagccctagcagcctgtctgccagcgtgggagacagagtgaccatcacatgcaaggccagcgaccacatcaacaactggctggcctggtatcagcagaagcctggcaaggcccctaagctgctgatctacggcgctaccacactggaaacaggcgtgcccagcagattttctggcagcggctctggcaccgacttcaccctgacaatatccagcctccagcctgaggacttcgccacctactactgtcagcagagctggaacaccccttggacattcggccagggcaccaaggtggaaatcaagagactcgaggccgacgtgtcccccaagcctaccatcttcctgccctctatcgccgagacaaagctccagaaggccggcacctacctgtgcctgctggaaaagttcttcccagatgtgattaagatccactggcaggaaaagaagtccaacaccatcctgggcagccaggaaggcaacaccatgaagaccaacgacacctacatgaagttcagctggctgaccgtgcccgagaagtccctggacaaagaacacagatgcatcgtgcggcacgaaaacaacaagaacggcgtggaccaggaaatcatcttcccacccatcaagaccgatgtgattacaatggaccccaaggacaactgctccaaggacgccaacgataccctgctgctccagctgaccaacaccagcgcctactacatgtacttgttgctgctgctgaagtccgtggtgtacttcgccatcatcacatgctgcctgctgcggagaaccgccttctgctgcaacggcgagaagtctagggccaagcgatctggatctggagcaacaaacttctcactactcaaacaagcaggtgacgtggaggagaatcccgggcctactagtatggactggatttggcgcatccttttccttgtcggcgctgctaccggcgcgcattccttcgaagaagttcagctggttgaatctggcggcggactggttcaacctggcggatctctgagactgagctgtgccgcctctggctacgcctttagcaactactgggtcaactgggttcgacaggcccctggcaaaggactggaatgggtcgcccaaatctatcccggcgacggcgacaccaactacaacggcaagttcaagggcagattcaccatcagccgggacaacagcaagaacaccctgtacctccagatgaactccctgagagccgaggacaccgccgtgtactattgtgccagatccatcaccaccgtcgtgggctgcgctatggattattggggccagggaaccctggtcaccgtgtcctctacgcgtagccagcctcacaccaagcccagcgtgttcgtgatgaagaacggcaccaacgtggcctgcctcgtgaaagagttctaccccaaggacatcaggatcaacctggtgtccagcaagaagatcaccgagttcgaccccgccatcgtgatctcccccagcggcaagtacaacgccgtgaagctggggaagtacgaggacagcaacagcgtgacctgctccgtgcagcacgacaacaagaccgtgcacagcaccgactttgaagtgaaaaccgactccaccgaccacgtgaagcccaaagagacagagaacaccaagcagcccagcaagagctgccacaagcccaaggccatcgtgcacaccgagaaagtgaacatgatgagcctgaccgtgctgggcttcagaatcctgctgctgaaagtggccggctttaacctgctgatgaccctgcggctgtggtccagctaa

SEQ ID NO: 36263 - DNA, 1866 bp, synthetic construct; identical to SEQ ID NO: 36260
  source 1..1866: mol_type = other DNA

SEQ ID NO: 36264 - DNA, 1878 bp, synthetic construct
  source 1..1878: mol_type = other DNA
atggccttaccagtgaccgccttgctcctgccgctggccttgctgctccacgccgccaggccggacatccagatgacacagagccctagcagcctgtctgccagcgtgggagacagagtgaccatcacatgcaaggccagcgaccacatcaacaactggctggcctggtatcagcagaagcctggcaaggcccctaagctgctgatctacggcgctaccacactggaaacaggcgtgcccagcagattttctggcagcggctctggcaccgacttcaccctgacaatatccagcctccagcctgaggacttcgccacctactactgtcagcagagctggaacaccccttggacattcggccagggcaccaaggtggaaatcaagagactcgagatccagaaccctgatcctgccgtgtaccagctgcgggatagcaagagcagcgacaagagcgtgtgtctgttcaccgacttcgacagccagaccaacgtgtcccagagcaaggactccgacgtgtacatcaccgataagtgcgtgctggacatgcggagcatggacttcaagagcaactccgccgtggcctggtccaacaagtccgatttcgcctgcgccaacgccttcaacaacagcattatccccgaggacacattcttcccaagccccgagagcagctgcggctttaccagcgagagctaccagcagggcgtgctgagcgccaccatcctgtacgagatcctgctgggcaaggccaccctgtacgccgtgctggtgtctgccctggtgctgatggctatggtcaagcggaaggacagccggggacgcgccaagagaagcggatctggcgtgaagcagaccctgaatttcgacctgctgaagctggctggcgacgtggaatccaacccaggccctactagtatggactggatttggcgcatccttttccttgtcggcgctgctaccggcgcgcattccttcgaagaagttcagctggttgaatctggcggcggactggttcaacctggcggatctctgagactgagctgtgccgcctctggctacgcctttagcaactactgggtcaactgggttcgacaggcccctggcaaaggactggaatgggtcgcccaaatctatcccggcgacggcgacaccaactacaacggcaagttcaagggcagattcaccatcagccgggacaacagcaagaacaccctgtacctccagatgaactccctgagagccgaggacaccgccgtgtactattgtgccagatccatcaccaccgtcgtgggctgcgctatggattattggggccagggaaccctggtcaccgtgtcctctacgcgtgaggacctgaagaacgtgttcccacctgaggtggccgtgttcgagcctagcgaggccgagatcagccacacccagaaagccaccctcgtgtgcctggctaccggcttctaccccgaccatgtggaactgtcttggtgggtcaacggcaaagaggtgcacagcggcgtgtgtaccgacccccagccactgaaagaacagcccgccctgaacgacagccggtactgcctgagcagcagactgagagtgtccgccaccttctggcagaacccccggaaccacttcagatgccaggtgcagttctacggcctgagcgagaacgacgagtggacccaggacagagccaagcccgtgacccagatcgtgtctgccgaagcctggggcagagccgattgcgacgtgaagctggtggaaaagagcttcgagacagacaccaacctgaacttccagaacctgagcgtgatcggcttcagaatcctgctgctgaaagtggccggctttaacctgctgatgaccctgcggctgtggtccagc

SEQ ID NO: 36265 - DNA, 2271 bp, synthetic construct
  source 1..2271: mol_type = other DNA
atggccttaccagtgaccgccttgctcctgccgctggccttgctgctccacgccgccaggccggaagtgcagctggttgaatctggcggaggactggttcagcctggcggatctctgagactgtcttgtgccgccagcggcttcagcttcagcgacttttggatgagctgggtccgacaggcccctggcaaaggacttgaatgggtcgccacaatcagccaggccggcagcgagaaggactacgtggactctgtgaagggcagattcaccatcagccgggacaacgccaagaagtccctgtacctccagatgaacagcctgagagccgaggacaccgccgtgtactattgtgcctctggcgtgtacagcttcgactacagaggccagggcaccctggtcacagtctcttctggtaccggcggaggcggatctggcggcggaggtagcggtggcggaggatctgaattcgacatccagatgacacagagccctagcagcctgtctgccagcgtgggagacagagtgaccatcacatgcaaggccagcgaccacatcaacaactggctggcctggtatcagcagaagcctggcaaggcccctaagctgctgatctacggcgctaccacactggaaacaggcgtgcccagcagattttctggcagcggctctggcaccgacttcaccctgacaatatccagcctccagcctgaggacttcgccacctactactgtcagcagagctggaacaccccttggacattcggccagggcaccaaggtggaaatcaagagactcgaggacctgaagaacgtgttcccacctgaggtggccgtgttcgagcctagcgaggccgagatcagccacacccagaaagccaccctcgtgtgcctggctaccggcttctaccccgaccatgtggaactgtcttggtgggtcaacggcaaagaggtgcacagcggcgtgtgtaccgacccccagccactgaaagaacagcccgccctgaacgacagccggtactgcctgagcagcagactgagagtgtccgccaccttctggcagaacccccggaaccacttcagatgccaggtgcagttctacggcctgagcgagaacgacgagtggacccaggacagagccaagcccgtgacccagatcgtgtctgccgaagcctggggcagagccgattgcgacgtgaagctggtggaaaagagcttcgagacagacaccaacctgaacttccagaacctgagcgtgatcggcttcagaatcctgctgctgaaagtggccggctttaacctgctgatgaccctgcggctgtggtccagcagggccaagcgatctggatctggagcaacaaacttctcactactcaaacaagcaggtgacgtggaggagaatcccgggcctactagtatggactggatttggcgcatccttttccttgtcggcgctgctaccggcgcgcattccttcgaagaagttcagctggttgaatctggcggcggactggttcaacctggcggatctctgagactgagctgtgccgcctctggctacgcctttagcaactactgggtcaactgggttcgacaggcccctggcaaaggactggaatgggtcgcccaaatctatcccggcgacggcgacaccaactacaacggcaagttcaagggcagattcaccatcagccgggacaacagcaagaacaccctgtacctccagatgaactccctgagagccgaggacaccgccgtgtactattgtgccagatccatcaccaccgtcgtgggctgcgctatggattattggggccagggaaccctggtcaccgtgtcctctacgcgtatccagaaccctgatcctgccgtgtaccagctgcgggatagcaagagcagcgacaagagcgtgtgtctgttcaccgacttcgacagccagaccaacgtgtcccagagcaaggactccgacgtgtacatcaccgataagtgcgtgctggacatgcggagcatggacttcaagagcaactccgccgtggcctggtccaacaagtccgatttcgcctgcgccaacgccttcaacaacagcattatccccgaggacacattcttcccaagccccgagagcagctgcggctttaccagcgagagctaccagcagggcgtgctgagcgccaccatcctgtacgagatcctgctgggcaaggccaccctgtacgccgtgctggtgtctgccctggtgctgatggctatggtcaagcggaaggacagccgggga

SEQ ID NO: 36266 - DNA, 2283 bp, synthetic construct
  source 1..2283: mol_type = other DNA
atggccttaccagtgaccgccttgctcctgccgctggccttgctgctccacgccgccaggccggaagtgcagctggttgaatctggcggaggactggttcagcctggcggatctctgagactgtcttgtgccgccagcggcttcagcttcagcgacttttggatgagctgggtccgacaggcccctggcaaaggacttgaatgggtcgccacaatcagccaggccggcagcgagaaggactacgtggactctgtgaagggcagattcaccatcagccgggacaacgccaagaagtccctgtacctccagatgaacagcctgagagccgaggacaccgccgtgtactattgtgcctctggcgtgtacagcttcgactacagaggccagggcaccctggtcacagtctcttctggtaccggcggaggcggatctggcggcggaggtagcggtggcggaggatctgaattcgacatccagatgacacagagccctagcagcctgtctgccagcgtgggagacagagtgaccatcacatgcaaggccagcgaccacatcaacaactggctggcctggtatcagcagaagcctggcaaggcccctaagctgctgatctacggcgctaccacactggaaacaggcgtgcccagcagattttctggcagcggctctggcaccgacttcaccctgacaatatccagcctccagcctgaggacttcgccacctactactgtcagcagagctggaacaccccttggacattcggccagggcaccaaggtggaaatcaagagactcgagatccagaaccctgatcctgccgtgtaccagctgcgggatagcaagagcagcgacaagagcgtgtgtctgttcaccgacttcgacagccagaccaacgtgtcccagagcaaggactccgacgtgtacatcaccgataagtgcgtgctggacatgcggagcatggacttcaagagcaactccgccgtggcctggtccaacaagtccgatttcgcctgcgccaacgccttcaacaacagcattatccccgaggacacattcttcccaagccccgagagcagctgcggctttaccagcgagagctaccagcagggcgtgctgagcgccaccatcctgtacgagatcctgctgggcaaggccaccctgtacgccgtgctggtgtctgccctggtgctgatggctatggtcaagcggaaggacagccggggacgcgccaagagaagcggatctggcgtgaagcagaccctgaatttcgacctgctgaagctggctggcgacgtggaatccaacccaggccctactagtatggactggatttggcgcatccttttccttgtcggcgctgctaccggcgcgcattccttcgaagaagttcagctggttgaatctggcggcggactggttcaacctggcggatctctgagactgagctgtgccgcctctggctacgcctttagcaactactgggtcaactgggttcgacaggcccctggcaaaggactggaatgggtcgcccaaatctatcccggcgacggcgacaccaactacaacggcaagttcaagggcagattcaccatcagccgggacaacagcaagaacaccctgtacctccagatgaactccctgagagccgaggacaccgccgtgtactattgtgccagatccatcaccaccgtcgtgggctgcgctatggattattggggccagggaaccctggtcaccgtgtcctctacgcgtgaggacctgaagaacgtgttcccacctgaggtggccgtgttcgagcctagcgaggccgagatcagccacacccagaaagccaccctcgtgtgcctggctaccggcttctaccccgaccatgtggaactgtcttggtgggtcaacggcaaagaggtgcacagcggcgtgtgtaccgacccccagccactgaaagaacagcccgccctgaacgacagccggtactgcctgagcagcagactgagagtgtccgccaccttctggcagaacccccggaaccacttcagatgccaggtgcagttctacggcctgagcgagaacgacgagtggacccaggacagagccaagcccgtgacccagatcgtgtctgccgaagcctggggcagagccgattgcgacgtgaagctggtggaaaagagcttcgagacagacaccaacctgaacttccagaacctgagcgtgatcggcttcagaatcctgctgctgaaagtggccggctttaacctgctgatgaccctgcggctgtggtccagc

SEQ ID NO: 36267 - DNA, 2682 bp, synthetic construct
  source 1..2682: mol_type = other DNA
atggccttaccagtgaccgccttgctcctgccgctggccttgctgctccacgccgccaggccggaagtgcagctggttgaatctggcggaggactggttcagcctggcggatctctgagactgtcttgtgccgccagcggcttcagcttcagcgacttttggatgagctgggtccgacaggcccctggcaaaggacttgaatgggtcgccacaatcagccaggccggcagcgagaaggactacgtggactctgtgaagggcagattcaccatcagccgggacaacgccaagaagtccctgtacctccagatgaacagcctgagagccgaggacaccgccgtgtactattgtgcctctggcgtgtacagcttcgactacagaggccagggcaccctggtcacagtctcttctggtaccggcggaggcggatctggcggcggaggtagcggtggcggaggatctgaattcgacatccagatgacacagagccctagcagcctgtctgccagcgtgggagacagagtgaccatcacatgcaaggccagcgaccacatcaacaactggctggcctggtatcagcagaagcctggcaaggcccctaagctgctgatctacggcgctaccacactggaaacaggcgtgcccagcagattttctggcagcggctctggcaccgacttcaccctgacaatatccagcctccagcctgaggacttcgccacctactactgtcagcagagctggaacaccccttggacattcggccagggcaccaaggtggaaatcaagagactcgaggacctgaagaacgtgttcccacctgaggtggccgtgttcgagcctagcgaggccgagatcagccacacccagaaagccaccctcgtgtgcctggctaccggcttctaccccgaccatgtggaactgtcttggtgggtcaacggcaaagaggtgcacagcggcgtgtgtaccgacccccagccactgaaagaacagcccgccctgaacgacagccggtactgcctgagcagcagactgagagtgtccgccaccttctggcagaacccccggaaccacttcagatgccaggtgcagttctacggcctgagcgagaacgacgagtggacccaggacagagccaagcccgtgacccagatcgtgtctgccgaagcctggggcagagccgattgcgacgtgaagctggtggaaaagagcttcgagacagacaccaacctgaacttccagaacctgagcgtgatcggcttcagaatcctgctgctgaaagtggccggctttaacctgctgatgaccctgcggctgtggtccagcagggccaagcgatctggatctggagcaacaaacttctcactactcaaacaagcaggtgacgtggaggagaatcccgggcctactagtatggactggatttggcgcatccttttccttgtcggcgctgctaccggcgcgcattccgggccccagctccagctgcaagagtctggacctggcctggtcaagcctagcgagacactgagcctgacctgtaccgtgtccggcgatagcatcagcagcggcgattactactggggctggatcagacagcctcctggcaaaggactggaatggatcggccacatctactacagcggcgtgacctactacaaccccagcctgaagtccagagtgaccatcagcgtggacaccagccggaaccagttctccctgaagctgtctagcgtgacagccgccgataccgccgtgtactactgcaccagagaggacagcagcaactggcggagtagaggccagggaacactggtcacagttagctctggatccggcggaggcggaagtggaggcggaggatctggcggcggaggctctttcgaagaagttcagctggttgaatctggcggcggactggttcaacctggcggatctctgagactgagctgtgccgcctctggctacgcctttagcaactactgggtcaactgggttcgacaggcccctggcaaaggactggaatgggtcgcccaaatctatcccggcgacggcgacaccaactacaacggcaagttcaagggcagattcaccatcagccgggacaacagcaagaacaccctgtacctccagatgaactccctgagagccgaggacaccgccgtgtactattgtgccagatccatcaccaccgtcgtgggctgcgctatggattattggggccagggaaccctggtcaccgtgtcctctacgcgtatccagaaccctgatcctgccgtgtaccagctgcgggatagcaagagcagcgacaagagcgtgtgtctgttcaccgacttcgacagccagaccaacgtgtcccagagcaaggactccgacgtgtacatcaccgataagtgcgtgctggacatgcggagcatggacttcaagagcaactccgccgtggcctggtccaacaagtccgatttcgcctgcgccaacgccttcaacaacagcattatccccgaggacacattcttcccaagccccgagagcagctgcggctttaccagcgagagctaccagcagggcgtgctgagcgccaccatcctgtacgagatcctgctgggcaaggccaccctgtacgccgtgctggtgtctgccctggtgctgatggctatggtcaagcggaaggacagccgggga

SEQ ID NO: 36268 - DNA, 2694 bp, synthetic construct
  source 1..2694: mol_type = other DNA
atggccttaccagtgaccgccttgctcctgccgctggccttgctgctccacgccgccaggccggaagtgcagctggttgaatctggcggaggactggttcagcctggcggatctctgagactgtcttgtgccgccagcggcttcagcttcagcgacttttggatgagctgggtccgacaggcccctggcaaaggacttgaatgggtcgccacaatcagccaggccggcagcgagaaggactacgtggactctgtgaagggcagattcaccatcagccgggacaacgccaagaagtccctgtacctccagatgaacagcctgagagccgaggacaccgccgtgtactattgtgcctctggcgtgtacagcttcgactacagaggccagggcaccctggtcacagtctcttctggtaccggcggaggcggatctggcggcggaggtagcggtggcggaggatctgaattcgacatccagatgacacagagccctagcagcctgtctgccagcgtgggagacagagtgaccatcacatgcaaggccagcgaccacatcaacaactggctggcctggtatcagcagaagcctggcaaggcccctaagctgctgatctacggcgctaccacactggaaacaggcgtgcccagcagattttctggcagcggctctggcaccgacttcaccctgacaatatccagcctccagcctgaggacttcgccacctactactgtcagcagagctggaacaccccttggacattcggccagggcaccaaggtggaaatcaagagactcgagatccagaaccctgatcctgccgtgtaccagctgcgggatagcaagagcagcgacaagagcgtgtgtctgttcaccgacttcgacagccagaccaacgtgtcccagagcaaggactccgacgtgtacatcaccgataagtgcgtgctggacatgcggagcatggacttcaagagcaactccgccgtggcctggtccaacaagtccgatttcgcctgcgccaacgccttcaacaacagcattatccccgaggacacattcttcccaagccccgagagcagctgcggctttaccagcgagagctaccagcagggcgtgctgagcgccaccatcctgtacgagatcctgctgggcaaggccaccctgtacgccgtgctggtgtctgccctggtgctgatggctatggtcaagcggaaggacagccggggacgcgccaagagaagcggatctggcgtgaagcagaccctgaatttcgacctgctgaagctggctggcgacgtggaatccaacccaggccctactagtatggactggatttggcgcatccttttccttgtcggcgctgctaccggcgcgcattccgggccccagctccagctgcaagagtctggacctggcctggtcaagcctagcgagacactgagcctgacctgtaccgtgtccggcgatagcatcagcagcggcgattactactggggctggatcagacagcctcctggcaaaggactggaatggatcggccacatctactacagcggcgtgacctactacaaccccagcctgaagtccagagtgaccatcagcgtggacaccagccggaaccagttctccctgaagctgtctagcgtgacagccgccgataccgccgtgtactactgcaccagagaggacagcagcaactggcggagtagaggccagggaacactggtcacagttagctctggatccggcggaggcggaagtggaggcggaggatctggcggcggaggctctttcgaagaagttcagctggttgaatctggcggcggactggttcaacctggcggatctctgagactgagctgtgccgcctctggctacgcctttagcaactactgggtcaactgggttcgacaggcccctggcaaaggactggaatgggtcgcccaaatctatcccggcgacggcgacaccaactacaacggcaagttcaagggcagattcaccatcagccgggacaacagcaagaacaccctgtacctccagatgaactccctgagagccgaggacaccgccgtgtactattgtgccagatccatcaccaccgtcgtgggctgcgctatggattattggggccagggaaccctggtcaccgtgtcctctacgcgtgaggacctgaagaacgtgttcccacctgaggtggccgtgttcgagcctagcgaggccgagatcagccacacccagaaagccaccctcgtgtgcctggctaccggcttctaccccgaccatgtggaactgtcttggtgggtcaacggcaaagaggtgcacagcggcgtgtgtaccgacccccagccactgaaagaacagcccgccctgaacgacagccggtactgcctgagcagcagactgagagtgtccgccaccttctggcagaacccccggaaccacttcagatgccaggtgcagttctacggcctgagcgagaacgacgagtggacccaggacagagccaagcccgtgacccagatcgtgtctgccgaagcctggggcagagccgattgcgacgtgaagctggtggaaaagagcttcgagacagacaccaacctgaacttccagaacctgagcgtgatcggcttcagaatcctgctgctgaaagtggccggctttaacctgctgatgaccctgcggctgtggtccagc

SEQ ID NO: 36269 - DNA, 2076 bp, synthetic construct
  source 1..2076: mol_type = other DNA
atggccttaccagtgaccgccttgctcctgccgctggccttgctgctccacgccgccaggccggacatccagatgacacagagccctagcagcctgtctgccagcgtgggagacagagtgaccatcacatgcaaggccagcgaccacatcaacaactggctggcctggtatcagcagaagcctggcaaggcccctaagctgctgatctacggcgctaccacactggaaacaggcgtgcccagcagattttctggcagcggctctggcaccgacttcaccctgacaatatccagcctccagcctgaggacttcgccacctactactgtcagcagagctggaacaccccttggacattcggccagggcaccaaggtggaaatcaagagactcgaggacctgaagaacgtgttcccacctgaggtggccgtgttcgagcctagcgaggccgagatcagccacacccagaaagccaccctcgtgtgcctggctaccggcttctaccccgaccatgtggaactgtcttggtgggtcaacggcaaagaggtgcacagcggcgtgtgtaccgacccccagccactgaaagaacagcccgccctgaacgacagccggtactgcctgagcagcagactgagagtgtccgccaccttctggcagaacccccggaaccacttcagatgccaggtgcagttctacggcctgagcgagaacgacgagtggacccaggacagagccaagcccgtgacccagatcgtgtctgccgaagcctggggcagagccgattgcgacgtgaagctggtggaaaagagcttcgagacagacaccaacctgaacttccagaacctgagcgtgatcggcttcagaatcctgctgctgaaagtggccggctttaacctgctgatgaccctgcggctgtggtccagcagggccaagcgatctggatctggagcaacaaacttctcactactcaaacaagcaggtgacgtggaggagaatcccgggcctactagtatggactggatttggcgcatccttttccttgtcggcgctgctaccggcgcccattccgggcccatggaccccgacctggaaatcagagccgccttcctgcggcagagaaacacagccctgagaacagaggtggccgagctggaacaagaggtgcagcggctggaaaacgaggtgtcccagtacgagacaagatacggccctctcggaggcggaaaaggatccggcggcggaggatctggcggaggcggatctgggggcggaggctctttcgaagaagttcagctggttgaatctggcggcggactggttcaacctggcggatctctgagactgagctgtgccgcctctggctacgcctttagcaactactgggtcaactgggttcgacaggcccctggcaaaggactggaatgggtcgcccaaatctatcccggcgacggcgacaccaactacaacggcaagttcaagggcagattcaccatcagccgggacaacagcaagaacaccctgtacctccagatgaactccctgagagccgaggacaccgccgtgtactattgtgccagatccatcaccaccgtcgtgggctgcgctatggattattggggccagggaaccctggtcaccgtgtcctctacgcgtatccagaaccctgatcctgccgtgtaccagctgcgggatagcaagagcagcgacaagagcgtgtgtctgttcaccgacttcgacagccagaccaacgtgtcccagagcaaggactccgacgtgtacatcaccgataagtgcgtgctggacatgcggagcatggacttcaagagcaactccgccgtggcctggtccaacaagtccgatttcgcctgcgccaacgccttcaacaacagcattatccccgaggacacattcttcccaagccccgagagcagctgcggctttaccagcgagagctaccagcagggcgtgctgagcgccaccatcctgtacgagatcctgctgggcaaggccaccctgtacgccgtgctggtgtctgccctggtgctgatggctatggtcaagcggaaggacagccgggga

SEQ ID NO: 36270 - DNA, 2088 bp, synthetic construct
  source 1..2088: mol_type = other DNA
atggccttaccagtgaccgccttgctcctgccgctggccttgctgctccacgccgccaggccggacatccagatgacacagagccctagcagcctgtctgccagcgtgggagacagagtgaccatcacatgcaaggccagcgaccacatcaacaactggctggcctggtatcagcagaagcctggcaaggcccctaagctgctgatctacggcgctaccacactggaaacaggcgtgcccagcagattttctggcagcggctctggcaccgacttcaccctgacaatatccagcctccagcctgaggacttcgccacctactactgtcagcagagctggaacaccccttggacattcggccagggcaccaaggtggaaatcaagagactcgagatccagaaccctgatcctgccgtgtaccagctgcgggatagcaagagcagcgacaagagcgtgtgtctgttcaccgacttcgacagccagaccaacgtgtcccagagcaaggactccgacgtgtacatcaccgataagtgcgtgctggacatgcggagcatggacttcaagagcaactccgccgtggcctggtccaacaagtccgatttcgcctgcgccaacgccttcaacaacagcattatccccgaggacacattcttcccaagccccgagagcagctgcggctttaccagcgagagctaccagcagggcgtgctgagcgccaccatcctgtacgagatcctgctgggcaaggccaccctgtacgccgtgctggtgtctgccctggtgctgatggctatggtcaagcggaaggacagccggggacgcgccaagagaagcggatctggcgtgaagcagaccctgaatttcgacctgctgaagctggctggcgacgtggaatccaacccaggccctactagtatggactggatttggcgcatccttttccttgtcggcgctgctaccggcgcccattccgggcccatggaccccgacctggaaatcagagccgccttcctgcggcagagaaacacagccctgagaacagaggtggccgagctggaacaagaggtgcagcggctggaaaacgaggtgtcccagtacgagacaagatacggccctctcggaggcggaaaaggatccggcggcggaggatctggcggaggcggatctgggggcggaggctctttcgaagaagttcagctggttgaatctggcggcggactggttcaacctggcggatctctgagactgagctgtgccgcctctggctacgcctttagcaactactgggtcaactgggttcgacaggcccctggcaaaggactggaatgggtcgcccaaatctatcccggcgacggcgacaccaactacaacggcaagttcaagggcagattcaccatcagccgggacaacagcaagaacaccctgtacctccagatgaactccctgagagccgaggacaccgccgtgtactattgtgccagatccatcaccaccgtcgtgggctgcgctatggattattggggccagggaaccctggtcaccgtgtcctctacgcgtgaggacctgaagaacgtgttcccacctgaggtggccgtgttcgagcctagcgaggccgagatcagccacacccagaaagccaccctcgtgtgcctggctaccggcttctaccccgaccatgtggaactgtcttggtgggtcaacggcaaagaggtgcacagcggcgtgtgtaccgacccccagccactgaaagaacagcccgccctgaacgacagccggtactgcctgagcagcagactgagagtgtccgccaccttctggcagaacccccggaaccacttcagatgccaggtgcagttctacggcctgagcgagaacgacgagtggacccaggacagagccaagcccgtgacccagatcgtgtctgccgaagcctggggcagagccgattgcgacgtgaagctggtggaaaagagcttcgagacagacaccaacctgaacttccagaacctgagcgtgatcggcttcagaatcctgctgctgaaagtggccggctttaacctgctgatgaccctgcggctgtggtccagc

SEQ ID NO: 36271 - DNA, 2007 bp, synthetic construct
  source 1..2007: mol_type = other DNA
atggccttaccagtgaccgccttgctcctgccgctggccttgctgctccacgccgccaggccggacatccagatgacacagagccctagcagcctgtctgccagcgtgggagacagagtgaccatcacatgcaaggccagcgaccacatcaacaactggctggcctggtatcagcagaagcctggcaaggcccctaagctgctgatctacggcgctaccacactggaaacaggcgtgcccagcagattttctggcagcggctctggcaccgacttcaccctgacaatatccagcctccagcctgaggacttcgccacctactactgtcagcagagctggaacaccccttggacattcggccagggcaccaaggtggaaatcaagagactcgaggacctgaagaacgtgttcccacctgaggtggccgtgttcgagcctagcgaggccgagatcagccacacccagaaagccaccctcgtgtgcctggctaccggcttctaccccgaccatgtggaactgtcttggtgggtcaacggcaaagaggtgcacagcggcgtgtgtaccgacccccagccactgaaagaacagcccgccctgaacgacagccggtactgcctgagcagcagactgagagtgtccgccaccttctggcagaacccccggaaccacttcagatgccaggtgcagttctacggcctgagcgagaacgacgagtggacccaggacagagccaagcccgtgacccagatcgtgtctgccgaagcctggggcagagccgattgcgacgtgaagctggtggaaaagagcttcgagacagacaccaacctgaacttccagaacctgagcgtgatcggcttcagaatcctgctgctgaaagtggccggctttaacctgctgatgaccctgcggctgtggtccagcagggccaagcgatctggatctggagcaacaaacttctcactactcaaacaagcaggtgacgtggaggagaatcccgggcctactagtatggactggatttggcgcatccttttccttgtcggcgctgctaccggcgcccattccgggcccgaagttgctgccctcgagaaggaggtagcagctttggaaaaagaagtcgcagcccttgagaaagaagttgcggctctggagaagggatccggcggcggaggatctggcggaggcggatctgggggcggaggctctttcgaagaagttcagctggttgaatctggcggcggactggttcaacctggcggatctctgagactgagctgtgccgcctctggctacgcctttagcaactactgggtcaactgggttcgacaggcccctggcaaaggactggaatgggtcgcccaaatctatcccggcgacggcgacaccaactacaacggcaagttcaagggcagattcaccatcagccgggacaacagcaagaacaccctgtacctccagatgaactccctgagagccgaggacaccgccgtgtactattgtgccagatccatcaccaccgtcgtgggctgcgctatggattattggggccagggaaccctggtcaccgtgtcctctacgcgtatccagaaccctgatcctgccgtgtaccagctgcgggatagcaagagcagcgacaagagcgtgtgtctgttcaccgacttcgacagccagaccaacgtgtcccagagcaaggactccgacgtgtacatcaccgataagtgcgtgctggacatgcggagcatggacttcaagagcaactccgccgtggcctggtccaacaagtccgatttcgcctgcgccaacgccttcaacaacagcattatccccgaggacacattcttcccaagccccgagagcagctgcggctttaccagcgagagctaccagcagggcgtgctgagcgccaccatcctgtacgagatcctgctgggcaaggccaccctgtacgccgtgctggtgtctgccctggtgctgatggctatggtcaagcggaaggacagccgggga

SEQ ID NO: 36272 - DNA, 2019 bp, synthetic construct
  source 1..2019: mol_type = other DNA
atggccttaccagtgaccgccttgctcctgccgctggccttgctgctccacgccgccaggccggacatccagatgacacagagccctagcagcctgtctgccagcgtgggagacagagtgaccatcacatgcaaggccagcgaccacatcaacaactggctggcctggtatcagcagaagcctggcaaggcccctaagctgctgatctacggcgctaccacactggaaacaggcgtgcccagcagattttctggcagcggctctggcaccgacttcaccctgacaatatccagcctccagcctgaggacttcgccacctactactgtcagcagagctggaacaccccttggacattcggccagggcaccaaggtggaaatcaagagactcgagatccagaaccctgatcctgccgtgtaccagctgcgggatagcaagagcagcgacaagagcgtgtgtctgttcaccgacttcgacagccagaccaacgtgtcccagagcaaggactccgacgtgtacatcaccgataagtgcgtgctggacatgcggagcatggacttcaagagcaactccgccgtggcctggtccaacaagtccgatttcgcctgcgccaacgccttcaacaacagcattatccccgaggacacattcttcccaagccccgagagcagctgcggctttaccagcgagagctaccagcagggcgtgctgagcgccaccatcctgtacgagatcctgctgggcaaggccaccctgtacgccgtgctggtgtctgccctggtgctgatggctatggtcaagcggaaggacagccggggacgcgccaagagaagcggatctggcgtgaagcagaccctgaatttcgacctgctgaagctggctggcgacgtggaatccaacccaggccctactagtatggactggatttggcgcatccttttccttgtcggcgctgctaccggcgcccattccgggcccgaagttgctgccctcgagaaggaggtagcagctttggaaaaagaagtcgcagcccttgagaaagaagttgcggctctggagaagggatccggcggcggaggatctggcggaggcggatctgggggcggaggctctttcgaagaagttcagctggttgaatctggcggcggactggttcaacctggcggatctctgagactgagctgtgccgcctctggctacgcctttagcaactactgggtcaactgggttcgacaggcccctggcaaaggactggaatgggtcgcccaaatctatcccggcgacggcgacaccaactacaacggcaagttcaagggcagattcaccatcagccgggacaacagcaagaacaccctgtacctccagatgaactccctgagagccgaggacaccgccgtgtactattgtgccagatccatcaccaccgtcgtgggctgcgctatggattattggggccagggaaccctggtcaccgtgtcctctacgcgtgaggacctgaagaacgtgttcccacctgaggtggccgtgttcgagcctagcgaggccgagatcagccacacccagaaagccaccctcgtgtgcctggctaccggcttctaccccgaccatgtggaactgtcttggtgggtcaacggcaaagaggtgcacagcggcgtgtgtaccgacccccagccactgaaagaacagcccgccctgaacgacagccggtactgcctgagcagcagactgagagtgtccgccaccttctggcagaacccccggaaccacttcagatgccaggtgcagttctacggcctgagcgagaacgacgagtggacccaggacagagccaagcccgtgacccagatcgtgtctgccgaagcctggggcagagccgattgcgacgtgaagctggtggaaaagagcttcgagacagacaccaacctgaacttccagaacctgagcgtgatcggcttcagaatcctgctgctgaaagtggccggctttaacctgctgatgaccctgcggctgtggtccagc

SEQ ID NO: 36273 - DNA, 2277 bp, synthetic construct
  source 1..2277: mol_type = other DNA
atggccttaccagtgaccgccttgctcctgccgctggccttgctgctccacgccgccaggccggacatccagatgacacagagccctagcagcctgtctgccagcgtgggagacagagtgaccatcacatgcaaggccagcgaccacatcaacaactggctggcctggtatcagcagaagcctggcaaggcccctaagctgctgatctacggcgctaccacactggaaacaggcgtgcccagcagattttctggcagcggctctggcaccgacttcaccctgacaatatccagcctccagcctgaggacttcgccacctactactgtcagcagagctggaacaccccttggacattcggccagggcaccaaggtggaaatcaagagactcgaggacctgaagaacgtgttcccacctgaggtggccgtgttcgagcctagcgaggccgagatcagccacacccagaaagccaccctcgtgtgcctggctaccggcttctaccccgaccatgtggaactgtcttggtgggtcaacggcaaagaggtgcacagcggcgtgtgtaccgacccccagccactgaaagaacagcccgccctgaacgacagccggtactgcctgagcagcagactgagagtgtccgccaccttctggcagaacccccggaaccacttcagatgccaggtgcagttctacggcctgagcgagaacgacgagtggacccaggacagagccaagcccgtgacccagatcgtgtctgccgaagcctggggcagagccgattgcgacgtgaagctggtggaaaagagcttcgagacagacaccaacctgaacttccagaacctgagcgtgatcggcttcagaatcctgctgctgaaagtggccggctttaacctgctgatgaccctgcggctgtggtccagcagggccaagcgatctggatctggagcaacaaacttctcactactcaaacaagcaggtgacgtggaggagaatcccgggcctactagtatggactggatttggcgcatccttttccttgtcggcgctgctaccggcgcccattccgggccccaggttcagctgcaagagtctggcggaggacttgctcaagctggcggaagcctgagactgtcttgtgccgcctctggcagaaccttcagcatgggctggtttagacaggcccctggcaaagagagagagttcgtcgccgccatcacatacagcggcggcagcccttactacgcctcttctgtcagaggccggttcaccatcagccgggacaacgccaagaacaccgtgtacctccagatgaacagcctgaagccagaggacaccgccgtgtactactgtgccgccaatccaacctacggcagcgactggaatgccgagaattggggccagggcacccaagtgacagtgtctagtggatccggcggcggaggatctggcggaggcggatctgggggcggaggctctttcgaagaagttcagctggttgaatctggcggcggactggttcaacctggcggatctctgagactgagctgtgccgcctctggctacgcctttagcaactactgggtcaactgggttcgacaggcccctggcaaaggactggaatgggtcgcccaaatctatcccggcgacggcgacaccaactacaacggcaagttcaagggcagattcaccatcagccgggacaacagcaagaacaccctgtacctccagatgaactccctgagagccgaggacaccgccgtgtactattgtgccagatccatcaccaccgtcgtgggctgcgctatggattattggggccagggaaccctggtcaccgtgtcctctacgcgtatccagaaccctgatcctgccgtgtaccagctgcgggatagcaagagcagcgacaagagcgtgtgtctgttcaccgacttcgacagccagaccaacgtgtcccagagcaaggactccgacgtgtacatcaccgataagtgcgtgctggacatgcggagcatggacttcaagagcaactccgccgtggcctggtccaacaagtccgatttcgcctgcgccaacgccttcaacaacagcattatccccgaggacacattcttcccaagccccgagagcagctgcggctttaccagcgagagctaccagcagggcgtgctgagcgccaccatcctgtacgagatcctgctgggcaaggccaccctgtacgccgtgctggtgtctgccctggtgctgatggctatggtcaagcggaaggacagccgggga

SEQ ID NO: 36274 - DNA, 2289 bp, synthetic construct
  source 1..2289: mol_type = other DNA
atggccttaccagtgaccgccttgctcctgccgctggccttgctgctccacgccgccaggccggacatccagatgacacagagccctagcagcctgtctgccagcgtgggagacagagtgaccatcacatgcaaggccagcgaccacatcaacaactggctggcctggtatcagcagaagcctggcaaggcccctaagctgctgatctacggcgctaccacactggaaacaggcgtgcccagcagattttctggcagcggctctggcaccgacttcaccctgacaatatccagcctccagcctgaggacttcgccacctactactgtcagcagagctggaacaccccttggacattcggccagggcaccaaggtggaaatcaagagactcgagatccagaaccctgatcctgccgtgtaccagctgcgggatagcaagagcagcgacaagagcgtgtgtctgttcaccgacttcgacagccagaccaacgtgtcccagagcaaggactccgacgtgtacatcaccgataagtgcgtgctggacatgcggagcatggacttcaagagcaactccgccgtggcctggtccaacaagtccgatttcgcctgcgccaacgccttcaacaacagcattatccccgaggacacattcttcccaagccccgagagcagctgcggctttaccagcgagagctaccagcagggcgtgctgagcgccaccatcctgtacgagatcctgctgggcaaggccaccctgtacgccgtgctggtgtctgccctggtgctgatggctatggtcaagcggaaggacagccggggacgcgccaagagaagcggatctggcgtgaagcagaccctgaatttcgacctgctgaagctggctggcgacgtggaatccaacccaggccctactagtatggactggatttggcgcatccttttccttgtcggcgctgctaccggcgcccattccgggccccaggttcagctgcaagagtctggcggaggacttgctcaagctggcggaagcctgagactgtcttgtgccgcctctggcagaaccttcagcatgggctggtttagacaggcccctggcaaagagagagagttcgtcgccgccatcacatacagcggcggcagcccttactacgcctcttctgtcagaggccggttcaccatcagccgggacaacgccaagaacaccgtgtacctccagatgaacagcctgaagccagaggacaccgccgtgtactactgtgccgccaatccaacctacggcagcgactggaatgccgagaattggggccagggcacccaagtgacagtgtctagtggatccggcggcggaggatctggcggaggcggatctgggggcggaggctctttcgaagaagttcagctggttgaatctggcggcggactggttcaacctggcggatctctgagactgagctgtgccgcctctggctacgcctttagcaactactgggtcaactgggttcgacaggcccctggcaaaggactggaatgggtcgcccaaatctatcccggcgacggcgacaccaactacaacggcaagttcaagggcagattcaccatcagccgggacaacagcaagaacaccctgtacctccagatgaactccctgagagccgaggacaccgccgtgtactattgtgccagatccatcaccaccgtcgtgggctgcgctatggattattggggccagggaaccctggtcaccgtgtcctctacgcgtgaggacctgaagaacgtgttcccacctgaggtggccgtgttcgagcctagcgaggccgagatcagccacacccagaaagccaccctcgtgtgcctggctaccggcttctaccccgaccatgtggaactgtcttggtgggtcaacggcaaagaggtgcacagcggcgtgtgtaccgacccccagccactgaaagaacagcccgccctgaacgacagccggtactgcctgagcagcagactgagagtgtccgccaccttctggcagaacccccggaaccacttcagatgccaggtgcagttctacggcctgagcgagaacgacgagtggacccaggacagagccaagcccgtgacccagatcgtgtctgccgaagcctggggcagagccgattgcgacgtgaagctggtggaaaagagcttcgagacagacaccaacctgaacttccagaacctgagcgtgatcggcttcagaatcctgctgctgaaagtggccggctttaacctgctgatgaccctgcggctgtggtccagc

SEQ ID NO: 36275 - DNA, 2295 bp, synthetic construct
  source 1..2295: mol_type = other DNA
atggccttaccagtgaccgccttgctcctgccgctggccttgctgctccacgccgccaggccggaagtgcaactggtggaatctggaggctctctggtgcagccagggggaagcctgagactgtcttgtgccgcttccggcttcaccttcgacgactacgccatgagctgggtgcgccaggtgccaggcaaaggcctggaatgggtgtccagcatcaactggagcggcacccacaccgattacgccgactccgtgaaaggcagattcacaatcagcagaaacaacgccaacaataccctgtacctgcagatgaactccctgaagtctgaggatacagcagtgtattattgcgccaagaactggcgggacgccggcaccacttggtttgagaaaagcggctctgccggacagggaacccaagtgacagtgtcctccggtaccggcggaggcggatctggcggcggaggtagcggtggcggaggatctgaattcgacatccagatgacacagagccctagcagcctgtctgccagcgtgggagacagagtgaccatcacatgcaaggccagcgaccacatcaacaactggctggcctggtatcagcagaagcctggcaaggcccctaagctgctgatctacggcgctaccacactggaaacaggcgtgcccagcagattttctggcagcggctctggcaccgacttcaccctgacaatatccagcctccagcctgaggacttcgccacctactactgtcagcagagctggaacaccccttggacattcggccagggcaccaaggtggaaatcaagagactcgaggacctgaagaacgtgttcccacctgaggtggccgtgttcgagcctagcgaggccgagatcagccacacccagaaagccaccctcgtgtgcctggctaccggcttctaccccgaccatgtggaactgtcttggtgggtcaacggcaaagaggtgcacagcggcgtgtgtaccgacccccagccactgaaagaacagcccgccctgaacgacagccggtactgcctgagcagcagactgagagtgtccgccaccttctggcagaacccccggaaccacttcagatgccaggtgcagttctacggcctgagcgagaacgacgagtggacccaggacagagccaagcccgtgacccagatcgtgtctgccgaagcctggggcagagccgattgcgacgtgaagctggtggaaaagagcttcgagacagacaccaacctgaacttccagaacctgagcgtgatcggcttcagaatcctgctgctgaaagtggccggctttaacctgctgatgaccctgcggctgtggtccagcagggccaagcgatctggatctggagcaacaaacttctcactactcaaacaagcaggtgacgtggaggagaatcccgggcctactagtatggactggatttggcgcatccttttccttgtcggcgctgctaccggcgcgcattccttcgaagaagttcagctggttgaatctggcggcggactggttcaacctggcggatctctgagactgagctgtgccgcctctggctacgcctttagcaactactgggtcaactgggttcgacaggcccctggcaaaggactggaatgggtcgcccaaatctatcccggcgacggcgacaccaactacaacggcaagttcaagggcagattcaccatcagccgggacaacagcaagaacaccctgtacctccagatgaactccctgagagccgaggacaccgccgtgtactattgtgccagatccatcaccaccgtcgtgggctgcgctatggattattggggccagggaaccctggtcaccgtgtcctctacgcgtatccagaaccctgatcctgccgtgtaccagctgcgggatagcaagagcagcgacaagagcgtgtgtctgttcaccgacttcgacagccagaccaacgtgtcccagagcaaggactccgacgtgtacatcaccgataagtgcgtgctggacatgcggagcatggacttcaagagcaactccgccgtggcctggtccaacaagtccgatttcgcctgcgccaacgccttcaacaacagcattatccccgaggacacattcttcccaagccccgagagcagctgcggctttaccagcgagagctaccagcagggcgtgctgagcgccaccatcctgtacgagatcctgctgggcaaggccaccctgtacgccgtgctggtgtctgccctggtgctgatggctatggtcaagcggaaggacagccgggga

SEQ ID NO: 36276 - DNA, 2307 bp, synthetic construct
  source 1..2307: mol_type = other DNA
atggccttaccagtgaccgccttgctcctgccgctggccttgctgctccacgccgccaggccggaagtgcaactggtggaatctggaggctctctggtgcagccagggggaagcctgagactgtcttgtgccgcttccggcttcaccttcgacgactacgccatgagctgggtgcgccaggtgccaggcaaaggcctggaatgggtgtccagcatcaactggagcggcacccacaccgattacgccgactccgtgaaaggcagattcacaatcagcagaaacaacgccaacaataccctgtacctgcagatgaactccctgaagtctgaggatacagcagtgtattattgcgccaagaactggcgggacgccggcaccacttggtttgagaaaagcggctctgccggacagggaacccaagtgacagtgtcctccggtaccggcggaggcggatctggcggcggaggtagcggtggcggaggatctgaattcgacatccagatgacacagagccctagcagcctgtctgccagcgtgggagacagagtgaccatcacatgcaaggccagcgaccacatcaacaactggctggcctggtatcagcagaagcctggcaaggcccctaagctgctgatctacggcgctaccacactggaaacaggcgtgcccagcagattttctggcagcggctctggcaccgacttcaccctgacaatatccagcctccagcctgaggacttcgccacctactactgtcagcagagctggaacaccccttggacattcggccagggcaccaaggtggaaatcaagagactcgagatccagaaccctgatcctgccgtgtaccagctgcgggatagcaagagcagcgacaagagcgtgtgtctgttcaccgacttcgacagccagaccaacgtgtcccagagcaaggactccgacgtgtacatcaccgataagtgcgtgctggacatgcggagcatggacttcaagagcaactccgccgtggcctggtccaacaagtccgatttcgcctgcgccaacgccttcaacaacagcattatccccgaggacacattcttcccaagccccgagagcagctgcggctttaccagcgagagctaccagcagggcgtgctgagcgccaccatcctgtacgagatcctgctgggcaaggccaccctgtacgccgtgctggtgtctgccctggtgctgatggctatggtcaagcggaaggacagccggggacgcgccaagagaagcggatctggcgtgaagcagaccctgaatttcgacctgctgaagctggctggcgacgtggaatccaacccaggccctactagtatggactggatttggcgcatccttttccttgtcggcgctgctaccggcgcgcattccttcgaagaagttcagctggttgaatctggcggcggactggttcaacctggcggatctctgagactgagctgtgccgcctctggctacgcctttagcaactactgggtcaactgggttcgacaggcccctggcaaaggactggaatgggtcgcccaaatctatcccggcgacggcgacaccaactacaacggcaagttcaagggcagattcaccatcagccgggacaacagcaagaacaccctgtacctccagatgaactccctgagagccgaggacaccgccgtgtactattgtgccagatccatcaccaccgtcgtgggctgcgctatggattattggggccagggaaccctggtcaccgtgtcctctacgcgtgaggacctgaagaacgtgttcccacctgaggtggccgtgttcgagcctagcgaggccgagatcagccacacccagaaagccaccctcgtgtgcctggctaccggcttctaccccgaccatgtggaactgtcttggtgggtcaacggcaaagaggtgcacagcggcgtgtgtaccgacccccagccactgaaagaacagcccgccctgaacgacagccggtactgcctgagcagcagactgagagtgtccgccaccttctggcagaacccccggaaccacttcagatgccaggtgcagttctacggcctgagcgagaacgacgagtggacccaggacagagccaagcccgtgacccagatcgtgtctgccgaagcctggggcagagccgattgcgacgtgaagctggtggaaaagagcttcgagacagacaccaacctgaacttccagaacctgagcgtgatcggcttcagaatcctgctgctgaaagtggccggctttaacctgctgatgaccctgcggctgtggtccagc

SEQ ID NO: 36277 - DNA, 2289 bp, synthetic construct
  source 1..2289: mol_type = other DNA
atggccttaccagtgaccgccttgctcctgccgctggccttgctgctccacgccgccaggccggaagttcagctgcttgagtctggcggaggactggttcaacctggcggaagcctgagactgtcttgtgccgccagcggcttcatcttcagcagctacgccatgagctgggtccgacaggctcctggaaagggccaagaatgggtttccggcgttagcggcacaggcgtgaacacctactacgccgatagcgtgaagggcagattcaccatcagccgggacaacagcaagaacaccctgtacctccagatgaacagcctgagagccgaggacaccgccgtgtactattgtgcctctggcaaaggctgggacagcggctcttggtacgaggactatagaggccagggcaccctggtcacagtttcttcaggtaccggcggaggcggatctggcggcggaggtagcggtggcggaggatctgaattcgacatccagatgacacagagccctagcagcctgtctgccagcgtgggagacagagtgaccatcacatgcaaggccagcgaccacatcaacaactggctggcctggtatcagcagaagcctggcaaggcccctaagctgctgatctacggcgctaccacactggaaacaggcgtgcccagcagattttctggcagcggctctggcaccgacttcaccctgacaatatccagcctccagcctgaggacttcgccacctactactgtcagcagagctggaacaccccttggacattcggccagggcaccaaggtggaaatcaagagactcgaggacctgaagaacgtgttcccacctgaggtggccgtgttcgagcctagcgaggccgagatcagccacacccagaaagccaccctcgtgtgcctggctaccggcttctaccccgaccatgtggaactgtcttggtgggtcaacggcaaagaggtgcacagcggcgtgtgtaccgacccccagccactgaaagaacagcccgccctgaacgacagccggtactgcctgagcagcagactgagagtgtccgccaccttctggcagaacccccggaaccacttcagatgccaggtgcagttctacggcctgagcgagaacgacgagtggacccaggacagagccaagcccgtgacccagatcgtgtctgccgaagcctggggcagagccgattgcgacgtgaagctggtggaaaagagcttcgagacagacaccaacctgaacttccagaacctgagcgtgatcggcttcagaatcctgctgctgaaagtggccggctttaacctgctgatgaccctgcggctgtggtccagcagggccaagcgatctggatctggagcaacaaacttctcactactcaaacaagcaggtgacgtggaggagaatcccgggcctactagtatggactggatttggcgcatccttttccttgtcggcgctgctaccggcgcgcattccttcgaagaagttcagctggttgaatctggcggcggactggttcaacctggcggatctctgagactgagctgtgccgcctctggctacgcctttagcaactactgggtcaactgggttcgacaggcccctggcaaaggactggaatgggtcgcccaaatctatcccggcgacggcgacaccaactacaacggcaagttcaagggcagattcaccatcagccgggacaacagcaagaacaccctgtacctccagatgaactccctgagagccgaggacaccgccgtgtactattgtgccagatccatcaccaccgtcgtgggctgcgctatggattattggggccagggaaccctggtcaccgtgtcctctacgcgtatccagaaccctgatcctgccgtgtaccagctgcgggatagcaagagcagcgacaagagcgtgtgtctgttcaccgacttcgacagccagaccaacgtgtcccagagcaaggactccgacgtgtacatcaccgataagtgcgtgctggacatgcggagcatggacttcaagagcaactccgccgtggcctggtccaacaagtccgatttcgcctgcgccaacgccttcaacaacagcattatccccgaggacacattcttcccaagccccgagagcagctgcggctttaccagcgagagctaccagcagggcgtgctgagcgccaccatcctgtacgagatcctgctgggcaaggccaccctgtacgccgtgctggtgtctgccctggtgctgatggctatggtcaagcggaaggacagccgggga

SEQ ID NO: 36278 - DNA, 2301 bp, synthetic construct
  source 1..2301: mol_type = other DNA
atggccttaccagtgaccgccttgctcctgccgctggccttgctgctccacgccgccaggccggaagttcagctgcttgagtctggcggaggactggttcaacctggcggaagcctgagactgtcttgtgccgccagcggcttcatcttcagcagctacgccatgagctgggtccgacaggctcctggaaagggccaagaatgggtttccggcgttagcggcacaggcgtgaacacctactacgccgatagcgtgaagggcagattcaccatcagccgggacaacagcaagaacaccctgtacctccagatgaacagcctgagagccgaggacaccgccgtgtactattgtgcctctggcaaaggctgggacagcggctcttggtacgaggactatagaggccagggcaccctggtcacagtttcttcaggtaccggcggaggcggatctggcggcggaggtagcggtggcggaggatctgaattcgacatccagatgacacagagccctagcagcctgtctgccagcgtgggagacagagtgaccatcacatgcaaggccagcgaccacatcaacaactggctggcctggtatcagcagaagcctggcaaggcccctaagctgctgatctacggcgctaccacactggaaacaggcgtgcccagcagattttctggcagcggctctggcaccgacttcaccctgacaatatccagcctccagcctgaggacttcgccacctactactgtcagcagagctggaacaccccttggacattcggccagggcaccaaggtggaaatcaagagactcgagatccagaaccctgatcctgccgtgtaccagctgcgggatagcaagagcagcgacaagagcgtgtgtctgttcaccgacttcgacagccagaccaacgtgtcccagagcaaggactccgacgtgtacatcaccgataagtgcgtgctggacatgcggagcatggacttcaagagcaactccgccgtggcctggtccaacaagtccgatttcgcctgcgccaacgccttcaacaacagcattatccccgaggacacattcttcccaagccccgagagcagctgcggctttaccagcgagagctaccagcagggcgtgctgagcgccaccatcctgtacgagatcctgctgggcaaggccaccctgtacgccgtgctggtgtctgccctggtgctgatggctatggtcaagcggaaggacagccggggacgcgccaagagaagcggatctggcgtgaagcagaccctgaatttcgacctgctgaagctggctggcgacgtggaatccaacccaggccctactagtatggactggatttggcgcatccttttccttgtcggcgctgctaccggcgcgcattccttcgaagaagttcagctggttgaatctggcggcggactggttcaacctggcggatctctgagactgagctgtgccgcctctggctacgcctttagcaactactgggtcaactgggttcgacaggcccctggcaaaggactggaatgggtcgcccaaatctatcccggcgacggcgacaccaactacaacggcaagttcaagggcagattcaccatcagccgggacaacagcaagaacaccctgtacctccagatgaactccctgagagccgaggacaccgccgtgtactattgtgccagatccatcaccaccgtcgtgggctgcgctatggattattggggccagggaaccctggtcaccgtgtcctctacgcgtgaggacctgaagaacgtgttcccacctgaggtggccgtgttcgagcctagcgaggccgagatcagccacacccagaaagccaccctcgtgtgcctggctaccggcttctaccccgaccatgtggaactgtcttggtgggtcaacggcaaagaggtgcacagcggcgtgtgtaccgacccccagccactgaaagaacagcccgccctgaacgacagccggtactgcctgagcagcagactgagagtgtccgccaccttctggcagaacccccggaaccacttcagatgccaggtgcagttctacggcctgagcgagaacgacgagtggacccaggacagagccaagcccgtgacccagatcgtgtctgccgaagcctggggcagagccgattgcgacgtgaagctggtggaaaagagcttcgagacagacaccaacctgaacttccagaacctgagcgtgatcggcttcagaatcctgctgctgaaagtggccggctttaacctgctgatgaccctgcggctgtggtccagc

SEQ ID NO: 36279 - DNA, 2193 bp, synthetic construct
  source 1..2193: mol_type = other DNA
atggccttaccagtgaccgccttgctcctgccgctggccttgctgctccacgccgccaggccgatgctgcccgctcctaagaatctggtggtgtccagaatcaccgaggacagcgccagactgtcttggacagctcctgatgccgccttcgacagcttccccatccggtacatcgagacactgatctggggcgaagccatctggctggatgtgcctggaagcgagagaagctacgacctgaccggactgaagcctggcacagagtatgccgtggtcatcaccggcgtgaaaggcggcagattctctagccctctggtggcctctttcaccaccggtaccggcggaggcggatctggcggcggaggtagcggtggcggaggatctgaattcgacatccagatgacacagagccctagcagcctgtctgccagcgtgggagacagagtgaccatcacatgcaaggccagcgaccacatcaacaactggctggcctggtatcagcagaagcctggcaaggcccctaagctgctgatctacggcgctaccacactggaaacaggcgtgcccagcagattttctggcagcggctctggcaccgacttcaccctgacaatatccagcctccagcctgaggacttcgccacctactactgtcagcagagctggaacaccccttggacattcggccagggcaccaaggtggaaatcaagagactcgaggacctgaagaacgtgttcccacctgaggtggccgtgttcgagcctagcgaggccgagatcagccacacccagaaagccaccctcgtgtgcctggctaccggcttctaccccgaccatgtggaactgtcttggtgggtcaacggcaaagaggtgcacagcggcgtgtgtaccgacccccagccactgaaagaacagcccgccctgaacgacagccggtactgcctgagcagcagactgagagtgtccgccaccttctggcagaacccccggaaccacttcagatgccaggtgcagttctacggcctgagcgagaacgacgagtggacccaggacagagccaagcccgtgacccagatcgtgtctgccgaagcctggggcagagccgattgcgacgtgaagctggtggaaaagagcttcgagacagacaccaacctgaacttccagaacctgagcgtgatcggcttcagaatcctgctgctgaaagtggccggctttaacctgctgatgaccctgcggctgtggtccagcagggccaagcgatctggatctggagcaacaaacttctcactactcaaacaagcaggtgacgtggaggagaatcccgggcctactagtatggactggatttggcgcatccttttccttgtcggcgctgctaccggcgcgcattccttcgaagaagttcagctggttgaatctggcggcggactggttcaacctggcggatctctgagactgagctgtgccgcctctggctacgcctttagcaactactgggtcaactgggttcgacaggcccctggcaaaggactggaatgggtcgcccaaatctatcccggcgacggcgacaccaactacaacggcaagttcaagggcagattcaccatcagccgggacaacagcaagaacaccctgtacctccagatgaactccctgagagccgaggacaccgccgtgtactattgtgccagatccatcaccaccgtcgtgggctgcgctatggattattggggccagggaaccctggtcaccgtgtcctctacgcgtatccagaaccctgatcctgccgtgtaccagctgcgggatagcaagagcagcgacaagagcgtgtgtctgttcaccgacttcgacagccagaccaacgtgtcccagagcaaggactccgacgtgtacatcaccgataagtgcgtgctggacatgcggagcatggacttcaagagcaactccgccgtggcctggtccaacaagtccgatttcgcctgcgccaacgccttcaacaacagcattatccccgaggacacattcttcccaagccccgagagcagctgcggctttaccagcgagagctaccagcagggcgtgctgagcgccaccatcctgtacgagatcctgctgggcaaggccaccctgtacgccgtgctggtgtctgccctggtgctgatggctatggtcaagcggaaggacagccgggga

SEQ ID NO: 36280 - DNA, 2205 bp, synthetic construct
  source 1..2205: mol_type = other DNA
atggccttaccagtgaccgccttgctcctgccgctggccttgctgctccacgccgccaggccgatgctgcccgctcctaagaatctggtggtgtccagaatcaccgaggacagcgccagactgtcttggacagctcctgatgccgccttcgacagcttccccatccggtacatcgagacactgatctggggcgaagccatctggctggatgtgcctggaagcgagagaagctacgacctgaccggactgaagcctggcacagagtatgccgtggtcatcaccggcgtgaaaggcggcagattctctagccctctggtggcctctttcaccaccggtaccggcggaggcggatctggcggcggaggtagcggtggcggaggatctgaattcgacatccagatgacacagagccctagcagcctgtctgccagcgtgggagacagagtgaccatcacatgcaaggccagcgaccacatcaacaactggctggcctggtatcagcagaagcctggcaaggcccctaagctgctgatctacggcgctaccacactggaaacaggcgtgcccagcagattttctggcagcggctctggcaccgacttcaccctgacaatatccagcctccagcctgaggacttcgccacctactactgtcagcagagctggaacaccccttggacattcggccagggcaccaaggtggaaatcaagagactcgagatccagaaccctgatcctgccgtgtaccagctgcgggatagcaagagcagcgacaagagcgtgtgtctgttcaccgacttcgacagccagaccaacgtgtcccagagcaaggactccgacgtgtacatcaccgataagtgcgtgctggacatgcggagcatggacttcaagagcaactccgccgtggcctggtccaacaagtccgatttcgcctgcgccaacgccttcaacaacagcattatccccgaggacacattcttcccaagccccgagagcagctgcggctttaccagcgagagctaccagcagggcgtgctgagcgccaccatcctgtacgagatcctgctgggcaaggccaccctgtacgccgtgctggtgtctgccctggtgctgatggctatggtcaagcggaaggacagccggggacgcgccaagagaagcggatctggcgtgaagcagaccctgaatttcgacctgctgaagctggctggcgacgtggaatccaacccaggccctactagtatggactggatttggcgcatccttttccttgtcggcgctgctaccggcgcgcattccttcgaagaagttcagctggttgaatctggcggcggactggttcaacctggcggatctctgagactgagctgtgccgcctctggctacgcctttagcaactactgggtcaactgggttcgacaggcccctggcaaaggactggaatgggtcgcccaaatctatcccggcgacggcgacaccaactacaacggcaagttcaagggcagattcaccatcagccgggacaacagcaagaacaccctgtacctccagatgaactccctgagagccgaggacaccgccgtgtactattgtgccagatccatcaccaccgtcgtgggctgcgctatggattattggggccagggaaccctggtcaccgtgtcctctacgcgtgaggacctgaagaacgtgttcccacctgaggtggccgtgttcgagcctagcgaggccgagatcagccacacccagaaagccaccctcgtgtgcctggctaccggcttctaccccgaccatgtggaactgtcttggtgggtcaacggcaaagaggtgcacagcggcgtgtgtaccgacccccagccactgaaagaacagcccgccctgaacgacagccggtactgcctgagcagcagactgagagtgtccgccaccttctggcagaacccccggaaccacttcagatgccaggtgcagttctacggcctgagcgagaacgacgagtggacccaggacagagccaagcccgtgacccagatcgtgtctgccgaagcctggggcagagccgattgcgacgtgaagctggtggaaaagagcttcgagacagacaccaacctgaacttccagaacctgagcgtgatcggcttcagaatcctgctgctgaaagtggccggctttaacctgctgatgaccctgcggctgtggtccagc

SEQ ID NO: 36281 - DNA, 2280 bp, synthetic construct
  source 1..2280: mol_type = other DNA
atggccttaccagtgaccgccttgctcctgccgctggccttgctgctccacgccgccaggccggaggtgcagctggttgaatctggcggaggactggttcagcctggcggatctctgagactgtcttgtgccgccagcggcttcaacatcaaggatacctgtatcggctgggttcgcagagcccctggcaaagaggaagaactggtcgccaaaatctgcaagtacagcggccacaccagatacgccgacagcgtgaagggcagattcaccatcagcgccgacaccagcaagaacaccgcctacctccagatgaacagcctgagagccgaggacaccgccgtgtactattgtgccgctgtgtccgtcagagatgggcactacaattactggggccagggcaccaccgtgaccgtttcttcaggtaccggcggaggcggatctggcggcggaggtagcggtggcggaggatctgaattcgacatccagatgacacagagccctagcagcctgtctgccagcgtgggagacagagtgaccatcacatgcaaggccagcgaccacatcaacaactggctggcctggtatcagcagaagcctggcaaggcccctaagctgctgatctacggcgctaccacactggaaacaggcgtgcccagcagattttctggcagcggctctggcaccgacttcaccctgacaatatccagcctccagcctgaggacttcgccacctactactgtcagcagagctggaacaccccttggacattcggccagggcaccaaggtggaaatcaagagactcgaggacctgaagaacgtgttcccacctgaggtggccgtgttcgagcctagcgaggccgagatcagccacacccagaaagccaccctcgtgtgcctggctaccggcttctaccccgaccatgtggaactgtcttggtgggtcaacggcaaagaggtgcacagcggcgtgtgtaccgacccccagccactgaaagaacagcccgccctgaacgacagccggtactgcctgagcagcagactgagagtgtccgccaccttctggcagaacccccggaaccacttcagatgccaggtgcagttctacggcctgagcgagaacgacgagtggacccaggacagagccaagcccgtgacccagatcgtgtctgccgaagcctggggcagagccgattgcgacgtgaagctggtggaaaagagcttcgagacagacaccaacctgaacttccagaacctgagcgtgatcggcttcagaatcctgctgctgaaagtggccggctttaacctgctgatgaccctgcggctgtggtccagcagggccaagcgatctggatctggagcaacaaacttctcactactcaaacaagcaggtgacgtggaggagaatcccgggcctactagtatggactggatttggcgcatccttttccttgtcggcgctgctaccggcgcgcattccttcgaagaagttcagctggttgaatctggcggcggactggttcaacctggcggatctctgagactgagctgtgccgcctctggctacgcctttagcaactactgggtcaactgggttcgacaggcccctggcaaaggactggaatgggtcgcccaaatctatcccggcgacggcgacaccaactacaacggcaagttcaagggcagattcaccatcagccgggacaacagcaagaacaccctgtacctccagatgaactccctgagagccgaggacaccgccgtgtactattgtgccagatccatcaccaccgtcgtgggctgcgctatggattattggggccagggaaccctggtcaccgtgtcctctacgcgtatccagaaccctgatcctgccgtgtaccagctgcgggatagcaagagcagcgacaagagcgtgtgtctgttcaccgacttcgacagccagaccaacgtgtcccagagcaaggactccgacgtgtacatcaccgataagtgcgtgctggacatgcggagcatggacttcaagagcaactccgccgtggcctggtccaacaagtccgatttcgcctgcgccaacgccttcaacaacagcattatccccgaggacacattcttcccaagccccgagagcagctgcggctttaccagcgagagctaccagcagggcgtgctgagcgccaccatcctgtacgagatcctgctgggcaaggccaccctgtacgccgtgctggtgtctgccctggtgctgatggctatggtcaagcggaaggacagccgggga

SEQ ID NO: 36282 - DNA, 2292 bp, synthetic construct
  source 1..2292: mol_type = other DNA
atggccttaccagtgaccgccttgctcctgccgctggccttgctgctccacgccgccaggccggaggtgcagctggttgaatctggcggaggactggttcagcctggcggatctctgagactgtcttgtgccgccagcggcttcaacatcaaggatacctgtatcggctgggttcgcagagcccctggcaaagaggaagaactggtcgccaaaatctgcaagtacagcggccacaccagatacgccgacagcgtgaagggcagattcaccatcagcgccgacaccagcaagaacaccgcctacctccagatgaacagcctgagagccgaggacaccgccgtgtactattgtgccgctgtgtccgtcagagatgggcactacaattactggggccagggcaccaccgtgaccgtttcttcaggtaccggcggaggcggatctggcggcggaggtagcggtggcggaggatctgaattcgacatccagatgacacagagccctagcagcctgtctgccagcgtgggagacagagtgaccatcacatgcaaggccagcgaccacatcaacaactggctggcctggtatcagcagaagcctggcaaggcccctaagctgctgatctacggcgctaccacactggaaacaggcgtgcccagcagattttctggcagcggctctggcaccgacttcaccctgacaatatccagcctccagcctgaggacttcgccacctactactgtcagcagagctggaacaccccttggacattcggccagggcaccaaggtggaaatcaagagactcgagatccagaaccctgatcctgccgtgtaccagctgcgggatagcaagagcagcgacaagagcgtgtgtctgttcaccgacttcgacagccagaccaacgtgtcccagagcaaggactccgacgtgtacatcaccgataagtgcgtgctggacatgcggagcatggacttcaagagcaactccgccgtggcctggtccaacaagtccgatttcgcctgcgccaacgccttcaacaacagcattatccccgaggacacattcttcccaagccccgagagcagctgcggctttaccagcgagagctaccagcagggcgtgctgagcgccaccatcctgtacgagatcctgctgggcaaggccaccctgtacgccgtgctggtgtctgccctggtgctgatggctatggtcaagcggaaggacagccggggacgcgccaagagaagcggatctggcgtgaagcagaccctgaatttcgacctgctgaagctggctggcgacgtggaatccaacccaggccctactagtatggactggatttggcgcatccttttccttgtcggcgctgctaccggcgcgcattccttcgaagaagttcagctggttgaatctggcggcggactggttcaacctggcggatctctgagactgagctgtgccgcctctggctacgcctttagcaactactgggtcaactgggttcgacaggcccctggcaaaggactggaatgggtcgcccaaatctatcccggcgacggcgacaccaactacaacggcaagttcaagggcagattcaccatcagccgggacaacagcaagaacaccctgtacctccagatgaactccctgagagccgaggacaccgccgtgtactattgtgccagatccatcaccaccgtcgtgggctgcgctatggattattggggccagggaaccctggtcaccgtgtcctctacgcgtgaggacctgaagaacgtgttcccacctgaggtggccgtgttcgagcctagcgaggccgagatcagccacacccagaaagccaccctcgtgtgcctggctaccggcttctaccccgaccatgtggaactgtcttggtgggtcaacggcaaagaggtgcacagcggcgtgtgtaccgacccccagccactgaaagaacagcccgccctgaacgacagccggtactgcctgagcagcagactgagagtgtccgccaccttctggcagaacccccggaaccacttcagatgccaggtgcagttctacggcctgagcgagaacgacgagtggacccaggacagagccaagcccgtgacccagatcgtgtctgccgaagcctggggcagagccgattgcgacgtgaagctggtggaaaagagcttcgagacagacaccaacctgaacttccagaacctgagcgtgatcggcttcagaatcctgctgctgaaagtggccggctttaacctgctgatgaccctgcggctgtggtccagc

SEQ ID NO: 36283 - DNA, 3396 bp, synthetic construct
  source 1..3396: mol_type = other DNA
atggccttaccagtgaccgccttgctcctgccgctggccttgctgctccacgccgccaggccggaagtgcagctggttgaatctggcggaggactggttcaggctggcggatctctgagactgtcttgtgccgccagcggcagaacctttagcatgggctggtttagacaggcccctggcaaagagagagagttcgtcgccgccatcacatactctggcggcagcccttactacgccgactctgtgaagggcagattcaccatcagccgggacaacgccaagaacaccgtgtacctccagatgaacagcctgaagcctgaggacaccgccgtgtactactgcgccgccaatccaacatacggcagcgactggaacgccgagaattggggccagggaacccaagtgacagtgtctagcggtaccggcggaggcggatctggcggcggaggtagcggtggcggaggatctgaattcgacatccagatgacacagagccctagcagcctgtctgccagcgtgggagacagagtgaccatcacatgcaaggccagcgaccacatcaacaactggctggcctggtatcagcagaagcctggcaaggcccctaagctgctgatctacggcgctaccacactggaaacaggcgtgcccagcagattttctggcagcggctctggcaccgacttcaccctgacaatatccagcctccagcctgaggacttcgccacctactactgtcagcagagctggaacaccccttggacattcggccagggcaccaaggtggaaatcaagagactcgaggacctgaagaacgtgttcccacctgaggtggccgtgttcgagcctagcgaggccgagatcagccacacccagaaagccaccctcgtgtgcctggctaccggcttctaccccgaccatgtggaactgtcttggtgggtcaacggcaaagaggtgcacagcggcgtgtgtaccgacccccagccactgaaagaacagcccgccctgaacgacagccggtactgcctgagcagcagactgagagtgtccgccaccttctggcagaacccccggaaccacttcagatgccaggtgcagttctacggcctgagcgagaacgacgagtggacccaggacagagccaagcccgtgacccagatcgtgtctgccgaagcctggggcagagccgattgcgacgtgaagctggtggaaaagagcttcgagacagacaccaacctgaacttccagaacctgagcgtgatcggcttcagaatcctgctgctgaaagtggccggctttaacctgctgatgaccctgcggctgtggtccagcagggccaagcgatctggatctggagcaacaaacttctcactactcaaacaagcaggtgacgtggaggagaatcccgggcctactagtgccaccatggactggatttggcgcatccttttccttgtcggcgctgctaccggcgcccattccgggcccgaagtgcaactggttgaatccggtggcggcctggtgcaagcaggcggatctctcagacttagctgtgccgcctccggcagaaccttcacaatgggatggtttaggcaggctccagggaaagagagagagttcgtcgccgccatctctctgtctcccacactggcctactacgccgactctgtgaaaggccggttcaccatctccagagataatgccaagaacaccgtggtgctgcaaatgaactctctgaaacccgaggatacagccctgtactattgtgccgctgaccggaagtccgtgatgagcatcagacccgattactggggacagggcacacaagtcacagtgtcctctggatccggcggcggaggatctggcggaggcggatctgggggcggaggctctttcgaagaagttcagctggttgaatctggcggcggactggttcaacctggcggatctctgagactgagctgtgccgcctctggctacgcctttagcaactactgggtcaactgggttcgacaggcccctggcaaaggactggaatgggtcgcccaaatctatcccggcgacggcgacaccaactacaacggcaagttcaagggcagattcaccatcagccgggacaacagcaagaacaccctgtacctccagatgaactccctgagagccgaggacaccgccgtgtactattgtgccagatccatcaccaccgtcgtgggctgcgctatggattattggggccagggaaccctggtcaccgtgtcctctacgcgtatccagaaccctgatcctgccgtgtaccagctgcgggatagcaagagcagcgacaagagcgtgtgtctgttcaccgacttcgacagccagaccaacgtgtcccagagcaaggactccgacgtgtacatcaccgataagtgcgtgctggacatgcggagcatggacttcaagagcaactccgccgtggcctggtccaacaagtccgatttcgcctgcgccaacgccttcaacaacagcattatccccgaggacacattcttcccaagccccgagagcagctgcggctttaccagcgagagctaccagcagggcgtgctgagcgccaccatcctgtacgagatcctgctgggcaaggccaccctgtacgccgtgctggtgtctgccctggtgctgatggctatggtcaagcggaaggacagccggggacgcgccaagagaagcggatctggcgtgaagcagaccctgaatttcgacctgctgaagctggctggcgacgtggaatccaacccaggcccttctagaggccatatgaccgagtacaagcccacggtgcgcctcgccacccgcgacgacgtccccagggccgtacgcaccctcgccgccgcgttcgccgactaccccgccacgcgccacaccgtcgatccggaccgccacatcgagcgggtcaccgagctgcaagaactcttcctcacgcgcgtcgggctcgacatcggcaaggtgtgggtcgcggacgacggcgccgcggtggcggtctggaccacgccggagagcgtcgaagcgggggcggtgttcgccgagatcggcccgcgcatggccgagttgagcggttcccggctggccgcgcagcaacagatggaaggcctcctggcgccgcaccggcccaaggagcccgcgtggttcctggccaccgtcggcgtctcgcccgaccaccagggcaagggtctgggcagcgccgtcgtgctccccggagtggaggcggccgagcgcgccggggtgcccgccttcctggagacctccgcgccccgcaacctccccttctacgagcggctcggcttcaccgtcaccgccgacgtcgaggtgcccgaaggaccgcgcacctggtgcatgacccgcaagcccggtgcctga

SEQ ID NO: 36284 - DNA, 2310 bp, synthetic construct
  source 1..2310: mol_type = other DNA
atggccttaccagtgaccgccttgctcctgccgctggccttgctgctccacgccgccaggccggaagtgcagctggttgaatctggcggaggactggttcagcctggcggatctctgagactgtcttgtgccgcctctggcttcgccagcgactactatatcatcggctggttcagacaggcccctggcaaagagagagagggcgtcagctgtatcagcagcagatacgccaacaccaactacgccgacagcgtgaagggcagattcaccatcagccgggacaacgccaagaacaccgtgtacctccagatgaacagcctgaagcctgaggacaccgccgtgtactactgtgccgccgacaccagaagatacacctgtcctgacattgccaccatgcaccggaacttcgattcttggggccagggcacactggtcaccgtttcttctggtaccggcggaggcggatctggcggcggaggtagcggtggcggaggatctgaattcgacatccagatgacacagagccctagcagcctgtctgccagcgtgggagacagagtgaccatcacatgcaaggccagcgaccacatcaacaactggctggcctggtatcagcagaagcctggcaaggcccctaagctgctgatctacggcgctaccacactggaaacaggcgtgcccagcagattttctggcagcggctctggcaccgacttcaccctgacaatatccagcctccagcctgaggacttcgccacctactactgtcagcagagctggaacaccccttggacattcggccagggcaccaaggtggaaatcaagagactcgaggacctgaagaacgtgttcccacctgaggtggccgtgttcgagcctagcgaggccgagatcagccacacccagaaagccaccctcgtgtgcctggctaccggcttctaccccgaccatgtggaactgtcttggtgggtcaacggcaaagaggtgcacagcggcgtgtgtaccgacccccagccactgaaagaacagcccgccctgaacgacagccggtactgcctgagcagcagactgagagtgtccgccaccttctggcagaacccccggaaccacttcagatgccaggtgcagttctacggcctgagcgagaacgacgagtggacccaggacagagccaagcccgtgacccagatcgtgtctgccgaagcctggggcagagccgattgcgacgtgaagctggtggaaaagagcttcgagacagacaccaacctgaacttccagaacctgagcgtgatcggcttcagaatcctgctgctgaaagtggccggctttaacctgctgatgaccctgcggctgtggtccagcagggccaagcgatctggatctggagcaacaaacttctcactactcaaacaagcaggtgacgtggaggagaatcccgggcctactagtatggactggatttggcgcatccttttccttgtcggcgctgctaccggcgcgcattccttcgaagaagttcagctggttgaatctggcggcggactggttcaacctggcggatctctgagactgagctgtgccgcctctggctacgcctttagcaactactgggtcaactgggttcgacaggcccctggcaaaggactggaatgggtcgcccaaatctatcccggcgacggcgacaccaactacaacggcaagttcaagggcagattcaccatcagccgggacaacagcaagaacaccctgtacctccagatgaactccctgagagccgaggacaccgccgtgtactattgtgccagatccatcaccaccgtcgtgggctgcgctatggattattggggccagggaaccctggtcaccgtgtcctctacgcgtatccagaaccctgatcctgccgtgtaccagctgcgggatagcaagagcagcgacaagagcgtgtgtctgttcaccgacttcgacagccagaccaacgtgtcccagagcaaggactccgacgtgtacatcaccgataagtgcgtgctggacatgcggagcatggacttcaagagcaactccgccgtggcctggtccaacaagtccgatttcgcctgcgccaacgccttcaacaacagcattatccccgaggacacattcttcccaagccccgagagcagctgcggctttaccagcgagagctaccagcagggcgtgctgagcgccaccatcctgtacgagatcctgctgggcaaggccaccctgtacgccgtgctggtgtctgccctggtgctgatggctatggtcaagcggaaggacagccggggataa

SEQ ID NO: 36285 - DNA, 2310 bp, synthetic construct
  source 1..2310: mol_type = other DNA
atggccttaccagtgaccgccttgctcctgccgctggccttgctgctccacgccgccaggccggaagtgcagctggttgaatctggcggaggactggttcagcctggcggatctctgagactgagctgtgaagccagcggcttcgccagcgacgattacatcatcggctggttcagacaggcccctggcaaagagagagagggcgtcagctgcatcagctctaagtacgccaacaccgtgtacaccgacagcgtgaagggcagattcagactgagcagaggcaccgccaagaataccgtgtacctccagatgagcgccctgaagcctgaggataccgccgtgtactactgcgctatggacagccgcagagtgacatgccctgagatcagcaccatgcaccggaacttcgattcttggggccagggcacactggtcacagtgtcatctggtaccggcggaggcggatctggcggcggaggtagcggtggcggaggatctgaattcgacatccagatgacacagagccctagcagcctgtctgccagcgtgggagacagagtgaccatcacatgcaaggccagcgaccacatcaacaactggctggcctggtatcagcagaagcctggcaaggcccctaagctgctgatctacggcgctaccacactggaaacaggcgtgcccagcagattttctggcagcggctctggcaccgacttcaccctgacaatatccagcctccagcctgaggacttcgccacctactactgtcagcagagctggaacaccccttggacattcggccagggcaccaaggtggaaatcaagagactcgaggacctgaagaacgtgttcccacctgaggtggccgtgttcgagcctagcgaggccgagatcagccacacccagaaagccaccctcgtgtgcctggctaccggcttctaccccgaccatgtggaactgtcttggtgggtcaacggcaaagaggtgcacagcggcgtgtgtaccgacccccagccactgaaagaacagcccgccctgaacgacagccggtactgcctgagcagcagactgagagtgtccgccaccttctggcagaacccccggaaccacttcagatgccaggtgcagttctacggcctgagcgagaacgacgagtggacccaggacagagccaagcccgtgacccagatcgtgtctgccgaagcctggggcagagccgattgcgacgtgaagctggtggaaaagagcttcgagacagacaccaacctgaacttccagaacctgagcgtgatcggcttcagaatcctgctgctgaaagtggccggctttaacctgctgatgaccctgcggctgtggtccagcagggccaagcgatctggatctggagcaacaaacttctcactactcaaacaagcaggtgacgtggaggagaatcccgggcctactagtatggactggatttggcgcatccttttccttgtcggcgctgctaccggcgcgcattccttcgaagaagttcagctggttgaatctggcggcggactggttcaacctggcggatctctgagactgagctgtgccgcctctggctacgcctttagcaactactgggtcaactgggttcgacaggcccctggcaaaggactggaatgggtcgcccaaatctatcccggcgacggcgacaccaactacaacggcaagttcaagggcagattcaccatcagccgggacaacagcaagaacaccctgtacctccagatgaactccctgagagccgaggacaccgccgtgtactattgtgccagatccatcaccaccgtcgtgggctgcgctatggattattggggccagggaaccctggtcaccgtgtcctctacgcgtatccagaaccctgatcctgccgtgtaccagctgcgggatagcaagagcagcgacaagagcgtgtgtctgttcaccgacttcgacagccagaccaacgtgtcccagagcaaggactccgacgtgtacatcaccgataagtgcgtgctggacatgcggagcatggacttcaagagcaactccgccgtggcctggtccaacaagtccgatttcgcctgcgccaacgccttcaacaacagcattatccccgaggacacattcttcccaagccccgagagcagctgcggctttaccagcgagagctaccagcagggcgtgctgagcgccaccatcctgtacgagatcctgctgggcaaggccaccctgtacgccgtgctggtgtctgccctggtgctgatggctatggtcaagcggaaggacagccggggataa

SEQ ID NO: 36286 - DNA, 2307 bp, synthetic construct
  source 1..2307: mol_type = other DNA
atggccttaccagtgaccgccttgctcctgccgctggccttgctgctccacgccgccaggccggaagtgcagctggttgaatctggcggaggactggttcagcctggcggatctctgagactgtcttgtgccgcctctggcttcgccagcgactactatatcatcggctggttcagacaggcccctggcaaagagagagagggcgtcagctgtatcagcagcagatacgccaacaccaactacgccgacagcgtgaagggcagattcaccatcagccgggacaacgccaagaacaccgtgtacctccagatgaacagcctgaagcctgaggacaccgccgtgtactactgtgccgccgacaccagaagatacacctgtcctgacattgccaccatgcaccggaacttcgattcttggggccagggcacactggtcaccgtttcttctggtaccggcggaggcggatctggcggcggaggtagcggtggcggaggatctgaattcgacatccagatgacacagagccctagcagcctgtctgccagcgtgggagacagagtgaccatcacatgcaaggccagcgaccacatcaacaactggctggcctggtatcagcagaagcctggcaaggcccctaagctgctgatctacggcgctaccacactggaaacaggcgtgcccagcagattttctggcagcggctctggcaccgacttcaccctgacaatatccagcctccagcctgaggacttcgccacctactactgtcagcagagctggaacaccccttggacattcggccagggcaccaaggtggaaatcaagagactcgagatccagaaccctgatcctgccgtgtaccagctgcgggatagcaagagcagcgacaagagcgtgtgtctgttcaccgacttcgacagccagaccaacgtgtcccagagcaaggactccgacgtgtacatcaccgataagtgcgtgctggacatgcggagcatggacttcaagagcaactccgccgtggcctggtccaacaagtccgatttcgcctgcgccaacgccttcaacaacagcattatccccgaggacacattcttcccaagccccgagagcagctgcggctttaccagcgagagctaccagcagggcgtgctgagcgccaccatcctgtacgagatcctgctgggcaaggccaccctgtacgccgtgctggtgtctgccctggtgctgatggctatggtcaagcggaaggacagccggggaagggccaagcgatctggatctggagcaacaaacttctcactactcaaacaagcaggtgacgtggaggagaatcccgggcctactagtatggactggatttggcgcatccttttccttgtcggcgctgctaccggcgcgcattccttcgaagaagttcagctggttgaatctggcggcggactggttcaacctggcggatctctgagactgagctgtgccgcctctggctacgcctttagcaactactgggtcaactgggttcgacaggcccctggcaaaggactggaatgggtcgcccaaatctatcccggcgacggcgacaccaactacaacggcaagttcaagggcagattcaccatcagccgggacaacagcaagaacaccctgtacctccagatgaactccctgagagccgaggacaccgccgtgtactattgtgccagatccatcaccaccgtcgtgggctgcgctatggattattggggccagggaaccctggtcaccgtgtcctctacgcgtgacctgaagaacgtgttcccacctgaggtggccgtgttcgagcctagcgaggccgagatcagccacacccagaaagccaccctcgtgtgcctggctaccggcttctaccccgaccatgtggaactgtcttggtgggtcaacggcaaagaggtgcacagcggcgtgtgtaccgacccccagccactgaaagaacagcccgccctgaacgacagccggtactgcctgagcagcagactgagagtgtccgccaccttctggcagaacccccggaaccacttcagatgccaggtgcagttctacggcctgagcgagaacgacgagtggacccaggacagagccaagcccgtgacccagatcgtgtctgccgaagcctggggcagagccgattgcgacgtgaagctggtggaaaagagcttcgagacagacaccaacctgaacttccagaacctgagcgtgatcggcttcagaatcctgctgctgaaagtggccggctttaacctgctgatgaccctgcggctgtggtccagc

SEQ ID NO: 36287 - DNA, 2307 bp, synthetic construct
  source 1..2307: mol_type = other DNA
atggccttaccagtgaccgccttgctcctgccgctggccttgctgctccacgccgccaggccggaagtgcagctggttgaatctggcggaggactggttcagcctggcggatctctgagactgagctgtgaagccagcggcttcgccagcgacgattacatcatcggctggttcagacaggcccctggcaaagagagagagggcgtcagctgcatcagctctaagtacgccaacaccgtgtacaccgacagcgtgaagggcagattcagactgagcagaggcaccgccaagaataccgtgtacctccagatgagcgccctgaagcctgaggataccgccgtgtactactgcgctatggacagccgcagagtgacatgccctgagatcagcaccatgcaccggaacttcgattcttggggccagggcacactggtcacagtgtcatctggtaccggcggaggcggatctggcggcggaggtagcggtggcggaggatctgaattcgacatccagatgacacagagccctagcagcctgtctgccagcgtgggagacagagtgaccatcacatgcaaggccagcgaccacatcaacaactggctggcctggtatcagcagaagcctggcaaggcccctaagctgctgatctacggcgctaccacactggaaacaggcgtgcccagcagattttctggcagcggctctggcaccgacttcaccctgacaatatccagcctccagcctgaggacttcgccacctactactgtcagcagagctggaacaccccttggacattcggccagggcaccaaggtggaaatcaagagactcgagatccagaaccctgatcctgccgtgtaccagctgcgggatagcaagagcagcgacaagagcgtgtgtctgttcaccgacttcgacagccagaccaacgtgtcccagagcaaggactccgacgtgtacatcaccgataagtgcgtgctggacatgcggagcatggacttcaagagcaactccgccgtggcctggtccaacaagtccgatttcgcctgcgccaacgccttcaacaacagcattatccccgaggacacattcttcccaagccccgagagcagctgcggctttaccagcgagagctaccagcagggcgtgctgagcgccaccatcctgtacgagatcctgctgggcaaggccaccctgtacgccgtgctggtgtctgccctggtgctgatggctatggtcaagcggaaggacagccggggaagggccaagcgatctggatctggagcaacaaacttctcactactcaaacaagcaggtgacgtggaggagaatcccgggcctactagtatggactggatttggcgcatccttttccttgtcggcgctgctaccggcgcgcattccttcgaagaagttcagctggttgaatctggcggcggactggttcaacctggcggatctctgagactgagctgtgccgcctctggctacgcctttagcaactactgggtcaactgggttcgacaggcccctggcaaaggactggaatgggtcgcccaaatctatcccggcgacggcgacaccaactacaacggcaagttcaagggcagattcaccatcagccgggacaacagcaagaacaccctgtacctccagatgaactccctgagagccgaggacaccgccgtgtactattgtgccagatccatcaccaccgtcgtgggctgcgctatggattattggggccagggaaccctggtcaccgtgtcctctacgcgtgacctgaagaacgtgttcccacctgaggtggccgtgttcgagcctagcgaggccgagatcagccacacccagaaagccaccctcgtgtgcctggctaccggcttctaccccgaccatgtggaactgtcttggtgggtcaacggcaaagaggtgcacagcggcgtgtgtaccgacccccagccactgaaagaacagcccgccctgaacgacagccggtactgcctgagcagcagactgagagtgtccgccaccttctggcagaacccccggaaccacttcagatgccaggtgcagttctacggcctgagcgagaacgacgagtggacccaggacagagccaagcccgtgacccagatcgtgtctgccgaagcctggggcagagccgattgcgacgtgaagctggtggaaaagagcttcgagacagacaccaacctgaacttccagaacctgagcgtgatcggcttcagaatcctgctgctgaaagtggccggctttaacctgctgatgaccctgcggctgtggtccagc

SEQ ID NO: 36288 - DNA, 2280 bp, synthetic construct
  source 1..2280: mol_type = other DNA
atggccttaccagtgaccgccttgctcctgccgctggccttgctgctccacgccgccaggccgcaagtcaaactggaagaaagcggtggcggcctggtgcaacctggcgaatctctgagactgagctgtagcgccagcggctccatcttcaaggtgttcagagtgttcgccatgagctggtacaggcaaggccctggcaagcagagagagctggtcgcctctatcagcagcggcgagacaaccacatacgccgaatctgtgaaaggccggttcaccatcagccgggataatgccaagaataccgcctatctccagatggactccctgaagcctgaagatacagctgtgtactactgcaacgccgaccataccttcaccggcgatttttggggccagggaacccaagtgaccgtgtctagtggtaccggcggaggcggatctggcggcggaggtagcggtggcggaggatctgaattcgacatccagatgacacagagccctagcagcctgtctgccagcgtgggagacagagtgaccatcacatgcaaggccagcgaccacatcaacaactggctggcctggtatcagcagaagcctggcaaggcccctaagctgctgatctacggcgctaccacactggaaacaggcgtgcccagcagattttctggcagcggctctggcaccgacttcaccctgacaatatccagcctccagcctgaggacttcgccacctactactgtcagcagagctggaacaccccttggacattcggccagggcaccaaggtggaaatcaagagactcgagatccagaaccctgatcctgccgtgtaccagctgcgggatagcaagagcagcgacaagagcgtgtgtctgttcaccgacttcgacagccagaccaacgtgtcccagagcaaggactccgacgtgtacatcaccgataagtgcgtgctggacatgcggagcatggacttcaagagcaactccgccgtggcctggtccaacaagtccgatttcgcctgcgccaacgccttcaacaacagcattatccccgaggacacattcttcccaagccccgagagcagctgcggctttaccagcgagagctaccagcagggcgtgctgagcgccaccatcctgtacgagatcctgctgggcaaggccaccctgtacgccgtgctggtgtctgccctggtgctgatggctatggtcaagcggaaggacagccggggaagggccaagcgatctggatctggagcaacaaacttctcactactcaaacaagcaggtgacgtggaggagaatcccgggcctactagtatggactggatttggcgcatccttttccttgtcggcgctgctaccggcgcgcattccttcgaagaagttcagctggttgaatctggcggcggactggttcaacctggcggatctctgagactgagctgtgccgcctctggctacgcctttagcaactactgggtcaactgggttcgacaggcccctggcaaaggactggaatgggtcgcccaaatctatcccggcgacggcgacaccaactacaacggcaagttcaagggcagattcaccatcagccgggacaacagcaagaacaccctgtacctccagatgaactccctgagagccgaggacaccgccgtgtactattgtgccagatccatcaccaccgtcgtgggctgcgctatggattattggggccagggaaccctggtcaccgtgtcctctacgcgtgacctgaagaacgtgttcccacctgaggtggccgtgttcgagcctagcgaggccgagatcagccacacccagaaagccaccctcgtgtgcctggctaccggcttctaccccgaccatgtggaactgtcttggtgggtcaacggcaaagaggtgcacagcggcgtgtgtaccgacccccagccactgaaagaacagcccgccctgaacgacagccggtactgcctgagcagcagactgagagtgtccgccaccttctggcagaacccccggaaccacttcagatgccaggtgcagttctacggcctgagcgagaacgacgagtggacccaggacagagccaagcccgtgacccagatcgtgtctgccgaagcctggggcagagccgattgcgacgtgaagctggtggaaaagagcttcgagacagacaccaacctgaacttccagaacctgagcgtgatcggcttcagaatcctgctgctgaaagtggccggctttaacctgctgatgaccctgcggctgtggtccagc

SEQ ID NO: 36289 - DNA, 2286 bp, synthetic construct
  source 1..2286: mol_type = other DNA
atggccttaccagtgaccgccttgctcctgccgctggccttgctgctccacgccgccaggccggacatccagatgacacagagccctagcagcctgtctgccagcgtgggagacagagtgaccatcacatgcaaggccagcgaccacatcaacaactggctggcctggtatcagcagaagcctggcaaggcccctaagctgctgatctacggcgctaccacactggaaacaggcgtgcccagcagattttctggcagcggctctggcaccgacttcaccctgacaatatccagcctccagcctgaggacttcgccacctactactgtcagcagagctggaacaccccttggacattcggccagggcaccaaggtggaaatcaagagactcgaggacctgaagaacgtgttcccacctgaggtggccgtgttcgagcctagcgaggccgagatcagccacacccagaaagccaccctcgtgtgcctggctaccggcttctaccccgaccatgtggaactgtcttggtgggtcaacggcaaagaggtgcacagcggcgtgtgtaccgacccccagccactgaaagaacagcccgccctgaacgacagccggtactgcctgagcagcagactgagagtgtccgccaccttctggcagaacccccggaaccacttcagatgccaggtgcagttctacggcctgagcgagaacgacgagtggacccaggacagagccaagcccgtgacccagatcgtgtctgccgaagcctggggcagagccgattgcgacgtgaagctggtggaaaagagcttcgagacagacaccaacctgaacttccagaacctgagcgtgatcggcttcagaatcctgctgctgaaagtggccggctttaacctgctgatgaccctgcggctgtggtccagcagggccaagcgatctggatctggagcaacaaacttctcactactcaaacaagcaggtgacgtggaggagaatcccgggcctactagtgccaccatggactggatttggcgcatccttttccttgtcggcgctgctaccggcgcccattccgggcccgaagtgcagctggttgaatctggcggaggactggttcaggctggcggatctctgagactgtcttgtgccgccagcggcagaacctttagcatgggctggtttagacaggcccctggcaaagagagagagttcgtcgccgccatcacatactctggcggcagcccttactacgccgactctgtgaagggcagattcaccatcagccgggacaacgccaagaacaccgtgtacctccagatgaacagcctgaagcctgaggacaccgccgtgtactactgcgccgccaatccaacatacggcagcgactggaacgccgagaattggggccagggaacccaagtgacagtgtctagcggatccggcggcggaggatctggcggaggcggatctgggggcggaggctctttcgaagaagttcagctggttgaatctggcggcggactggttcaacctggcggatctctgagactgagctgtgccgcctctggctacgcctttagcaactactgggtcaactgggttcgacaggcccctggcaaaggactggaatgggtcgcccaaatctatcccggcgacggcgacaccaactacaacggcaagttcaagggcagattcaccatcagccgggacaacagcaagaacaccctgtacctccagatgaactccctgagagccgaggacaccgccgtgtactattgtgccagatccatcaccaccgtcgtgggctgcgctatggattattggggccagggaaccctggtcaccgtgtcctctacgcgtatccagaaccctgatcctgccgtgtaccagctgcgggatagcaagagcagcgacaagagcgtgtgtctgttcaccgacttcgacagccagaccaacgtgtcccagagcaaggactccgacgtgtacatcaccgataagtgcgtgctggacatgcggagcatggacttcaagagcaactccgccgtggcctggtccaacaagtccgatttcgcctgcgccaacgccttcaacaacagcattatccccgaggacacattcttcccaagccccgagagcagctgcggctttaccagcgagagctaccagcagggcgtgctgagcgccaccatcctgtacgagatcctgctgggcaaggccaccctgtacgccgtgctggtgtctgccctggtgctgatggctatggtcaagcggaaggacagccggggataa

SEQ ID NO: 36290 - DNA, 2289 bp, synthetic construct
  source 1..2289: mol_type = other DNA
atggccttaccagtgaccgccttgctcctgccgctggccttgctgctccacgccgccaggccggacatccagatgacacagagccctagcagcctgtctgccagcgtgggagacagagtgaccatcacatgcaaggccagcgaccacatcaacaactggctggcctggtatcagcagaagcctggcaaggcccctaagctgctgatctacggcgctaccacactggaaacaggcgtgcccagcagattttctggcagcggctctggcaccgacttcaccctgacaatatccagcctccagcctgaggacttcgccacctactactgtcagcagagctggaacaccccttggacattcggccagggcaccaaggtggaaatcaagagactcgaggacctgaagaacgtgttcccacctgaggtggccgtgttcgagcctagcgaggccgagatcagccacacccagaaagccaccctcgtgtgcctggctaccggcttctaccccgaccatgtggaactgtcttggtgggtcaacggcaaagaggtgcacagcggcgtgtgtaccgacccccagccactgaaagaacagcccgccctgaacgacagccggtactgcctgagcagcagactgagagtgtccgccaccttctggcagaacccccggaaccacttcagatgccaggtgcagttctacggcctgagcgagaacgacgagtggacccaggacagagccaagcccgtgacccagatcgtgtctgccgaagcctggggcagagccgattgcgacgtgaagctggtggaaaagagcttcgagacagacaccaacctgaacttccagaacctgagcgtgatcggcttcagaatcctgctgctgaaagtggccggctttaacctgctgatgaccctgcggctgtggtccagcagggccaagcgatctggatctggagcaacaaacttctcactactcaaacaagcaggtgacgtggaggagaatcccgggcctactagtgccaccatggactggatttggcgcatccttttccttgtcggcgctgctaccggcgcccattccgggcccgaagtgcaactggtggaatctgggggcggactggtgcagccaggcggaagtctgaggctgtcttgtgccgcctccggcagcatcttcggcttcaacgacatggcctggtatcggcaggctcccggaaaacagcgcgagctggtggctctgattagcagagtgggcgtgaccagcagcgccgactctgtgaagggcagattcacaatctccagagtgaacgccaaggatacagtgtacctccagatgaactctctgaaacctgaggatacagcagtgtactattgctacatggaccagcggctggacggcagcacactggcctactggggacagggaactcaagtgacagtgtctagcggatccggcggcggaggatctggcggaggcggatctgggggcggaggctctttcgaagaagttcagctggttgaatctggcggcggactggttcaacctggcggatctctgagactgagctgtgccgcctctggctacgcctttagcaactactgggtcaactgggttcgacaggcccctggcaaaggactggaatgggtcgcccaaatctatcccggcgacggcgacaccaactacaacggcaagttcaagggcagattcaccatcagccgggacaacagcaagaacaccctgtacctccagatgaactccctgagagccgaggacaccgccgtgtactattgtgccagatccatcaccaccgtcgtgggctgcgctatggattattggggccagggaaccctggtcaccgtgtcctctacgcgtatccagaaccctgatcctgccgtgtaccagctgcgggatagcaagagcagcgacaagagcgtgtgtctgttcaccgacttcgacagccagaccaacgtgtcccagagcaaggactccgacgtgtacatcaccgataagtgcgtgctggacatgcggagcatggacttcaagagcaactccgccgtggcctggtccaacaagtccgatttcgcctgcgccaacgccttcaacaacagcattatccccgaggacacattcttcccaagccccgagagcagctgcggctttaccagcgagagctaccagcagggcgtgctgagcgccaccatcctgtacgagatcctgctgggcaaggccaccctgtacgccgtgctggtgtctgccctggtgctgatggctatggtcaagcggaaggacagccggggataa

SEQ ID NO: 36291 - DNA, 2277 bp, synthetic construct
  source 1..2277: mol_type = other DNA
atggccttaccagtgaccgccttgctcctgccgctggccttgctgctccacgccgccaggccggacatccagatgacacagagccctagcagcctgtctgccagcgtgggagacagagtgaccatcacatgcaaggccagcgaccacatcaacaactggctggcctggtatcagcagaagcctggcaaggcccctaagctgctgatctacggcgctaccacactggaaacaggcgtgcccagcagattttctggcagcggctctggcaccgacttcaccctgacaatatccagcctccagcctgaggacttcgccacctactactgtcagcagagctggaacaccccttggacattcggccagggcaccaaggtggaaatcaagagactcgaggacctgaagaacgtgttcccacctgaggtggccgtgttcgagcctagcgaggccgagatcagccacacccagaaagccaccctcgtgtgcctggctaccggcttctaccccgaccatgtggaactgtcttggtgggtcaacggcaaagaggtgcacagcggcgtgtgtaccgacccccagccactgaaagaacagcccgccctgaacgacagccggtactgcctgagcagcagactgagagtgtccgccaccttctggcagaacccccggaaccacttcagatgccaggtgcagttctacggcctgagcgagaacgacgagtggacccaggacagagccaagcccgtgacccagatcgtgtctgccgaagcctggggcagagccgattgcgacgtgaagctggtggaaaagagcttcgagacagacaccaacctgaacttccagaacctgagcgtgatcggcttcagaatcctgctgctgaaagtggccggctttaacctgctgatgaccctgcggctgtggtccagcagggccaagcgatctggatctggagcaacaaacttctcactactcaaacaagcaggtgacgtggaggagaatcccgggcctactagtgccaccatggactggatttggcgcatccttttccttgtcggcgctgctaccggcgcccattccgggcccgaggtgcagctggttgaatctggcggaggactggttcaggctggcggatctctgagactgtcttgtgccgccagcggctctgtgttcagcggcaatgtgatgggctggtacagacaggcccctggcaaagaaagagagtgggttgccgccattgccagcggcggcagcatctactacagagactctgtgaagggcagattcaccatcagccgggacaacgccaagaacaccgtgtacctccagatgaacagcctgaagcctgaggacaccgccgtgtactactgcaactctcaccctcctacactgccctattggggcctgggaacccaagtgacagtgtcctctggatccggcggcggaggatctggcggaggcggatctgggggcggaggctctttcgaagaagttcagctggttgaatctggcggcggactggttcaacctggcggatctctgagactgagctgtgccgcctctggctacgcctttagcaactactgggtcaactgggttcgacaggcccctggcaaaggactggaatgggtcgcccaaatctatcccggcgacggcgacaccaactacaacggcaagttcaagggcagattcaccatcagccgggacaacagcaagaacaccctgtacctccagatgaactccctgagagccgaggacaccgccgtgtactattgtgccagatccatcaccaccgtcgtgggctgcgctatggattattggggccagggaaccctggtcaccgtgtcctctacgcgtatccagaaccctgatcctgccgtgtaccagctgcgggatagcaagagcagcgacaagagcgtgtgtctgttcaccgacttcgacagccagaccaacgtgtcccagagcaaggactccgacgtgtacatcaccgataagtgcgtgctggacatgcggagcatggacttcaagagcaactccgccgtggcctggtccaacaagtccgatttcgcctgcgccaacgccttcaacaacagcattatccccgaggacacattcttcccaagccccgagagcagctgcggctttaccagcgagagctaccagcagggcgtgctgagcgccaccatcctgtacgagatcctgctgggcaaggccaccctgtacgccgtgctggtgtctgccctggtgctgatggctatggtcaagcggaaggacagccggggataa

SEQ ID NO: 36292 - DNA, 2271 bp, synthetic construct
  source 1..2271: mol_type = other DNA
atggccttaccagtgaccgccttgctcctgccgctggccttgctgctccacgccgccaggccggacatccagatgacacagagccctagcagcctgtctgccagcgtgggagacagagtgaccatcacatgcaaggccagcgaccacatcaacaactggctggcctggtatcagcagaagcctggcaaggcccctaagctgctgatctacggcgctaccacactggaaacaggcgtgcccagcagattttctggcagcggctctggcaccgacttcaccctgacaatatccagcctccagcctgaggacttcgccacctactactgtcagcagagctggaacaccccttggacattcggccagggcaccaaggtggaaatcaagagactcgaggacctgaagaacgtgttcccacctgaggtggccgtgttcgagcctagcgaggccgagatcagccacacccagaaagccaccctcgtgtgcctggctaccggcttctaccccgaccatgtggaactgtcttggtgggtcaacggcaaagaggtgcacagcggcgtgtgtaccgacccccagccactgaaagaacagcccgccctgaacgacagccggtactgcctgagcagcagactgagagtgtccgccaccttctggcagaacccccggaaccacttcagatgccaggtgcagttctacggcctgagcgagaacgacgagtggacccaggacagagccaagcccgtgacccagatcgtgtctgccgaagcctggggcagagccgattgcgacgtgaagctggtggaaaagagcttcgagacagacaccaacctgaacttccagaacctgagcgtgatcggcttcagaatcctgctgctgaaagtggccggctttaacctgctgatgaccctgcggctgtggtccagcagggccaagcgatctggatctggagcaacaaacttctcactactcaaacaagcaggtgacgtggaggagaatcccgggcctactagtgccaccatggactggatttggcgcatccttttccttgtcggcgctgctaccggcgcccattccgggcccgaagttcagctgctggaatctggcggaggactcgttcaacctggcggctctctgagactgagctgtgccgcttctggcttcagcttctctagctacgccctgagctgggttcgacaagctcccggaaagggccttgaatgggtgtccagcatcggcgagaatgacggcaccacagactatgccgatgccgtgaaaggccggtttaccatcagcagagacaattccaagaacacgctctatctgcaaatgaactccctgcgcgtggaagatacagccgtgtattattgcgtgaaggacggcatccactggggacagggaaccctggttacagtgtctagcggatccggcggcggaggatctggcggaggcggatctgggggcggaggctctttcgaagaagttcagctggttgaatctggcggcggactggttcaacctggcggatctctgagactgagctgtgccgcctctggctacgcctttagcaactactgggtcaactgggttcgacaggcccctggcaaaggactggaatgggtcgcccaaatctatcccggcgacggcgacaccaactacaacggcaagttcaagggcagattcaccatcagccgggacaacagcaagaacaccctgtacctccagatgaactccctgagagccgaggacaccgccgtgtactattgtgccagatccatcaccaccgtcgtgggctgcgctatggattattggggccagggaaccctggtcaccgtgtcctctacgcgtatccagaaccctgatcctgccgtgtaccagctgcgggatagcaagagcagcgacaagagcgtgtgtctgttcaccgacttcgacagccagaccaacgtgtcccagagcaaggactccgacgtgtacatcaccgataagtgcgtgctggacatgcggagcatggacttcaagagcaactccgccgtggcctggtccaacaagtccgatttcgcctgcgccaacgccttcaacaacagcattatccccgaggacacattcttcccaagccccgagagcagctgcggctttaccagcgagagctaccagcagggcgtgctgagcgccaccatcctgtacgagatcctgctgggcaaggccaccctgtacgccgtgctggtgtctgccctggtgctgatggctatggtcaagcggaaggacagccggggataa

SEQ ID NO: 36293 - DNA, 3378 bp, synthetic construct
  source 1..3378: mol_type = other DNA
atgggacccagactgctgttttgggctctgctgtgtctgctcggcacaggacctgttgaagctggcgtgacacagagccccacacacctgattaagaccagaggccagcaggccacactgagatgcagccctatcagcggccacaccagcgtgtactggtatcagcaggctctcggactgggcctccagttcctgctttggtacgacgagggcgaagagagaaaccggggcaacttccctcctcggttttccggcagacagttccccaactacagcagcgagctgaacgtgaacgccctggaactggaagatagcgccctgtacctgtgtgcctcttctcttggtggacctcgcggactggctggactgagaggggatgagcagtttttcggccctggcaccagactgaccgtgctggaaggtaccggcggaggcggatctggcggcggagaattcgacatccagatgacacagagccctagcagcctgtctgccagcgtgggagacagagtgaccatcacatgcaaggccagcgaccacatcaacaactggctggcctggtatcagcagaagcctggcaaggcccctaagctgctgatctacggcgctaccacactggaaacaggcgtgcccagcagattttctggcagcggctctggcaccgacttcaccctgacaatatccagcctccagcctgaggacttcgccacctactactgtcagcagagctggaacaccccttggacattcggccagggcaccaaggtggaaatcaagagactcgaggacctgaagaacgtgttcccacctgaggtggccgtgttcgagcctagcgaggccgagatcagccacacccagaaagccaccctcgtgtgcctggctaccggcttctaccccgaccatgtggaactgtcttggtgggtcaacggcaaagaggtgcacagcggcgtgtgtaccgacccccagccactgaaagaacagcccgccctgaacgacagccggtactgcctgagcagcagactgagagtgtccgccaccttctggcagaacccccggaaccacttcagatgccaggtgcagttctacggcctgagcgagaacgacgagtggacccaggacagagccaagcccgtgacccagatcgtgtctgccgaagcctggggcagagccgattgcgacgtgaagctggtggaaaagagcttcgagacagacaccaacctgaacttccagaacctgagcgtgatcggcttcagaatcctgctgctgaaagtggccggctttaacctgctgatgaccctgcggctgtggtccagcagggccaagcgatctggatctggagcaacaaacttctcactactcaaacaagcaggtgacgtggaggagaatcccgggcctactagtgccaccatggactggatttggcgcatccttttccttgtcggcgctgctaccggcgcccattccgggcccgaagtgcagctggttgaatctggcggaggactggttcaggctggcggatctctgagactgtcttgtgccgccagcggcagaacctttagcatgggctggtttagacaggcccctggcaaagagagagagttcgtcgccgccatcacatactctggcggcagcccttactacgccgactctgtgaagggcagattcaccatcagccgggacaacgccaagaacaccgtgtacctccagatgaacagcctgaagcctgaggacaccgccgtgtactactgcgccgccaatccaacatacggcagcgactggaacgccgagaattggggccagggaacccaagtgacagtgtctagcggatccggcggcggaggatctggcggaggcggatctgggggcggaggctctttcgaagaagttcagctggttgaatctggcggcggactggttcaacctggcggatctctgagactgagctgtgccgcctctggctacgcctttagcaactactgggtcaactgggttcgacaggcccctggcaaaggactggaatgggtcgcccaaatctatcccggcgacggcgacaccaactacaacggcaagttcaagggcagattcaccatcagccgggacaacagcaagaacaccctgtacctccagatgaactccctgagagccgaggacaccgccgtgtactattgtgccagatccatcaccaccgtcgtgggctgcgctatggattattggggccagggaaccctggtcaccgtgtcctctacgcgtatccagaaccctgatcctgccgtgtaccagctgcgggatagcaagagcagcgacaagagcgtgtgtctgttcaccgacttcgacagccagaccaacgtgtcccagagcaaggactccgacgtgtacatcaccgataagtgcgtgctggacatgcggagcatggacttcaagagcaactccgccgtggcctggtccaacaagtccgatttcgcctgcgccaacgccttcaacaacagcattatccccgaggacacattcttcccaagccccgagagcagctgcggctttaccagcgagagctaccagcagggcgtgctgagcgccaccatcctgtacgagatcctgctgggcaaggccaccctgtacgccgtgctggtgtctgccctggtgctgatggctatggtcaagcggaaggacagccggggacgcgccaagagaagcggatctggcgtgaagcagaccctgaatttcgacctgctgaagctggctggcgacgtggaatccaacccaggcccttctagaggccatatgaccgagtacaagcccacggtgcgcctcgccacccgcgacgacgtccccagggccgtacgcaccctcgccgccgcgttcgccgactaccccgccacgcgccacaccgtcgatccggaccgccacatcgagcgggtcaccgagctgcaagaactcttcctcacgcgcgtcgggctcgacatcggcaaggtgtgggtcgcggacgacggcgccgcggtggcggtctggaccacgccggagagcgtcgaagcgggggcggtgttcgccgagatcggcccgcgcatggccgagttgagcggttcccggctggccgcgcagcaacagatggaaggcctcctggcgccgcaccggcccaaggagcccgcgtggttcctggccaccgtcggcgtctcgcccgaccaccagggcaagggtctgggcagcgccgtcgtgctccccggagtggaggcggccgagcgcgccggggtgcccgccttcctggagacctccgcgccccgcaacctccccttctacgagcggctcggcttcaccgtcaccgccgacgtcgaggtgcccgaaggaccgcgcacctggtgcatgacccgcaagcccggtgcctga

SEQ ID NO: 36294 - DNA, 3375 bp, synthetic construct
  source 1..3375: mol_type = other DNA
atgggacccagactgctgttttgggctctgctgtgtctgctcggcacaggacctgttgaagctggcgtgacacagagccccacacacctgattaagaccagaggccagcaggccacactgagatgcagccctatcagcggccacaccagcgtgtactggtatcagcaggctctcggactgggcctccagttcctgctttggtacgacgagggcgaagagagaaaccggggcaacttccctcctcggttttccggcagacagttccccaactacagcagcgagctgaacgtgaacgccctggaactggaagatagcgccctgtacctgtgtgccagctctctcggcggagatgaactgggagccgatggcaacgagcagttctttggccctggcaccagactgaccgtgctggaaggtaccggcggaggcggatctggcggcggaagcgaattcgacatccagatgacacagagccctagcagcctgtctgccagcgtgggagacagagtgaccatcacatgcaaggccagcgaccacatcaacaactggctggcctggtatcagcagaagcctggcaaggcccctaagctgctgatctacggcgctaccacactggaaacaggcgtgcccagcagattttctggcagcggctctggcaccgacttcaccctgacaatatccagcctccagcctgaggacttcgccacctactactgtcagcagagctggaacaccccttggacattcggccagggcaccaaggtggaaatcaagagactcgaggacctgaagaacgtgttcccacctgaggtggccgtgttcgagcctagcgaggccgagatcagccacacccagaaagccaccctcgtgtgcctggctaccggcttctaccccgaccatgtggaactgtcttggtgggtcaacggcaaagaggtgcacagcggcgtgtgtaccgacccccagccactgaaagaacagcccgccctgaacgacagccggtactgcctgagcagcagactgagagtgtccgccaccttctggcagaacccccggaaccacttcagatgccaggtgcagttctacggcctgagcgagaacgacgagtggacccaggacagagccaagcccgtgacccagatcgtgtctgccgaagcctggggcagagccgattgcgacgtgaagctggtggaaaagagcttcgagacagacaccaacctgaacttccagaacctgagcgtgatcggcttcagaatcctgctgctgaaagtggccggctttaacctgctgatgaccctgcggctgtggtccagcagggccaagcgatctggatctggagcaacaaacttctcactactcaaacaagcaggtgacgtggaggagaatcccgggcctactagtgccaccatggactggatttggcgcatccttttccttgtcggcgctgctaccggcgcccattccgggcccgaagtgcagctggttgaatctggcggaggactggttcaggctggcggatctctgagactgtcttgtgccgccagcggcagaacctttagcatgggctggtttagacaggcccctggcaaagagagagagttcgtcgccgccatcacatactctggcggcagcccttactacgccgactctgtgaagggcagattcaccatcagccgggacaacgccaagaacaccgtgtacctccagatgaacagcctgaagcctgaggacaccgccgtgtactactgcgccgccaatccaacatacggcagcgactggaacgccgagaattggggccagggaacccaagtgacagtgtctagcggatccggcggcggaggatctggcggaggcggatctgggggcggaggctctttcgaagaagttcagctggttgaatctggcggcggactggttcaacctggcggatctctgagactgagctgtgccgcctctggctacgcctttagcaactactgggtcaactgggttcgacaggcccctggcaaaggactggaatgggtcgcccaaatctatcccggcgacggcgacaccaactacaacggcaagttcaagggcagattcaccatcagccgggacaacagcaagaacaccctgtacctccagatgaactccctgagagccgaggacaccgccgtgtactattgtgccagatccatcaccaccgtcgtgggctgcgctatggattattggggccagggaaccctggtcaccgtgtcctctacgcgtatccagaaccctgatcctgccgtgtaccagctgcgggatagcaagagcagcgacaagagcgtgtgtctgttcaccgacttcgacagccagaccaacgtgtcccagagcaaggactccgacgtgtacatcaccgataagtgcgtgctggacatgcggagcatggacttcaagagcaactccgccgtggcctggtccaacaagtccgatttcgcctgcgccaacgccttcaacaacagcattatccccgaggacacattcttcccaagccccgagagcagctgcggctttaccagcgagagctaccagcagggcgtgctgagcgccaccatcctgtacgagatcctgctgggcaaggccaccctgtacgccgtgctggtgtctgccctggtgctgatggctatggtcaagcggaaggacagccggggacgcgccaagagaagcggatctggcgtgaagcagaccctgaatttcgacctgctgaagctggctggcgacgtggaatccaacccaggcccttctagaggccatatgaccgagtacaagcccacggtgcgcctcgccacccgcgacgacgtccccagggccgtacgcaccctcgccgccgcgttcgccgactaccccgccacgcgccacaccgtcgatccggaccgccacatcgagcgggtcaccgagctgcaagaactcttcctcacgcgcgtcgggctcgacatcggcaaggtgtgggtcgcggacgacggcgccgcggtggcggtctggaccacgccggagagcgtcgaagcgggggcggtgttcgccgagatcggcccgcgcatggccgagttgagcggttcccggctggccgcgcagcaacagatggaaggcctcctggcgccgcaccggcccaaggagcccgcgtggttcctggccaccgtcggcgtctcgcccgaccaccagggcaagggtctgggcagcgccgtcgtgctccccggagtggaggcggccgagcgcgccggggtgcccgccttcctggagacctccgcgccccgcaacctccccttctacgagcggctcggcttcaccgtcaccgccgacgtcgaggtgcccgaaggaccgcgcacctggtgcatgacccgcaagcccggtgcctga

SEQ ID NO: 36295 - DNA, 2850 bp, synthetic construct
  source 1..2850: mol_type = other DNA
atggccttaccagtgaccgccttgctcctgccgctggccttgctgctccacgccgccaggccggacatccagatgacacagagccctagcagcctgtctgccagcgtgggagacagagtgaccatcacatgcaaggccagcgaccacatcaacaactggctggcctggtatcagcagaagcctggcaaggcccctaagctgctgatctacggcgctaccacactggaaacaggcgtgcccagcagattttctggcagcggctctggcaccgacttcaccctgacaatatccagcctccagcctgaggacttcgccacctactactgtcagcagagctggaacaccccttggacattcggccagggcaccaaggtggaaatcaagagactcgaggacctgaagaacgtgttcccacctgaggtggccgtgttcgagcctagcgaggccgagatcagccacacccagaaagccaccctcgtgtgcctggctaccggcttctaccccgaccatgtggaactgtcttggtgggtcaacggcaaagaggtgcacagcggcgtgtgtaccgacccccagccactgaaagaacagcccgccctgaacgacagccggtactgcctgagcagcagactgagagtgtccgccaccttctggcagaacccccggaaccacttcagatgccaggtgcagttctacggcctgagcgagaacgacgagtggacccaggacagagccaagcccgtgacccagatcgtgtctgccgaagcctggggcagagccgattgcgacgtgaagctggtggaaaagagcttcgagacagacaccaacctgaacttccagaacctgagcgtgatcggcttcagaatcctgctgctgaaagtggccggctttaacctgctgatgaccctgcggctgtggtccagcagggccaagcgatctggatctggagcaacaaacttctcactactcaaacaagcaggtgacgtggaggagaatcccgggcctactagtgccaccatggactggatttggcgcatccttttccttgtcggcgctgctaccggcgcccattccgggcccatgggaagctggcttgagttctaccacagactcaacgccattgacagcaggctgtgggcacttggcggaagcgaagctgaactcgccgcttttgaaaaagaaattgccgctttcgagtccgagcttcaggcttacaaaggcaaagggaatcctgaggtcgagagcctgagagatcacgctgcccacattagagagtggttgcaggcataccggcacaatggatccggcggcggaggatctggcggaggcggatctgggggcggaggctctttcgaagaagttcagctggttgaatctggcggcggactggttcaacctggcggatctctgagactgagctgtgccgcctctggctacgcctttagcaactactgggtcaactgggttcgacaggcccctggcaaaggactggaatgggtcgcccaaatctatcccggcgacggcgacaccaactacaacggcaagttcaagggcagattcaccatcagccgggacaacagcaagaacaccctgtacctccagatgaactccctgagagccgaggacaccgccgtgtactattgtgccagatccatcaccaccgtcgtgggctgcgctatggattattggggccagggaaccctggtcaccgtgtcctctacgcgtatccagaaccctgatcctgccgtgtaccagctgcgggatagcaagagcagcgacaagagcgtgtgtctgttcaccgacttcgacagccagaccaacgtgtcccagagcaaggactccgacgtgtacatcaccgataagtgcgtgctggacatgcggagcatggacttcaagagcaactccgccgtggcctggtccaacaagtccgatttcgcctgcgccaacgccttcaacaacagcattatccccgaggacacattcttcccaagccccgagagcagctgcggctttaccagcgagagctaccagcagggcgtgctgagcgccaccatcctgtacgagatcctgctgggcaaggccaccctgtacgccgtgctggtgtctgccctggtgctgatggctatggtcaagcggaaggacagccggggacgcgccaagagaagcggatctggcgtgaagcagaccctgaatttcgacctgctgaagctggctggcgacgtggaatccaacccaggcccttctagaggccatatgaccgagtacaagcccacggtgcgcctcgccacccgcgacgacgtccccagggccgtacgcaccctcgccgccgcgttcgccgactaccccgccacgcgccacaccgtcgatccggaccgccacatcgagcgggtcaccgagctgcaagaactcttcctcacgcgcgtcgggctcgacatcggcaaggtgtgggtcgcggacgacggcgccgcggtggcggtctggaccacgccggagagcgtcgaagcgggggcggtgttcgccgagatcggcccgcgcatggccgagttgagcggttcccggctggccgcgcagcaacagatggaaggcctcctggcgccgcaccggcccaaggagcccgcgtggttcctggccaccgtcggcgtctcgcccgaccaccagggcaagggtctgggcagcgccgtcgtgctccccggagtggaggcggccgagcgcgccggggtgcccgccttcctggagacctccgcgccccgcaacctccccttctacgagcggctcggcttcaccgtcaccgccgacgtcgaggtgcccgaaggaccgcgcacctggtgcatgacccgcaagcccggtgcctga

SEQ ID NO: 36296 - DNA, 2850 bp, synthetic construct
  source 1..2850: mol_type = other DNA
atggccttaccagtgaccgccttgctcctgccgctggccttgctgctccacgccgccaggccggcatgcatgggcagttggttcgagttctacgaccggctgaatgccatcgacgccagactgtgggctctcggaggatctgaagctgagctggccgccttcgagaaagagatcgccgcctttgagagcgagctgcaagcctacaaaggcaagggcaaccccgaggtggaaaacctgagagtgcacgccgctgccatcagagaatggctccaggcttacagacacaacggtaccggcggaggcggatctggcggcggaggtagcggtggcggaggatctgaattcgacatccagatgacacagagccctagcagcctgtctgccagcgtgggagacagagtgaccatcacatgcaaggccagcgaccacatcaacaactggctggcctggtatcagcagaagcctggcaaggcccctaagctgctgatctacggcgctaccacactggaaacaggcgtgcccagcagattttctggcagcggctctggcaccgacttcaccctgacaatatccagcctccagcctgaggacttcgccacctactactgtcagcagagctggaacaccccttggacattcggccagggcaccaaggtggaaatcaagagactcgaggacctgaagaacgtgttcccacctgaggtggccgtgttcgagcctagcgaggccgagatcagccacacccagaaagccaccctcgtgtgcctggctaccggcttctaccccgaccatgtggaactgtcttggtgggtcaacggcaaagaggtgcacagcggcgtgtgtaccgacccccagccactgaaagaacagcccgccctgaacgacagccggtactgcctgagcagcagactgagagtgtccgccaccttctggcagaacccccggaaccacttcagatgccaggtgcagttctacggcctgagcgagaacgacgagtggacccaggacagagccaagcccgtgacccagatcgtgtctgccgaagcctggggcagagccgattgcgacgtgaagctggtggaaaagagcttcgagacagacaccaacctgaacttccagaacctgagcgtgatcggcttcagaatcctgctgctgaaagtggccggctttaacctgctgatgaccctgcggctgtggtccagcagggccaagcgatctggatctggagcaacaaacttctcactactcaaacaagcaggtgacgtggaggagaatcccgggcctactagtatggactggatttggcgcatccttttccttgtcggcgctgctaccggcgcgcattccttcgaagaagttcagctggttgaatctggcggcggactggttcaacctggcggatctctgagactgagctgtgccgcctctggctacgcctttagcaactactgggtcaactgggttcgacaggcccctggcaaaggactggaatgggtcgcccaaatctatcccggcgacggcgacaccaactacaacggcaagttcaagggcagattcaccatcagccgggacaacagcaagaacaccctgtacctccagatgaactccctgagagccgaggacaccgccgtgtactattgtgccagatccatcaccaccgtcgtgggctgcgctatggattattggggccagggaaccctggtcaccgtgtcctctacgcgtatccagaaccctgatcctgccgtgtaccagctgcgggatagcaagagcagcgacaagagcgtgtgtctgttcaccgacttcgacagccagaccaacgtgtcccagagcaaggactccgacgtgtacatcaccgataagtgcgtgctggacatgcggagcatggacttcaagagcaactccgccgtggcctggtccaacaagtccgatttcgcctgcgccaacgccttcaacaacagcattatccccgaggacacattcttcccaagccccgagagcagctgcggctttaccagcgagagctaccagcagggcgtgctgagcgccaccatcctgtacgagatcctgctgggcaaggccaccctgtacgccgtgctggtgtctgccctggtgctgatggctatggtcaagcggaaggacagccggggacgcgccaagagaagcggatctggcgtgaagcagaccctgaatttcgacctgctgaagctggctggcgacgtggaatccaacccaggcccttctagaggccatatgaccgagtacaagcccacggtgcgcctcgccacccgcgacgacgtccccagggccgtacgcaccctcgccgccgcgttcgccgactaccccgccacgcgccacaccgtcgatccggaccgccacatcgagcgggtcaccgagctgcaagaactcttcctcacgcgcgtcgggctcgacatcggcaaggtgtgggtcgcggacgacggcgccgcggtggcggtctggaccacgccggagagcgtcgaagcgggggcggtgttcgccgagatcggcccgcgcatggccgagttgagcggttcccggctggccgcgcagcaacagatggaaggcctcctggcgccgcaccggcccaaggagcccgcgtggttcctggccaccgtcggcgtctcgcccgaccaccagggcaagggtctgggcagcgccgtcgtgctccccggagtggaggcggccgagcgcgccggggtgcccgccttcctggagacctccgcgccccgcaacctccccttctacgagcggctcggcttcaccgtcaccgccgacgtcgaggtgcccgaaggaccgcgcacctggtgcatgacccgcaagcccggtgcctga

SEQ ID NO: 36297 - DNA, 3201 bp, synthetic construct
  source 1..3201: mol_type = other DNA
atggccttaccagtgaccgccttgctcctgccgctggccttgctgctccacgccgccaggccggcatgcatggaccccgacctggaaatcagagccgccttcctgcggcagagaaacacagccctgagaacagaggtggccgagctggaacaagaggtgcagcggctggaaaacgaggtgtcccagtacgagacaagatacggccctctcggaggcggaaaaggtaccggcggaggcggatctggcggcggaggtagcggtggcggaggatctgaattcgacatccagatgacacagagccctagcagcctgtctgccagcgtgggagacagagtgaccatcacatgcaaggccagcgaccacatcaacaactggctggcctggtatcagcagaagcctggcaaggcccctaagctgctgatctacggcgctaccacactggaaacaggcgtgcccagcagattttctggcagcggctctggcaccgacttcaccctgacaatatccagcctccagcctgaggacttcgccacctactactgtcagcagagctggaacaccccttggacattcggccagggcaccaaggtggaaatcaagagactcgaggacctgaagaacgtgttcccacctgaggtggccgtgttcgagcctagcgaggccgagatcagccacacccagaaagccaccctcgtgtgcctggctaccggcttctaccccgaccatgtggaactgtcttggtgggtcaacggcaaagaggtgcacagcggcgtgtgtaccgacccccagccactgaaagaacagcccgccctgaacgacagccggtactgcctgagcagcagactgagagtgtccgccaccttctggcagaacccccggaaccacttcagatgccaggtgcagttctacggcctgagcgagaacgacgagtggacccaggacagagccaagcccgtgacccagatcgtgtctgccgaagcctggggcagagccgattgcgacgtgaagctggtggaaaagagcttcgagacagacaccaacctgaacttccagaacctgagcgtgatcggcttcagaatcctgctgctgaaagtggccggctttaacctgctgatgaccctgcggctgtggtccagcagggccaagcgatctggatctggagcaacaaacttctcactactcaaacaagcaggtgacgtggaggagaatcccgggcctactagtgccaccatggactggatttggcgcatccttttccttgtcggcgctgctaccggcgcccattccgggcccgaagtgcagctggttgaatctggcggaggactggttcaggctggcggatctctgagactgtcttgtgccgccagcggcagaacctttagcatgggctggtttagacaggcccctggcaaagagagagagttcgtcgccgccatcacatactctggcggcagcccttactacgccgactctgtgaagggcagattcaccatcagccgggacaacgccaagaacaccgtgtacctccagatgaacagcctgaagcctgaggacaccgccgtgtactactgcgccgccaatccaacatacggcagcgactggaacgccgagaattggggccagggaacccaagtgacagtgtctagcggatccggcggcggaggatctggcggaggcggatctgggggcggaggctctttcgaagaagttcagctggttgaatctggcggcggactggttcaacctggcggatctctgagactgagctgtgccgcctctggctacgcctttagcaactactgggtcaactgggttcgacaggcccctggcaaaggactggaatgggtcgcccaaatctatcccggcgacggcgacaccaactacaacggcaagttcaagggcagattcaccatcagccgggacaacagcaagaacaccctgtacctccagatgaactccctgagagccgaggacaccgccgtgtactattgtgccagatccatcaccaccgtcgtgggctgcgctatggattattggggccagggaaccctggtcaccgtgtcctctacgcgtatccagaaccctgatcctgccgtgtaccagctgcgggatagcaagagcagcgacaagagcgtgtgtctgttcaccgacttcgacagccagaccaacgtgtcccagagcaaggactccgacgtgtacatcaccgataagtgcgtgctggacatgcggagcatggacttcaagagcaactccgccgtggcctggtccaacaagtccgatttcgcctgcgccaacgccttcaacaacagcattatccccgaggacacattcttcccaagccccgagagcagctgcggctttaccagcgagagctaccagcagggcgtgctgagcgccaccatcctgtacgagatcctgctgggcaaggccaccctgtacgccgtgctggtgtctgccctggtgctgatggctatggtcaagcggaaggacagccggggacgcgccaagagaagcggatctggcgtgaagcagaccctgaatttcgacctgctgaagctggctggcgacgtggaatccaacccaggcccttctagaggccatatgaccgagtacaagcccacggtgcgcctcgccacccgcgacgacgtccccagggccgtacgcaccctcgccgccgcgttcgccgactaccccgccacgcgccacaccgtcgatccggaccgccacatcgagcgggtcaccgagctgcaagaactcttcctcacgcgcgtcgggctcgacatcggcaaggtgtgggtcgcggacgacggcgccgcggtggcggtctggaccacgccggagagcgtcgaagcgggggcggtgttcgccgagatcggcccgcgcatggccgagttgagcggttcccggctggccgcgcagcaacagatggaaggcctcctggcgccgcaccggcccaaggagcccgcgtggttcctggccaccgtcggcgtctcgcccgaccaccagggcaagggtctgggcagcgccgtcgtgctccccggagtggaggcggccgagcgcgccggggtgcccgccttcctggagacctccgcgccccgcaacctccccttctacgagcggctcggcttcaccgtcaccgccgacgtcgaggtgcccgaaggaccgcgcacctggtgcatgacccgcaagcccggtgcctga

SEQ ID NO: 36298 - DNA, 2850 bp, synthetic construct
  source 1..2850: mol_type = other DNA
atggccttaccagtgaccgccttgctcctgccgctggccttgctgctccacgccgccaggccggacatccagatgacacagagccctagcagcctgtctgccagcgtgggagacagagtgaccatcacatgcaaggccagcgaccacatcaacaactggctggcctggtatcagcagaagcctggcaaggcccctaagctgctgatctacggcgctaccacactggaaacaggcgtgcccagcagattttctggcagcggctctggcaccgacttcaccctgacaatatccagcctccagcctgaggacttcgccacctactactgtcagcagagctggaacaccccttggacattcggccagggcaccaaggtggaaatcaagagactcgaggacctgaagaacgtgttcccacctgaggtggccgtgttcgagcctagcgaggccgagatcagccacacccagaaagccaccctcgtgtgcctggctaccggcttctaccccgaccatgtggaactgtcttggtgggtcaacggcaaagaggtgcacagcggcgtgtgtaccgacccccagccactgaaagaacagcccgccctgaacgacagccggtactgcctgagcagcagactgagagtgtccgccaccttctggcagaacccccggaaccacttcagatgccaggtgcagttctacggcctgagcgagaacgacgagtggacccaggacagagccaagcccgtgacccagatcgtgtctgccgaagcctggggcagagccgattgcgacgtgaagctggtggaaaagagcttcgagacagacaccaacctgaacttccagaacctgagcgtgatcggcttcagaatcctgctgctgaaagtggccggctttaacctgctgatgaccctgcggctgtggtccagcagggccaagcgatctggatctggagcaacaaacttctcactactcaaacaagcaggtgacgtggaggagaatcccgggcctactagtgccaccatggactggatttggcgcatccttttccttgtcggcgctgctaccggcgcccattccgggcccatgggatcttggagcgagttttacgatcggctgcacgccattcaccaccggctgtatgctctcggaggaagcgaagctgagctggccgcttttgaaaaagaaattgccgctttcgagtccgagcttcaggcttacaaaggcaaagggaatcctgaggtcgaggccctgagagataccgccgccttcatcagaacccggttgcaggcataccggcacaacggatccggcggcggaggatctggcggaggcggatctgggggcggaggctctttcgaagaagttcagctggttgaatctggcggcggactggttcaacctggcggatctctgagactgagctgtgccgcctctggctacgcctttagcaactactgggtcaactgggttcgacaggcccctggcaaaggactggaatgggtcgcccaaatctatcccggcgacggcgacaccaactacaacggcaagttcaagggcagattcaccatcagccgggacaacagcaagaacaccctgtacctccagatgaactccctgagagccgaggacaccgccgtgtactattgtgccagatccatcaccaccgtcgtgggctgcgctatggattattggggccagggaaccctggtcaccgtgtcctctacgcgtatccagaaccctgatcctgccgtgtaccagctgcgggatagcaagagcagcgacaagagcgtgtgtctgttcaccgacttcgacagccagaccaacgtgtcccagagcaaggactccgacgtgtacatcaccgataagtgcgtgctggacatgcggagcatggacttcaagagcaactccgccgtggcctggtccaacaagtccgatttcgcctgcgccaacgccttcaacaacagcattatccccgaggacacattcttcccaagccccgagagcagctgcggctttaccagcgagagctaccagcagggcgtgctgagcgccaccatcctgtacgagatcctgctgggcaaggccaccctgtacgccgtgctggtgtctgccctggtgctgatggctatggtcaagcggaaggacagccggggacgcgccaagagaagcggatctggcgtgaagcagaccctgaatttcgacctgctgaagctggctggcgacgtggaatccaacccaggcccttctagaggccatatgaccgagtacaagcccacggtgcgcctcgccacccgcgacgacgtccccagggccgtacgcaccctcgccgccgcgttcgccgactaccccgccacgcgccacaccgtcgatccggaccgccacatcgagcgggtcaccgagctgcaagaactcttcctcacgcgcgtcgggctcgacatcggcaaggtgtgggtcgcggacgacggcgccgcggtggcggtctggaccacgccggagagcgtcgaagcgggggcggtgttcgccgagatcggcccgcgcatggccgagttgagcggttcccggctggccgcgcagcaacagatggaaggcctcctggcgccgcaccggcccaaggagcccgcgtggttcctggccaccgtcggcgtctcgcccgaccaccagggcaagggtctgggcagcgccgtcgtgctccccggagtggaggcggccgagcgcgccggggtgcccgccttcctggagacctccgcgccccgcaacctccccttctacgagcggctcggcttcaccgtcaccgccgacgtcgaggtgcccgaaggaccgcgcacctggtgcatgacccgcaagcccggtgcctga

SEQ ID NO: 36299 - DNA, 3480 bp, synthetic construct
  source 1..3480: mol_type = other DNA
atggccttaccagtgaccgccttgctcctgccgctggccttgctgctccacgccgccaggccggacatccagatgacacagagccctagcagcctgtctgccagcgtgggagacagagtgaccatcacatgcaaggccagcgaccacatcaacaactggctggcctggtatcagcagaagcctggcaaggcccctaagctgctgatctacggcgctaccacactggaaacaggcgtgcccagcagattttctggcagcggctctggcaccgacttcaccctgacaatatccagcctccagcctgaggacttcgccacctactactgtcagcagagctggaacaccccttggacattcggccagggcaccaaggtggaaatcaagagactcgaggacctgaagaacgtgttcccacctgaggtggccgtgttcgagcctagcgaggccgagatcagccacacccagaaagccaccctcgtgtgcctggctaccggcttctaccccgaccatgtggaactgtcttggtgggtcaacggcaaagaggtgcacagcggcgtgtgtaccgacccccagccactgaaagaacagcccgccctgaacgacagccggtactgcctgagcagcagactgagagtgtccgccaccttctggcagaacccccggaaccacttcagatgccaggtgcagttctacggcctgagcgagaacgacgagtggacccaggacagagccaagcccgtgacccagatcgtgtctgccgaagcctggggcagagccgattgcgacgtgaagctggtggaaaagagcttcgagacagacaccaacctgaacttccagaacctgagcgtgatcggcttcagaatcctgctgctgaaagtggccggctttaacctgctgatgaccctgcggctgtggtccagcagggccaagcgatctggatctggagcaacaaacttctcactactcaaacaagcaggtgacgtggaggagaatcccgggcctactagtaccatggactggatttggcgcatccttttccttgtcggcgctgctaccggcgcccattccctgttcaatcaagaggtgcagatccctctgaccgagagctactgtggcccctgtcctaagaactggatctgctacaagaacaactgctaccagttcttcgacgagagcaagaattggtacgagagccaggccagctgcatgagccagaatgccagcctgctgaaggtgtacagcaaagaggaccaggacctgctgaaactggtcaagagcgcccactggatgggccttgtgcacatccccaccaatggctcttggcagtgggaggacggcagcattctgagccctaacctgctgaccatcatcgagatgcagaagggcgactgcgccctgtacgccagcagctttaagggctacatcgagaattgcagcaccccgaacacctacatctgtatgcagagaaccgtttctggcggaggcggctctggaggaggcggaagtggcggcggaggcgacctctttaatcaagaagtccagattccactcaccgaatcctactgcggaccttgtccaaaaaattggatttgttataagaacaactgttatcaattctttgatgagtctaaaaattggtatgagtcccaggcttcctgcatgtctcagaacgcttctctgctgaaagtctactctaaagaagatcaggatctcctgaagctcgtcaagtctgcccattggatggggctcgtccacattcctaccaacggaagctggcaatgggaagatggctccatcctgtctccaaatctgctcacgattattgaaatgcagaaaggggattgtgctctctacgccagctccttcaagggatatattgagaactgtagcacgcccaatacttatatctgtatgcaacggaccgtgggatccggcggcggaggatctggcggaggcggatctgggggcggaggctctttcgaagaagttcagctggttgaatctggcggcggactggttcaacctggcggatctctgagactgagctgtgccgcctctggctacgcctttagcaactactgggtcaactgggttcgacaggcccctggcaaaggactggaatgggtcgcccaaatctatcccggcgacggcgacaccaactacaacggcaagttcaagggcagattcaccatcagccgggacaacagcaagaacaccctgtacctccagatgaactccctgagagccgaggacaccgccgtgtactattgtgccagatccatcaccaccgtcgtgggctgcgctatggattattggggccagggaaccctggtcaccgtgtcctctacgcgtatccagaaccctgatcctgccgtgtaccagctgcgggatagcaagagcagcgacaagagcgtgtgtctgttcaccgacttcgacagccagaccaacgtgtcccagagcaaggactccgacgtgtacatcaccgataagtgcgtgctggacatgcggagcatggacttcaagagcaactccgccgtggcctggtccaacaagtccgatttcgcctgcgccaacgccttcaacaacagcattatccccgaggacacattcttcccaagccccgagagcagctgcggctttaccagcgagagctaccagcagggcgtgctgagcgccaccatcctgtacgagatcctgctgggcaaggccaccctgtacgccgtgctggtgtctgccctggtgctgatggctatggtcaagcggaaggacagccggggacgcgccaagagaagcggatctggcgtgaagcagaccctgaatttcgacctgctgaagctggctggcgacgtggaatccaacccaggcccttctagaggccatatgaccgagtacaagcccacggtgcgcctcgccacccgcgacgacgtccccagggccgtacgcaccctcgccgccgcgttcgccgactaccccgccacgcgccacaccgtcgatccggaccgccacatcgagcgggtcaccgagctgcaagaactcttcctcacgcgcgtcgggctcgacatcggcaaggtgtgggtcgcggacgacggcgccgcggtggcggtctggaccacgccggagagcgtcgaagcgggggcggtgttcgccgagatcggcccgcgcatggccgagttgagcggttcccggctggccgcgcagcaacagatggaaggcctcctggcgccgcaccggcccaaggagcccgcgtggttcctggccaccgtcggcgtctcgcccgaccaccagggcaagggtctgggcagcgccgtcgtgctccccggagtggaggcggccgagcgcgccggggtgcccgccttcctggagacctccgcgccccgcaacctccccttctacgagcggctcggcttcaccgtcaccgccgacgtcgaggtgcccgaaggaccgcgcacctggtgcatgacccgcaagcccggtgcctga

SEQ ID NO: 36300 - DNA, 1866 bp, synthetic construct
  source 1..1866: mol_type = other DNA
atggccttaccagtgaccgccttgctcctgccgctggccttgctgctccacgccgccaggccggacatccagatgacacagagccctagcagcctgtctgccagcgtgggagacagagtgaccatcacatgcaaggccagcgaccacatcaacaactggctggcctggtatcagcagaagcctggcaaggcccctaagctgctgatctacggcgctaccacactggaaacaggcgtgcccagcagattttctggcagcggctctggcaccgacttcaccctgacaatatccagcctccagcctgaggacttcgccacctactactgtcagcagagctggaacaccccttggacattcggccagggcaccaaggtggaaatcaagagactcgaggacctgaagaacgtgttcccacctgaggtggccgtgttcgagcctagcgaggccgagatcagccacacccagaaagccaccctcgtgtgcctggctaccggcttctaccccgaccatgtggaactgtcttggtgggtcaacggcaaagaggtgcacagcggcgtgtgtaccgacccccagccactgaaagaacagcccgccctgaacgacagccggtactgcctgagcagcagactgagagtgtccgccaccttctggcagaacccccggaaccacttcagatgccaggtgcagttctacggcctgagcgagaacgacgagtggacccaggacagagccaagcccgtgacccagatcgtgtctgccgaagcctggggcagagccgattgcggctttaccagcgagagctaccagcagggcgtgctgagcgccaccaacctgagcgtgatcggcttcagaatcctgctgctgaaagtggccggctttaacctgctgatgaccctgcggctgtggtccagcagggccaagcgatctggatctggagcaacaaacttctcactactcaaacaagcaggtgacgtggaggagaatcccgggcctactagtatggactggatttggcgcatccttttccttgtcggcgctgctaccggcgcgcattccttcgaagaagttcagctggttgaatctggcggcggactggttcaacctggcggatctctgagactgagctgtgccgcctctggctacgcctttagcaactactgggtcaactgggttcgacaggcccctggcaaaggactggaatgggtcgcccaaatctatcccggcgacggcgacaccaactacaacggcaagttcaagggcagattcaccatcagccgggacaacagcaagaacaccctgtacctccagatgaactccctgagagccgaggacaccgccgtgtactattgtgccagatccatcaccaccgtcgtgggctgcgctatggattattggggccagggaaccctggtcaccgtgtcctctacgcgtatccagaaccctgatcctgccgtgtaccagctgcgggatagcaagagcagcgacaagagcgtgtgtctgttcaccgacttcgacagccagaccaacgtgtcccagagcaaggactccgacgtgtacatcaccgataagtgcgtgctggacatgcggagcatggacttcaagagcaactccgccgtggcctggtccaacaagtccgatttcgcctgcgccaacgccttcaacaacagcattatccccgaggacacattcttcccaagccccgagagcagctgcgacgtgaagctggtggaaaagagcttcgagacagacaccaacctgaacttccagatcctgtacgagatcctgctgggcaaggccaccctgtacgccgtgctggtgtctgccctggtgctgatggctatggtcaagcggaaggacagccgggga

SEQ ID NO: 36301 - DNA, 1878 bp, synthetic construct
  source 1..1878: mol_type = other DNA
atggccttaccagtgaccgccttgctcctgccgctggccttgctgctccacgccgccaggccggacatccagatgacacagagccctagcagcctgtctgccagcgtgggagacagagtgaccatcacatgcaaggccagcgaccacatcaacaactggctggcctggtatcagcagaagcctggcaaggcccctaagctgctgatctacggcgctaccacactggaaacaggcgtgcccagcagattttctggcagcggctctggcaccgacttcaccctgacaatatccagcctccagcctgaggacttcgccacctactactgtcagcagagctggaacaccccttggacattcggccagggcaccaaggtggaaatcaagagactcgagatccagaaccctgatcctgccgtgtaccagctgcgggatagcaagagcagcgacaagagcgtgtgtctgttcaccgacttcgacagccagaccaacgtgtcccagagcaaggactccgacgtgtacatcaccgataagtgcgtgctggacatgcggagcatggacttcaagagcaactccgccgtggcctggtccaacaagtccgatttcgcctgcgccaacgccttcaacaacagcattatccccgaggacacattcttcccaagccccgagagcagctgcgacgtgaagctggtggaaaagagcttcgagacagacaccaacctgaacttccagatcctgtacgagatcctgctgggcaaggccaccctgtacgccgtgctggtgtctgccctggtgctgatggctatggtcaagcggaaggacagccggggacgcgccaagagaagcggatctggcgtgaagcagaccctgaatttcgacctgctgaagctggctggcgacgtggaatccaacccaggccctactagtatggactggatttggcgcatccttttccttgtcggcgctgctaccggcgcgcattccttcgaagaagttcagctggttgaatctggcggcggactggttcaacctggcggatctctgagactgagctgtgccgcctctggctacgcctttagcaactactgggtcaactgggttcgacaggcccctggcaaaggactggaatgggtcgcccaaatctatcccggcgacggcgacaccaactacaacggcaagttcaagggcagattcaccatcagccgggacaacagcaagaacaccctgtacctccagatgaactccctgagagccgaggacaccgccgtgtactattgtgccagatccatcaccaccgtcgtgggctgcgctatggattattggggccagggaaccctggtcaccgtgtcctctacgcgtgaggacctgaagaacgtgttcccacctgaggtggccgtgttcgagcctagcgaggccgagatcagccacacccagaaagccaccctcgtgtgcctggctaccggcttctaccccgaccatgtggaactgtcttggtgggtcaacggcaaagaggtgcacagcggcgtgtgtaccgacccccagccactgaaagaacagcccgccctgaacgacagccggtactgcctgagcagcagactgagagtgtccgccaccttctggcagaacccccggaaccacttcagatgccaggtgcagttctacggcctgagcgagaacgacgagtggacccaggacagagccaagcccgtgacccagatcgtgtctgccgaagcctggggcagagccgattgcggctttaccagcgagagctaccagcagggcgtgctgagcgccaccaacctgagcgtgatcggcttcagaatcctgctgctgaaagtggccggctttaacctgctgatgaccctgcggctgtggtccagc

SEQ ID NO: 36302 - DNA, 2271 bp, synthetic construct
  source 1..2271: mol_type = other DNA
atggccttaccagtgaccgccttgctcctgccgctggccttgctgctccacgccgccaggccggaagtgcagctggttgaatctggcggaggactggttcagcctggcggatctctgagactgtcttgtgccgccagcggcttcagcttcagcgacttttggatgagctgggtccgacaggcccctggcaaaggacttgaatgggtcgccacaatcagccaggccggcagcgagaaggactacgtggactctgtgaagggcagattcaccatcagccgggacaacgccaagaagtccctgtacctccagatgaacagcctgagagccgaggacaccgccgtgtactattgtgcctctggcgtgtacagcttcgactacagaggccagggcaccctggtcacagtctcttctggtaccggcggaggcggatctggcggcggaggtagcggtggcggaggatctgaattcgacatccagatgacacagagccctagcagcctgtctgccagcgtgggagacagagtgaccatcacatgcaaggccagcgaccacatcaacaactggctggcctggtatcagcagaagcctggcaaggcccctaagctgctgatctacggcgctaccacactggaaacaggcgtgcccagcagattttctggcagcggctctggcaccgacttcaccctgacaatatccagcctccagcctgaggacttcgccacctactactgtcagcagagctggaacaccccttggacattcggccagggcaccaaggtggaaatcaagagactcgaggacctgaagaacgtgttcccacctgaggtggccgtgttcgagcctagcgaggccgagatcagccacacccagaaagccaccctcgtgtgcctggctaccggcttctaccccgaccatgtggaactgtcttggtgggtcaacggcaaagaggtgcacagcggcgtgtgtaccgacccccagccactgaaagaacagcccgccctgaacgacagccggtactgcctgagcagcagactgagagtgtccgccaccttctggcagaacccccggaaccacttcagatgccaggtgcagttctacggcctgagcgagaacgacgagtggacccaggacagagccaagcccgtgacccagatcgtgtctgccgaagcctggggcagagccgattgcggctttaccagcgagagctaccagcagggcgtgctgagcgccaccaacctgagcgtgatcggcttcagaatcctgctgctgaaagtggccggctttaacctgctgatgaccctgcggctgtggtccagcagggccaagcgatctggatctggagcaacaaacttctcactactcaaacaagcaggtgacgtggaggagaatcccgggcctactagtatggactggatttggcgcatccttttccttgtcggcgctgctaccggcgcgcattccttcgaagaagttcagctggttgaatctggcggcggactggttcaacctggcggatctctgagactgagctgtgccgcctctggctacgcctttagcaactactgggtcaactgggttcgacaggcccctggcaaaggactggaatgggtcgcccaaatctatcccggcgacggcgacaccaactacaacggcaagttcaagggcagattcaccatcagccgggacaacagcaagaacaccctgtacctccagatgaactccctgagagccgaggacaccgccgtgtactattgtgccagatccatcaccaccgtcgtgggctgcgctatggattattggggccagggaaccctggtcaccgtgtcctctacgcgtatccagaaccctgatcctgccgtgtaccagctgcgggatagcaagagcagcgacaagagcgtgtgtctgttcaccgacttcgacagccagaccaacgtgtcccagagcaaggactccgacgtgtacatcaccgataagtgcgtgctggacatgcggagcatggacttcaagagcaactccgccgtggcctggtccaacaagtccgatttcgcctgcgccaacgccttcaacaacagcattatccccgaggacacattcttcccaagccccgagagcagctgcgacgtgaagctggtggaaaagagcttcgagacagacaccaacctgaacttccagatcctgtacgagatcctgctgggcaaggccaccctgtacgccgtgctggtgtctgccctggtgctgatggctatggtcaagcggaaggacagccgggga

SEQ ID NO: 36303 - DNA, 2283 bp, synthetic construct
  source 1..2283: mol_type = other DNA
atggccttaccagtgaccgccttgctcctgccgctggccttgctgctccacgccgccaggccggaagtgcagctggttgaatctggcggaggactggttcagcctggcggatctctgagactgtcttgtgccgccagcggcttcagcttcagcgacttttggatgagctgggtccgacaggcccctggcaaaggacttgaatgggtcgccacaatcagccaggccggcagcgagaaggactacgtggactctgtgaagggcagattcaccatcagccgggacaacgccaagaagtccctgtacctccagatgaacagcctgagagccgaggacaccgccgtgtactattgtgcctctggcgtgtacagcttcgactacagaggccagggcaccctggtcacagtctcttctggtaccggcggaggcggatctggcggcggaggtagcggtggcggaggatctgaattcgacatccagatgacacagagccctagcagcctgtctgccagcgtgggagacagagtgaccatcacatgcaaggccagcgaccacatcaacaactggctggcctggtatcagcagaagcctggcaaggcccctaagctgctgatctacggcgctaccacactggaaacaggcgtgcccagcagattttctggcagcggctctggcaccgacttcaccctgacaatatccagcctccagcctgaggacttcgccacctactactgtcagcagagctggaacaccccttggacattcggccagggcaccaaggtggaaatcaagagactcgagatccagaaccctgatcctgccgtgtaccagctgcgggatagcaagagcagcgacaagagcgtgtgtctgttcaccgacttcgacagccagaccaacgtgtcccagagcaaggactccgacgtgtacatcaccgataagtgcgtgctggacatgcggagcatggacttcaagagcaactccgccgtggcctggtccaacaagtccgatttcgcctgcgccaacgccttcaacaacagcattatccccgaggacacattcttcccaagccccgagagcagctgcgacgtgaagctggtggaaaagagcttcgagacagacaccaacctgaacttccagatcctgtacgagatcctgctgggcaaggccaccctgtacgccgtgctggtgtctgccctggtgctgatggctatggtcaagcggaaggacagccggggacgcgccaagagaagcggatctggcgtgaagcagaccctgaatttcgacctgctgaagctggctggcgacgtggaatccaacccaggccctactagtatggactggatttggcgcatccttttccttgtcggcgctgctaccggcgcgcattccttcgaagaagttcagctggttgaatctggcggcggactggttcaacctggcggatctctgagactgagctgtgccgcctctggctacgcctttagcaactactgggtcaactgggttcgacaggcccctggcaaaggactggaatgggtcgcccaaatctatcccggcgacggcgacaccaactacaacggcaagttcaagggcagattcaccatcagccgggacaacagcaagaacaccctgtacctccagatgaactccctgagagccgaggacaccgccgtgtactattgtgccagatccatcaccaccgtcgtgggctgcgctatggattattggggccagggaaccctggtcaccgtgtcctctacgcgtgaggacctgaagaacgtgttcccacctgaggtggccgtgttcgagcctagcgaggccgagatcagccacacccagaaagccaccctcgtgtgcctggctaccggcttctaccccgaccatgtggaactgtcttggtgggtcaacggcaaagaggtgcacagcggcgtgtgtaccgacccccagccactgaaagaacagcccgccctgaacgacagccggtactgcctgagcagcagactgagagtgtccgccaccttctggcagaacccccggaaccacttcagatgccaggtgcagttctacggcctgagcgagaacgacgagtggacccaggacagagccaagcccgtgacccagatcgtgtctgccgaagcctggggcagagccgattgcggctttaccagcgagagctaccagcagggcgtgctgagcgccaccaacctgagcgtgatcggcttcagaatcctgctgctgaaagtggccggctttaacctgctgatgaccctgcggctgtggtccagc

SEQ ID NO: 36304 - DNA, 2682 bp, synthetic construct
  source 1..2682: mol_type = other DNA
atggccttaccagtgaccgccttgctcctgccgctggccttgctgctccacgccgccaggccggaagtgcagctggttgaatctggcggaggactggttcagcctggcggatctctgagactgtcttgtgccgccagcggcttcagcttcagcgacttttggatgagctgggtccgacaggcccctggcaaaggacttgaatgggtcgccacaatcagccaggccggcagcgagaaggactacgtggactctgtgaagggcagattcaccatcagccgggacaacgccaagaagtccctgtacctccagatgaacagcctgagagccgaggacaccgccgtgtactattgtgcctctggcgtgtacagcttcgactacagaggccagggcaccctggtcacagtctcttctggtaccggcggaggcggatctggcggcggaggtagcggtggcggaggatctgaattcgacatccagatgacacagagccctagcagcctgtctgccagcgtgggagacagagtgaccatcacatgcaaggccagcgaccacatcaacaactggctggcctggtatcagcagaagcctggcaaggcccctaagctgctgatctacggcgctaccacactggaaacaggcgtgcccagcagattttctggcagcggctctggcaccgacttcaccctgacaatatccagcctccagcctgaggacttcgccacctactactgtcagcagagctggaacaccccttggacattcggccagggcaccaaggtggaaatcaagagactcgaggacctgaagaacgtgttcccacctgaggtggccgtgttcgagcctagcgaggccgagatcagccacacccagaaagccaccctcgtgtgcctggctaccggcttctaccccgaccatgtggaactgtcttggtgggtcaacggcaaagaggtgcacagcggcgtgtgtaccgacccccagccactgaaagaacagcccgccctgaacgacagccggtactgcctgagcagcagactgagagtgtccgccaccttctggcagaacccccggaaccacttcagatgccaggtgcagttctacggcctgagcgagaacgacgagtggacccaggacagagccaagcccgtgacccagatcgtgtctgccgaagcctggggcagagccgattgcggctttaccagcgagagctaccagcagggcgtgctgagcgccaccaacctgagcgtgatcggcttcagaatcctgctgctgaaagtggccggctttaacctgctgatgaccctgcggctgtggtccagcagggccaagcgatctggatctggagcaacaaacttctcactactcaaacaagcaggtgacgtggaggagaatcccgggcctactagtatggactggatttggcgcatccttttccttgtcggcgctgctaccggcgcgcattccgggccccagctccagctgcaagagtctggacctggcctggtcaagcctagcgagacactgagcctgacctgtaccgtgtccggcgatagcatcagcagcggcgattactactggggctggatcagacagcctcctggcaaaggactggaatggatcggccacatctactacagcggcgtgacctactacaaccccagcctgaagtccagagtgaccatcagcgtggacaccagccggaaccagttctccctgaagctgtctagcgtgacagccgccgataccgccgtgtactactgcaccagagaggacagcagcaactggcggagtagaggccagggaacactggtcacagttagctctggatccggcggaggcggaagtggaggcggaggatctggcggcggaggctctttcgaagaagttcagctggttgaatctggcggcggactggttcaacctggcggatctctgagactgagctgtgccgcctctggctacgcctttagcaactactgggtcaactgggttcgacaggcccctggcaaaggactggaatgggtcgcccaaatctatcccggcgacggcgacaccaactacaacggcaagttcaagggcagattcaccatcagccgggacaacagcaagaacaccctgtacctccagatgaactccctgagagccgaggacaccgccgtgtactattgtgccagatccatcaccaccgtcgtgggctgcgctatggattattggggccagggaaccctggtcaccgtgtcctctacgcgtatccagaaccctgatcctgccgtgtaccagctgcgggatagcaagagcagcgacaagagcgtgtgtctgttcaccgacttcgacagccagaccaacgtgtcccagagcaaggactccgacgtgtacatcaccgataagtgcgtgctggacatgcggagcatggacttcaagagcaactccgccgtggcctggtccaacaagtccgatttcgcctgcgccaacgccttcaacaacagcattatccccgaggacacattcttcccaagccccgagagcagctgcgacgtgaagctggtggaaaagagcttcgagacagacaccaacctgaacttccagatcctgtacgagatcctgctgggcaaggccaccctgtacgccgtgctggtgtctgccctggtgctgatggctatggtcaagcggaaggacagccgggga

SEQ ID NO: 36305 - DNA, 2694 bp, synthetic construct
  source 1..2694: mol_type = other DNA
atggccttaccagtgaccgccttgctcctgccgctggccttgctgctccacgccgccaggccggaagtgcagctggttgaatctggcggaggactggttcagcctggcggatctctgagactgtcttgtgccgccagcggcttcagcttcagcgacttttggatgagctgggtccgacaggcccctggcaaaggacttgaatgggtcgccacaatcagccaggccggcagcgagaaggactacgtggactctgtgaagggcagattcaccatcagccgggacaacgccaagaagtccctgtacctccagatgaacagcctgagagccgaggacaccgccgtgtactattgtgcctctggcgtgtacagcttcgactacagaggccagggcaccctggtcacagtctcttctggtaccggcggaggcggatctggcggcggaggtagcggtggcggaggatctgaattcgacatccagatgacacagagccctagcagcctgtctgccagcgtgggagacagagtgaccatcacatgcaaggccagcgaccacatcaacaactggctggcctggtatcagcagaagcctggcaaggcccctaagctgctgatctacggcgctaccacactggaaacaggcgtgcccagcagattttctggcagcggctctggcaccgacttcaccctgacaatatccagcctccagcctgaggacttcgccacctactactgtcagcagagctggaacaccccttggacattcggccagggcaccaaggtggaaatcaagagactcgagatccagaaccctgatcctgccgtgtaccagctgcgggatagcaagagcagcgacaagagcgtgtgtctgttcaccgacttcgacagccagaccaacgtgtcccagagcaaggactccgacgtgtacatcaccgataagtgcgtgctggacatgcggagcatggacttcaagagcaactccgccgtggcctggtccaacaagtccgatttcgcctgcgccaacgccttcaacaacagcattatccccgaggacacattcttcccaagccccgagagcagctgcgacgtgaagctggtggaaaagagcttcgagacagacaccaacctgaacttccagatcctgtacgagatcctgctgggcaaggccaccctgtacgccgtgctggtgtctgccctggtgctgatggctatggtcaagcggaaggacagccggggacgcgccaagagaagcggatctggcgtgaagcagaccctgaatttcgacctgctgaagctggctggcgacgtggaatccaacccaggccctactagtatggactggatttggcgcatccttttccttgtcggcgctgctaccggcgcgcattccgggccccagctccagctgcaagagtctggacctggcctggtcaagcctagcgagacactgagcctgacctgtaccgtgtccggcgatagcatcagcagcggcgattactactggggctggatcagacagcctcctggcaaaggactggaatggatcggccacatctactacagcggcgtgacctactacaaccccagcctgaagtccagagtgaccatcagcgtggacaccagccggaaccagttctccctgaagctgtctagcgtgacagccgccgataccgccgtgtactactgcaccagagaggacagcagcaactggcggagtagaggccagggaacactggtcacagttagctctggatccggcggaggcggaagtggaggcggaggatctggcggcggaggctctttcgaagaagttcagctggttgaatctggcggcggactggttcaacctggcggatctctgagactgagctgtgccgcctctggctacgcctttagcaactactgggtcaactgggttcgacaggcccctggcaaaggactggaatgggtcgcccaaatctatcccggcgacggcgacaccaactacaacggcaagttcaagggcagattcaccatcagccgggacaacagcaagaacaccctgtacctccagatgaactccctgagagccgaggacaccgccgtgtactattgtgccagatccatcaccaccgtcgtgggctgcgctatggattattggggccagggaaccctggtcaccgtgtcctctacgcgtgaggacctgaagaacgtgttcccacctgaggtggccgtgttcgagcctagcgaggccgagatcagccacacccagaaagccaccctcgtgtgcctggctaccggcttctaccccgaccatgtggaactgtcttggtgggtcaacggcaaagaggtgcacagcggcgtgtgtaccgacccccagccactgaaagaacagcccgccctgaacgacagccggtactgcctgagcagcagactgagagtgtccgccaccttctggcagaacccccggaaccacttcagatgccaggtgcagttctacggcctgagcgagaacgacgagtggacccaggacagagccaagcccgtgacccagatcgtgtctgccgaagcctggggcagagccgattgcggctttaccagcgagagctaccagcagggcgtgctgagcgccaccaacctgagcgtgatcggcttcagaatcctgctgctgaaagtggccggctttaacctgctgatgaccctgcggctgtggtccagc

SEQ ID NO: 36306 - DNA, 2178 bp, synthetic construct
  source 1..2178: mol_type = other DNA
atggccttaccagtgaccgccttgctcctgccgctggccttgctgctccacgccgccaggccggacatccagatgacacagagccctagcagcctgtctgccagcgtgggagacagagtgaccatcacatgcaaggccagcgaccacatcaacaactggctggcctggtatcagcagaagcctggcaaggcccctaagctgctgatctacggcgctaccacactggaaacaggcgtgcccagcagattttctggcagcggctctggcaccgacttcaccctgacaatatccagcctccagcctgaggacttcgccacctactactgtcagcagagctggaacaccccttggacattcggccagggcaccaaggtggaaatcaagagactcgaggacctgaagaacgtgttcccacctgaggtggccgtgttcgagcctagcgaggccgagatcagccacacccagaaagccaccctcgtgtgcctggctaccggcttctaccccgaccatgtggaactgtcttggtgggtcaacggcaaagaggtgcacagcggcgtgtgtaccgacccccagccactgaaagaacagcccgccctgaacgacagccggtactgcctgagcagcagactgagagtgtccgccaccttctggcagaacccccggaaccacttcagatgccaggtgcagttctacggcctgagcgagaacgacgagtggacccaggacagagccaagcccgtgacccagatcgtgtctgccgaagcctggggcagagccgatgatgtgattaagatccactggcaggaaaagaagtccaacaccatcctgggcagccaggaaggcaacaccatgaagaccaacgacacctacatgaagttcagctggctgaccgtgcccgagaagtccctggacaaagaacacagatgcatcgtgcggcacgaaaacaacaagaacggcgtggaccaggaaatcatcttcccacccatcaagaccgatgtgattacaatggaccccaaggacaactgctccaaggacgccaacgataccctgctgctccagctgaccaacaccagcgcctactacatgtacttgttgctgctgctgaagtccgtggtgtacttcgccatcatcacatgctgcctgctgatggctatggtcaagcggaaggacagccggggaagggccaagcgatctggatctggagcaacaaacttctcactactcaaacaagcaggtgacgtggaggagaatcccgggcctactagtatggactggatttggcgcatccttttccttgtcggcgctgctaccggcgcgcattccttcgaagaagttcagctggttgaatctggcggcggactggttcaacctggcggatctctgagactgagctgtgccgcctctggctacgcctttagcaactactgggtcaactgggttcgacaggcccctggcaaaggactggaatgggtcgcccaaatctatcccggcgacggcgacaccaactacaacggcaagttcaagggcagattcaccatcagccgggacaacagcaagaacaccctgtacctccagatgaactccctgagagccgaggacaccgccgtgtactattgtgccagatccatcaccaccgtcgtgggctgcgctatggattattggggccagggaaccctggtcaccgtgtcctctacgcgtatccagaaccctgatcctgccgtgtaccagctgcgggatagcaagagcagcgacaagagcgtgtgtctgttcaccgacttcgacagccagaccaacgtgtcccagagcaaggactccgacgtgtacatcaccgataagtgcgtgctggacatgcggagcatggacttcaagagcaactccgccgtggcctggtccaacaagtccgatttcgcctgcgccaacgccttcaacaacagcattatccccgaggacacattcttcccaagccccgagagcagcgactccaccgaccacgtgaagcccaaagagacagagaacaccaagcagcccagcaagagctgccacaagcccaaggccatcgtgcacaccgagaaagtgaacatgatgagcctgaccgtgctgggcctgcggatgctgttcgccaaaaccgtggccgtgaacttcctgctgaccgccaagctgttcttcctcctcaccgcc

SEQ ID NO: 36307 - DNA, 2190 bp, synthetic construct
  source 1..2190: mol_type = other DNA
atggccttaccagtgaccgccttgctcctgccgctggccttgctgctccacgccgccaggccggacatccagatgacacagagccctagcagcctgtctgccagcgtgggagacagagtgaccatcacatgcaaggccagcgaccacatcaacaactggctggcctggtatcagcagaagcctggcaaggcccctaagctgctgatctacggcgctaccacactggaaacaggcgtgcccagcagattttctggcagcggctctggcaccgacttcaccctgacaatatccagcctccagcctgaggacttcgccacctactactgtcagcagagctggaacaccccttggacattcggccagggcaccaaggtggaaatcaagagactcgagatccagaaccctgatcctgccgtgtaccagctgcgggatagcaagagcagcgacaagagcgtgtgtctgttcaccgacttcgacagccagaccaacgtgtcccagagcaaggactccgacgtgtacatcaccgataagtgcgtgctggacatgcggagcatggacttcaagagcaactccgccgtggcctggtccaacaagtccgatttcgcctgcgccaacgccttcaacaacagcattatccccgaggacacattcttcccaagccccgagagcagcgactccaccgaccacgtgaagcccaaagagacagagaacaccaagcagcccagcaagagctgccacaagcccaaggccatcgtgcacaccgagaaagtgaacatgatgagcctgaccgtgctgggcctgcggatgctgttcgccaaaaccgtggccgtgaacttcctgctgaccgccaagctgttcttcctcctcaccgcccgcgccaagagaagcggatctggcgtgaagcagaccctgaatttcgacctgctgaagctggctggcgacgtggaatccaacccaggccctactagtatggactggatttggcgcatccttttccttgtcggcgctgctaccggcgcgcattccttcgaagaagttcagctggttgaatctggcggcggactggttcaacctggcggatctctgagactgagctgtgccgcctctggctacgcctttagcaactactgggtcaactgggttcgacaggcccctggcaaaggactggaatgggtcgcccaaatctatcccggcgacggcgacaccaactacaacggcaagttcaagggcagattcaccatcagccgggacaacagcaagaacaccctgtacctccagatgaactccctgagagccgaggacaccgccgtgtactattgtgccagatccatcaccaccgtcgtgggctgcgctatggattattggggccagggaaccctggtcaccgtgtcctctacgcgtgaggacctgaagaacgtgttcccacctgaggtggccgtgttcgagcctagcgaggccgagatcagccacacccagaaagccaccctcgtgtgcctggctaccggcttctaccccgaccatgtggaactgtcttggtgggtcaacggcaaagaggtgcacagcggcgtgtgtaccgacccccagccactgaaagaacagcccgccctgaacgacagccggtactgcctgagcagcagactgagagtgtccgccaccttctggcagaacccccggaaccacttcagatgccaggtgcagttctacggcctgagcgagaacgacgagtggacccaggacagagccaagcccgtgacccagatcgtgtctgccgaagcctggggcagagccgatgatgtgattaagatccactggcaggaaaagaagtccaacaccatcctgggcagccaggaaggcaacaccatgaagaccaacgacacctacatgaagttcagctggctgaccgtgcccgagaagtccctggacaaagaacacagatgcatcgtgcggcacgaaaacaacaagaacggcgtggaccaggaaatcatcttcccacccatcaagaccgatgtgattacaatggaccccaaggacaactgctccaaggacgccaacgataccctgctgctccagctgaccaacaccagcgcctactacatgtacttgttgctgctgctgaagtccgtggtgtacttcgccatcatcacatgctgcctgctgatggctatggtcaagcggaaggacagccgggga

SEQ ID NO: 36308 - DNA, 2583 bp, synthetic construct
  source 1..2583: mol_type = other DNA
atggccttaccagtgaccgccttgctcctgccgctggccttgctgctccacgccgccaggccggaagtgcagctggttgaatctggcggaggactggttcagcctggcggatctctgagactgtcttgtgccgccagcggcttcagcttcagcgacttttggatgagctgggtccgacaggcccctggcaaaggacttgaatgggtcgccacaatcagccaggccggcagcgagaaggactacgtggactctgtgaagggcagattcaccatcagccgggacaacgccaagaagtccctgtacctccagatgaacagcctgagagccgaggacaccgccgtgtactattgtgcctctggcgtgtacagcttcgactacagaggccagggcaccctggtcacagtctcttctggtaccggcggaggcggatctggcggcggaggtagcggtggcggaggatctgaattcgacatccagatgacacagagccctagcagcctgtctgccagcgtgggagacagagtgaccatcacatgcaaggccagcgaccacatcaacaactggctggcctggtatcagcagaagcctggcaaggcccctaagctgctgatctacggcgctaccacactggaaacaggcgtgcccagcagattttctggcagcggctctggcaccgacttcaccctgacaatatccagcctccagcctgaggacttcgccacctactactgtcagcagagctggaacaccccttggacattcggccagggcaccaaggtggaaatcaagagactcgaggacctgaagaacgtgttcccacctgaggtggccgtgttcgagcctagcgaggccgagatcagccacacccagaaagccaccctcgtgtgcctggctaccggcttctaccccgaccatgtggaactgtcttggtgggtcaacggcaaagaggtgcacagcggcgtgtgtaccgacccccagccactgaaagaacagcccgccctgaacgacagccggtactgcctgagcagcagactgagagtgtccgccaccttctggcagaacccccggaaccacttcagatgccaggtgcagttctacggcctgagcgagaacgacgagtggacccaggacagagccaagcccgtgacccagatcgtgtctgccgaagcctggggcagagccgatgatgtgattaagatccactggcaggaaaagaagtccaacaccatcctgggcagccaggaaggcaacaccatgaagaccaacgacacctacatgaagttcagctggctgaccgtgcccgagaagtccctggacaaagaacacagatgcatcgtgcggcacgaaaacaacaagaacggcgtggaccaggaaatcatcttcccacccatcaagaccgatgtgattacaatggaccccaaggacaactgctccaaggacgccaacgataccctgctgctccagctgaccaacaccagcgcctactacatgtacttgttgctgctgctgaagtccgtggtgtacttcgccatcatcacatgctgcctgctgatggctatggtcaagcggaaggacagccggggaagggccaagcgatctggatctggagcaacaaacttctcactactcaaacaagcaggtgacgtggaggagaatcccgggcctactagtatggactggatttggcgcatccttttccttgtcggcgctgctaccggcgcgcattccttcgaagaagttcagctggttgaatctggcggcggactggttcaacctggcggatctctgagactgagctgtgccgcctctggctacgcctttagcaactactgggtcaactgggttcgacaggcccctggcaaaggactggaatgggtcgcccaaatctatcccggcgacggcgacaccaactacaacggcaagttcaagggcagattcaccatcagccgggacaacagcaagaacaccctgtacctccagatgaactccctgagagccgaggacaccgccgtgtactattgtgccagatccatcaccaccgtcgtgggctgcgctatggattattggggccagggaaccctggtcaccgtgtcctctacgcgtatccagaaccctgatcctgccgtgtaccagctgcgggatagcaagagcagcgacaagagcgtgtgtctgttcaccgacttcgacagccagaccaacgtgtcccagagcaaggactccgacgtgtacatcaccgataagtgcgtgctggacatgcggagcatggacttcaagagcaactccgccgtggcctggtccaacaagtccgatttcgcctgcgccaacgccttcaacaacagcattatccccgaggacacattcttcccaagccccgagagcagcgactccaccgaccacgtgaagcccaaagagacagagaacaccaagcagcccagcaagagctgccacaagcccaaggccatcgtgcacaccgagaaagtgaacatgatgagcctgaccgtgctgggcctgcggatgctgttcgccaaaaccgtggccgtgaacttcctgctgaccgccaagctgttcttcctcctcaccgcc

SEQ ID NO: 36309 - DNA, 2595 bp, synthetic construct
  source 1..2595: mol_type = other DNA
atggccttaccagtgaccgccttgctcctgccgctggccttgctgctccacgccgccaggccggaagtgcagctggttgaatctggcggaggactggttcagcctggcggatctctgagactgtcttgtgccgccagcggcttcagcttcagcgacttttggatgagctgggtccgacaggcccctggcaaaggacttgaatgggtcgccacaatcagccaggccggcagcgagaaggactacgtggactctgtgaagggcagattcaccatcagccgggacaacgccaagaagtccctgtacctccagatgaacagcctgagagccgaggacaccgccgtgtactattgtgcctctggcgtgtacagcttcgactacagaggccagggcaccctggtcacagtctcttctggtaccggcggaggcggatctggcggcggaggtagcggtggcggaggatctgaattcgacatccagatgacacagagccctagcagcctgtctgccagcgtgggagacagagtgaccatcacatgcaaggccagcgaccacatcaacaactggctggcctggtatcagcagaagcctggcaaggcccctaagctgctgatctacggcgctaccacactggaaacaggcgtgcccagcagattttctggcagcggctctggcaccgacttcaccctgacaatatccagcctccagcctgaggacttcgccacctactactgtcagcagagctggaacaccccttggacattcggccagggcaccaaggtggaaatcaagagactcgagatccagaaccctgatcctgccgtgtaccagctgcgggatagcaagagcagcgacaagagcgtgtgtctgttcaccgacttcgacagccagaccaacgtgtcccagagcaaggactccgacgtgtacatcaccgataagtgcgtgctggacatgcggagcatggacttcaagagcaactccgccgtggcctggtccaacaagtccgatttcgcctgcgccaacgccttcaacaacagcattatccccgaggacacattcttcccaagccccgagagcagcgactccaccgaccacgtgaagcccaaagagacagagaacaccaagcagcccagcaagagctgccacaagcccaaggccatcgtgcacaccgagaaagtgaacatgatgagcctgaccgtgctgggcctgcggatgctgttcgccaaaaccgtggccgtgaacttcctgctgaccgccaagctgttcttcctcctcaccgcccgcgccaagagaagcggatctggcgtgaagcagaccctgaatttcgacctgctgaagctggctggcgacgtggaatccaacccaggccctactagtatggactggatttggcgcatccttttccttgtcggcgctgctaccggcgcgcattccttcgaagaagttcagctggttgaatctggcggcggactggttcaacctggcggatctctgagactgagctgtgccgcctctggctacgcctttagcaactactgggtcaactgggttcgacaggcccctggcaaaggactggaatgggtcgcccaaatctatcccggcgacggcgacaccaactacaacggcaagttcaagggcagattcaccatcagccgggacaacagcaagaacaccctgtacctccagatgaactccctgagagccgaggacaccgccgtgtactattgtgccagatccatcaccaccgtcgtgggctgcgctatggattattggggccagggaaccctggtcaccgtgtcctctacgcgtgaggacctgaagaacgtgttcccacctgaggtggccgtgttcgagcctagcgaggccgagatcagccacacccagaaagccaccctcgtgtgcctggctaccggcttctaccccgaccatgtggaactgtcttggtgggtcaacggcaaagaggtgcacagcggcgtgtgtaccgacccccagccactgaaagaacagcccgccctgaacgacagccggtactgcctgagcagcagactgagagtgtccgccaccttctggcagaacccccggaaccacttcagatgccaggtgcagttctacggcctgagcgagaacgacgagtggacccaggacagagccaagcccgtgacccagatcgtgtctgccgaagcctggggcagagccgatgatgtgattaagatccactggcaggaaaagaagtccaacaccatcctgggcagccaggaaggcaacaccatgaagaccaacgacacctacatgaagttcagctggctgaccgtgcccgagaagtccctggacaaagaacacagatgcatcgtgcggcacgaaaacaacaagaacggcgtggaccaggaaatcatcttcccacccatcaagaccgatgtgattacaatggaccccaaggacaactgctccaaggacgccaacgataccctgctgctccagctgaccaacaccagcgcctactacatgtacttgttgctgctgctgaagtccgtggtgtacttcgccatcatcacatgctgcctgctgatggctatggtcaagcggaaggacagccgggga

SEQ ID NO: 36310 - DNA, 2994 bp, synthetic construct
  source 1..2994: mol_type = other DNA
atggccttaccagtgaccgccttgctcctgccgctggccttgctgctccacgccgccaggccggaagtgcagctggttgaatctggcggaggactggttcagcctggcggatctctgagactgtcttgtgccgccagcggcttcagcttcagcgacttttggatgagctgggtccgacaggcccctggcaaaggacttgaatgggtcgccacaatcagccaggccggcagcgagaaggactacgtggactctgtgaagggcagattcaccatcagccgggacaacgccaagaagtccctgtacctccagatgaacagcctgagagccgaggacaccgccgtgtactattgtgcctctggcgtgtacagcttcgactacagaggccagggcaccctggtcacagtctcttctggtaccggcggaggcggatctggcggcggaggtagcggtggcggaggatctgaattcgacatccagatgacacagagccctagcagcctgtctgccagcgtgggagacagagtgaccatcacatgcaaggccagcgaccacatcaacaactggctggcctggtatcagcagaagcctggcaaggcccctaagctgctgatctacggcgctaccacactggaaacaggcgtgcccagcagattttctggcagcggctctggcaccgacttcaccctgacaatatccagcctccagcctgaggacttcgccacctactactgtcagcagagctggaacaccccttggacattcggccagggcaccaaggtggaaatcaagagactcgaggacctgaagaacgtgttcccacctgaggtggccgtgttcgagcctagcgaggccgagatcagccacacccagaaagccaccctcgtgtgcctggctaccggcttctaccccgaccatgtggaactgtcttggtgggtcaacggcaaagaggtgcacagcggcgtgtgtaccgacccccagccactgaaagaacagcccgccctgaacgacagccggtactgcctgagcagcagactgagagtgtccgccaccttctggcagaacccccggaaccacttcagatgccaggtgcagttctacggcctgagcgagaacgacgagtggacccaggacagagccaagcccgtgacccagatcgtgtctgccgaagcctggggcagagccgatgatgtgattaagatccactggcaggaaaagaagtccaacaccatcctgggcagccaggaaggcaacaccatgaagaccaacgacacctacatgaagttcagctggctgaccgtgcccgagaagtccctggacaaagaacacagatgcatcgtgcggcacgaaaacaacaagaacggcgtggaccaggaaatcatcttcccacccatcaagaccgatgtgattacaatggaccccaaggacaactgctccaaggacgccaacgataccctgctgctccagctgaccaacaccagcgcctactacatgtacttgttgctgctgctgaagtccgtggtgtacttcgccatcatcacatgctgcctgctgatggctatggtcaagcggaaggacagccggggaagggccaagcgatctggatctggagcaacaaacttctcactactcaaacaagcaggtgacgtggaggagaatcccgggcctactagtatggactggatttggcgcatccttttccttgtcggcgctgctaccggcgcgcattccgggccccagctccagctgcaagagtctggacctggcctggtcaagcctagcgagacactgagcctgacctgtaccgtgtccggcgatagcatcagcagcggcgattactactggggctggatcagacagcctcctggcaaaggactggaatggatcggccacatctactacagcggcgtgacctactacaaccccagcctgaagtccagagtgaccatcagcgtggacaccagccggaaccagttctccctgaagctgtctagcgtgacagccgccgataccgccgtgtactactgcaccagagaggacagcagcaactggcggagtagaggccagggaacactggtcacagttagctctggatccggcggaggcggaagtggaggcggaggatctggcggcggaggctctttcgaagaagttcagctggttgaatctggcggcggactggttcaacctggcggatctctgagactgagctgtgccgcctctggctacgcctttagcaactactgggtcaactgggttcgacaggcccctggcaaaggactggaatgggtcgcccaaatctatcccggcgacggcgacaccaactacaacggcaagttcaagggcagattcaccatcagccgggacaacagcaagaacaccctgtacctccagatgaactccctgagagccgaggacaccgccgtgtactattgtgccagatccatcaccaccgtcgtgggctgcgctatggattattggggccagggaaccctggtcaccgtgtcctctacgcgtatccagaaccctgatcctgccgtgtaccagctgcgggatagcaagagcagcgacaagagcgtgtgtctgttcaccgacttcgacagccagaccaacgtgtcccagagcaaggactccgacgtgtacatcaccgataagtgcgtgctggacatgcggagcatggacttcaagagcaactccgccgtggcctggtccaacaagtccgatttcgcctgcgccaacgccttcaacaacagcattatccccgaggacacattcttcccaagccccgagagcagcgactccaccgaccacgtgaagcccaaagagacagagaacaccaagcagcccagcaagagctgccacaagcccaaggccatcgtgcacaccgagaaagtgaacatgatgagcctgaccgtgctgggcctgcggatgctgttcgccaaaaccgtggccgtgaacttcctgctgaccgccaagctgttcttcctcctcaccgcc

SEQ ID NO: 36311 - DNA, 3006 bp, synthetic construct
  source 1..3006: mol_type = other DNA
atggccttaccagtgaccgccttgctcctgccgctggccttgctgctccacgccgccaggccggaagtgcagctggttgaatctggcggaggactggttcagcctggcggatctctgagactgtcttgtgccgccagcggcttcagcttcagcgacttttggatgagctgggtccgacaggcccctggcaaaggacttgaatgggtcgccacaatcagccaggccggcagcgagaaggactacgtggactctgtgaagggcagattcaccatcagccgggacaacgccaagaagtccctgtacctccagatgaacagcctgagagccgaggacaccgccgtgtactattgtgcctctggcgtgtacagcttcgactacagaggccagggcaccctggtcacagtctcttctggtaccggcggaggcggatctggcggcggaggtagcggtggcggaggatctgaattcgacatccagatgacacagagccctagcagcctgtctgccagcgtgggagacagagtgaccatcacatgcaaggccagcgaccacatcaacaactggctggcctggtatcagcagaagcctggcaaggcccctaagctgctgatctacggcgctaccacactggaaacaggcgtgcccagcagattttctggcagcggctctggcaccgacttcaccctgacaatatccagcctccagcctgaggacttcgccacctactactgtcagcagagctggaacaccccttggacattcggccagggcaccaaggtggaaatcaagagactcgagatccagaaccctgatcctgccgtgtaccagctgcgggatagcaagagcagcgacaagagcgtgtgtctgttcaccgacttcgacagccagaccaacgtgtcccagagcaaggactccgacgtgtacatcaccgataagtgcgtgctggacatgcggagcatggacttcaagagcaactccgccgtggcctggtccaacaagtccgatttcgcctgcgccaacgccttcaacaacagcattatccccgaggacacattcttcccaagccccgagagcagcgactccaccgaccacgtgaagcccaaagagacagagaacaccaagcagcccagcaagagctgccacaagcccaaggccatcgtgcacaccgagaaagtgaacatgatgagcctgaccgtgctgggcctgcggatgctgttcgccaaaaccgtggccgtgaacttcctgctgaccgccaagctgttcttcctcctcaccgcccgcgccaagagaagcggatctggcgtgaagcagaccctgaatttcgacctgctgaagctggctggcgacgtggaatccaacccaggccctactagtatggactggatttggcgcatccttttccttgtcggcgctgctaccggcgcgcattccgggccccagctccagctgcaagagtctggacctggcctggtcaagcctagcgagacactgagcctgacctgtaccgtgtccggcgatagcatcagcagcggcgattactactggggctggatcagacagcctcctggcaaaggactggaatggatcggccacatctactacagcggcgtgacctactacaaccccagcctgaagtccagagtgaccatcagcgtggacaccagccggaaccagttctccctgaagctgtctagcgtgacagccgccgataccgccgtgtactactgcaccagagaggacagcagcaactggcggagtagaggccagggaacactggtcacagttagctctggatccggcggaggcggaagtggaggcggaggatctggcggcggaggctctttcgaagaagttcagctggttgaatctggcggcggactggttcaacctggcggatctctgagactgagctgtgccgcctctggctacgcctttagcaactactgggtcaactgggttcgacaggcccctggcaaaggactggaatgggtcgcccaaatctatcccggcgacggcgacaccaactacaacggcaagttcaagggcagattcaccatcagccgggacaacagcaagaacaccctgtacctccagatgaactccctgagagccgaggacaccgccgtgtactattgtgccagatccatcaccaccgtcgtgggctgcgctatggattattggggccagggaaccctggtcaccgtgtcctctacgcgtgaggacctgaagaacgtgttcccacctgaggtggccgtgttcgagcctagcgaggccgagatcagccacacccagaaagccaccctcgtgtgcctggctaccggcttctaccccgaccatgtggaactgtcttggtgggtcaacggcaaagaggtgcacagcggcgtgtgtaccgacccccagccactgaaagaacagcccgccctgaacgacagccggtactgcctgagcagcagactgagagtgtccgccaccttctggcagaacccccggaaccacttcagatgccaggtgcagttctacggcctgagcgagaacgacgagtggacccaggacagagccaagcccgtgacccagatcgtgtctgccgaagcctggggcagagccgatgatgtgattaagatccactggcaggaaaagaagtccaacaccatcctgggcagccaggaaggcaacaccatgaagaccaacgacacctacatgaagttcagctggctgaccgtgcccgagaagtccctggacaaagaacacagatgcatcgtgcggcacgaaaacaacaagaacggcgtggaccaggaaatcatcttcccacccatcaagaccgatgtgattacaatggaccccaaggacaactgctccaaggacgccaacgataccctgctgctccagctgaccaacaccagcgcctactacatgtacttgttgctgctgctgaagtccgtggtgtacttcgccatcatcacatgctgcctgctgatggctatggtcaagcggaaggacagccgggga

SEQ ID NO: 36312 - DNA, 2172 bp, synthetic construct
  source 1..2172: mol_type = other DNA
atggccttaccagtgaccgccttgctcctgccgctggccttgctgctccacgccgccaggccggacatccagatgacacagagccctagcagcctgtctgccagcgtgggagacagagtgaccatcacatgcaaggccagcgaccacatcaacaactggctggcctggtatcagcagaagcctggcaaggcccctaagctgctgatctacggcgctaccacactggaaacaggcgtgcccagcagattttctggcagcggctctggcaccgacttcaccctgacaatatccagcctccagcctgaggacttcgccacctactactgtcagcagagctggaacaccccttggacattcggccagggcaccaaggtggaaatcaagagactcgaggacctgaagaacgtgttcccacctgaggtggccgtgttcgagcctagcgaggccgagatcagccacacccagaaagccaccctcgtgtgcctggctaccggcttctaccccgaccatgtggaactgtcttggtgggtcaacggcaaagaggtgcacagcggcgtgtgtaccgacccccagccactgaaagaacagcccgccctgaacgacagccggtactgcctgagcagcagactgagagtgtccgccaccttctggcagaacccccggaaccacttcagatgccaggtgcagttctacggcctgagcgagaacgacgagtggacccaggacagagccaagcccgtgacccagatcgtgtctgccgaagcctggggcagagccgatgatgtgattaagatccactggcaggaaaagaagtccaacaccatcctgggcagccaggaaggcaacaccatgaagaccaacgacacctacatgaagttcagctggctgaccgtgcccgagaagtccctggacaaagaacacagatgcatcgtgcggcacgaaaacaacaagaacggcgtggaccaggaaatcatcttcccacccatcaagaccgatgtgattacaatggaccccaaggacaactgctccaaggacgccaacgataccctgctgctccagctgaccaacaccagcgcctactacatgtacttgttgctgctgctgaagtccgtggtgtacttcgccatcatcacatgctgcctgctgcggagaaccgccttctgctgcaacggcgagaagtctagggccaagcgatctggatctggagcaacaaacttctcactactcaaacaagcaggtgacgtggaggagaatcccgggcctactagtatggactggatttggcgcatccttttccttgtcggcgctgctaccggcgcgcattccttcgaagaagttcagctggttgaatctggcggcggactggttcaacctggcggatctctgagactgagctgtgccgcctctggctacgcctttagcaactactgggtcaactgggttcgacaggcccctggcaaaggactggaatgggtcgcccaaatctatcccggcgacggcgacaccaactacaacggcaagttcaagggcagattcaccatcagccgggacaacagcaagaacaccctgtacctccagatgaactccctgagagccgaggacaccgccgtgtactattgtgccagatccatcaccaccgtcgtgggctgcgctatggattattggggccagggaaccctggtcaccgtgtcctctacgcgtatccagaaccctgatcctgccgtgtaccagctgcgggatagcaagagcagcgacaagagcgtgtgtctgttcaccgacttcgacagccagaccaacgtgtcccagagcaaggactccgacgtgtacatcaccgataagtgcgtgctggacatgcggagcatggacttcaagagcaactccgccgtggcctggtccaacaagtccgatttcgcctgcgccaacgccttcaacaacagcattatccccgaggacacattcttcccaagccccgagagcagcgactccaccgaccacgtgaagcccaaagagacagagaacaccaagcagcccagcaagagctgccacaagcccaaggccatcgtgcacaccgagaaagtgaacatgatgagcctgaccgtgctgggcctgcggatgctgttcgccaaaaccgtggccgtgaacttcctgctgaccgccaagctgttcttcctc

SEQ ID NO: 36313 - DNA, 2184 bp, synthetic construct
  source 1..2184: mol_type = other DNA
atggccttaccagtgaccgccttgctcctgccgctggccttgctgctccacgccgccaggccggacatccagatgacacagagccctagcagcctgtctgccagcgtgggagacagagtgaccatcacatgcaaggccagcgaccacatcaacaactggctggcctggtatcagcagaagcctggcaaggcccctaagctgctgatctacggcgctaccacactggaaacaggcgtgcccagcagattttctggcagcggctctggcaccgacttcaccctgacaatatccagcctccagcctgaggacttcgccacctactactgtcagcagagctggaacaccccttggacattcggccagggcaccaaggtggaaatcaagagactcgagatccagaaccctgatcctgccgtgtaccagctgcgggatagcaagagcagcgacaagagcgtgtgtctgttcaccgacttcgacagccagaccaacgtgtcccagagcaaggactccgacgtgtacatcaccgataagtgcgtgctggacatgcggagcatggacttcaagagcaactccgccgtggcctggtccaacaagtccgatttcgcctgcgccaacgccttcaacaacagcattatccccgaggacacattcttcccaagccccgagagcagcgactccaccgaccacgtgaagcccaaagagacagagaacaccaagcagcccagcaagagctgccacaagcccaaggccatcgtgcacaccgagaaagtgaacatgatgagcctgaccgtgctgggcctgcggatgctgttcgccaaaaccgtggccgtgaacttcctgctgaccgccaagctgttcttcctccgcgccaagagaagcggatctggcgtgaagcagaccctgaatttcgacctgctgaagctggctggcgacgtggaatccaacccaggccctactagtatggactggatttggcgcatccttttccttgtcggcgctgctaccggcgcgcattccttcgaagaagttcagctggttgaatctggcggcggactggttcaacctggcggatctctgagactgagctgtgccgcctctggctacgcctttagcaactactgggtcaactgggttcgacaggcccctggcaaaggactggaatgggtcgcccaaatctatcccggcgacggcgacaccaactacaacggcaagttcaagggcagattcaccatcagccgggacaacagcaagaacaccctgtacctccagatgaactccctgagagccgaggacaccgccgtgtactattgtgccagatccatcaccaccgtcgtgggctgcgctatggattattggggccagggaaccctggtcaccgtgtcctctacgcgtgaggacctgaagaacgtgttcccacctgaggtggccgtgttcgagcctagcgaggccgagatcagccacacccagaaagccaccctcgtgtgcctggctaccggcttctaccccgaccatgtggaactgtcttggtgggtcaacggcaaagaggtgcacagcggcgtgtgtaccgacccccagccactgaaagaacagcccgccctgaacgacagccggtactgcctgagcagcagactgagagtgtccgccaccttctggcagaacccccggaaccacttcagatgccaggtgcagttctacggcctgagcgagaacgacgagtggacccaggacagagccaagcccgtgacccagatcgtgtctgccgaagcctggggcagagccgatgatgtgattaagatccactggcaggaaaagaagtccaacaccatcctgggcagccaggaaggcaacaccatgaagaccaacgacacctacatgaagttcagctggctgaccgtgcccgagaagtccctggacaaagaacacagatgcatcgtgcggcacgaaaacaacaagaacggcgtggaccaggaaatcatcttcccacccatcaagaccgatgtgattacaatggaccccaaggacaactgctccaaggacgccaacgataccctgctgctccagctgaccaacaccagcgcctactacatgtacttgttgctgctgctgaagtccgtggtgtacttcgccatcatcacatgctgcctgctgcggagaaccgccttctgctgcaacggcgagaagtct

SEQ ID NO: 36314 - DNA, 2577 bp, synthetic construct
  source 1..2577: mol_type = other DNA
atggccttaccagtgaccgccttgctcctgccgctggccttgctgctccacgccgccaggccggaagtgcagctggttgaatctggcggaggactggttcagcctggcggatctctgagactgtcttgtgccgccagcggcttcagcttcagcgacttttggatgagctgggtccgacaggcccctggcaaaggacttgaatgggtcgccacaatcagccaggccggcagcgagaaggactacgtggactctgtgaagggcagattcaccatcagccgggacaacgccaagaagtccctgtacctccagatgaacagcctgagagccgaggacaccgccgtgtactattgtgcctctggcgtgtacagcttcgactacagaggccagggcaccctggtcacagtctcttctggtaccggcggaggcggatctggcggcggaggtagcggtggcggaggatctgaattcgacatccagatgacacagagccctagcagcctgtctgccagcgtgggagacagagtgaccatcacatgcaaggccagcgaccacatcaacaactggctggcctggtatcagcagaagcctggcaaggcccctaagctgctgatctacggcgctaccacactggaaacaggcgtgcccagcagattttctggcagcggctctggcaccgacttcaccctgacaatatccagcctccagcctgaggacttcgccacctactactgtcagcagagctggaacaccccttggacattcggccagggcaccaaggtggaaatcaagagactcgaggacctgaagaacgtgttcccacctgaggtggccgtgttcgagcctagcgaggccgagatcagccacacccagaaagccaccctcgtgtgcctggctaccggcttctaccccgaccatgtggaactgtcttggtgggtcaacggcaaagaggtgcacagcggcgtgtgtaccgacccccagccactgaaagaacagcccgccctgaacgacagccggtactgcctgagcagcagactgagagtgtccgccaccttctggcagaacccccggaaccacttcagatgccaggtgcagttctacggcctgagcgagaacgacgagtggacccaggacagagccaagcccgtgacccagatcgtgtctgccgaagcctggggcagagccgatgatgtgattaagatccactggcaggaaaagaagtccaacaccatcctgggcagccaggaaggcaacaccatgaagaccaacgacacctacatgaagttcagctggctgaccgtgcccgagaagtccctggacaaagaacacagatgcatcgtgcggcacgaaaacaacaagaacggcgtggaccaggaaatcatcttcccacccatcaagaccgatgtgattacaatggaccccaaggacaactgctccaaggacgccaacgataccctgctgctccagctgaccaacaccagcgcctactacatgtacttgttgctgctgctgaagtccgtggtgtacttcgccatcatcacatgctgcctgctgcggagaaccgccttctgctgcaacggcgagaagtctagggccaagcgatctggatctggagcaacaaacttctcactactcaaacaagcaggtgacgtggaggagaatcccgggcctactagtatggactggatttggcgcatccttttccttgtcggcgctgctaccggcgcgcattccttcgaagaagttcagctggttgaatctggcggcggactggttcaacctggcggatctctgagactgagctgtgccgcctctggctacgcctttagcaactactgggtcaactgggttcgacaggcccctggcaaaggactggaatgggtcgcccaaatctatcccggcgacggcgacaccaactacaacggcaagttcaagggcagattcaccatcagccgggacaacagcaagaacaccctgtacctccagatgaactccctgagagccgaggacaccgccgtgtactattgtgccagatccatcaccaccgtcgtgggctgcgctatggattattggggccagggaaccctggtcaccgtgtcctctacgcgtatccagaaccctgatcctgccgtgtaccagctgcgggatagcaagagcagcgacaagagcgtgtgtctgttcaccgacttcgacagccagaccaacgtgtcccagagcaaggactccgacgtgtacatcaccgataagtgcgtgctggacatgcggagcatggacttcaagagcaactccgccgtggcctggtccaacaagtccgatttcgcctgcgccaacgccttcaacaacagcattatccccgaggacacattcttcccaagccccgagagcagcgactccaccgaccacgtgaagcccaaagagacagagaacaccaagcagcccagcaagagctgccacaagcccaaggccatcgtgcacaccgagaaagtgaacatgatgagcctgaccgtgctgggcctgcggatgctgttcgccaaaaccgtggccgtgaacttcctgctgaccgccaagctgttcttcctc

SEQ ID NO: 36315 - DNA, 2988 bp, synthetic construct
  source 1..2988: mol_type = other DNA
atggccttaccagtgaccgccttgctcctgccgctggccttgctgctccacgccgccaggccggaagtgcagctggttgaatctggcggaggactggttcagcctggcggatctctgagactgtcttgtgccgccagcggcttcagcttcagcgacttttggatgagctgggtccgacaggcccctggcaaaggacttgaatgggtcgccacaatcagccaggccggcagcgagaaggactacgtggactctgtgaagggcagattcaccatcagccgggacaacgccaagaagtccctgtacctccagatgaacagcctgagagccgaggacaccgccgtgtactattgtgcctctggcgtgtacagcttcgactacagaggccagggcaccctggtcacagtctcttctggtaccggcggaggcggatctggcggcggaggtagcggtggcggaggatctgaattcgacatccagatgacacagagccctagcagcctgtctgccagcgtgggagacagagtgaccatcacatgcaaggccagcgaccacatcaacaactggctggcctggtatcagcagaagcctggcaaggcccctaagctgctgatctacggcgctaccacactggaaacaggcgtgcccagcagattttctggcagcggctctggcaccgacttcaccctgacaatatccagcctccagcctgaggacttcgccacctactactgtcagcagagctggaacaccccttggacattcggccagggcaccaaggtggaaatcaagagactcgaggacctgaagaacgtgttcccacctgaggtggccgtgttcgagcctagcgaggccgagatcagccacacccagaaagccaccctcgtgtgcctggctaccggcttctaccccgaccatgtggaactgtcttggtgggtcaacggcaaagaggtgcacagcggcgtgtgtaccgacccccagccactgaaagaacagcccgccctgaacgacagccggtactgcctgagcagcagactgagagtgtccgccaccttctggcagaacccccggaaccacttcagatgccaggtgcagttctacggcctgagcgagaacgacgagtggacccaggacagagccaagcccgtgacccagatcgtgtctgccgaagcctggggcagagccgatgatgtgattaagatccactggcaggaaaagaagtccaacaccatcctgggcagccaggaaggcaacaccatgaagaccaacgacacctacatgaagttcagctggctgaccgtgcccgagaagtccctggacaaagaacacagatgcatcgtgcggcacgaaaacaacaagaacggcgtggaccaggaaatcatcttcccacccatcaagaccgatgtgattacaatggaccccaaggacaactgctccaaggacgccaacgataccctgctgctccagctgaccaacaccagcgcctactacatgtacttgttgctgctgctgaagtccgtggtgtacttcgccatcatcacatgctgcctgctgcggagaaccgccttctgctgcaacggcgagaagtctagggccaagcgatctggatctggagcaacaaacttctcactactcaaacaagcaggtgacgtggaggagaatcccgggcctactagtatggactggatttggcgcatccttttccttgtcggcgctgctaccggcgcgcattccgggccccagctccagctgcaagagtctggacctggcctggtcaagcctagcgagacactgagcctgacctgtaccgtgtccggcgatagcatcagcagcggcgattactactggggctggatcagacagcctcctggcaaaggactggaatggatcggccacatctactacagcggcgtgacctactacaaccccagcctgaagtccagagtgaccatcagcgtggacaccagccggaaccagttctccctgaagctgtctagcgtgacagccgccgataccgccgtgtactactgcaccagagaggacagcagcaactggcggagtagaggccagggaacactggtcacagttagctctggatccggcggaggcggaagtggaggcggaggatctggcggcggaggctctttcgaagaagttcagctggttgaatctggcggcggactggttcaacctggcggatctctgagactgagctgtgccgcctctggctacgcctttagcaactactgggtcaactgggttcgacaggcccctggcaaaggactggaatgggtcgcccaaatctatcccggcgacggcgacaccaactacaacggcaagttcaagggcagattcaccatcagccgggacaacagcaagaacaccctgtacctccagatgaactccctgagagccgaggacaccgccgtgtactattgtgccagatccatcaccaccgtcgtgggctgcgctatggattattggggccagggaaccctggtcaccgtgtcctctacgcgtatccagaaccctgatcctgccgtgtaccagctgcgggatagcaagagcagcgacaagagcgtgtgtctgttcaccgacttcgacagccagaccaacgtgtcccagagcaaggactccgacgtgtacatcaccgataagtgcgtgctggacatgcggagcatggacttcaagagcaactccgccgtggcctggtccaacaagtccgatttcgcctgcgccaacgccttcaacaacagcattatccccgaggacacattcttcccaagccccgagagcagcgactccaccgaccacgtgaagcccaaagagacagagaacaccaagcagcccagcaagagctgccacaagcccaaggccatcgtgcacaccgagaaagtgaacatgatgagcctgaccgtgctgggcctgcggatgctgttcgccaaaaccgtggccgtgaacttcctgctgaccgccaagctgttcttcctc

SEQ ID NO: 36316 - DNA, 1866 bp, synthetic construct
  source 1..1866: mol_type = other DNA
atggccttaccagtgaccgccttgctcctgccgctggccttgctgctccacgccgccaggccggacatccagatgacacagagccctagcagcctgtctgccagcgtgggagacagagtgaccatcacatgcaaggccagcgaccacatcaacaactggctggcctggtatcagcagaagcctggcaaggcccctaagctgctgatctacggcgctaccacactggaaacaggcgtgcccagcagattttctggcagcggctctggcaccgacttcaccctgacaatatccagcctccagcctgaggacttcgccacctactactgtcagcagagctggaacaccccttggacattcggccagggcaccaaggtggaaatcaagagactcgaggacctgaagaacgtgttcccacctgaggtggccgtgttcgagcctagcgaggccgagatcagccacacccagaaagccaccctcgtgtgcctggctaccggcttctaccccgaccatgtggaactgtcttggtgggtcaacggcaaagaggtgcacagcggcgtgtctaccgacccccagccactgaaagaacagcccgccctgaacgacagccggtactgcctgagcagcagactgagagtgtccgccaccttctggcagaacccccggaaccacttcagatgccaggtgcagttctacggcctgagcgagaacgacgagtggacccaggacagagccaagcccgtgacccagatcgtgtctgccgaagcctggggcagagccgattgcgacgtgaagctggtggaaaagagcttcgagacagacaccaacctgaacttccagaacctgagcgtgatcggcttcagaatcctgctgctgaaagtggccggctttaacctgctgatgaccctgcggctgtggtccagcagggccaagcgatctggatctggagcaacaaacttctcactactcaaacaagcaggtgacgtggaggagaatcccgggcctactagtatggactggatttggcgcatccttttccttgtcggcgctgctaccggcgcgcattccttcgaagaagttcagctggttgaatctggcggcggactggttcaacctggcggatctctgagactgagctgtgccgcctctggctacgcctttagcaactactgggtcaactgggttcgacaggcccctggcaaaggactggaatgggtcgcccaaatctatcccggcgacggcgacaccaactacaacggcaagttcaagggcagattcaccatcagccgggacaacagcaagaacaccctgtacctccagatgaactccctgagagccgaggacaccgccgtgtactattgtgccagatccatcaccaccgtcgtgggctgcgctatggattattggggccagggaaccctggtcaccgtgtcctctacgcgtatccagaaccctgatcctgccgtgtaccagctgcgggatagcaagagcagcgacaagagcgtgtgtctgttcaccgacttcgacagccagaccaacgtgtcccagagcaaggactccgacgtgtacatcaccgataagaccgtgctggacatgcggagcatggacttcaagagcaactccgccgtggcctggtccaacaagtccgatttcgcctgcgccaacgccttcaacaacagcattatccccgaggacacattcttcccaagccccgagagcagctgcggctttaccagcgagagctaccagcagggcgtgctgagcgccaccatcctgtacgagatcctgctgggcaaggccaccctgtacgccgtgctggtgtctgccctggtgctgatggctatggtcaagcggaaggacagccgggga

SEQ ID NO: 36317 - DNA, 1866 bp, synthetic construct
  source 1..1866: mol_type = other DNA
atggccttaccagtgaccgccttgctcctgccgctggccttgctgctccacgccgccaggccggacatccagatgacacagagccctagcagcctgtctgccagcgtgggagacagagtgaccatcacatgcaaggccagcgaccacatcaacaactggctggcctggtatcagcagaagcctggcaaggcccctaagctgctgatctacggcgctaccacactggaaacaggcgtgcccagcagattttctggcagcggctctggcaccgacttcaccctgacaatatccagcctccagcctgaggacttcgccacctactactgtcagcagagctggaacaccccttggacattcggccagggcaccaaggtggaaatcaagagactcgaggacctgaagaacgtgttcccacctgaggtggccgtgttcgagcctagcgaggccgagatcagccacacccagaaagccaccctcgtgtgcctggctaccggcttctaccccgaccatgtggaactgtcttggtgggtcaacggcaaagaggtgcacagcggcgtgtctaccgacccccagccactgaaagaacagcccgccctgaacgacagccggtactgcctgagcagcagactgagagtgtccgccaccttctggcagaacccccggaaccacttcagatgccaggtgcagttctacggcctgagcgagaacgacgagtggacccaggacagagccaagcccgtgacccagatcgtgtctgccgaagcctggggcagagccgattgcggctttaccagcgagagctaccagcagggcgtgctgagcgccaccaacctgagcgtgatcggcttcagaatcctgctgctgaaagtggccggctttaacctgctgatgaccctgcggctgtggtccagcagggccaagcgatctggatctggagcaacaaacttctcactactcaaacaagcaggtgacgtggaggagaatcccgggcctactagtatggactggatttggcgcatccttttccttgtcggcgctgctaccggcgcgcattccttcgaagaagttcagctggttgaatctggcggcggactggttcaacctggcggatctctgagactgagctgtgccgcctctggctacgcctttagcaactactgggtcaactgggttcgacaggcccctggcaaaggactggaatgggtcgcccaaatctatcccggcgacggcgacaccaactacaacggcaagttcaagggcagattcaccatcagccgggacaacagcaagaacaccctgtacctccagatgaactccctgagagccgaggacaccgccgtgtactattgtgccagatccatcaccaccgtcgtgggctgcgctatggattattggggccagggaaccctggtcaccgtgtcctctacgcgtatccagaaccctgatcctgccgtgtaccagctgcgggatagcaagagcagcgacaagagcgtgtgtctgttcaccgacttcgacagccagaccaacgtgtcccagagcaaggactccgacgtgtacatcaccgataagaccgtgctggacatgcggagcatggacttcaagagcaactccgccgtggcctggtccaacaagtccgatttcgcctgcgccaacgccttcaacaacagcattatccccgaggacacattcttcccaagccccgagagcagctgcgacgtgaagctggtggaaaagagcttcgagacagacaccaacctgaacttccagatcctgtacgagatcctgctgggcaaggccaccctgtacgccgtgctggtgtctgccctggtgctgatggctatggtcaagcggaaggacagccgggga

SEQ ID NO: 36318 - DNA, 2178 bp, synthetic construct
  source 1..2178: mol_type = other DNA
atggccttaccagtgaccgccttgctcctgccgctggccttgctgctccacgccgccaggccggacatccagatgacacagagccctagcagcctgtctgccagcgtgggagacagagtgaccatcacatgcaaggccagcgaccacatcaacaactggctggcctggtatcagcagaagcctggcaaggcccctaagctgctgatctacggcgctaccacactggaaacaggcgtgcccagcagattttctggcagcggctctggcaccgacttcaccctgacaatatccagcctccagcctgaggacttcgccacctactactgtcagcagagctggaacaccccttggacattcggccagggcaccaaggtggaaatcaagagactcgaggacctgaagaacgtgttcccacctgaggtggccgtgttcgagcctagcgaggccgagatcagccacacccagaaagccaccctcgtgtgcctggctaccggcttctaccccgaccatgtggaactgtcttggtgggtcaacggcaaagaggtgcacagcggcgtgtctaccgacccccagccactgaaagaacagcccgccctgaacgacagccggtactgcctgagcagcagactgagagtgtccgccaccttctggcagaacccccggaaccacttcagatgccaggtgcagttctacggcctgagcgagaacgacgagtggacccaggacagagccaagcccgtgacccagatcgtgtctgccgaagcctggggcagagccgatgatgtgattaagatccactggcaggaaaagaagtccaacaccatcctgggcagccaggaaggcaacaccatgaagaccaacgacacctacatgaagttcagctggctgaccgtgcccgagaagtccctggacaaagaacacagatgcatcgtgcggcacgaaaacaacaagaacggcgtggaccaggaaatcatcttcccacccatcaagaccgatgtgattacaatggaccccaaggacaactgctccaaggacgccaacgataccctgctgctccagctgaccaacaccagcgcctactacatgtacttgttgctgctgctgaagtccgtggtgtacttcgccatcatcacatgctgcctgctgatggctatggtcaagcggaaggacagccggggaagggccaagcgatctggatctggagcaacaaacttctcactactcaaacaagcaggtgacgtggaggagaatcccgggcctactagtatggactggatttggcgcatccttttccttgtcggcgctgctaccggcgcgcattccttcgaagaagttcagctggttgaatctggcggcggactggttcaacctggcggatctctgagactgagctgtgccgcctctggctacgcctttagcaactactgggtcaactgggttcgacaggcccctggcaaaggactggaatgggtcgcccaaatctatcccggcgacggcgacaccaactacaacggcaagttcaagggcagattcaccatcagccgggacaacagcaagaacaccctgtacctccagatgaactccctgagagccgaggacaccgccgtgtactattgtgccagatccatcaccaccgtcgtgggctgcgctatggattattggggccagggaaccctggtcaccgtgtcctctacgcgtatccagaaccctgatcctgccgtgtaccagctgcgggatagcaagagcagcgacaagagcgtgtgtctgttcaccgacttcgacagccagaccaacgtgtcccagagcaaggactccgacgtgtacatcaccgataagaccgtgctggacatgcggagcatggacttcaagagcaactccgccgtggcctggtccaacaagtccgatttcgcctgcgccaacgccttcaacaacagcattatccccgaggacacattcttcccaagccccgagagcagcgactccaccgaccacgtgaagcccaaagagacagagaacaccaagcagcccagcaagagctgccacaagcccaaggccatcgtgcacaccgagaaagtgaacatgatgagcctgaccgtgctgggcctgcggatgctgttcgccaaaaccgtggccgtgaacttcctgctgaccgccaagctgttcttcctcctcaccgcc

SEQ ID NO: 36319 - DNA, 2172 bp, synthetic construct
  source 1..2172: mol_type = other DNA
atggccttaccagtgaccgccttgctcctgccgctggccttgctgctccacgccgccaggccggacatccagatgacacagagccctagcagcctgtctgccagcgtgggagacagagtgaccatcacatgcaaggccagcgaccacatcaacaactggctggcctggtatcagcagaagcctggcaaggcccctaagctgctgatctacggcgctaccacactggaaacaggcgtgcccagcagattttctggcagcggctctggcaccgacttcaccctgacaatatccagcctccagcctgaggacttcgccacctactactgtcagcagagctggaacaccccttggacattcggccagggcaccaaggtggaaatcaagagactcgaggacctgaagaacgtgttcccacctgaggtggccgtgttcgagcctagcgaggccgagatcagccacacccagaaagccaccctcgtgtgcctggctaccggcttctaccccgaccatgtggaactgtcttggtgggtcaacggcaaagaggtgcacagcggcgtgtctaccgacccccagccactgaaagaacagcccgccctgaacgacagccggtactgcctgagcagcagactgagagtgtccgccaccttctggcagaacccccggaaccacttcagatgccaggtgcagttctacggcctgagcgagaacgacgagtggacccaggacagagccaagcccgtgacccagatcgtgtctgccgaagcctggggcagagccgatgatgtgattaagatccactggcaggaaaagaagtccaacaccatcctgggcagccaggaaggcaacaccatgaagaccaacgacacctacatgaagttcagctggctgaccgtgcccgagaagtccctggacaaagaacacagatgcatcgtgcggcacgaaaacaacaagaacggcgtggaccaggaaatcatcttcccacccatcaagaccgatgtgattacaatggaccccaaggacaactgctccaaggacgccaacgataccctgctgctccagctgaccaacaccagcgcctactacatgtacttgttgctgctgctgaagtccgtggtgtacttcgccatcatcacatgctgcctgctgcggagaaccgccttctgctgcaacggcgagaagtctagggccaagcgatctggatctggagcaacaaacttctcactactcaaacaagcaggtgacgtggaggagaatcccgggcctactagtatggactggatttggcgcatccttttccttgtcggcgctgctaccggcgcgcattccttcgaagaagttcagctggttgaatctggcggcggactggttcaacctggcggatctctgagactgagctgtgccgcctctggctacgcctttagcaactactgggtcaactgggttcgacaggcccctggcaaaggactggaatgggtcgcccaaatctatcccggcgacggcgacaccaactacaacggcaagttcaagggcagattcaccatcagccgggacaacagcaagaacaccctgtacctccagatgaactccctgagagccgaggacaccgccgtgtactattgtgccagatccatcaccaccgtcgtgggctgcgctatggattattggggccagggaaccctggtcaccgtgtcctctacgcgtatccagaaccctgatcctgccgtgtaccagctgcgggatagcaagagcagcgacaagagcgtgtgtctgttcaccgacttcgacagccagaccaacgtgtcccagagcaaggactccgacgtgtacatcaccgataagaccgtgctggacatgcggagcatggacttcaagagcaactccgccgtggcctggtccaacaagtccgatttcgcctgcgccaacgccttcaacaacagcattatccccgaggacacattcttcccaagccccgagagcagcgactccaccgaccacgtgaagcccaaagagacagagaacaccaagcagcccagcaagagctgccacaagcccaaggccatcgtgcacaccgagaaagtgaacatgatgagcctgaccgtgctgggcctgcggatgctgttcgccaaaaccgtggccgtgaacttcctgctgaccgccaagctgttcttcctc

SEQ ID NO: 36320 - DNA, 2604 bp, synthetic construct
  source 1..2604: mol_type = other DNA
atggccttaccagtgaccgccttgctcctgccgctggccttgctgctccacgccgccaggccgctcgaggaggacctgaagaacgtgttcccacctgaggtggccgtgttcgagcctagcgaggccgagatcagccacacccagaaagccaccctcgtgtgcctggctaccggcttctaccccgaccatgtggaactgtcttggtgggtcaacggcaaagaggtgcacagcggcgtgtgtaccgacccccagccactgaaagaacagcccgccctgaacgacagccggtactgcctgagcagcagactgagagtgtccgccaccttctggcagaacccccggaaccacttcagatgccaggtgcagttctacggcctgagcgagaacgacgagtggacccaggacagagccaagcccgtgacccagatcgtgtctgccgaagcctggggcagagccgattgcggctttaccagcgagagctaccagcagggcgtgctgagcgccaccaacctgagcgtgatcggcttcagaatcctgctgctgaaagtggccggctttaacctgctgatgaccctgcggctgtggtccagcagggccaagcgatctggatctggagcaacaaacttctcactactcaaacaagcaggtgacgtggaggagaatcccgggcctactagcatggccttaccagtgaccgccttgctcctgccgctggccttgctgctccacgccgccaggccggacatccagatgacacagagccctagcagcctgtctgccagcgtgggagacagagtgaccatcacatgcaaggccagcgaccacatcaacaactggctggcctggtatcagcagaagcctggcaaggcccctaagctgctgatctacggcgctaccacactggaaacaggcgtgcccagcagattttctggcagcggctctggcaccgacttcaccctgacaatatccagcctccagcctgaggacttcgccacctactactgtcagcagagctggaacaccccttggacattcggccagggcaccaaggtggaaatcaagagaggcggaggcggaagtggaggcggaggatctggcggcggaggctctgaagttcagctggttgaatctggcggcggactggttcaacctggcggatctctgagactgagctgtgccgcctctggctacgcctttagcaactactgggtcaactgggttcgacaggcccctggcaaaggactggaatgggtcgcccaaatctatcccggcgacggcgacaccaactacaacggcaagttcaagggcagattcaccatcagccgggacaacagcaagaacaccctgtacctccagatgaactccctgagagccgaggacaccgccgtgtactattgtgccagatccatcaccaccgtcgtgggctgcgctatggattattggggccagggaaccctggtcaccgtgtcctctacgcgtatccagaaccctgatcctgccgtgtaccagctgcgggatagcaagagcagcgacaagagcgtgtgtctgttcaccgacttcgacagccagaccaacgtgtcccagagcaaggactccgacgtgtacatcaccgataagtgcgtgctggacatgcggagcatggacttcaagagcaactccgccgtggcctggtccaacaagtccgatttcgcctgcgccaacgccttcaacaacagcattatccccgaggacacattcttcccaagccccgagagcagctgcgacgtgaagctggtggaaaagagcttcgagacagacaccaacctgaacttccagatcctgtacgaggtgatcggcttcagaatcctgctgctgaaagtggccggctttaacctgctgatgaccctgcggctgtggtccagccgcgccaagagaagcggatctggcgtgaagcagaccctgaatttcgacctgctgaagctggctggcgacgtggaatccaacccaggcccttctagaggccatatgaccgagtacaagcccacggtgcgcctcgccacccgcgacgacgtccccagggccgtacgcaccctcgccgccgcgttcgccgactaccccgccacgcgccacaccgtcgatccggaccgccacatcgagcgggtcaccgagctgcaagaactcttcctcacgcgcgtcgggctcgacatcggcaaggtgtgggtcgcggacgacggcgccgcggtggcggtctggaccacgccggagagcgtcgaagcgggggcggtgttcgccgagatcggcccgcgcatggccgagttgagcggttcccggctggccgcgcagcaacagatggaaggcctcctggcgccgcaccggcccaaggagcccgcgtggttcctggccaccgtcggcgtctcgcccgaccaccagggcaagggtctgggcagcgccgtcgtgctccccggagtggaggcggccgagcgcgccggggtgcccgccttcctggagacctccgcgccccgcaacctccccttctacgagcggctcggcttcaccgtcaccgccgacgtcgaggtgcccgaaggaccgcgcacctggtgcatgacccgcaagcccggtgcctga

SEQ ID NO: 36321 - DNA, 2604 bp, synthetic construct
  source 1..2604: mol_type = other DNA
atggccttaccagtgaccgccttgctcctgccgctggccttgctgctccacgccgccaggccgctcgagatccagaaccctgatcctgccgtgtaccagctgcgggatagcaagagcagcgacaagagcgtgtgtctgttcaccgacttcgacagccagaccaacgtgtcccagagcaaggactccgacgtgtacatcaccgataagtgcgtgctggacatgcggagcatggacttcaagagcaactccgccgtggcctggtccaacaagtccgatttcgcctgcgccaacgccttcaacaacagcattatccccgaggacacattcttcccaagccccgagagcagctgcgacgtgaagctggtggaaaagagcttcgagacagacaccaacctgaacttccagatcctgtacgaggtgatcggcttcagaatcctgctgctgaaagtggccggctttaacctgctgatgaccctgcggctgtggtccagcagggccaagcgatctggatctggagcaacaaacttctcactactcaaacaagcaggtgacgtggaggagaatcccgggcctactagcatggccttaccagtgaccgccttgctcctgccgctggccttgctgctccacgccgccaggccggacatccagatgacacagagccctagcagcctgtctgccagcgtgggagacagagtgaccatcacatgcaaggccagcgaccacatcaacaactggctggcctggtatcagcagaagcctggcaaggcccctaagctgctgatctacggcgctaccacactggaaacaggcgtgcccagcagattttctggcagcggctctggcaccgacttcaccctgacaatatccagcctccagcctgaggacttcgccacctactactgtcagcagagctggaacaccccttggacattcggccagggcaccaaggtggaaatcaagagaggcggaggcggaagtggaggcggaggatctggcggcggaggctctgaagttcagctggttgaatctggcggcggactggttcaacctggcggatctctgagactgagctgtgccgcctctggctacgcctttagcaactactgggtcaactgggttcgacaggcccctggcaaaggactggaatgggtcgcccaaatctatcccggcgacggcgacaccaactacaacggcaagttcaagggcagattcaccatcagccgggacaacagcaagaacaccctgtacctccagatgaactccctgagagccgaggacaccgccgtgtactattgtgccagatccatcaccaccgtcgtgggctgcgctatggattattggggccagggaaccctggtcaccgtgtcctctacgcgtgaggacctgaagaacgtgttcccacctgaggtggccgtgttcgagcctagcgaggccgagatcagccacacccagaaagccaccctcgtgtgcctggctaccggcttctaccccgaccatgtggaactgtcttggtgggtcaacggcaaagaggtgcacagcggcgtgtgtaccgacccccagccactgaaagaacagcccgccctgaacgacagccggtactgcctgagcagcagactgagagtgtccgccaccttctggcagaacccccggaaccacttcagatgccaggtgcagttctacggcctgagcgagaacgacgagtggacccaggacagagccaagcccgtgacccagatcgtgtctgccgaagcctggggcagagccgattgcggctttaccagcgagagctaccagcagggcgtgctgagcgccaccaacctgagcgtgatcggcttcagaatcctgctgctgaaagtggccggctttaacctgctgatgaccctgcggctgtggtccagccgcgccaagagaagcggatctggcgtgaagcagaccctgaatttcgacctgctgaagctggctggcgacgtggaatccaacccaggcccttctagaggccatatgaccgagtacaagcccacggtgcgcctcgccacccgcgacgacgtccccagggccgtacgcaccctcgccgccgcgttcgccgactaccccgccacgcgccacaccgtcgatccggaccgccacatcgagcgggtcaccgagctgcaagaactcttcctcacgcgcgtcgggctcgacatcggcaaggtgtgggtcgcggacgacggcgccgcggtggcggtctggaccacgccggagagcgtcgaagcgggggcggtgttcgccgagatcggcccgcgcatggccgagttgagcggttcccggctggccgcgcagcaacagatggaaggcctcctggcgccgcaccggcccaaggagcccgcgtggttcctggccaccgtcggcgtctcgcccgaccaccagggcaagggtctgggcagcgccgtcgtgctccccggagtggaggcggccgagcgcgccggggtgcccgccttcctggagacctccgcgccccgcaacctccccttctacgagcggctcggcttcaccgtcaccgccgacgtcgaggtgcccgaaggaccgcgcacctggtgcatgacccgcaagcccggtgcctga

SEQ ID NO: 36322 - DNA, 2604 bp, synthetic construct; identical to SEQ ID NO: 36320
  source 1..2604: mol_type = other DNA

SEQ ID NO: 36323 - DNA, 2928 bp, synthetic construct
  source 1..2928: mol_type = other DNA
atggccttaccagtgaccgccttgctcctgccgctggccttgctgctccacgccgccaggccgctcgaggaggacctgaagaacgtgttcccacctgaggtggccgtgttcgagcctagcgaggccgagatcagccacacccagaaagccaccctcgtgtgcctggctaccggcttctaccccgaccatgtggaactgtcttggtgggtcaacggcaaagaggtgcacagcggcgtgtctaccgacccccagccactgaaagaacagcccgccctgaacgacagccggtactgcctgagcagcagactgagagtgtccgccaccttctggcagaacccccggaaccacttcagatgccaggtgcagttctacggcctgagcgagaacgacgagtggacccaggacagagccaagcccgtgacccagatcgtgtctgccgaagcctggggcagagccgatgatgtgattaagatccactggcaggaaaagaagtccaacaccatcctgggcagccaggaaggcaacaccatgaagaccaacgacacctacatgaagttcagctggctgaccgtgcccgagaagtccctggacaaagaacacagatgcatcgtgcggcacgaaaacaacaagaacggcgtggaccaggaaatcatcttcccacccatcaagaccgatgtgattacaatggaccccaaggacaactgctccaaggacgccaacgataccctgctgctccagctgaccaacaccagcgcctactacatgtacttgttgctgctgctgaagtccgtggtgtacttcgccatcatcacatgctgcctgctgatggctatggtcaagcggaaggacagccggggaagggccaagcgatctggatctggagcaacaaacttctcactactcaaacaagcaggtgacgtggaggagaatcccgggcctactagcatggccttaccagtgaccgccttgctcctgccgctggccttgctgctccacgccgccaggccggacatccagatgacacagagccctagcagcctgtctgccagcgtgggagacagagtgaccatcacatgcaaggccagcgaccacatcaacaactggctggcctggtatcagcagaagcctggcaaggcccctaagctgctgatctacggcgctaccacactggaaacaggcgtgcccagcagattttctggcagcggctctggcaccgacttcaccctgacaatatccagcctccagcctgaggacttcgccacctactactgtcagcagagctggaacaccccttggacattcggccagggcaccaaggtggaaatcaagagaggcggaggcggaagtggaggcggaggatctggcggcggaggctctgaagttcagctggttgaatctggcggcggactggttcaacctggcggatctctgagactgagctgtgccgcctctggctacgcctttagcaactactgggtcaactgggttcgacaggcccctggcaaaggactggaatgggtcgcccaaatctatcccggcgacggcgacaccaactacaacggcaagttcaagggcagattcaccatcagccgggacaacagcaagaacaccctgtacctccagatgaactccctgagagccgaggacaccgccgtgtactattgtgccagatccatcaccaccgtcgtgggctgcgctatggattattggggccagggaaccctggtcaccgtgtcctctacgcgtatccagaaccctgatcctgccgtgtaccagctgcgggatagcaagagcagcgacaagagcgtgtgtctgttcaccgacttcgacagccagaccaacgtgtcccagagcaaggactccgacgtgtacatcaccgataagaccgtgctggacatgcggagcatggacttcaagagcaactccgccgtggcctggtccaacaagtccgatttcgcctgcgccaacgccttcaacaacagcattatccccgaggacacattcttcccaagccccgagagcagcgactccaccgaccacgtgaagcccaaagagacagagaacaccaagcagcccagcaagagctgccacaagcccaaggccatcgtgcacaccgagaaagtgaacatgatgagcctgaccgtgctgggcctgcggatgctgttcgccaaaaccgtggccgtgaacttcctgctgaccgccaagctgttcttcctcctcaccgcccgcgccaagagaagcggatctggcgtgaagcagaccctgaatttcgacctgctgaagctggctggcgacgtggaatccaacccaggcccttctagaggccatatgaccgagtacaagcccacggtgcgcctcgccacccgcgacgacgtccccagggccgtacgcaccctcgccgccgcgttcgccgactaccccgccacgcgccacaccgtcgatccggaccgccacatcgagcgggtcaccgagctgcaagaactcttcctcacgcgcgtcgggctcgacatcggcaaggtgtgggtcgcggacgacggcgccgcggtggcggtctggaccacgccggagagcgtcgaagcgggggcggtgttcgccgagatcggcccgcgcatggccgagttgagcggttcccggctggccgcgcagcaacagatggaaggcctcctggcgccgcaccggcccaaggagcccgcgtggttcctggccaccgtcggcgtctcgcccgaccaccagggcaagggtctgggcagcgccgtcgtgctccccggagtggaggcggccgagcgcgccggggtgcccgccttcctggagacctccgcgccccgcaacctccccttctacgagcggctcggcttcaccgtcaccgccgacgtcgaggtgcccgaaggaccgcgcacctggtgcatgacccgcaagcccggtgcctga

SEQ ID NO: 36324 - DNA, 2928 bp, synthetic construct
  source 1..2928: mol_type = other DNA
atggccttaccagtgaccgccttgctcctgccgctggccttgctgctccacgccgccaggccgctcgagatccagaaccctgatcctgccgtgtaccagctgcgggatagcaagagcagcgacaagagcgtgtgtctgttcaccgacttcgacagccagaccaacgtgtcccagagcaaggactccgacgtgtacatcaccgataagaccgtgctggacatgcggagcatggacttcaagagcaactccgccgtggcctggtccaacaagtccgatttcgcctgcgccaacgccttcaacaacagcattatccccgaggacacattcttcccaagccccgagagcagcgactccaccgaccacgtgaagcccaaagagacagagaacaccaagcagcccagcaagagctgccacaagcccaaggccatcgtgcacaccgagaaagtgaacatgatgagcctgaccgtgctgggcctgcggatgctgttcgccaaaaccgtggccgtgaacttcctgctgaccgccaagctgttcttcctcctcaccgccagggccaagcgatctggatctggagcaacaaacttctcactactcaaacaagcaggtgacgtggaggagaatcccgggcctactagcatggccttaccagtgaccgccttgctcctgccgctggccttgctgctccacgccgccaggccggacatccagatgacacagagccctagcagcctgtctgccagcgtgggagacagagtgaccatcacatgcaaggccagcgaccacatcaacaactggctggcctggtatcagcagaagcctggcaaggcccctaagctgctgatctacggcgctaccacactggaaacaggcgtgcccagcagattttctggcagcggctctggcaccgacttcaccctgacaatatccagcctccagcctgaggacttcgccacctactactgtcagcagagctggaacaccccttggacattcggccagggcaccaaggtggaaatcaagagaggcggaggcggaagtggaggcggaggatctggcggcggaggctctgaagttcagctggttgaatctggcggcggactggttcaacctggcggatctctgagactgagctgtgccgcctctggctacgcctttagcaactactgggtcaactgggttcgacaggcccctggcaaaggactggaatgggtcgcccaaatctatcccggcgacggcgacaccaactacaacggcaagttcaagggcagattcaccatcagccgggacaacagcaagaacaccctgtacctccagatgaactccctgagagccgaggacaccgccgtgtactattgtgccagatccatcaccaccgtcgtgggctgcgctatggattattggggccagggaaccctggtcaccgtgtcctctacgcgtgaggacctgaagaacgtgttcccacctgaggtggccgtgttcgagcctagcgaggccgagatcagccacacccagaaagccaccctcgtgtgcctggctaccggcttctaccccgaccatgtggaactgtcttggtgggtcaacggcaaagaggtgcacagcggcgtgtctaccgacccccagccactgaaagaacagcccgccctgaacgacagccggtactgcctgagcagcagactgagagtgtccgccaccttctggcagaacccccggaaccacttcagatgccaggtgcagttctacggcctgagcgagaacgacgagtggacccaggacagagccaagcccgtgacccagatcgtgtctgccgaagcctggggcagagccgatgatgtgattaagatccactggcaggaaaagaagtccaacaccatcctgggcagccaggaaggcaacaccatgaagaccaacgacacctacatgaagttcagctggctgaccgtgcccgagaagtccctggacaaagaacacagatgcatcgtgcggcacgaaaacaacaagaacggcgtggaccaggaaatcatcttcccacccatcaagaccgatgtgattacaatggaccccaaggacaactgctccaaggacgccaacgataccctgctgctccagctgaccaacaccagcgcctactacatgtacttgttgctgctgctgaagtccgtggtgtacttcgccatcatcacatgctgcctgctgatggctatggtcaagcggaaggacagccggggacgcgccaagagaagcggatctggcgtgaagcagaccctgaatttcgacctgctgaagctggctggcgacgtggaatccaacccaggcccttctagaggccatatgaccgagtacaagcccacggtgcgcctcgccacccgcgacgacgtccccagggccgtacgcaccctcgccgccgcgttcgccgactaccccgccacgcgccacaccgtcgatccggaccgccacatcgagcgggtcaccgagctgcaagaactcttcctcacgcgcgtcgggctcgacatcggcaaggtgtgggtcgcggacgacggcgccgcggtggcggtctggaccacgccggagagcgtcgaagcgggggcggtgttcgccgagatcggcccgcgcatggccgagttgagcggttcccggctggccgcgcagcaacagatggaaggcctcctggcgccgcaccggcccaaggagcccgcgtggttcctggccaccgtcggcgtctcgcccgaccaccagggcaagggtctgggcagcgccgtcgtgctccccggagtggaggcggccgagcgcgccggggtgcccgccttcctggagacctccgcgccccgcaacctccccttctacgagcggctcggcttcaccgtcaccgccgacgtcgaggtgcccgaaggaccgcgcacctggtgcatgacccgcaagcccggtgcctga

SEQ ID NO: 36325 - DNA, 2922 bp, synthetic construct
  source 1..2922: mol_type = other DNA
atggccttaccagtgaccgccttgctcctgccgctggccttgctgctccacgccgccaggccgctcgaggaggacctgaagaacgtgttcccacctgaggtggccgtgttcgagcctagcgaggccgagatcagccacacccagaaagccaccctcgtgtgcctggctaccggcttctaccccgaccatgtggaactgtcttggtgggtcaacggcaaagaggtgcacagcggcgtgtgtaccgacccccagccactgaaagaacagcccgccctgaacgacagccggtactgcctgagcagcagactgagagtgtccgccaccttctggcagaacccccggaaccacttcagatgccaggtgcagttctacggcctgagcgagaacgacgagtggacccaggacagagccaagcccgtgacccagatcgtgtctgccgaagcctggggcagagccgatgatgtgattaagatccactggcaggaaaagaagtccaacaccatcctgggcagccaggaaggcaacaccatgaagaccaacgacacctacatgaagttcagctggctgaccgtgcccgagaagtccctggacaaagaacacagatgcatcgtgcggcacgaaaacaacaagaacggcgtggaccaggaaatcatcttcccacccatcaagaccgatgtgattacaatggaccccaaggacaactgctccaaggacgccaacgataccctgctgctccagctgaccaacaccagcgcctactacatgtacttgttgctgctgctgaagtccgtggtgtacttcgccatcatcacatgctgcctgctgcggagaaccgccttctgctgcaacggcgagaagtctagggccaagcgatctggatctggagcaacaaacttctcactactcaaacaagcaggtgacgtggaggagaatcccgggcctactagcatggccttaccagtgaccgccttgctcctgccgctggccttgctgctccacgccgccaggccggacatccagatgacacagagccctagcagcctgtctgccagcgtgggagacagagtgaccatcacatgcaaggccagcgaccacatcaacaactggctggcctggtatcagcagaagcctggcaaggcccctaagctgctgatctacggcgctaccacactggaaacaggcgtgcccagcagattttctggcagcggctctggcaccgacttcaccctgacaatatccagcctccagcctgaggacttcgccacctactactgtcagcagagctggaacaccccttggacattcggccagggcaccaaggtggaaatcaagagaggcggaggcggaagtggaggcggaggatctggcggcggaggctctgaagttcagctggttgaatctggcggcggactggttcaacctggcggatctctgagactgagctgtgccgcctctggctacgcctttagcaactactgggtcaactgggttcgacaggcccctggcaaaggactggaatgggtcgcccaaatctatcccggcgacggcgacaccaactacaacggcaagttcaagggcagattcaccatcagccgggacaacagcaagaacaccctgtacctccagatgaactccctgagagccgaggacaccgccgtgtactattgtgccagatccatcaccaccgtcgtgggctgcgctatggattattggggccagggaaccctggtcaccgtgtcctctacgcgtatccagaaccctgatcctgccgtgtaccagctgcgggatagcaagagcagcgacaagagcgtgtgtctgttcaccgacttcgacagccagaccaacgtgtcccagagcaaggactccgacgtgtacatcaccgataagtgcgtgctggacatgcggagcatggacttcaagagcaactccgccgtggcctggtccaacaagtccgatttcgcctgcgccaacgccttcaacaacagcattatccccgaggacacattcttcccaagccccgagagcagcgactccaccgaccacgtgaagcccaaagagacagagaacaccaagcagcccagcaagagctgccacaagcccaaggccatcgtgcacaccgagaaagtgaacatgatgagcctgaccgtgctgggcctgcggatgctgttcgccaaaaccgtggccgtgaacttcctgctgaccgccaagctgttcttcctccgcgccaagagaagcggatctggcgtgaagcagaccctgaatttcgacctgctgaagctggctggcgacgtggaatccaacccaggcccttctagaggccatatgaccgagtacaagcccacggtgcgcctcgccacccgcgacgacgtccccagggccgtacgcaccctcgccgccgcgttcgccgactaccccgccacgcgccacaccgtcgatccggaccgccacatcgagcgggtcaccgagctgcaagaactcttcctcacgcgcgtcgggctcgacatcggcaaggtgtgggtcgcggacgacggcgccgcggtggcggtctggaccacgccggagagcgtcgaagcgggggcggtgttcgccgagatcggcccgcgcatggccgagttgagcggttcccggctggccgcgcagcaacagatggaaggcctcctggcgccgcaccggcccaaggagcccgcgtggttcctggccaccgtcggcgtctcgcccgaccaccagggcaagggtctgggcagcgccgtcgtgctccccggagtggaggcggccgagcgcgccggggtgcccgccttcctggagacctccgcgccccgcaacctccccttctacgagcggctcggcttcaccgtcaccgccgacgtcgaggtgcccgaaggaccgcgcacctggtgcatgacccgcaagcccggtgcctga

SEQ ID NO: 36326 - DNA, 2922 bp, synthetic construct
  source 1..2922: mol_type = other DNA
atggccttaccagtgaccgccttgctcctgccgctggccttgctgctccacgccgccaggccgctcgagatccagaaccctgatcctgccgtgtaccagctgcgggatagcaagagcagcgacaagagcgtgtgtctgttcaccgacttcgacagccagaccaacgtgtcccagagcaaggactccgacgtgtacatcaccgataagtgcgtgctggacatgcggagcatggacttcaagagcaactccgccgtggcctggtccaacaagtccgatttcgcctgcgccaacgccttcaacaacagcattatccccgaggacacattcttcccaagccccgagagcagcgactccaccgaccacgtgaagcccaaagagacagagaacaccaagcagcccagcaagagctgccacaagcccaaggccatcgtgcacaccgagaaagtgaacatgatgagcctgaccgtgctgggcctgcggatgctgttcgccaaaaccgtggccgtgaacttcctgctgaccgccaagctgttcttcctcagggccaagcgatctggatctggagcaacaaacttctcactactcaaacaagcaggtgacgtggaggagaatcccgggcctactagcatggccttaccagtgaccgccttgctcctgccgctggccttgctgctccacgccgccaggccggacatccagatgacacagagccctagcagcctgtctgccagcgtgggagacagagtgaccatcacatgcaaggccagcgaccacatcaacaactggctggcctggtatcagcagaagcctggcaaggcccctaagctgctgatctacggcgctaccacactggaaacaggcgtgcccagcagattttctggcagcggctctggcaccgacttcaccctgacaatatccagcctccagcctgaggacttcgccacctactactgtcagcagagctggaacaccccttggacattcggccagggcaccaaggtggaaatcaagagaggcggaggcggaagtggaggcggaggatctggcggcggaggctctgaagttcagctggttgaatctggcggcggactggttcaacctggcggatctctgagactgagctgtgccgcctctggctacgcctttagcaactactgggtcaactgggttcgacaggcccctggcaaaggactggaatgggtcgcccaaatctatcccggcgacggcgacaccaactacaacggcaagttcaagggcagattcaccatcagccgggacaacagcaagaacaccctgtacctccagatgaactccctgagagccgaggacaccgccgtgtactattgtgccagatccatcaccaccgtcgtgggctgcgctatggattattggggccagggaaccctggtcaccgtgtcctctacgcgtgaggacctgaagaacgtgttcccacctgaggtggccgtgttcgagcctagcgaggccgagatcagccacacccagaaagccaccctcgtgtgcctggctaccggcttctaccccgaccatgtggaactgtcttggtgggtcaacggcaaagaggtgcacagcggcgtgtgtaccgacccccagccactgaaagaacagcccgccctgaacgacagccggtactgcctgagcagcagactgagagtgtccgccaccttctggcagaacccccggaaccacttcagatgccaggtgcagttctacggcctgagcgagaacgacgagtggacccaggacagagccaagcccgtgacccagatcgtgtctgccgaagcctggggcagagccgatgatgtgattaagatccactggcaggaaaagaagtccaacaccatcctgggcagccaggaaggcaacaccatgaagaccaacgacacctacatgaagttcagctggctgaccgtgcccgagaagtccctggacaaagaacacagatgcatcgtgcggcacgaaaacaacaagaacggcgtggaccaggaaatcatcttcccacccatcaagaccgatgtgattacaatggaccccaaggacaactgctccaaggacgccaacgataccctgctgctccagctgaccaacaccagcgcctactacatgtacttgttgctgctgctgaagtccgtggtgtacttcgccatcatcacatgctgcctgctgcggagaaccgccttctgctgcaacggcgagaagtctcgcgccaagagaagcggatctggcgtgaagcagaccctgaatttcgacctgctgaagctggctggcgacgtggaatccaacccaggcccttctagaggccatatgaccgagtacaagcccacggtgcgcctcgccacccgcgacgacgtccccagggccgtacgcaccctcgccgccgcgttcgccgactaccccgccacgcgccacaccgtcgatccggaccgccacatcgagcgggtcaccgagctgcaagaactcttcctcacgcgcgtcgggctcgacatcggcaaggtgtgggtcgcggacgacggcgccgcggtggcggtctggaccacgccggagagcgtcgaagcgggggcggtgttcgccgagatcggcccgcgcatggccgagttgagcggttcccggctggccgcgcagcaacagatggaaggcctcctggcgccgcaccggcccaaggagcccgcgtggttcctggccaccgtcggcgtctcgcccgaccaccagggcaagggtctgggcagcgccgtcgtgctccccggagtggaggcggccgagcgcgccggggtgcccgccttcctggagacctccgcgccccgcaacctccccttctacgagcggctcggcttcaccgtcaccgccgacgtcgaggtgcccgaaggaccgcgcacctggtgcatgacccgcaagcccggtgcctga

SEQ ID NO: 36327 - DNA, 2922 bp, synthetic construct
  source 1..2922: mol_type = other DNA
atggccttaccagtgaccgccttgctcctgccgctggccttgctgctccacgccgccaggccgctcgaggaggacctgaagaacgtgttcccacctgaggtggccgtgttcgagcctagcgaggccgagatcagccacacccagaaagccaccctcgtgtgcctggctaccggcttctaccccgaccatgtggaactgtcttggtgggtcaacggcaaagaggtgcacagcggcgtgtctaccgacccccagccactgaaagaacagcccgccctgaacgacagccggtactgcctgagcagcagactgagagtgtccgccaccttctggcagaacccccggaaccacttcagatgccaggtgcagttctacggcctgagcgagaacgacgagtggacccaggacagagccaagcccgtgacccagatcgtgtctgccgaagcctggggcagagccgatgatgtgattaagatccactggcaggaaaagaagtccaacaccatcctgggcagccaggaaggcaacaccatgaagaccaacgacacctacatgaagttcagctggctgaccgtgcccgagaagtccctggacaaagaacacagatgcatcgtgcggcacgaaaacaacaagaacggcgtggaccaggaaatcatcttcccacccatcaagaccgatgtgattacaatggaccccaaggacaactgctccaaggacgccaacgataccctgctgctccagctgaccaacaccagcgcctactacatgtacttgttgctgctgctgaagtccgtggtgtacttcgccatcatcacatgctgcctgctgcggagaaccgccttctgctgcaacggcgagaagtctagggccaagcgatctggatctggagcaacaaacttctcactactcaaacaagcaggtgacgtggaggagaatcccgggcctactagcatggccttaccagtgaccgccttgctcctgccgctggccttgctgctccacgccgccaggccggacatccagatgacacagagccctagcagcctgtctgccagcgtgggagacagagtgaccatcacatgcaaggccagcgaccacatcaacaactggctggcctggtatcagcagaagcctggcaaggcccctaagctgctgatctacggcgctaccacactggaaacaggcgtgcccagcagattttctggcagcggctctggcaccgacttcaccctgacaatatccagcctccagcctgaggacttcgccacctactactgtcagcagagctggaacaccccttggacattcggccagggcaccaaggtggaaatcaagagaggcggaggcggaagtggaggcggaggatctggcggcggaggctctgaagttcagctggttgaatctggcggcggactggttcaacctggcggatctctgagactgagctgtgccgcctctggctacgcctttagcaactactgggtcaactgggttcgacaggcccctggcaaaggactggaatgggtcgcccaaatctatcccggcgacggcgacaccaactacaacggcaagttcaagggcagattcaccatcagccgggacaacagcaagaacaccctgtacctccagatgaactccctgagagccgaggacaccgccgtgtactattgtgccagatccatcaccaccgtcgtgggctgcgctatggattattggggccagggaaccctggtcaccgtgtcctctacgcgtatccagaaccctgatcctgccgtgtaccagctgcgggatagcaagagcagcgacaagagcgtgtgtctgttcaccgacttcgacagccagaccaacgtgtcccagagcaaggactccgacgtgtacatcaccgataagaccgtgctggacatgcggagcatggacttcaagagcaactccgccgtggcctggtccaacaagtccgatttcgcctgcgccaacgccttcaacaacagcattatccccgaggacacattcttcccaagccccgagagcagcgactccaccgaccacgtgaagcccaaagagacagagaacaccaagcagcccagcaagagctgccacaagcccaaggccatcgtgcacaccgagaaagtgaacatgatgagcctgaccgtgctgggcctgcggatgctgttcgccaaaaccgtggccgtgaacttcctgctgaccgccaagctgttcttcctccgcgccaagagaagcggatctggcgtgaagcagaccctgaatttcgacctgctgaagctggctggcgacgtggaatccaacccaggcccttctagaggccatatgaccgagtacaagcccacggtgcgcctcgccacccgcgacgacgtccccagggccgtacgcaccctcgccgccgcgttcgccgactaccccgccacgcgccacaccgtcgatccggaccgccacatcgagcgggtcaccgagctgcaagaactcttcctcacgcgcgtcgggctcgacatcggcaaggtgtgggtcgcggacgacggcgccgcggtggcggtctggaccacgccggagagcgtcgaagcgggggcggtgttcgccgagatcggcccgcgcatggccgagttgagcggttcccggctggccgcgcagcaacagatggaaggcctcctggcgccgcaccggcccaaggagcccgcgtggttcctggccaccgtcggcgtctcgcccgaccaccagggcaagggtctgggcagcgccgtcgtgctccccggagtggaggcggccgagcgcgccggggtgcccgccttcctggagacctccgcgccccgcaacctccccttctacgagcggctcggcttcaccgtcaccgccgacgtcgaggtgcccgaaggaccgcgcacctggtgcatgacccgcaagcccggtgcctga

SEQ ID NO: 36328 - DNA, 2922 bp, synthetic construct
  source 1..2922: mol_type = other DNA
atggccttaccagtgaccgccttgctcctgccgctggccttgctgctccacgccgccaggccgctcgagatccagaaccctgatcctgccgtgtaccagctgcgggatagcaagagcagcgacaagagcgtgtgtctgttcaccgacttcgacagccagaccaacgtgtcccagagcaaggactccgacgtgtacatcaccgataagaccgtgctggacatgcggagcatggacttcaagagcaactccgccgtggcctggtccaacaagtccgatttcgcctgcgccaacgccttcaacaacagcattatccccgaggacacattcttcccaagccccgagagcagcgactccaccgaccacgtgaagcccaaagagacagagaacaccaagcagcccagcaagagctgccacaagcccaaggccatcgtgcacaccgagaaagtgaacatgatgagcctgaccgtgctgggcctgcggatgctgttcgccaaaaccgtggccgtgaacttcctgctgaccgccaagctgttcttcctcagggccaagcgatctggatctggagcaacaaacttctcactactcaaacaagcaggtgacgtggaggagaatcccgggcctactagcatggccttaccagtgaccgccttgctcctgccgctggccttgctgctccacgccgccaggccggacatccagatgacacagagccctagcagcctgtctgccagcgtgggagacagagtgaccatcacatgcaaggccagcgaccacatcaacaactggctggcctggtatcagcagaagcctggcaaggcccctaagctgctgatctacggcgctaccacactggaaacaggcgtgcccagcagattttctggcagcggctctggcaccgacttcaccctgacaatatccagcctccagcctgaggacttcgccacctactactgtcagcagagctggaacaccccttggacattcggccagggcaccaaggtggaaatcaagagaggcggaggcggaagtggaggcggaggatctggcggcggaggctctgaagttcagctggttgaatctggcggcggactggttcaacctggcggatctctgagactgagctgtgccgcctctggctacgcctttagcaactactgggtcaactgggttcgacaggcccctggcaaaggactggaatgggtcgcccaaatctatcccggcgacggcgacaccaactacaacggcaagttcaagggcagattcaccatcagccgggacaacagcaagaacaccctgtacctccagatgaactccctgagagccgaggacaccgccgtgtactattgtgccagatccatcaccaccgtcgtgggctgcgctatggattattggggccagggaaccctggtcaccgtgtcctctacgcgtgaggacctgaagaacgtgttcccacctgaggtggccgtgttcgagcctagcgaggccgagatcagccacacccagaaagccaccctcgtgtgcctggctaccggcttctaccccgaccatgtggaactgtcttggtgggtcaacggcaaagaggtgcacagcggcgtgtctaccgacccccagccactgaaagaacagcccgccctgaacgacagccggtactgcctgagcagcagactgagagtgtccgccaccttctggcagaacccccggaaccacttcagatgccaggtgcagttctacggcctgagcgagaacgacgagtggacccaggacagagccaagcccgtgacccagatcgtgtctgccgaagcctggggcagagccgatgatgtgattaagatccactggcaggaaaagaagtccaacaccatcctgggcagccaggaaggcaacaccatgaagaccaacgacacctacatgaagttcagctggctgaccgtgcccgagaagtccctggacaaagaacacagatgcatcgtgcggcacgaaaacaacaagaacggcgtggaccaggaaatcatcttcccacccatcaagaccgatgtgattacaatggaccccaaggacaactgctccaaggacgccaacgataccctgctgctccagctgaccaacaccagcgcctactacatgtacttgttgctgctgctgaagtccgtggtgtacttcgccatcatcacatgctgcctgctgcggagaaccgccttctgctgcaacggcgagaagtctcgcgccaagagaagcggatctggcgtgaagcagaccctgaatttcgacctgctgaagctggctggcgacgtggaatccaacccaggcccttctagaggccatatgaccgagtacaagcccacggtgcgcctcgccacccgcgacgacgtccccagggccgtacgcaccctcgccgccgcgttcgccgactaccccgccacgcgccacaccgtcgatccggaccgccacatcgagcgggtcaccgagctgcaagaactcttcctcacgcgcgtcgggctcgacatcggcaaggtgtgggtcgcggacgacggcgccgcggtggcggtctggaccacgccggagagcgtcgaagcgggggcggtgttcgccgagatcggcccgcgcatggccgagttgagcggttcccggctggccgcgcagcaacagatggaaggcctcctggcgccgcaccggcccaaggagcccgcgtggttcctggccaccgtcggcgtctcgcccgaccaccagggcaagggtctgggcagcgccgtcgtgctccccggagtggaggcggccgagcgcgccggggtgcccgccttcctggagacctccgcgccccgcaacctccccttctacgagcggctcggcttcaccgtcaccgccgacgtcgaggtgcccgaaggaccgcgcacctggtgcatgacccgcaagcccggtgcctga

SEQ ID NO: 36329 - DNA, 2616 bp, synthetic construct
  source 1..2616: mol_type = other DNA
atggccttaccagtgaccgccttgctcctgccgctggccttgctgctccacgccgccaggccgctcgaggaggacctgaagaacgtgttcccacctgaggtggccgtgttcgagcctagcaaggccgagatcgcccacacccagaaagccaccctcgtgtgcctggctaccggcttctaccccgaccatgtggaactgtcttggtgggtcaacggcaaagaggtgcacagcggcgtgtgtaccgacccccagccactgaaagaacagcccgccctgaacgacagccggtactgcctgagcagcagactgagagtgtccgccaccttctggcagaacccccggaaccacttcagatgccaggtgcagttctacggcctgagcgagaacgacgagtggacccaggacagagccaagcccgtgacccagatcgtgtctgccgaagcctggggcagagccgattgcggcatcaccagcgccagctaccaccagggcgtgctgagcgccaccatcctgtacgagatcctgctgggcaaggccaccctgtacgccgtgctggtgtctgccctggtgctgatggctatggtcaagcggaaggacagccggggaagggccaagcgatctggatctggagcaacaaacttctcactactcaaacaagcaggtgacgtggaggagaatcccgggcctactagcatggccttaccagtgaccgccttgctcctgccgctggccttgctgctccacgccgccaggccggacatccagatgacacagagccctagcagcctgtctgccagcgtgggagacagagtgaccatcacatgcaaggccagcgaccacatcaacaactggctggcctggtatcagcagaagcctggcaaggcccctaagctgctgatctacggcgctaccacactggaaacaggcgtgcccagcagattttctggcagcggctctggcaccgacttcaccctgacaatatccagcctccagcctgaggacttcgccacctactactgtcagcagagctggaacaccccttggacattcggccagggcaccaaggtggaaatcaagagaggcggaggcggaagtggaggcggaggatctggcggcggaggctctgaagttcagctggttgaatctggcggcggactggttcaacctggcggatctctgagactgagctgtgccgcctctggctacgcctttagcaactactgggtcaactgggttcgacaggcccctggcaaaggactggaatgggtcgcccaaatctatcccggcgacggcgacaccaactacaacggcaagttcaagggcagattcaccatcagccgggacaacagcaagaacaccctgtacctccagatgaactccctgagagccgaggacaccgccgtgtactattgtgccagatccatcaccaccgtcgtgggctgcgctatggattattggggccagggaaccctggtcaccgtgtcctctacgcgtatccagaaccctgatcctgccgtgtaccagctgcgggatagcaagagcagcgacaagagcgtgtgtctgttcaccgacttcgacagccagaccaacgtgtcccagagcaaggactccgacgtgtacatcaccgataagtgcgtgctggacatgcggagcatggacttcaagagcaactccgccgtggcctggtccaacaagtccgatttcgcctgcgccaacgccttcaacaacagcattatccccgaggacacattcttcccaagcagcgacgtgccctgcgacgtgaagctggtggaaaagagcttcgagacagacaccaacctgaacttccagaacctgagcgtgatcggcttcagaatcctgctgctgaaagtggccggctttaacctgctgatgaccctgcggctgtggtccagccgcgccaagagaagcggatctggcgtgaagcagaccctgaatttcgacctgctgaagctggctggcgacgtggaatccaacccaggcccttctagaggccatatgaccgagtacaagcccacggtgcgcctcgccacccgcgacgacgtccccagggccgtacgcaccctcgccgccgcgttcgccgactaccccgccacgcgccacaccgtcgatccggaccgccacatcgagcgggtcaccgagctgcaagaactcttcctcacgcgcgtcgggctcgacatcggcaaggtgtgggtcgcggacgacggcgccgcggtggcggtctggaccacgccggagagcgtcgaagcgggggcggtgttcgccgagatcggcccgcgcatggccgagttgagcggttcccggctggccgcgcagcaacagatggaaggcctcctggcgccgcaccggcccaaggagcccgcgtggttcctggccaccgtcggcgtctcgcccgaccaccagggcaagggtctgggcagcgccgtcgtgctccccggagtggaggcggccgagcgcgccggggtgcccgccttcctggagacctccgcgccccgcaacctccccttctacgagcggctcggcttcaccgtcaccgccgacgtcgaggtgcccgaaggaccgcgcacctggtgcatgacccgcaagcccggtgcctga

SEQ ID NO: 36330 - DNA, 2616 bp, synthetic construct
  source 1..2616: mol_type = other DNA
atggccttaccagtgaccgccttgctcctgccgctggccttgctgctccacgccgccaggccgctcgagatccagaaccctgatcctgccgtgtaccagctgcgggatagcaagagcagcgacaagagcgtgtgtctgttcaccgacttcgacagccagaccaacgtgtcccagagcaaggactccgacgtgtacatcaccgataagtgcgtgctggacatgcggagcatggacttcaagagcaactccgccgtggcctggtccaacaagtccgatttcgcctgcgccaacgccttcaacaacagcattatccccgaggacacattcttcccaagcagcgacgtgccctgcgacgtgaagctggtggaaaagagcttcgagacagacaccaacctgaacttccagaacctgagcgtgatcggcttcagaatcctgctgctgaaagtggccggctttaacctgctgatgaccctgcggctgtggtccagcagggccaagcgatctggatctggagcaacaaacttctcactactcaaacaagcaggtgacgtggaggagaatcccgggcctactagcatggccttaccagtgaccgccttgctcctgccgctggccttgctgctccacgccgccaggccggacatccagatgacacagagccctagcagcctgtctgccagcgtgggagacagagtgaccatcacatgcaaggccagcgaccacatcaacaactggctggcctggtatcagcagaagcctggcaaggcccctaagctgctgatctacggcgctaccacactggaaacaggcgtgcccagcagattttctggcagcggctctggcaccgacttcaccctgacaatatccagcctccagcctgaggacttcgccacctactactgtcagcagagctggaacaccccttggacattcggccagggcaccaaggtggaaatcaagagaggcggaggcggaagtggaggcggaggatctggcggcggaggctctgaagttcagctggttgaatctggcggcggactggttcaacctggcggatctctgagactgagctgtgccgcctctggctacgcctttagcaactactgggtcaactgggttcgacaggcccctggcaaaggactggaatgggtcgcccaaatctatcccggcgacggcgacaccaactacaacggcaagttcaagggcagattcaccatcagccgggacaacagcaagaacaccctgtacctccagatgaactccctgagagccgaggacaccgccgtgtactattgtgccagatccatcaccaccgtcgtgggctgcgctatggattattggggccagggaaccctggtcaccgtgtcctctacgcgtgaggacctgaagaacgtgttcccacctgaggtggccgtgttcgagcctagcaaggccgagatcgcccacacccagaaagccaccctcgtgtgcctggctaccggcttctaccccgaccatgtggaactgtcttggtgggtcaacggcaaagaggtgcacagcggcgtgtgtaccgacccccagccactgaaagaacagcccgccctgaacgacagccggtactgcctgagcagcagactgagagtgtccgccaccttctggcagaacccccggaaccacttcagatgccaggtgcagttctacggcctgagcgagaacgacgagtggacccaggacagagccaagcccgtgacccagatcgtgtctgccgaagcctggggcagagccgattgcggcatcaccagcgccagctaccaccagggcgtgctgagcgccaccatcctgtacgagatcctgctgggcaaggccaccctgtacgccgtgctggtgtctgccctggtgctgatggctatggtcaagcggaaggacagccggggacgcgccaagagaagcggatctggcgtgaagcagaccctgaatttcgacctgctgaagctggctggcgacgtggaatccaacccaggcccttctagaggccatatgaccgagtacaagcccacggtgcgcctcgccacccgcgacgacgtccccagggccgtacgcaccctcgccgccgcgttcgccgactaccccgccacgcgccacaccgtcgatccggaccgccacatcgagcgggtcaccgagctgcaagaactcttcctcacgcgcgtcgggctcgacatcggcaaggtgtgggtcgcggacgacggcgccgcggtggcggtctggaccacgccggagagcgtcgaagcgggggcggtgttcgccgagatcggcccgcgcatggccgagttgagcggttcccggctggccgcgcagcaacagatggaaggcctcctggcgccgcaccggcccaaggagcccgcgtggttcctggccaccgtcggcgtctcgcccgaccaccagggcaagggtctgggcagcgccgtcgtgctccccggagtggaggcggccgagcgcgccggggtgcccgccttcctggagacctccgcgccccgcaacctccccttctacgagcggctcggcttcaccgtcaccgccgacgtcgaggtgcccgaaggaccgcgcacctggtgcatgacccgcaagcccggtgcctga

SEQ ID NO: 36331 - DNA, 2295 bp, synthetic construct
  source 1..2295: mol_type = other DNA
atggccttaccagtgaccgccttgctcctgccgctggccttgctgctccacgccgccaggccgctcgagcagagttttgggttgttggaccctaaattgtgctatctgttggacggaatcctgttcatttacggagtgatcctgaccgcattgttcctgcgggttaagttttccagatccgcagacgcacccgcttaccaacaagggcagaaccaactctacaatgaacttaatttggggcggagggaagagtacgacgttctggacaaaaggaggggacgagatcccgagatgggcggaaagcctcagcgaaggaagaatccgcaagaggggctttataacgaactccagaaagataaaatggcagaagcctatagtgagattgggatgaagggagaaaggaggaggggtaaaggtcacgatgggttgtaccaaggattgagcacagccactaaagatacctatgatgcgctccacatgcaggccctgccgccaagaagggccaagcgatctggatctggagcaacaaacttctcactactcaaacaagcaggtgacgtggaggagaatcccgggcctactagcatggccttaccagtgaccgccttgctcctgccgctggccttgctgctccacgccgccaggccggacatccagatgacacagagccctagcagcctgtctgccagcgtgggagacagagtgaccatcacatgcaaggccagcgaccacatcaacaactggctggcctggtatcagcagaagcctggcaaggcccctaagctgctgatctacggcgctaccacactggaaacaggcgtgcccagcagattttctggcagcggctctggcaccgacttcaccctgacaatatccagcctccagcctgaggacttcgccacctactactgtcagcagagctggaacaccccttggacattcggccagggcaccaaggtggaaatcaagagaggcggaggcggaagtggaggcggaggatctggcggcggaggctctgaagttcagctggttgaatctggcggcggactggttcaacctggcggatctctgagactgagctgtgccgcctctggctacgcctttagcaactactgggtcaactgggttcgacaggcccctggcaaaggactggaatgggtcgcccaaatctatcccggcgacggcgacaccaactacaacggcaagttcaagggcagattcaccatcagccgggacaacagcaagaacaccctgtacctccagatgaactccctgagagccgaggacaccgccgtgtactattgtgccagatccatcaccaccgtcgtgggctgcgctatggattattggggccagggaaccctggtcaccgtgtcctctacgcgtgagctgggagagcctcagctgtgctatatcctggacgccatcctgtttctgtacggcatcgtgctgaccctgctgtactgccggctgaagatccaagtgcggaaggccgccatcaccagctacgagaaatccgacggcgtgtacaccggcctgagcaccagaaatcaagagacatacgagacactgaagcacgaaaagcctccacaacgcgccaagagaagcggatctggcgtgaagcagaccctgaatttcgacctgctgaagctggctggcgacgtggaatccaacccaggcccttctagaggccatatgaccgagtacaagcccacggtgcgcctcgccacccgcgacgacgtccccagggccgtacgcaccctcgccgccgcgttcgccgactaccccgccacgcgccacaccgtcgatccggaccgccacatcgagcgggtcaccgagctgcaagaactcttcctcacgcgcgtcgggctcgacatcggcaaggtgtgggtcgcggacgacggcgccgcggtggcggtctggaccacgccggagagcgtcgaagcgggggcggtgttcgccgagatcggcccgcgcatggccgagttgagcggttcccggctggccgcgcagcaacagatggaaggcctcctggcgccgcaccggcccaaggagcccgcgtggttcctggccaccgtcggcgtctcgcccgaccaccagggcaagggtctgggcagcgccgtcgtgctccccggagtggaggcggccgagcgcgccggggtgcccgccttcctggagacctccgcgccccgcaacctccccttctacgagcggctcggcttcaccgtcaccgccgacgtcgaggtgcccgaaggaccgcgcacctggtgcatgacccgcaagcccggtgcctga

SEQ ID NO: 36332 - DNA, 2928 bp, synthetic construct; identical to SEQ ID NO: 36323
  source 1..2928: mol_type = other DNA

SEQ ID NO: 36333 - DNA, 2928 bp, synthetic construct; identical to SEQ ID NO: 36324
  source 1..2928: mol_type = other DNA

SEQ ID NO: 36334 - DNA, 2925 bp, synthetic construct
  source 1..2925: mol_type = other DNA
atggccttaccagtgaccgccttgctcctgccgctggccttgctgctccacgccgccaggccgctcgaggaggaggacctgaagaacgtgttcccacctgaggtggccgtgttcgagcctagcgaggccgagatcagccacacccagaaagccaccctcgtgtgcctggctaccggcttctaccccgaccatgtggaactgtcttggtgggtcaacggcaaagaggtgcacagcggcgtgtgtaccgacccccagccactgaaagaacagcccgccctgaacgacagccggtactgcctgagcagcagactgagagtgtccgccaccttctggcagaacccccggaaccacttcagatgccaggtgcagttctacggcctgagcgagaacgacgagtggacccaggacagagccaagcccgtgacccagatcgtgtctgccgaagcctggggcagagccgatgatgtgattaagatccactggcaggaaaagaagtccaacaccatcctgggcagccaggaaggcaacaccatgaagaccaacgacacctacatgaagttcagctggctgaccgtgcccgagaagtccctggacaaagaacacagatgcatcgtgcggcacgaaaacaacaagaacggcgtggaccaggaaatcatcttcccacccatcaagaccgatgtgattacaatggaccccaaggacaactgctccaaggacgccaacgataccctgctgctccagctgaccaacaccagcgcctactacatgtacttgttgctgctgctgaagtccgtggtgtacttcgccatcatcacatgctgcctgctgcggagaaccgccttctgctgcaacggcgagaagtctagggccaagcgatctggatctggagcaacaaacttctcactactcaaacaagcaggtgacgtggaggagaatcccgggcctactagcatggccttaccagtgaccgccttgctcctgccgctggccttgctgctccacgccgccaggccggacatccagatgacacagagccctagcagcctgtctgccagcgtgggagacagagtgaccatcacatgcaaggccagcgaccacatcaacaactggctggcctggtatcagcagaagcctggcaaggcccctaagctgctgatctacggcgctaccacactggaaacaggcgtgcccagcagattttctggcagcggctctggcaccgacttcaccctgacaatatccagcctccagcctgaggacttcgccacctactactgtcagcagagctggaacaccccttggacattcggccagggcaccaaggtggaaatcaagagaggcggaggcggaagtggaggcggaggatctggcggcggaggctctgaagttcagctggttgaatctggcggcggactggttcaacctggcggatctctgagactgagctgtgccgcctctggctacgcctttagcaactactgggtcaactgggttcgacaggcccctggcaaaggactggaatgggtcgcccaaatctatcccggcgacggcgacaccaactacaacggcaagttcaagggcagattcaccatcagccgggacaacagcaagaacaccctgtacctccagatgaactccctgagagccgaggacaccgccgtgtactattgtgccagatccatcaccaccgtcgtgggctgcgctatggattattggggccagggaaccctggtcaccgtgtcctctacgcgtatccagaaccctgatcctgccgtgtaccagctgcgggatagcaagagcagcgacaagagcgtgtgtctgttcaccgacttcgacagccagaccaacgtgtcccagagcaaggactccgacgtgtacatcaccgataagtgcgtgctggacatgcggagcatggacttcaagagcaactccgccgtggcctggtccaacaagtccgatttcgcctgcgccaacgccttcaacaacagcattatccccgaggacacattcttcccaagccccgagagcagcgactccaccgaccacgtgaagcccaaagagacagagaacaccaagcagcccagcaagagctgccacaagcccaaggccatcgtgcacaccgagaaagtgaacatgatgagcctgaccgtgctgggcctgcggatgctgttcgccaaaaccgtggccgtgaacttcctgctgaccgccaagctgttcttcctccgcgccaagagaagcggatctggcgtgaagcagaccctgaatttcgacctgctgaagctggctggcgacgtggaatccaacccaggcccttctagaggccatatgaccgagtacaagcccacggtgcgcctcgccacccgcgacgacgtccccagggccgtacgcaccctcgccgccgcgttcgccgactaccccgccacgcgccacaccgtcgatccggaccgccacatcgagcgggtcaccgagctgcaagaactcttcctcacgcgcgtcgggctcgacatcggcaaggtgtgggtcgcggacgacggcgccgcggtggcggtctggaccacgccggagagcgtcgaagcgggggcggtgttcgccgagatcggcccgcgcatggccgagttgagcggttcccggctggccgcgcagcaacagatggaaggcctcctggcgccgcaccggcccaaggagcccgcgtggttcctggccaccgtcggcgtctcgcccgaccaccagggcaagggtctgggcagcgccgtcgtgctccccggagtggaggcggccgagcgcgccggggtgcccgccttcctggagacctccgcgccccgcaacctccccttctacgagcggctcggcttcaccgtcaccgccgacgtcgaggtgcccgaaggaccgcgcacctggtgcatgacccgcaagcccggtgcctga

SEQ ID NO: 36335 - DNA, 2925 bp, synthetic construct
  source 1..2925: mol_type = other DNA
atggccttaccagtgaccgccttgctcctgccgctggccttgctgctccacgccgccaggccgctcgagatccagaaccctgatcctgccgtgtaccagctgcgggatagcaagagcagcgacaagagcgtgtgtctgttcaccgacttcgacagccagaccaacgtgtcccagagcaaggactccgacgtgtacatcaccgataagtgcgtgctggacatgcggagcatggacttcaagagcaactccgccgtggcctggtccaacaagtccgatttcgcctgcgccaacgccttcaacaacagcattatccccgaggacacattcttcccaagccccgagagcagcgactccaccgaccacgtgaagcccaaagagacagagaacaccaagcagcccagcaagagctgccacaagcccaaggccatcgtgcacaccgagaaagtgaacatgatgagcctgaccgtgctgggcctgcggatgctgttcgccaaaaccgtggccgtgaacttcctgctgaccgccaagctgttcttcctcagggccaagcgatctggatctggagcaacaaacttctcactactcaaacaagcaggtgacgtggaggagaatcccgggcctactagcatggccttaccagtgaccgccttgctcctgccgctggccttgctgctccacgccgccaggccggacatccagatgacacagagccctagcagcctgtctgccagcgtgggagacagagtgaccatcacatgcaaggccagcgaccacatcaacaactggctggcctggtatcagcagaagcctggcaaggcccctaagctgctgatctacggcgctaccacactggaaacaggcgtgcccagcagattttctggcagcggctctggcaccgacttcaccctgacaatatccagcctccagcctgaggacttcgccacctactactgtcagcagagctggaacaccccttggacattcggccagggcaccaaggtggaaatcaagagaggcggaggcggaagtggaggcggaggatctggcggcggaggctctgaagttcagctggttgaatctggcggcggactggttcaacctggcggatctctgagactgagctgtgccgcctctggctacgcctttagcaactactgggtcaactgggttcgacaggcccctggcaaaggactggaatgggtcgcccaaatctatcccggcgacggcgacaccaactacaacggcaagttcaagggcagattcaccatcagccgggacaacagcaagaacaccctgtacctccagatgaactccctgagagccgaggacaccgccgtgtactattgtgccagatccatcaccaccgtcgtgggctgcgctatggattattggggccagggaaccctggtcaccgtgtcctctacgcgtgaggaggacctgaagaacgtgttcccacctgaggtggccgtgttcgagcctagcgaggccgagatcagccacacccagaaagccaccctcgtgtgcctggctaccggcttctaccccgaccatgtggaactgtcttggtgggtcaacggcaaagaggtgcacagcggcgtgtgtaccgacccccagccactgaaagaacagcccgccctgaacgacagccggtactgcctgagcagcagactgagagtgtccgccaccttctggcagaacccccggaaccacttcagatgccaggtgcagttctacggcctgagcgagaacgacgagtggacccaggacagagccaagcccgtgacccagatcgtgtctgccgaagcctggggcagagccgatgatgtgattaagatccactggcaggaaaagaagtccaacaccatcctgggcagccaggaaggcaacaccatgaagaccaacgacacctacatgaagttcagctggctgaccgtgcccgagaagtccctggacaaagaacacagatgcatcgtgcggcacgaaaacaacaagaacggcgtggaccaggaaatcatcttcccacccatcaagaccgatgtgattacaatggaccccaaggacaactgctccaaggacgccaacgataccctgctgctccagctgaccaacaccagcgcctactacatgtacttgttgctgctgctgaagtccgtggtgtacttcgccatcatcacatgctgcctgctgcggagaaccgccttctgctgcaacggcgagaagtctcgcgccaagagaagcggatctggcgtgaagcagaccctgaatttcgacctgctgaagctggctggcgacgtggaatccaacccaggcccttctagaggccatatgaccgagtacaagcccacggtgcgcctcgccacccgcgacgacgtccccagggccgtacgcaccctcgccgccgcgttcgccgactaccccgccacgcgccacaccgtcgatccggaccgccacatcgagcgggtcaccgagctgcaagaactcttcctcacgcgcgtcgggctcgacatcggcaaggtgtgggtcgcggacgacggcgccgcggtggcggtctggaccacgccggagagcgtcgaagcgggggcggtgttcgccgagatcggcccgcgcatggccgagttgagcggttcccggctggccgcgcagcaacagatggaaggcctcctggcgccgcaccggcccaaggagcccgcgtggttcctggccaccgtcggcgtctcgcccgaccaccagggcaagggtctgggcagcgccgtcgtgctccccggagtggaggcggccgagcgcgccggggtgcccgccttcctggagacctccgcgccccgcaacctccccttctacgagcggctcggcttcaccgtcaccgccgacgtcgaggtgcccgaaggaccgcgcacctggtgcatgacccgcaagcccggtgcctga

SEQ ID NO: 36336 - DNA, 2616 bp, synthetic construct
  source 1..2616: mol_type = other DNA
atggccttaccagtgaccgccttgctcctgccgctggccttgctgctccacgccgccaggccgctcgaggaggacctgaagaacgtgttcccacctgaggtggccgtgttcgagcctagcgaggccgagatcagccacacccagaaagccaccctcgtgtgcctggctaccggcttctaccccgaccatgtggaactgtcttggtgggtcaacggcaaagaggtgcacagcggcgtgtctaccgacccccagccactgaaagaacagcccgccctgaacgacagccggtactgcctgagcagcagactgagagtgtccgccaccttctggcagaacccccggaaccacttcagatgccaggtgcagttctacggcctgagcgagaacgacgagtggacccaggacagagccaagcccgtgacccagatcgtgtctgccgaagcctggggcagagccgattgcggctttaccagcgagagctaccagcagggcgtgctgagcgccaccaacctgagcgtgatcggcttcagaatcctgctgctgaaagtggccggctttaacctgctgatgaccctgcggctgtggtccagcagggccaagcgatctggatctggagcaacaaacttctcactactcaaacaagcaggtgacgtggaggagaatcccgggcctactagcatggccttaccagtgaccgccttgctcctgccgctggccttgctgctccacgccgccaggccggacatccagatgacacagagccctagcagcctgtctgccagcgtgggagacagagtgaccatcacatgcaaggccagcgaccacatcaacaactggctggcctggtatcagcagaagcctggcaaggcccctaagctgctgatctacggcgctaccacactggaaacaggcgtgcccagcagattttctggcagcggctctggcaccgacttcaccctgacaatatccagcctccagcctgaggacttcgccacctactactgtcagcagagctggaacaccccttggacattcggccagggcaccaaggtggaaatcaagagaggcggaggcggaagtggaggcggaggatctggcggcggaggctctgaagttcagctggttgaatctggcggcggactggttcaacctggcggatctctgagactgagctgtgccgcctctggctacgcctttagcaactactgggtcaactgggttcgacaggcccctggcaaaggactggaatgggtcgcccaaatctatcccggcgacggcgacaccaactacaacggcaagttcaagggcagattcaccatcagccgggacaacagcaagaacaccctgtacctccagatgaactccctgagagccgaggacaccgccgtgtactattgtgccagatccatcaccaccgtcgtgggctgcgctatggattattggggccagggaaccctggtcaccgtgtcctctacgcgtatccagaaccctgatcctgccgtgtaccagctgcgggatagcaagagcagcgacaagagcgtgtgtctgttcaccgacttcgacagccagaccaacgtgtcccagagcaaggactccgacgtgtacatcaccgataagaccgtgctggacatgcggagcatggacttcaagagcaactccgccgtggcctggtccaacaagtccgatttcgcctgcgccaacgccttcaacaacagcattatccccgaggacacattcttcccaagccccgagagcagctgcgacgtgaagctggtggaaaagagcttcgagacagacaccaacctgaacttccagatcctgtacgagatcctgctgggcaaggccaccctgtacgccgtgctggtgtctgccctggtgctgatggctatggtcaagcggaaggacagccggggacgcgccaagagaagcggatctggcgtgaagcagaccctgaatttcgacctgctgaagctggctggcgacgtggaatccaacccaggcccttctagaggccatatgaccgagtacaagcccacggtgcgcctcgccacccgcgacgacgtccccagggccgtacgcaccctcgccgccgcgttcgccgactaccccgccacgcgccacaccgtcgatccggaccgccacatcgagcgggtcaccgagctgcaagaactcttcctcacgcgcgtcgggctcgacatcggcaaggtgtgggtcgcggacgacggcgccgcggtggcggtctggaccacgccggagagcgtcgaagcgggggcggtgttcgccgagatcggcccgcgcatggccgagttgagcggttcccggctggccgcgcagcaacagatggaaggcctcctggcgccgcaccggcccaaggagcccgcgtggttcctggccaccgtcggcgtctcgcccgaccaccagggcaagggtctgggcagcgccgtcgtgctccccggagtggaggcggccgagcgcgccggggtgcccgccttcctggagacctccgcgccccgcaacctccccttctacgagcggctcggcttcaccgtcaccgccgacgtcgaggtgcccgaaggaccgcgcacctggtgcatgacccgcaagcccggtgcctga

SEQ ID NO: 36337 - DNA, 2616 bp, synthetic construct
  source 1..2616: mol_type = other DNA
atggccttaccagtgaccgccttgctcctgccgctggccttgctgctccacgccgccaggccgctcgagatccagaaccctgatcctgccgtgtaccagctgcgggatagcaagagcagcgacaagagcgtgtgtctgttcaccgacttcgacagccagaccaacgtgtcccagagcaaggactccgacgtgtacatcaccgataagaccgtgctggacatgcggagcatggacttcaagagcaactccgccgtggcctggtccaacaagtccgatttcgcctgcgccaacgccttcaacaacagcattatccccgaggacacattcttcccaagccccgagagcagctgcgacgtgaagctggtggaaaagagcttcgagacagacaccaacctgaacttccagatcctgtacgagatcctgctgggcaaggccaccctgtacgccgtgctggtgtctgccctggtgctgatggctatggtcaagcggaaggacagccggggaagggccaagcgatctggatctggagcaacaaacttctcactactcaaacaagcaggtgacgtggaggagaatcccgggcctactagcatggccttaccagtgaccgccttgctcctgccgctggccttgctgctccacgccgccaggccggacatccagatgacacagagccctagcagcctgtctgccagcgtgggagacagagtgaccatcacatgcaaggccagcgaccacatcaacaactggctggcctggtatcagcagaagcctggcaaggcccctaagctgctgatctacggcgctaccacactggaaacaggcgtgcccagcagattttctggcagcggctctggcaccgacttcaccctgacaatatccagcctccagcctgaggacttcgccacctactactgtcagcagagctggaacaccccttggacattcggccagggcaccaaggtggaaatcaagagaggcggaggcggaagtggaggcggaggatctggcggcggaggctctgaagttcagctggttgaatctggcggcggactggttcaacctggcggatctctgagactgagctgtgccgcctctggctacgcctttagcaactactgggtcaactgggttcgacaggcccctggcaaaggactggaatgggtcgcccaaatctatcccggcgacggcgacaccaactacaacggcaagttcaagggcagattcaccatcagccgggacaacagcaagaacaccctgtacctccagatgaactccctgagagccgaggacaccgccgtgtactattgtgccagatccatcaccaccgtcgtgggctgcgctatggattattggggccagggaaccctggtcaccgtgtcctctacgcgtgaggacctgaagaacgtgttcccacctgaggtggccgtgttcgagcctagcgaggccgagatcagccacacccagaaagccaccctcgtgtgcctggctaccggcttctaccccgaccatgtggaactgtcttggtgggtcaacggcaaagaggtgcacagcggcgtgtctaccgacccccagccactgaaagaacagcccgccctgaacgacagccggtactgcctgagcagcagactgagagtgtccgccaccttctggcagaacccccggaaccacttcagatgccaggtgcagttctacggcctgagcgagaacgacgagtggacccaggacagagccaagcccgtgacccagatcgtgtctgccgaagcctggggcagagccgattgcggctttaccagcgagagctaccagcagggcgtgctgagcgccaccaacctgagcgtgatcggcttcagaatcctgctgctgaaagtggccggctttaacctgctgatgaccctgcggctgtggtccagccgcgccaagagaagcggatctggcgtgaagcagaccctgaatttcgacctgctgaagctggctggcgacgtggaatccaacccaggcccttctagaggccatatgaccgagtacaagcccacggtgcgcctcgccacccgcgacgacgtccccagggccgtacgcaccctcgccgccgcgttcgccgactaccccgccacgcgccacaccgtcgatccggaccgccacatcgagcgggtcaccgagctgcaagaactcttcctcacgcgcgtcgggctcgacatcggcaaggtgtgggtcgcggacgacggcgccgcggtggcggtctggaccacgccggagagcgtcgaagcgggggcggtgttcgccgagatcggcccgcgcatggccgagttgagcggttcccggctggccgcgcagcaacagatggaaggcctcctggcgccgcaccggcccaaggagcccgcgtggttcctggccaccgtcggcgtctcgcccgaccaccagggcaagggtctgggcagcgccgtcgtgctccccggagtggaggcggccgagcgcgccggggtgcccgccttcctggagacctccgcgccccgcaacctccccttctacgagcggctcggcttcaccgtcaccgccgacgtcgaggtgcccgaaggaccgcgcacctggtgcatgacccgcaagcccggtgcctga

SEQ ID NO: 36338 - DNA, 2616 bp, synthetic construct
  source 1..2616: mol_type = other DNA
atggccttaccagtgaccgccttgctcctgccgctggccttgctgctccacgccgccaggccgctcgaggaggacctgaagaacgtgttcccacctgaggtggccgtgttcgagcctagcgaggccgagatcagccacacccagaaagccaccctcgtgtgcctggctaccggcttctaccccgaccatgtggaactgtcttggtgggtcaacggcaaagaggtgcacagcggcgtgtgtaccgacccccagccactgaaagaacagcccgccctgaacgacagccggtactgcctgagcagcagactgagagtgtccgccaccttctggcagaacccccggaaccacttcagatgccaggtgcagttctacggcctgagcgagaacgacgagtggacccaggacagagccaagcccgtgacccagatcgtgtctgccgaagcctggggcagagccgattgcgacgtgaagctggtggaaaagagcttcgagacagacaccaacctgaacttccagaacctgagcgtgatcggcttcagaatcctgctgctgaaagtggccggctttaacctgctgatgaccctgcggctgtggtccagcagggccaagcgatctggatctggagcaacaaacttctcactactcaaacaagcaggtgacgtggaggagaatcccgggcctactagcatggccttaccagtgaccgccttgctcctgccgctggccttgctgctccacgccgccaggccggacatccagatgacacagagccctagcagcctgtctgccagcgtgggagacagagtgaccatcacatgcaaggccagcgaccacatcaacaactggctggcctggtatcagcagaagcctggcaaggcccctaagctgctgatctacggcgctaccacactggaaacaggcgtgcccagcagattttctggcagcggctctggcaccgacttcaccctgacaatatccagcctccagcctgaggacttcgccacctactactgtcagcagagctggaacaccccttggacattcggccagggcaccaaggtggaaatcaagagaggcggaggcggaagtggaggcggaggatctggcggcggaggctctgaagttcagctggttgaatctggcggcggactggttcaacctggcggatctctgagactgagctgtgccgcctctggctacgcctttagcaactactgggtcaactgggttcgacaggcccctggcaaaggactggaatgggtcgcccaaatctatcccggcgacggcgacaccaactacaacggcaagttcaagggcagattcaccatcagccgggacaacagcaagaacaccctgtacctccagatgaactccctgagagccgaggacaccgccgtgtactattgtgccagatccatcaccaccgtcgtgggctgcgctatggattattggggccagggaaccctggtcaccgtgtcctctacgcgtatccagaaccctgatcctgccgtgtaccagctgcgggatagcaagagcagcgacaagagcgtgtgtctgttcaccgacttcgacagccagaccaacgtgtcccagagcaaggactccgacgtgtacatcaccgataagtgcgtgctggacatgcggagcatggacttcaagagcaactccgccgtggcctggtccaacaagtccgatttcgcctgcgccaacgccttcaacaacagcattatccccgaggacacattcttcccaagccccgagagcagctgcggctttaccagcgagagctaccagcagggcgtgctgagcgccaccatcctgtacgagatcctgctgggcaaggccaccctgtacgccgtgctggtgtctgccctggtgctgatggctatggtcaagcggaaggacagccggggacgcgccaagagaagcggatctggcgtgaagcagaccctgaatttcgacctgctgaagctggctggcgacgtggaatccaacccaggcccttctagaggccatatgaccgagtacaagcccacggtgcgcctcgccacccgcgacgacgtccccagggccgtacgcaccctcgccgccgcgttcgccgactaccccgccacgcgccacaccgtcgatccggaccgccacatcgagcgggtcaccgagctgcaagaactcttcctcacgcgcgtcgggctcgacatcggcaaggtgtgggtcgcggacgacggcgccgcggtggcggtctggaccacgccggagagcgtcgaagcgggggcggtgttcgccgagatcggcccgcgcatggccgagttgagcggttcccggctggccgcgcagcaacagatggaaggcctcctggcgccgcaccggcccaaggagcccgcgtggttcctggccaccgtcggcgtctcgcccgaccaccagggcaagggtctgggcagcgccgtcgtgctccccggagtggaggcggccgagcgcgccggggtgcccgccttcctggagacctccgcgccccgcaacctccccttctacgagcggctcggcttcaccgtcaccgccgacgtcgaggtgcccgaaggaccgcgcacctggtgcatgacccgcaagcccggtgcctga

SEQ ID NO: 36339 - DNA, 2616 bp, synthetic construct
  source 1..2616: mol_type = other DNA
atggccttaccagtgaccgccttgctcctgccgctggccttgctgctccacgccgccaggccgctcgaggaggacctgaagaacgtgttcccacctgaggtggccgtgttcgagcctagcgaggccgagatcagccacacccagaaagccaccctcgtgtgcctggctaccggcttctaccccgaccatgtggaactgtcttggtgggtcaacggcaaagaggtgcacagcggcgtgtctaccgacccccagccactgaaagaacagcccgccctgaacgacagccggtactgcctgagcagcagactgagagtgtccgccaccttctggcagaacccccggaaccacttcagatgccaggtgcagttctacggcctgagcgagaacgacgagtggacccaggacagagccaagcccgtgacccagatcgtgtctgccgaagcctggggcagagccgattgcgacgtgaagctggtggaaaagagcttcgagacagacaccaacctgaacttccagaacctgagcgtgatcggcttcagaatcctgctgctgaaagtggccggctttaacctgctgatgaccctgcggctgtggtccagcagggccaagcgatctggatctggagcaacaaacttctcactactcaaacaagcaggtgacgtggaggagaatcccgggcctactagcatggccttaccagtgaccgccttgctcctgccgctggccttgctgctccacgccgccaggccggacatccagatgacacagagccctagcagcctgtctgccagcgtgggagacagagtgaccatcacatgcaaggccagcgaccacatcaacaactggctggcctggtatcagcagaagcctggcaaggcccctaagctgctgatctacggcgctaccacactggaaacaggcgtgcccagcagattttctggcagcggctctggcaccgacttcaccctgacaatatccagcctccagcctgaggacttcgccacctactactgtcagcagagctggaacaccccttggacattcggccagggcaccaaggtggaaatcaagagaggcggaggcggaagtggaggcggaggatctggcggcggaggctctgaagttcagctggttgaatctggcggcggactggttcaacctggcggatctctgagactgagctgtgccgcctctggctacgcctttagcaactactgggtcaactgggttcgacaggcccctggcaaaggactggaatgggtcgcccaaatctatcccggcgacggcgacaccaactacaacggcaagttcaagggcagattcaccatcagccgggacaacagcaagaacaccctgtacctccagatgaactccctgagagccgaggacaccgccgtgtactattgtgccagatccatcaccaccgtcgtgggctgcgctatggattattggggccagggaaccctggtcaccgtgtcctctacgcgtatccagaaccctgatcctgccgtgtaccagctgcgggatagcaagagcagcgacaagagcgtgtgtctgttcaccgacttcgacagccagaccaacgtgtcccagagcaaggactccgacgtgtacatcaccgataagaccgtgctggacatgcggagcatggacttcaagagcaactccgccgtggcctggtccaacaagtccgatttcgcctgcgccaacgccttcaacaacagcattatccccgaggacacattcttcccaagccccgagagcagctgcggctttaccagcgagagctaccagcagggcgtgctgagcgccaccatcctgtacgagatcctgctgggcaaggccaccctgtacgccgtgctggtgtctgccctggtgctgatggctatggtcaagcggaaggacagccggggacgcgccaagagaagcggatctggcgtgaagcagaccctgaatttcgacctgctgaagctggctggcgacgtggaatccaacccaggcccttctagaggccatatgaccgagtacaagcccacggtgcgcctcgccacccgcgacgacgtccccagggccgtacgcaccctcgccgccgcgttcgccgactaccccgccacgcgccacaccgtcgatccggaccgccacatcgagcgggtcaccgagctgcaagaactcttcctcacgcgcgtcgggctcgacatcggcaaggtgtgggtcgcggacgacggcgccgcggtggcggtctggaccacgccggagagcgtcgaagcgggggcggtgttcgccgagatcggcccgcgcatggccgagttgagcggttcccggctggccgcgcagcaacagatggaaggcctcctggcgccgcaccggcccaaggagcccgcgtggttcctggccaccgtcggcgtctcgcccgaccaccagggcaagggtctgggcagcgccgtcgtgctccccggagtggaggcggccgagcgcgccggggtgcccgccttcctggagacctccgcgccccgcaacctccccttctacgagcggctcggcttcaccgtcaccgccgacgtcgaggtgcccgaaggaccgcgcacctggtgcatgacccgcaagcccggtgcctga

SEQ ID NO: 36340 - DNA, 2925 bp, synthetic construct
  source 1..2925: mol_type = other DNA
atggccttaccagtgaccgccttgctcctgccgctggccttgctgctccacgccgccaggccgctcgaggaggaggacctgaagaacgtgttcccacctgaggtggccgtgttcgagcctagcgaggccgagatcagccacacccagaaagccaccctcgtgtgcctggctaccggcttctaccccgaccatgtggaactgtcttggtgggtcaacggcaaagaggtgcacagcggcgtgtctaccgacccccagccactgaaagaacagcccgccctgaacgacagccggtactgcctgagcagcagactgagagtgtccgccaccttctggcagaacccccggaaccacttcagatgccaggtgcagttctacggcctgagcgagaacgacgagtggacccaggacagagccaagcccgtgacccagatcgtgtctgccgaagcctggggcagagccgatgatgtgattaagatccactggcaggaaaagaagtccaacaccatcctgggcagccaggaaggcaacaccatgaagaccaacgacacctacatgaagttcagctggctgaccgtgcccgagaagtccctggacaaagaacacagatgcatcgtgcggcacgaaaacaacaagaacggcgtggaccaggaaatcatcttcccacccatcaagaccgatgtgattacaatggaccccaaggacaactgctccaaggacgccaacgataccctgctgctccagctgaccaacaccagcgcctactacatgtacttgttgctgctgctgaagtccgtggtgtacttcgccatcatcacatgctgcctgctgcggagaaccgccttctgctgcaacggcgagaagtctagggccaagcgatctggatctggagcaacaaacttctcactactcaaacaagcaggtgacgtggaggagaatcccgggcctactagcatggccttaccagtgaccgccttgctcctgccgctggccttgctgctccacgccgccaggccggacatccagatgacacagagccctagcagcctgtctgccagcgtgggagacagagtgaccatcacatgcaaggccagcgaccacatcaacaactggctggcctggtatcagcagaagcctggcaaggcccctaagctgctgatctacggcgctaccacactggaaacaggcgtgcccagcagattttctggcagcggctctggcaccgacttcaccctgacaatatccagcctccagcctgaggacttcgccacctactactgtcagcagagctggaacaccccttggacattcggccagggcaccaaggtggaaatcaagagaggcggaggcggaagtggaggcggaggatctggcggcggaggctctgaagttcagctggttgaatctggcggcggactggttcaacctggcggatctctgagactgagctgtgccgcctctggctacgcctttagcaactactgggtcaactgggttcgacaggcccctggcaaaggactggaatgggtcgcccaaatctatcccggcgacggcgacaccaactacaacggcaagttcaagggcagattcaccatcagccgggacaacagcaagaacaccctgtacctccagatgaactccctgagagccgaggacaccgccgtgtactattgtgccagatccatcaccaccgtcgtgggctgcgctatggattattggggccagggaaccctggtcaccgtgtcctctacgcgtatccagaaccctgatcctgccgtgtaccagctgcgggatagcaagagcagcgacaagagcgtgtgtctgttcaccgacttcgacagccagaccaacgtgtcccagagcaaggactccgacgtgtacatcaccgataagaccgtgctggacatgcggagcatggacttcaagagcaactccgccgtggcctggtccaacaagtccgatttcgcctgcgccaacgccttcaacaacagcattatccccgaggacacattcttcccaagccccgagagcagcgactccaccgaccacgtgaagcccaaagagacagagaacaccaagcagcccagcaagagctgccacaagcccaaggccatcgtgcacaccgagaaagtgaacatgatgagcctgaccgtgctgggcctgcggatgctgttcgccaaaaccgtggccgtgaacttcctgctgaccgccaagctgttcttcctccgcgccaagagaagcggatctggcgtgaagcagaccctgaatttcgacctgctgaagctggctggcgacgtggaatccaacccaggcccttctagaggccatatgaccgagtacaagcccacggtgcgcctcgccacccgcgacgacgtccccagggccgtacgcaccctcgccgccgcgttcgccgactaccccgccacgcgccacaccgtcgatccggaccgccacatcgagcgggtcaccgagctgcaagaactcttcctcacgcgcgtcgggctcgacatcggcaaggtgtgggtcgcggacgacggcgccgcggtggcggtctggaccacgccggagagcgtcgaagcgggggcggtgttcgccgagatcggcccgcgcatggccgagttgagcggttcccggctggccgcgcagcaacagatggaaggcctcctggcgccgcaccggcccaaggagcccgcgtggttcctggccaccgtcggcgtctcgcccgaccaccagggcaagggtctgggcagcgccgtcgtgctccccggagtggaggcggccgagcgcgccggggtgcccgccttcctggagacctccgcgccccgcaacctccccttctacgagcggctcggcttcaccgtcaccgccgacgtcgaggtgcccgaaggaccgcgcacctggtgcatgacccgcaagcccggtgcctga

SEQ ID NO: 36341 - DNA, 2616 bp, synthetic construct
  source 1..2616: mol_type = other DNA
atggccttaccagtgaccgccttgctcctgccgctggccttgctgctccacgccgccaggccgctcgaggaggacctgaagaacgtgttcccacctgaggtggccgtgttcgagcctagcgaggccgagatcagccacacccagaaagccaccctcgtgtgcctggctaccggcttctaccccgaccatgtggaactgtcttggtgggtcaacggcaaagaggtgcacagcggcgtgtgtaccgacccccagccactgaaagaacagcccgccctgaacgacagccggtactgcctgagcagcagactgagagtgtccgccaccttctggcagaacccccggaaccacttcagatgccaggtgcagttctacggcctgagcgagaacgacgagtggacccaggacagagccaagcccgtgacccagatcgtgtctgccgaagcctggggcagagccgattgcggctttaccagcgagagctaccagcagggcgtgctgagcgccaccaacctgagcgtgatcggcttcagaatcctgctgctgaaagtggccggctttaacctgctgatgaccctgcggctgtggtccagcagggccaagcgatctggatctggagcaacaaacttctcactactcaaacaagcaggtgacgtggaggagaatcccgggcctactagcatggccttaccagtgaccgccttgctcctgccgctggccttgctgctccacgccgccaggccggacatccagatgacacagagccctagcagcctgtctgccagcgtgggagacagagtgaccatcacatgcaaggccagcgaccacatcaacaactggctggcctggtatcagcagaagcctggcaaggcccctaagctgctgatctacggcgctaccacactggaaacaggcgtgcccagcagattttctggcagcggctctggcaccgacttcaccctgacaatatccagcctccagcctgaggacttcgccacctactactgtcagcagagctggaacaccccttggacattcggccagggcaccaaggtggaaatcaagagaggcggaggcggaagtggaggcggaggatctggcggcggaggctctgaagttcagctggttgaatctggcggcggactggttcaacctggcggatctctgagactgagctgtgccgcctctggctacgcctttagcaactactgggtcaactgggttcgacaggcccctggcaaaggactggaatgggtcgcccaaatctatcccggcgacggcgacaccaactacaacggcaagttcaagggcagattcaccatcagccgggacaacagcaagaacaccctgtacctccagatgaactccctgagagccgaggacaccgccgtgtactattgtgccagatccatcaccaccgtcgtgggctgcgctatggattattggggccagggaaccctggtcaccgtgtcctctacgcgtatccagaaccctgatcctgccgtgtaccagctgcgggatagcaagagcagcgacaagagcgtgtgtctgttcaccgacttcgacagccagaccaacgtgtcccagagcaaggactccgacgtgtacatcaccgataagtgcgtgctggacatgcggagcatggacttcaagagcaactccgccgtggcctggtccaacaagtccgatttcgcctgcgccaacgccttcaacaacagcattatccccgaggacacattcttcccaagccccgagagcagctgcgacgtgaagctggtggaaaagagcttcgagacagacaccaacctgaacttccagatcctgtacgagatcctgctgggcaaggccaccctgtacgccgtgctggtgtctgccctggtgctgatggctatggtcaagcggaaggacagccggggacgcgccaagagaagcggatctggcgtgaagcagaccctgaatttcgacctgctgaagctggctggcgacgtggaatccaacccaggcccttctagaggccatatgaccgagtacaagcccacggtgcgcctcgccacccgcgacgacgtccccagggccgtacgcaccctcgccgccgcgttcgccgactaccccgccacgcgccacaccgtcgatccggaccgccacatcgagcgggtcaccgagctgcaagaactcttcctcacgcgcgtcgggctcgacatcggcaaggtgtgggtcgcggacgacggcgccgcggtggcggtctggaccacgccggagagcgtcgaagcgggggcggtgttcgccgagatcggcccgcgcatggccgagttgagcggttcccggctggccgcgcagcaacagatggaaggcctcctggcgccgcaccggcccaaggagcccgcgtggttcctggccaccgtcggcgtctcgcccgaccaccagggcaagggtctgggcagcgccgtcgtgctccccggagtggaggcggccgagcgcgccggggtgcccgccttcctggagacctccgcgccccgcaacctccccttctacgagcggctcggcttcaccgtcaccgccgacgtcgaggtgcccgaaggaccgcgcacctggtgcatgacccgcaagcccggtgcctga

SEQ ID NO: 36342 - DNA, 2703 bp, synthetic construct
  source 1..2703: mol_type = other DNA
atggccttaccagtgaccgccttgctcctgccgctggccttgctgctccacgccgccaggccgctcgaggaggaggacctgaagaacgtgttcccacctgaggtggccgtgttcgagcctagcgaggccgagatcagccacacccagaaagccaccctcgtgtgcctggctaccggcttctaccccgaccatgtggaactgtcttggtgggtcaacggcaaagaggtgcacagcggcgtgtgtaccgacccccagccactgaaagaacagcccgccctgaacgacagccggtactgcctgagcagcagactgagagtgtccgccaccttctggcagaacccccggaaccacttcagatgccaggtgcagttctacggcctgagcgagaacgacgagtggacccaggacagagccaagcccgtgacccagatcgtgtctgccgaagcctggggcagagccgattgcggctttaccagcgagagctaccagcagggcgtgctgagcgccaccaacctgagcgtgatcggcttcagaatcctgctgctgaaagtggccggctttaacctgctgatgaccctgcggctgtggtccagcagggccaagcgatctggatctggagcaacaaacttctcactactcaaacaagcaggtgacgtggaggagaatcccgggcctactagcatggccttaccagtgaccgccttgctcctgccgctggccttgctgctccacgccgccaggccggacatccagatgacacagagccctagcagcctgtctgccagcgtgggagacagagtgaccatcacatgcaaggccagcgaccacatcaacaactggctggcctggtatcagcagaagcctggcaaggcccctaagctgctgatctacggcgctaccacactggaaacaggcgtgcccagcagattttctggcagcggctctggcaccgacttcaccctgacaatatccagcctccagcctgaggacttcgccacctactactgtcagcagagctggaacaccccttggacattcggccagggcaccaaggtggaaatcaagagaggcggaggcggaagtggaggcggaggatctggcggcggaggctctgaagttcagctggttgaatctggcggcggactggttcaacctggcggatctctgagactgagctgtgccgcctctggctacgcctttagcaactactgggtcaactgggttcgacaggcccctggcaaaggactggaatgggtcgcccaaatctatcccggcgacggcgacaccaactacaacggcaagttcaagggcagattcaccatcagccgggacaacagcaagaacaccctgtacctccagatgaactccctgagagccgaggacaccgccgtgtactattgtgccagatccatcaccaccgtcgtgggctgcgctatggattattggggccagggaaccctggtcaccgtgtcctctacgcgtggacagcctaaggccaatcctaccgtgacactgttccctccaagcagcgaagaactccaggccaacaaggccacacttgtgtgcctgatctccgacttctaccctggggctgtgacagtggcttggaaggccgatggatctcctgtgaaagccggcgtggaaaccaccaagccatccaagcagagcaacaacaaatacgccgccagctcctacctgagcctgacacctgagcagtggaagtcccacagatcctacagctgccaagtgacccacgaaggcagcaccgtggaaaagacagtggcccctacagagtgcagccccatcaagaccgatgtgattacaatggaccccaaggacaactgctccaaggacgccaacgataccctgctgctccagctgaccaacaccagcgcctactacatgtacttgttgctgctgctgaagtccgtggtgtacttcgccatcatcacatgctgcctgctgcggagaaccgccttctgctgcaacggcgagaagtctcgcgccaagagaagcggatctggcgtgaagcagaccctgaatttcgacctgctgaagctggctggcgacgtggaatccaacccaggcccttctagaggccatatgaccgagtacaagcccacggtgcgcctcgccacccgcgacgacgtccccagggccgtacgcaccctcgccgccgcgttcgccgactaccccgccacgcgccacaccgtcgatccggaccgccacatcgagcgggtcaccgagctgcaagaactcttcctcacgcgcgtcgggctcgacatcggcaaggtgtgggtcgcggacgacggcgccgcggtggcggtctggaccacgccggagagcgtcgaagcgggggcggtgttcgccgagatcggcccgcgcatggccgagttgagcggttcccggctggccgcgcagcaacagatggaaggcctcctggcgccgcaccggcccaaggagcccgcgtggttcctggccaccgtcggcgtctcgcccgaccaccagggcaagggtctgggcagcgccgtcgtgctccccggagtggaggcggccgagcgcgccggggtgcccgccttcctggagacctccgcgccccgcaacctccccttctacgagcggctcggcttcaccgtcaccgccgacgtcgaggtgcccgaaggaccgcgcacctggtgcatgacccgcaagcccggtgcctga

SEQ ID NO: 36343 - DNA, 2703 bp, synthetic construct
  source 1..2703: mol_type = other DNA
atggccttaccagtgaccgccttgctcctgccgctggccttgctgctccacgccgccaggccgctcgagggacagcctaaggccaatcctaccgtgacactgttccctccaagcagcgaagaactccaggccaacaaggccacacttgtgtgcctgatctccgacttctaccctggggctgtgacagtggcttggaaggccgatggatctcctgtgaaagccggcgtggaaaccaccaagccatccaagcagagcaacaacaaatacgccgccagctcctacctgagcctgacacctgagcagtggaagtcccacagatcctacagctgccaagtgacccacgaaggcagcaccgtggaaaagacagtggcccctacagagtgcagccccatcaagaccgatgtgattacaatggaccccaaggacaactgctccaaggacgccaacgataccctgctgctccagctgaccaacaccagcgcctactacatgtacttgttgctgctgctgaagtccgtggtgtacttcgccatcatcacatgctgcctgctgcggagaaccgccttctgctgcaacggcgagaagtctagggccaagcgatctggatctggagcaacaaacttctcactactcaaacaagcaggtgacgtggaggagaatcccgggcctactagcatggccttaccagtgaccgccttgctcctgccgctggccttgctgctccacgccgccaggccggacatccagatgacacagagccctagcagcctgtctgccagcgtgggagacagagtgaccatcacatgcaaggccagcgaccacatcaacaactggctggcctggtatcagcagaagcctggcaaggcccctaagctgctgatctacggcgctaccacactggaaacaggcgtgcccagcagattttctggcagcggctctggcaccgacttcaccctgacaatatccagcctccagcctgaggacttcgccacctactactgtcagcagagctggaacaccccttggacattcggccagggcaccaaggtggaaatcaagagaggcggaggcggaagtggaggcggaggatctggcggcggaggctctgaagttcagctggttgaatctggcggcggactggttcaacctggcggatctctgagactgagctgtgccgcctctggctacgcctttagcaactactgggtcaactgggttcgacaggcccctggcaaaggactggaatgggtcgcccaaatctatcccggcgacggcgacaccaactacaacggcaagttcaagggcagattcaccatcagccgggacaacagcaagaacaccctgtacctccagatgaactccctgagagccgaggacaccgccgtgtactattgtgccagatccatcaccaccgtcgtgggctgcgctatggattattggggccagggaaccctggtcaccgtgtcctctacgcgtgaggaggacctgaagaacgtgttcccacctgaggtggccgtgttcgagcctagcgaggccgagatcagccacacccagaaagccaccctcgtgtgcctggctaccggcttctaccccgaccatgtggaactgtcttggtgggtcaacggcaaagaggtgcacagcggcgtgtgtaccgacccccagccactgaaagaacagcccgccctgaacgacagccggtactgcctgagcagcagactgagagtgtccgccaccttctggcagaacccccggaaccacttcagatgccaggtgcagttctacggcctgagcgagaacgacgagtggacccaggacagagccaagcccgtgacccagatcgtgtctgccgaagcctggggcagagccgattgcggctttaccagcgagagctaccagcagggcgtgctgagcgccaccaacctgagcgtgatcggcttcagaatcctgctgctgaaagtggccggctttaacctgctgatgaccctgcggctgtggtccagccgcgccaagagaagcggatctggcgtgaagcagaccctgaatttcgacctgctgaagctggctggcgacgtggaatccaacccaggcccttctagaggccatatgaccgagtacaagcccacggtgcgcctcgccacccgcgacgacgtccccagggccgtacgcaccctcgccgccgcgttcgccgactaccccgccacgcgccacaccgtcgatccggaccgccacatcgagcgggtcaccgagctgcaagaactcttcctcacgcgcgtcgggctcgacatcggcaaggtgtgggtcgcggacgacggcgccgcggtggcggtctggaccacgccggagagcgtcgaagcgggggcggtgttcgccgagatcggcccgcgcatggccgagttgagcggttcccggctggccgcgcagcaacagatggaaggcctcctggcgccgcaccggcccaaggagcccgcgtggttcctggccaccgtcggcgtctcgcccgaccaccagggcaagggtctgggcagcgccgtcgtgctccccggagtggaggcggccgagcgcgccggggtgcccgccttcctggagacctccgcgccccgcaacctccccttctacgagcggctcggcttcaccgtcaccgccgacgtcgaggtgcccgaaggaccgcgcacctggtgcatgacccgcaagcccggtgcctga

SEQ ID NO: 36344 - DNA, 2694 bp, synthetic construct
  source 1..2694: mol_type = other DNA
atggccttaccagtgaccgccttgctcctgccgctggccttgctgctccacgccgccaggccgctcgaggaggcctctacaaagggaccctccgtgtttcctctggctcccagcagcaagtctacaagcggaggaacagccgctctgggctgcctggtcaaggattactttcccgagcctgtgaccgtgtcctggaatagcggagcactgacaagcggcgtgcacacctttccagccgtgctgcaaagcagcggcctgtactctctgagcagcgtggtcacagtgcctagctctagcctgggcacccagacctacatctgcaatgtgaaccacaagcctagcaacaccaaggtggacaagagagtggaacccaagagctgtcccatcaagaccgatgtgattacaatggaccccaaggacaactgctccaaggacgccaacgataccctgctgctccagctgaccaacaccagcgcctactacatgtacttgttgctgctgctgaagtccgtggtgtacttcgccatcatcacatgctgcctgctgcggagaaccgccttctgctgcaacggcgagaagtctagggccaagcgatctggatctggagcaacaaacttctcactactcaaacaagcaggtgacgtggaggagaatcccgggcctactagcatggccttaccagtgaccgccttgctcctgccgctggccttgctgctccacgccgccaggccggacatccagatgacacagagccctagcagcctgtctgccagcgtgggagacagagtgaccatcacatgcaaggccagcgaccacatcaacaactggctggcctggtatcagcagaagcctggcaaggcccctaagctgctgatctacggcgctaccacactggaaacaggcgtgcccagcagattttctggcagcggctctggcaccgacttcaccctgacaatatccagcctccagcctgaggacttcgccacctactactgtcagcagagctggaacaccccttggacattcggccagggcaccaaggtggaaatcaagagaggcggaggcggaagtggaggcggaggatctggcggcggaggctctgaagttcagctggttgaatctggcggcggactggttcaacctggcggatctctgagactgagctgtgccgcctctggctacgcctttagcaactactgggtcaactgggttcgacaggcccctggcaaaggactggaatgggtcgcccaaatctatcccggcgacggcgacaccaactacaacggcaagttcaagggcagattcaccatcagccgggacaacagcaagaacaccctgtacctccagatgaactccctgagagccgaggacaccgccgtgtactattgtgccagatccatcaccaccgtcgtgggctgcgctatggattattggggccagggaaccctggtcaccgtgtcctctacgcgtggacagcctaaggccaatcctaccgtgacactgttccctccaagcagcgaagaactccaggccaacaaggccacacttgtgtgcctgatctccgacttctaccctggggctgtgacagtggcttggaaggccgatggatctcctgtgaaagccggcgtggaaaccaccaagccatccaagcagagcaacaacaaatacgccgccagctcctacctgagcctgacacctgagcagtggaagtcccacagatcctacagctgccaagtgacccacgaaggcagcaccgtggaaaagacagtggcccctacagagtgcagcgaagtgaaaaccgactccaccgaccacgtgaagcccaaagagacagagaacaccaagcagcccagcaagagctgccacaagcccaaggccatcgtgcacaccgagaaagtgaacatgatgagcctgaccgtgctgggcctgcggatgctgttcgccaaaaccgtggccgtgaacttcctgctgaccgccaagctgttcttcctccgcgccaagagaagcggatctggcgtgaagcagaccctgaatttcgacctgctgaagctggctggcgacgtggaatccaacccaggcccttctagaggccatatgaccgagtacaagcccacggtgcgcctcgccacccgcgacgacgtccccagggccgtacgcaccctcgccgccgcgttcgccgactaccccgccacgcgccacaccgtcgatccggaccgccacatcgagcgggtcaccgagctgcaagaactcttcctcacgcgcgtcgggctcgacatcggcaaggtgtgggtcgcggacgacggcgccgcggtggcggtctggaccacgccggagagcgtcgaagcgggggcggtgttcgccgagatcggcccgcgcatggccgagttgagcggttcccggctggccgcgcagcaacagatggaaggcctcctggcgccgcaccggcccaaggagcccgcgtggttcctggccaccgtcggcgtctcgcccgaccaccagggcaagggtctgggcagcgccgtcgtgctccccggagtggaggcggccgagcgcgccggggtgcccgccttcctggagacctccgcgccccgcaacctccccttctacgagcggctcggcttcaccgtcaccgccgacgtcgaggtgcccgaaggaccgcgcacctggtgcatgacccgcaagcccggtgcctga

SEQ ID NO: 36345 - DNA, 2628 bp, synthetic construct
  source 1..2628: mol_type = other DNA
atggccttaccagtgaccgccttgctcctgccgctggccttgctgctccacgccgccaggccgctcgaggaggcctctacaaagggaccctccgtgtttcctctggctcccagcagcaagtctacaagcggaggaacagccgctctgggctgcctggtcaaggattactttcccgagcctgtgaccgtgtcctggaatagcggagcactgacaagcggcgtgcacacctttccagccgtgctgcaaagcagcggcctgtactctctgagcagcgtggtcacagtgcctagctctagcctgggcacccagacctacatctgcaatgtgaaccacaagcctagcaacaccaaggtggacaagagagtggaacccaagagctgtggcagagccgattgcggctttaccagcgagagctaccagcagggcgtgctgagcgccaccatcctgtacgagatcctgctgggcaaggccaccctgtacgccgtgctggtgtctgccctggtgctgatggctatggtcaagcggaaggacagccggggaagggccaagcgatctggatctggagcaacaaacttctcactactcaaacaagcaggtgacgtggaggagaatcccgggcctactagcatggccttaccagtgaccgccttgctcctgccgctggccttgctgctccacgccgccaggccggacatccagatgacacagagccctagcagcctgtctgccagcgtgggagacagagtgaccatcacatgcaaggccagcgaccacatcaacaactggctggcctggtatcagcagaagcctggcaaggcccctaagctgctgatctacggcgctaccacactggaaacaggcgtgcccagcagattttctggcagcggctctggcaccgacttcaccctgacaatatccagcctccagcctgaggacttcgccacctactactgtcagcagagctggaacaccccttggacattcggccagggcaccaaggtggaaatcaagagaggcggaggcggaagtggaggcggaggatctggcggcggaggctctgaagttcagctggttgaatctggcggcggactggttcaacctggcggatctctgagactgagctgtgccgcctctggctacgcctttagcaactactgggtcaactgggttcgacaggcccctggcaaaggactggaatgggtcgcccaaatctatcccggcgacggcgacaccaactacaacggcaagttcaagggcagattcaccatcagccgggacaacagcaagaacaccctgtacctccagatgaactccctgagagccgaggacaccgccgtgtactattgtgccagatccatcaccaccgtcgtgggctgcgctatggattattggggccagggaaccctggtcaccgtgtcctctacgcgtggacagcctaaggccaatcctaccgtgacactgttccctccaagcagcgaagaactccaggccaacaaggccacacttgtgtgcctgatctccgacttctaccctggggctgtgacagtggcttggaaggccgatggatctcctgtgaaagccggcgtggaaaccaccaagccatccaagcagagcaacaacaaatacgccgccagctcctacctgagcctgacacctgagcagtggaagtcccacagatcctacagctgccaagtgacccacgaaggcagcaccgtggaaaagacagtggcccctacagagtgcagcatccccgaggacacattcttcccaagccccgagagcagctgcgacgtgaagctggtggaaaagagcttcgagacagacaccaacctgaacttccagaacctgagcgtgatcggcttcagaatcctgctgctgaaagtggccggctttaacctgctgatgaccctgcggctgtggtccagccgcgccaagagaagcggatctggcgtgaagcagaccctgaatttcgacctgctgaagctggctggcgacgtggaatccaacccaggcccttctagaggccatatgaccgagtacaagcccacggtgcgcctcgccacccgcgacgacgtccccagggccgtacgcaccctcgccgccgcgttcgccgactaccccgccacgcgccacaccgtcgatccggaccgccacatcgagcgggtcaccgagctgcaagaactcttcctcacgcgcgtcgggctcgacatcggcaaggtgtgggtcgcggacgacggcgccgcggtggcggtctggaccacgccggagagcgtcgaagcgggggcggtgttcgccgagatcggcccgcgcatggccgagttgagcggttcccggctggccgcgcagcaacagatggaaggcctcctggcgccgcaccggcccaaggagcccgcgtggttcctggccaccgtcggcgtctcgcccgaccaccagggcaagggtctgggcagcgccgtcgtgctccccggagtggaggcggccgagcgcgccggggtgcccgccttcctggagacctccgcgccccgcaacctccccttctacgagcggctcggcttcaccgtcaccgccgacgtcgaggtgcccgaaggaccgcgcacctggtgcatgacccgcaagcccggtgcctga

SEQ ID NO: 36346 - DNA, 2628 bp, synthetic construct
  source 1..2628: mol_type = other DNA
atggccttaccagtgaccgccttgctcctgccgctggccttgctgctccacgccgccaggccgctcgaggaggcctctacaaagggaccctccgtgtttcctctggctcccagcagcaagtctacaagcggaggaacagccgctctgggctgcctggtcaaggattactttcccgagcctgtgaccgtgtcctggaatagcggagcactgacaagcggcgtgcacacctttccagccgtgctgcaaagcagcggcctgtactctctgagcagcgtggtcacagtgcctagctctagcctgggcacccagacctacatctgcaatgtgaaccacaagcctagcaacaccaaggtggacaagagagtggaacccaagagctgtatccccgaggacacattcttcccaagccccgagagcagctgcgacgtgaagctggtggaaaagagcttcgagacagacaccaacctgaacttccagaacctgagcgtgatcggcttcagaatcctgctgctgaaagtggccggctttaacctgctgatgaccctgcggctgtggtccagcagggccaagcgatctggatctggagcaacaaacttctcactactcaaacaagcaggtgacgtggaggagaatcccgggcctactagcatggccttaccagtgaccgccttgctcctgccgctggccttgctgctccacgccgccaggccggacatccagatgacacagagccctagcagcctgtctgccagcgtgggagacagagtgaccatcacatgcaaggccagcgaccacatcaacaactggctggcctggtatcagcagaagcctggcaaggcccctaagctgctgatctacggcgctaccacactggaaacaggcgtgcccagcagattttctggcagcggctctggcaccgacttcaccctgacaatatccagcctccagcctgaggacttcgccacctactactgtcagcagagctggaacaccccttggacattcggccagggcaccaaggtggaaatcaagagaggcggaggcggaagtggaggcggaggatctggcggcggaggctctgaagttcagctggttgaatctggcggcggactggttcaacctggcggatctctgagactgagctgtgccgcctctggctacgcctttagcaactactgggtcaactgggttcgacaggcccctggcaaaggactggaatgggtcgcccaaatctatcccggcgacggcgacaccaactacaacggcaagttcaagggcagattcaccatcagccgggacaacagcaagaacaccctgtacctccagatgaactccctgagagccgaggacaccgccgtgtactattgtgccagatccatcaccaccgtcgtgggctgcgctatggattattggggccagggaaccctggtcaccgtgtcctctacgcgtggacagcctaaggccaatcctaccgtgacactgttccctccaagcagcgaagaactccaggccaacaaggccacacttgtgtgcctgatctccgacttctaccctggggctgtgacagtggcttggaaggccgatggatctcctgtgaaagccggcgtggaaaccaccaagccatccaagcagagcaacaacaaatacgccgccagctcctacctgagcctgacacctgagcagtggaagtcccacagatcctacagctgccaagtgacccacgaaggcagcaccgtggaaaagacagtggcccctacagagtgcagcggcagagccgattgcggctttaccagcgagagctaccagcagggcgtgctgagcgccaccatcctgtacgagatcctgctgggcaaggccaccctgtacgccgtgctggtgtctgccctggtgctgatggctatggtcaagcggaaggacagccggggacgcgccaagagaagcggatctggcgtgaagcagaccctgaatttcgacctgctgaagctggctggcgacgtggaatccaacccaggcccttctagaggccatatgaccgagtacaagcccacggtgcgcctcgccacccgcgacgacgtccccagggccgtacgcaccctcgccgccgcgttcgccgactaccccgccacgcgccacaccgtcgatccggaccgccacatcgagcgggtcaccgagctgcaagaactcttcctcacgcgcgtcgggctcgacatcggcaaggtgtgggtcgcggacgacggcgccgcggtggcggtctggaccacgccggagagcgtcgaagcgggggcggtgttcgccgagatcggcccgcgcatggccgagttgagcggttcccggctggccgcgcagcaacagatggaaggcctcctggcgccgcaccggcccaaggagcccgcgtggttcctggccaccgtcggcgtctcgcccgaccaccagggcaagggtctgggcagcgccgtcgtgctccccggagtggaggcggccgagcgcgccggggtgcccgccttcctggagacctccgcgccccgcaacctccccttctacgagcggctcggcttcaccgtcaccgccgacgtcgaggtgcccgaaggaccgcgcacctggtgcatgacccgcaagcccggtgcctga

SEQ ID NO: 36347 - DNA, 1866 bp, synthetic construct
  source 1..1866: mol_type = other DNA
atggccttaccagtgaccgccttgctcctgccgctggccttgctgctccacgccgccaggccggacatccagatgacacagagccctagcagcctgtctgccagcgtgggagacagagtgaccatcacatgcaaggccagcgaccacatcaacaactggctggcctggtatcagcagaagcctggcaaggcccctaagctgctgatctacggcgctaccacactggaaacaggcgtgcccagcagattttctggcagcggctctggcaccgacttcaccctgacaatatccagcctccagcctgaggacttcgccacctactactgtcagcagagctggaacaccccttggacattcggccagggcaccaaggtggaaatcaagagactcgaggacctgaagaacgtgttcccacctgaggtggccgtgttcgagcctagcgaggccgagatcagccacacccagaaagccaccctcgtgtgcctggctaccggcttctaccccgaccatgtggaactgtcttggtgggtcaacggcaaagaggtgcacagcggcgtgtgtaccgacccccagccactgaaagaacagcccgccctgaacgacagccggtactgcctgagcagcagactgagagtgtccgccaccttctggcagaacccccggaaccacttcagatgccaggtgcagttctacggcctgagcgagaacgacgagtggacccaggacagagccaagcccgtgacccagatcgtgtctgccgaagcctggggcagagccgatagcggctttaccagcgagagctaccagcagggcgtgctgagcgccaccatcctgtacgagatcctgctgggcaaggccaccctgtacgccgtgctggtgtctgccctggtgctgatggctatggtcaagcggaaggacagccggggaagggccaagcgatctggatctggagcaacaaacttctcactactcaaacaagcaggtgacgtggaggagaatcccgggcctactagtatggactggatttggcgcatccttttccttgtcggcgctgctaccggcgcgcattccttcgaagaagttcagctggttgaatctggcggcggactggttcaacctggcggatctctgagactgagctgtgccgcctctggctacgcctttagcaactactgggtcaactgggttcgacaggcccctggcaaaggactggaatgggtcgcccaaatctatcccggcgacggcgacaccaactacaacggcaagttcaagggcagattcaccatcagccgggacaacagcaagaacaccctgtacctccagatgaactccctgagagccgaggacaccgccgtgtactattgtgccagatccatcaccaccgtcgtgggctgcgctatggattattggggccagggaaccctggtcaccgtgtcctctacgcgtatccagaaccctgatcctgccgtgtaccagctgcgggatagcaagagcagcgacaagagcgtgtgtctgttcaccgacttcgacagccagaccaacgtgtcccagagcaaggactccgacgtgtacatcaccgataagtgcgtgctggacatgcggagcatggacttcaagagcaactccgccgtggcctggtccaacaagtccgatttcgcctgcgccaacgccttcaacaacagcattatccccgaggacacattcttcccaagccccgagagcagcagcgacgtgaagctggtggaaaagagcttcgagacagacaccaacctgaacttccagaacctgagcgtgatcggcttcagaatcctgctgctgaaagtggccggctttaacctgctgatgaccctgcggctgtggtccagc

SEQ ID NO: 36348 - DNA, 2706 bp, synthetic construct
  source 1..2706: mol_type = other DNA
atggccttaccagtgaccgccttgctcctgccgctggccttgctgctccacgccgccaggccggaggttcagctgcttgagtctggcggaggactggttcaacctggcggaagcctgagactgtcttgtgccgcctctggcagaaccttcagcatgggctggtatagacaggcccctggcaagggcctcgaatttgtgtctgccatcacatacagcggcggcagcccttactacgccgattctgtgaagggcagattcaccatcagccgggacaacagcaagaacaccgtgtacctccagatgaacagcctgagagccgaggacaccgccgtgtactactgtgccgccaatccaacctacggcagcgactggaatgccgagaattggggccagggcacactggtcacagtgtctagtggtaccggcggaggcggatctggcggcggaggtagcggtggcggaggatctgaattcgacatccagatgacacagagccctagcagcctgtctgccagcgtgggagacagagtgaccatcacatgcaaggccagcgaccacatcaacaactggctggcctggtatcagcagaagcctggcaaggcccctaagctgctgatctacggcgctaccacactggaaacaggcgtgcccagcagattttctggcagcggctctggcaccgacttcaccctgacaatatccagcctccagcctgaggacttcgccacctactactgtcagcagagctggaacaccccttggacattcggccagggcaccaaggtggaaatcaagagactcgagatccagaaccctgatcctgccgtgtaccagctgcgggatagcaagagcagcgacaagagcgtgtgtctgttcaccgacttcgacagccagaccaacgtgtcccagagcaaggactccgacgtgtacatcaccgataagtgcgtgctggacatgcggagcatggacttcaagagcaactccgccgtggcctggtccaacaagtccgatttcgcctgcgccaacgccttcaacaacagcattatccccgaggacacattcttcccaagcagcgacgtgccctgcgacgtgaagctggtggaaaagagcttcgagacagacaccaacctgaacttccagaacctgagcgtgatcggcttcagaatcctgctgctgaaagtggccggctttaacctgctgatgaccctgcggctgtggtccagccgcgccaagagaagcggatctggcgtgaagcagaccctgaatttcgacctgctgaagctggctggcgacgtggaatccaacccaggccctactagtaccatggactggatttggcgcatccttttccttgtcggcgctgctaccggcacccattccgggcccgaagtgcaactggttgaatccggtggcggcctggtgcaacccggcggatctctcagacttagctgtgccgcctccggcagaaccttcacaatgggatggtacaggcaggctccagggaaagagagagagttcgtcgccgccatctctctgtctcccacactggcctactacgccgactctgtgaaaggccggttcaccatctccagagataatagcaagaacaccgtggtgctgcaaatgaactctctgagagccgaggatacagccctgtactattgtgccgctgaccggaagtccgtgatgagcatcagacccgattactggggacagggcacactggtcacagtgtctagtggatccggcggcggaggatctggcggaggcggatctgggggcggaggctctttcgaagaagttcagctggttgaatctggcggcggactggttcaacctggcggatctctgagactgagctgtgccgcctctggctacgcctttagcaactactgggtcaactgggttcgacaggcccctggcaaaggactggaatgggtcgcccaaatctatcccggcgacggcgacaccaactacaacggcaagttcaagggcagattcaccatcagccgggacaacagcaagaacaccctgtacctccagatgaactccctgagagccgaggacaccgccgtgtactattgtgccagatccatcaccaccgtcgtgggctgcgctatggattattggggccagggaaccctggtcaccgtgtcctctacgcgtgaggacctgaagaacgtgttcccacctgaggtggccgtgttcgagcctagcaaggccgagatcgcccacacccagaaagccaccctcgtgtgcctggctaccggcttctaccccgaccatgtggaactgtcttggtgggtcaacggcaaagaggtgcacagcggcgtgtgtaccgacccccagccactgaaagaacagcccgccctgaacgacagccggtactgcctgagcagcagactgagagtgtccgccaccttctggcagaacccccggaaccacttcagatgccaggtgcagttctacggcctgagcgagaacgacgagtggacccaggacagagccaagcccgtgacccagatcgtgtctgccgaagcctggggcagagccgattgcggcatcaccagcgccagctaccaccagggcgtgctgagcgccaccatcctgtacgagatcctgctgggcaaggccaccctgtacgccgtgctggtgtctgccctggtgctgatggctatggtcaagcggaaggacagccggggataa

SEQ ID NO: 36349 - DNA, 2706 bp, synthetic construct
  source 1..2706: mol_type = other DNA
atggccttaccagtgaccgccttgctcctgccgctggccttgctgctccacgccgccaggccggaagtgcagctggttgaatctggcggaggactggttcaggctggcggatctctgagactgtcttgtgccgccagcggcagaacctttagcatgggctggtttagacaggcccctggcaaagagagagagttcgtcgccgccatcacatactctggcggcagcccttactacgccgactctgtgaagggcagattcaccatcagccgggacaacgccaagaacaccgtgtacctccagatgaacagcctgaagcctgaggacaccgccgtgtactactgcgccgccaatccaacatacggcagcgactggaacgccgagaattggggccagggaacccaagtgacagtgtctagcggtaccggcggaggcggatctggcggcggaggtagcggtggcggaggatctgaattcgacatccagatgacacagagccctagcagcctgtctgccagcgtgggagacagagtgaccatcacatgcaaggccagcgaccacatcaacaactggctggcctggtatcagcagaagcctggcaaggcccctaagctgctgatctacggcgctaccacactggaaacaggcgtgcccagcagattttctggcagcggctctggcaccgacttcaccctgacaatatccagcctccagcctgaggacttcgccacctactactgtcagcagagctggaacaccccttggacattcggccagggcaccaaggtggaaatcaagagactcgagatccagaaccctgatcctgccgtgtaccagctgcgggatagcaagagcagcgacaagagcgtgtgtctgttcaccgacttcgacagccagaccaacgtgtcccagagcaaggactccgacgtgtacatcaccgataagtgcgtgctggacatgcggagcatggacttcaagagcaactccgccgtggcctggtccaacaagtccgatttcgcctgcgccaacgccttcaacaacagcattatccccgaggacacattcttcccaagcagcgacgtgccctgcgacgtgaagctggtggaaaagagcttcgagacagacaccaacctgaacttccagaacctgagcgtgatcggcttcagaatcctgctgctgaaagtggccggctttaacctgctgatgaccctgcggctgtggtccagccgcgccaagagaagcggatctggcgtgaagcagaccctgaatttcgacctgctgaagctggctggcgacgtggaatccaacccaggccctactagtaccatggactggatttggcgcatccttttccttgtcggcgctgctaccggcgcccattccgggcccgaagtgcaactggttgaatccggtggcggcctggtgcaacccggcggatctctcagacttagctgtgccgcctccggcagaaccttcacaatgggatggtacaggcaggctccagggaaagagagagagttcgtcgccgccatctctctgtctcccacactggcctactacgccgactctgtgaaaggccggttcaccatctccagagataatagcaagaacaccgtggtgctgcaaatgaactctctgagagccgaggatacagccctgtactattgtgccgctgaccggaagtccgtgatgagcatcagacccgattactggggacagggcacactggtcacagtgtctagtggatccggcggcggaggatctggcggaggcggatctgggggcggaggctctttcgaagaagttcagctggttgaatctggcggcggactggttcaacctggcggatctctgagactgagctgtgccgcctctggctacgcctttagcaactactgggtcaactgggttcgacaggcccctggcaaaggactggaatgggtcgcccaaatctatcccggcgacggcgacaccaactacaacggcaagttcaagggcagattcaccatcagccgggacaacagcaagaacaccctgtacctccagatgaactccctgagagccgaggacaccgccgtgtactattgtgccagatccatcaccaccgtcgtgggctgcgctatggattattggggccagggaaccctggtcaccgtgtcctctacgcgtgaggacctgaagaacgtgttcccacctgaggtggccgtgttcgagcctagcaaggccgagatcgcccacacccagaaagccaccctcgtgtgcctggctaccggcttctaccccgaccatgtggaactgtcttggtgggtcaacggcaaagaggtgcacagcggcgtgtgtaccgacccccagccactgaaagaacagcccgccctgaacgacagccggtactgcctgagcagcagactgagagtgtccgccaccttctggcagaacccccggaaccacttcagatgccaggtgcagttctacggcctgagcgagaacgacgagtggacccaggacagagccaagcccgtgacccagatcgtgtctgccgaagcctggggcagagccgattgcggcatcaccagcgccagctaccaccagggcgtgctgagcgccaccatcctgtacgagatcctgctgggcaaggccaccctgtacgccgtgctggtgtctgccctggtgctgatggctatggtcaagcggaaggacagccggggataa

SEQ ID NO: 36350 - DNA, 2697 bp, synthetic construct
  source 1..2697: mol_type = other DNA
atggccttaccagtgaccgccttgctcctgccgctggccttgctgctccacgccgccaggccggaagtgcagctggttgaatctggcggaggactggttcaggctggcggatctctgagactgtcttgtgccgccagcggcagaacctttagcatgggctggtttagacaggcccctggcaaagagagagagttcgtcgccgccatcacatactctggcggcagcccttactacgccgactctgtgaagggcagattcaccatcagccgggacaacgccaagaacaccgtgtacctccagatgaacagcctgaagcctgaggacaccgccgtgtactactgcgccgccaatccaacatacggcagcgactggaacgccgagaattggggccagggaacccaagtgacagtgtctagcggtaccggcggaggcggatctggcggcggaggtagcggtggcggaggatctgaattcgacatccagatgacacagagccctagcagcctgtctgccagcgtgggagacagagtgaccatcacatgcaaggccagcgaccacatcaacaactggctggcctggtatcagcagaagcctggcaaggcccctaagctgctgatctacggcgctaccacactggaaacaggcgtgcccagcagattttctggcagcggctctggcaccgacttcaccctgacaatatccagcctccagcctgaggacttcgccacctactactgtcagcagagctggaacaccccttggacattcggccagggcaccaaggtggaaatcaagagactcgaggacctgaagaacgtgttcccacctgaggtggccgtgttcgagcctagcgaggccgagatcagccacacccagaaagccaccctcgtgtgcctggctaccggcttctaccccgaccatgtggaactgtcttggtgggtcaacggcaaagaggtgcacagcggcgtgtgtaccgacccccagccactgaaagaacagcccgccctgaacgacagccggtactgcctgagcagcagactgagagtgtccgccaccttctggcagaacccccggaaccacttcagatgccaggtgcagttctacggcctgagcgagaacgacgagtggacccaggacagagccaagcccgtgacccagatcgtgtctgccgaagcctggggcagagccgattgcggctttaccagcgagagctaccagcagggcgtgctgagcgccaccatcctgtacgagatcctgctgggcaaggccaccctgtacgccgtgctggtgtctgccctggtgctgatggctatggtcaagcggaaggacagccggggaagggccaagcgatctggatctggagcaacaaacttctcactactcaaacaagcaggtgacgtggaggagaatcccgggcctactagtgccaccatggactggatttggcgcatccttttccttgtcggcgctgctaccggcgcccattccgggcccgaagtgcaactggttgaatccggtggcggcctggtgcaagcaggcggatctctcagacttagctgtgccgcctccggcagaaccttcacaatgggatggtttaggcaggctccagggaaagagagagagttcgtcgccgccatctctctgtctcccacactggcctactacgccgactctgtgaaaggccggttcaccatctccagagataatgccaagaacaccgtggtgctgcaaatgaactctctgaaacccgaggatacagccctgtactattgtgccgctgaccggaagtccgtgatgagcatcagacccgattactggggacagggcacacaagtcacagtgtcctctggatccggcggcggaggatctggcggaggcggatctgggggcggaggctctttcgaagaagttcagctggttgaatctggcggcggactggttcaacctggcggatctctgagactgagctgtgccgcctctggctacgcctttagcaactactgggtcaactgggttcgacaggcccctggcaaaggactggaatgggtcgcccaaatctatcccggcgacggcgacaccaactacaacggcaagttcaagggcagattcaccatcagccgggacaacagcaagaacaccctgtacctccagatgaactccctgagagccgaggacaccgccgtgtactattgtgccagatccatcaccaccgtcgtgggctgcgctatggattattggggccagggaaccctggtcaccgtgtcctctacgcgtatccagaaccctgatcctgccgtgtaccagctgcgggatagcaagagcagcgacaagagcgtgtgtctgttcaccgacttcgacagccagaccaacgtgtcccagagcaaggactccgacgtgtacatcaccgataagtgcgtgctggacatgcggagcatggacttcaagagcaactccgccgtggcctggtccaacaagtccgatttcgcctgcgccaacgccttcaacaacagcattatccccgaggacacattcttcccaagccccgagagcagctgcgacgtgaagctggtggaaaagagcttcgagacagacaccaacctgaacttccagaacctgagcgtgatcggcttcagaatcctgctgctgaaagtggccggctttaacctgctgatgaccctgcggctgtggtccagctaa

SEQ ID NO: 36351 - DNA, 2310 bp, synthetic construct
  source 1..2310: mol_type = other DNA
atggccttaccagtgaccgccttgctcctgccgctggccttgctgctccacgccgccaggccggaagtgcagctggttgaatctggcggaggactggttcagcctggcggatctctgagactgagctgtgaagccagcggcttcgccagcgacgattacatcatcggctggttcagacaggcccctggcaaagagagagagggcgtcagctgcatcagctctaagtacgccaacaccgtgtacaccgacagcgtgaagggcagattcagactgagcagaggcaccgccaagaataccgtgtacctccagatgagcgccctgaagcctgaggataccgccgtgtactactgcgctatggacagccgcagagtgacatgccctgagatcagcaccatgcaccggaacttcgattcttggggccagggcacactggtcacagtgtcatctggtaccggcggaggcggatctggcggcggaggtagcggtggcggaggatctgaattcgacatccagatgacacagagccctagcagcctgtctgccagcgtgggagacagagtgaccatcacatgcaaggccagcgaccacatcaacaactggctggcctggtatcagcagaagcctggcaaggcccctaagctgctgatctacggcgctaccacactggaaacaggcgtgcccagcagattttctggcagcggctctggcaccgacttcaccctgacaatatccagcctccagcctgaggacttcgccacctactactgtcagcagagctggaacaccccttggacattcggccagggcaccaaggtggaaatcaagagactcgaggacctgaagaacgtgttcccacctgaggtggccgtgttcgagcctagcaaggccgagatcgcccacacccagaaagccaccctcgtgtgcctggctaccggcttctaccccgaccatgtggaactgtcttggtgggtcaacggcaaagaggtgcacagcggcgtgtgtaccgacccccagccactgaaagaacagcccgccctgaacgacagccggtactgcctgagcagcagactgagagtgtccgccaccttctggcagaacccccggaaccacttcagatgccaggtgcagttctacggcctgagcgagaacgacgagtggacccaggacagagccaagcccgtgacccagatcgtgtctgccgaagcctggggcagagccgattgcggcatcaccagcgccagctaccaccagggcgtgctgagcgccaccatcctgtacgagatcctgctgggcaaggccaccctgtacgccgtgctggtgtctgccctggtgctgatggctatggtcaagcggaaggacagccggggaagggccaagcgatctggatctggagcaacaaacttctcactactcaaacaagcaggtgacgtggaggagaatcccgggcctactagtatggactggatttggcgcatccttttccttgtcggcgctgctaccggcgcgcattccttcgaagaagttcagctggttgaatctggcggcggactggttcaacctggcggatctctgagactgagctgtgccgcctctggctacgcctttagcaactactgggtcaactgggttcgacaggcccctggcaaaggactggaatgggtcgcccaaatctatcccggcgacggcgacaccaactacaacggcaagttcaagggcagattcaccatcagccgggacaacagcaagaacaccctgtacctccagatgaactccctgagagccgaggacaccgccgtgtactattgtgccagatccatcaccaccgtcgtgggctgcgctatggattattggggccagggaaccctggtcaccgtgtcctctacgcgtatccagaaccctgatcctgccgtgtaccagctgcgggatagcaagagcagcgacaagagcgtgtgtctgttcaccgacttcgacagccagaccaacgtgtcccagagcaaggactccgacgtgtacatcaccgataagtgcgtgctggacatgcggagcatggacttcaagagcaactccgccgtggcctggtccaacaagtccgatttcgcctgcgccaacgccttcaacaacagcattatccccgaggacacattcttcccaagcagcgacgtgccctgcgacgtgaagctggtggaaaagagcttcgagacagacaccaacctgaacttccagaacctgagcgtgatcggcttcagaatcctgctgctgaaagtggccggctttaacctgctgatgaccctgcggctgtggtccagctaa

SEQ ID NO: 36352 - DNA, 2283 bp, synthetic construct
  source 1..2283: mol_type = other DNA
atggccttaccagtgaccgccttgctcctgccgctggccttgctgctccacgccgccaggccggacatccagatgacacagagccctagcagcctgtctgccagcgtgggagacagagtgaccatcacatgcaaggccagcgaccacatcaacaactggctggcctggtatcagcagaagcctggcaaggcccctaagctgctgatctacggcgctaccacactggaaacaggcgtgcccagcagattttctggcagcggctctggcaccgacttcaccctgacaatatccagcctccagcctgaggacttcgccacctactactgtcagcagagctggaacaccccttggacattcggccagggcaccaaggtggaaatcaagagactcgaggacctgaagaacgtgttcccacctgaggtggccgtgttcgagcctagcgaggccgagatcagccacacccagaaagccaccctcgtgtgcctggctaccggcttctaccccgaccatgtggaactgtcttggtgggtcaacggcaaagaggtgcacagcggcgtgtgtaccgacccccagccactgaaagaacagcccgccctgaacgacagccggtactgcctgagcagcagactgagagtgtccgccaccttctggcagaacccccggaaccacttcagatgccaggtgcagttctacggcctgagcgagaacgacgagtggacccaggacagagccaagcccgtgacccagatcgtgtctgccgaagcctggggcagagccgattgcggctttaccagcgagagctaccagcagggcgtgctgagcgccaccatcctgtacgagatcctgctgggcaaggccaccctgtacgccgtgctggtgtctgccctggtgctgatggctatggtcaagcggaaggacagccggggaagggccaagcgatctggatctggagcaacaaacttctcactactcaaacaagcaggtgacgtggaggagaatcccgggcctactagtaccatggactggatttggcgcatccttttccttgtcggcgctgctaccggcgcccattccgggcccgaagtgcaactggttgaatccggtggcggcctggtgcaacccggcggatctctcagacttagctgtgccgcctccggcagaaccttcacaatgggatggtacaggcaggctccagggaaagagagagagttcgtcgccgccatctctctgtctcccacactggcctactacgccgactctgtgaaaggccggttcaccatctccagagataatagcaagaacaccgtggtgctgcaaatgaactctctgagagccgaggatacagccctgtactattgtgccgctgaccggaagtccgtgatgagcatcagacccgattactggggacagggcacactggtcacagtgtctagtggatccggcggcggaggatctggcggaggcggatctgggggcggaggctctttcgaagaagttcagctggttgaatctggcggcggactggttcaacctggcggatctctgagactgagctgtgccgcctctggctacgcctttagcaactactgggtcaactgggttcgacaggcccctggcaaaggactggaatgggtcgcccaaatctatcccggcgacggcgacaccaactacaacggcaagttcaagggcagattcaccatcagccgggacaacagcaagaacaccctgtacctccagatgaactccctgagagccgaggacaccgccgtgtactattgtgccagatccatcaccaccgtcgtgggctgcgctatggattattggggccagggaaccctggtcaccgtgtcctctacgcgtatccagaaccctgatcctgccgtgtaccagctgcgggatagcaagagcagcgacaagagcgtgtgtctgttcaccgacttcgacagccagaccaacgtgtcccagagcaaggactccgacgtgtacatcaccgataagtgcgtgctggacatgcggagcatggacttcaagagcaactccgccgtggcctggtccaacaagtccgatttcgcctgcgccaacgccttcaacaacagcattatccccgaggacacattcttcccaagccccgagagcagctgcgacgtgaagctggtggaaaagagcttcgagacagacaccaacctgaacttccagaacctgagcgtgatcggcttcagaatcctgctgctgaaagtggccggctttaacctgctgatgaccctgcggctgtggtccagctaa

SEQ ID NO: 36353 - DNA, 2301 bp, synthetic construct
  source 1..2301: mol_type = other DNA
atggccttaccagtgaccgccttgctcctgccgctggccttgctgctccacgccgccaggccggacatccagatgacacagagccctagcagcctgtctgccagcgtgggagacagagtgaccatcacatgcaaggccagcgaccacatcaacaactggctggcctggtatcagcagaagcctggcaaggcccctaagctgctgatctacggcgctaccacactggaaacaggcgtgcccagcagattttctggcagcggctctggcaccgacttcaccctgacaatatccagcctccagcctgaggacttcgccacctactactgtcagcagagctggaacaccccttggacattcggccagggcaccaaggtggaaatcaagagactcgaggacctgaagaacgtgttcccacctgaggtggccgtgttcgagcctagcgaggccgagatcagccacacccagaaagccaccctcgtgtgcctggctaccggcttctaccccgaccatgtggaactgtcttggtgggtcaacggcaaagaggtgcacagcggcgtgtgtaccgacccccagccactgaaagaacagcccgccctgaacgacagccggtactgcctgagcagcagactgagagtgtccgccaccttctggcagaacccccggaaccacttcagatgccaggtgcagttctacggcctgagcgagaacgacgagtggacccaggacagagccaagcccgtgacccagatcgtgtctgccgaagcctggggcagagccgattgcggctttaccagcgagagctaccagcagggcgtgctgagcgccaccatcctgtacgagatcctgctgggcaaggccaccctgtacgccgtgctggtgtctgccctggtgctgatggctatggtcaagcggaaggacagccggggaagggccaagcgatctggatctggagcaacaaacttctcactactcaaacaagcaggtgacgtggaggagaatcccgggcctactagtaccatggactggatttggcgcatccttttccttgtcggcgctgctaccggcgcccattccgggccccaggtgcagctggttgaatctggcggaggactggttcagcctggcggatctctgagactgtcttgtgccgccagcggcaacatcaacagcagaaactgcatgggctggttcagacaggcccctggcaagggaagagaaggcgtggcagctatcggccaagtgaccggcagaacctactacgtggacagcgtgaagggcagattcaccatcagcctggacaacagcaagaacaccctgtacctccagatgaacagcctgagagccgaggacaccgccgtgtactattgtgctgctgcccctggctgtctgctgtctgcacttagaagcgccgactacagaaactggggccagggcacactggtcaccgtttcttctggatccggcggcggaggatctggcggaggcggatctgggggcggaggctctttcgaagaagttcagctggttgaatctggcggcggactggttcaacctggcggatctctgagactgagctgtgccgcctctggctacgcctttagcaactactgggtcaactgggttcgacaggcccctggcaaaggactggaatgggtcgcccaaatctatcccggcgacggcgacaccaactacaacggcaagttcaagggcagattcaccatcagccgggacaacagcaagaacaccctgtacctccagatgaactccctgagagccgaggacaccgccgtgtactattgtgccagatccatcaccaccgtcgtgggctgcgctatggattattggggccagggaaccctggtcaccgtgtcctctacgcgtatccagaaccctgatcctgccgtgtaccagctgcgggatagcaagagcagcgacaagagcgtgtgtctgttcaccgacttcgacagccagaccaacgtgtcccagagcaaggactccgacgtgtacatcaccgataagtgcgtgctggacatgcggagcatggacttcaagagcaactccgccgtggcctggtccaacaagtccgatttcgcctgcgccaacgccttcaacaacagcattatccccgaggacacattcttcccaagccccgagagcagctgcgacgtgaagctggtggaaaagagcttcgagacagacaccaacctgaacttccagaacctgagcgtgatcggcttcagaatcctgctgctgaaagtggccggctttaacctgctgatgaccctgcggctgtggtccagc

SEQ ID NO: 36354 - DNA, 2304 bp, synthetic construct
  source 1..2304: mol_type = other DNA
atggccttaccagtgaccgccttgctcctgccgctggccttgctgctccacgccgccaggccggacatccagatgacacagagccctagcagcctgtctgccagcgtgggagacagagtgaccatcacatgcaaggccagcgaccacatcaacaactggctggcctggtatcagcagaagcctggcaaggcccctaagctgctgatctacggcgctaccacactggaaacaggcgtgcccagcagattttctggcagcggctctggcaccgacttcaccctgacaatatccagcctccagcctgaggacttcgccacctactactgtcagcagagctggaacaccccttggacattcggccagggcaccaaggtggaaatcaagagactcgaggacctgaagaacgtgttcccacctgaggtggccgtgttcgagcctagcgaggccgagatcagccacacccagaaagccaccctcgtgtgcctggctaccggcttctaccccgaccatgtggaactgtcttggtgggtcaacggcaaagaggtgcacagcggcgtgtgtaccgacccccagccactgaaagaacagcccgccctgaacgacagccggtactgcctgagcagcagactgagagtgtccgccaccttctggcagaacccccggaaccacttcagatgccaggtgcagttctacggcctgagcgagaacgacgagtggacccaggacagagccaagcccgtgacccagatcgtgtctgccgaagcctggggcagagccgattgcggctttaccagcgagagctaccagcagggcgtgctgagcgccaccatcctgtacgagatcctgctgggcaaggccaccctgtacgccgtgctggtgtctgccctggtgctgatggctatggtcaagcggaaggacagccggggaagggccaagcgatctggatctggagcaacaaacttctcactactcaaacaagcaggtgacgtggaggagaatcccgggcctactagtaccatggactggatttggcgcatccttttccttgtcggcgctgctaccggcgcccattccgggccccaggtgcagctggttgaatctggcggaggatctgttcaggctggcggctctctgagactgtcttgtggcgcttccggcaacatcagcagcagaaactgcatgggctggttcagacaggcccctggcaaagagagagaaggcgttgccgccatcggacaagtgaccggcagatcctactacgtggacagcgtgaagggcagattcaccatcagcctggacaacgccaagaacaccctgtacctccagatgaacacactgaagcccgaggacaccgccatgtactactgtgctgctgcccctggctgtctgctgtctgcacttagaagcgccgactacagaaactggggccagggaacccaagtgacagtgtctagtggatccggcggcggaggatctggcggaggcggatctgggggcggaggctctttcgaagaagttcagctggttgaatctggcggcggactggttcaacctggcggatctctgagactgagctgtgccgcctctggctacgcctttagcaactactgggtcaactgggttcgacaggcccctggcaaaggactggaatgggtcgcccaaatctatcccggcgacggcgacaccaactacaacggcaagttcaagggcagattcaccatcagccgggacaacagcaagaacaccctgtacctccagatgaactccctgagagccgaggacaccgccgtgtactattgtgccagatccatcaccaccgtcgtgggctgcgctatggattattggggccagggaaccctggtcaccgtgtcctctacgcgtatccagaaccctgatcctgccgtgtaccagctgcgggatagcaagagcagcgacaagagcgtgtgtctgttcaccgacttcgacagccagaccaacgtgtcccagagcaaggactccgacgtgtacatcaccgataagtgcgtgctggacatgcggagcatggacttcaagagcaactccgccgtggcctggtccaacaagtccgatttcgcctgcgccaacgccttcaacaacagcattatccccgaggacacattcttcccaagccccgagagcagctgcgacgtgaagctggtggaaaagagcttcgagacagacaccaacctgaacttccagaacctgagcgtgatcggcttcagaatcctgctgctgaaagtggccggctttaacctgctgatgaccctgcggctgtggtccagctaa

SEQ ID NO: 36355 - DNA, 2727 bp, synthetic construct
  source 1..2727: mol_type = other DNA
atggccttaccagtgaccgccttgctcctgccgctggccttgctgctccacgccgccaggccggaagtgcagctggttgaatctggcggaggactggttcaggctggcggatctctgagactgtcttgtgccgccagcggcagaacctttagcatgggctggtttagacaggcccctggcaaagagagagagttcgtcgccgccatcacatactctggcggcagcccttactacgccgactctgtgaagggcagattcaccatcagccgggacaacgccaagaacaccgtgtacctccagatgaacagcctgaagcctgaggacaccgccgtgtactactgcgccgccaatccaacatacggcagcgactggaacgccgagaattggggccagggaacccaagtgacagtgtctagcggtaccggcggaggcggatctggcggcggaggtagcggtggcggaggatctgaattcgacatccagatgacacagagccctagcagcctgtctgccagcgtgggagacagagtgaccatcacatgcaaggccagcgaccacatcaacaactggctggcctggtatcagcagaagcctggcaaggcccctaagctgctgatctacggcgctaccacactggaaacaggcgtgcccagcagattttctggcagcggctctggcaccgacttcaccctgacaatatccagcctccagcctgaggacttcgccacctactactgtcagcagagctggaacaccccttggacattcggccagggcaccaaggtggaaatcaagagactcgagatccagaaccctgatcctgccgtgtaccagctgcgggatagcaagagcagcgacaagagcgtgtgtctgttcaccgacttcgacagccagaccaacgtgtcccagagcaaggactccgacgtgtacatcaccgataagtgcgtgctggacatgcggagcatggacttcaagagcaactccgccgtggcctggtccaacaagtccgatttcgcctgcgccaacgccttcaacaacagcattatccccgaggacacattcttcccaagcagcgacgtgccctgcgacgtgaagctggtggaaaagagcttcgagacagacaccaacctgaacttccagaacctgagcgtgatcggcttcagaatcctgctgctgaaagtggccggctttaacctgctgatgaccctgcggctgtggtccagccgcgccaagagaagcggatctggcgtgaagcagaccctgaatttcgacctgctgaagctggctggcgacgtggaatccaacccaggccctactagtaccatggactggatttggcgcatccttttccttgtcggcgctgctaccggcgcccattccgggccccaggtgcagctggttgaatctggcggaggatctgttcaggctggcggctctctgagactgtcttgtggcgcttccggcaacatcagcagcagaaactgcatgggctggttcagacaggcccctggcaaagagagagaaggcgttgccgccatcggacaagtgaccggcagatcctactacgtggacagcgtgaagggcagattcaccatcagcctggacaacgccaagaacaccctgtacctccagatgaacacactgaagcccgaggacaccgccatgtactactgtgctgctgcccctggctgtctgctgtctgcacttagaagcgccgactacagaaactggggccagggaacccaagtgacagtgtctagtggatccggcggcggaggatctggcggaggcggatctgggggcggaggctctttcgaagaagttcagctggttgaatctggcggcggactggttcaacctggcggatctctgagactgagctgtgccgcctctggctacgcctttagcaactactgggtcaactgggttcgacaggcccctggcaaaggactggaatgggtcgcccaaatctatcccggcgacggcgacaccaactacaacggcaagttcaagggcagattcaccatcagccgggacaacagcaagaacaccctgtacctccagatgaactccctgagagccgaggacaccgccgtgtactattgtgccagatccatcaccaccgtcgtgggctgcgctatggattattggggccagggaaccctggtcaccgtgtcctctacgcgtgaggacctgaagaacgtgttcccacctgaggtggccgtgttcgagcctagcaaggccgagatcgcccacacccagaaagccaccctcgtgtgcctggctaccggcttctaccccgaccatgtggaactgtcttggtgggtcaacggcaaagaggtgcacagcggcgtgtgtaccgacccccagccactgaaagaacagcccgccctgaacgacagccggtactgcctgagcagcagactgagagtgtccgccaccttctggcagaacccccggaaccacttcagatgccaggtgcagttctacggcctgagcgagaacgacgagtggacccaggacagagccaagcccgtgacccagatcgtgtctgccgaagcctggggcagagccgattgcggcatcaccagcgccagctaccaccagggcgtgctgagcgccaccatcctgtacgagatcctgctgggcaaggccaccctgtacgccgtgctggtgtctgccctggtgctgatggctatggtcaagcggaaggacagccggggataa

SEQ ID NO: 36356 - DNA, 2718 bp, synthetic construct
  source 1..2718: mol_type = other DNA
atggccttaccagtgaccgccttgctcctgccgctggccttgctgctccacgccgccaggccgcaggtgcagctggttgaatctggcggaggatctgttcaggctggcggctctctgagactgtcttgtggcgcttccggcaacatcagcagcagaaactgcatgggctggttcagacaggcccctggcaaagagagagaaggcgttgccgccatcggacaagtgaccggcagatcctactacgtggacagcgtgaagggcagattcaccatcagcctggacaacgccaagaacaccctgtacctccagatgaacacactgaagcccgaggacaccgccatgtactactgtgctgctgcccctggctgtctgctgtctgcacttagaagcgccgactacagaaactggggccagggaacccaagtgacagtgtctagtggtaccggcggaggcggatctggcggcggaggtagcggtggcggaggatctgaattcgacatccagatgacacagagccctagcagcctgtctgccagcgtgggagacagagtgaccatcacatgcaaggccagcgaccacatcaacaactggctggcctggtatcagcagaagcctggcaaggcccctaagctgctgatctacggcgctaccacactggaaacaggcgtgcccagcagattttctggcagcggctctggcaccgacttcaccctgacaatatccagcctccagcctgaggacttcgccacctactactgtcagcagagctggaacaccccttggacattcggccagggcaccaaggtggaaatcaagagactcgaggacctgaagaacgtgttcccacctgaggtggccgtgttcgagcctagcgaggccgagatcagccacacccagaaagccaccctcgtgtgcctggctaccggcttctaccccgaccatgtggaactgtcttggtgggtcaacggcaaagaggtgcacagcggcgtgtgtaccgacccccagccactgaaagaacagcccgccctgaacgacagccggtactgcctgagcagcagactgagagtgtccgccaccttctggcagaacccccggaaccacttcagatgccaggtgcagttctacggcctgagcgagaacgacgagtggacccaggacagagccaagcccgtgacccagatcgtgtctgccgaagcctggggcagagccgattgcggctttaccagcgagagctaccagcagggcgtgctgagcgccaccatcctgtacgagatcctgctgggcaaggccaccctgtacgccgtgctggtgtctgccctggtgctgatggctatggtcaagcggaaggacagccggggaagggccaagcgatctggatctggagcaacaaacttctcactactcaaacaagcaggtgacgtggaggagaatcccgggcctactagtgccaccatggactggatttggcgcatccttttccttgtcggcgctgctaccggcgcccattccgggcccgaagtgcaactggttgaatccggtggcggcctggtgcaagcaggcggatctctcagacttagctgtgccgcctccggcagaaccttcacaatgggatggtttaggcaggctccagggaaagagagagagttcgtcgccgccatctctctgtctcccacactggcctactacgccgactctgtgaaaggccggttcaccatctccagagataatgccaagaacaccgtggtgctgcaaatgaactctctgaaacccgaggatacagccctgtactattgtgccgctgaccggaagtccgtgatgagcatcagacccgattactggggacagggcacacaagtcacagtgtcctctggatccggcggcggaggatctggcggaggcggatctgggggcggaggctctttcgaagaagttcagctggttgaatctggcggcggactggttcaacctggcggatctctgagactgagctgtgccgcctctggctacgcctttagcaactactgggtcaactgggttcgacaggcccctggcaaaggactggaatgggtcgcccaaatctatcccggcgacggcgacaccaactacaacggcaagttcaagggcagattcaccatcagccgggacaacagcaagaacaccctgtacctccagatgaactccctgagagccgaggacaccgccgtgtactattgtgccagatccatcaccaccgtcgtgggctgcgctatggattattggggccagggaaccctggtcaccgtgtcctctacgcgtatccagaaccctgatcctgccgtgtaccagctgcgggatagcaagagcagcgacaagagcgtgtgtctgttcaccgacttcgacagccagaccaacgtgtcccagagcaaggactccgacgtgtacatcaccgataagtgcgtgctggacatgcggagcatggacttcaagagcaactccgccgtggcctggtccaacaagtccgatttcgcctgcgccaacgccttcaacaacagcattatccccgaggacacattcttcccaagccccgagagcagctgcgacgtgaagctggtggaaaagagcttcgagacagacaccaacctgaacttccagaacctgagcgtgatcggcttcagaatcctgctgctgaaagtggccggctttaacctgctgatgaccctgcggctgtggtccagctaa

SEQ ID NO: 36357 - DNA, 2307 bp, synthetic construct
  source 1..2307: mol_type = other DNA
atggccttaccagtgaccgccttgctcctgccgctggccttgctgctccacgccgccaggccgcaggtgcagctggttgaatctggcggaggatctgttcaggctggcggctctctgagactgtcttgtggcgcttccggcaacatcagcagcagaaactgcatgggctggttcagacaggcccctggcaaagagagagaaggcgttgccgccatcggacaagtgaccggcagatcctactacgtggacagcgtgaagggcagattcaccatcagcctggacaacgccaagaacaccctgtacctccagatgaacacactgaagcccgaggacaccgccatgtactactgtgctgctgcccctggctgtctgctgtctgcacttagaagcgccgactacagaaactggggccagggaacccaagtgacagtgtctagtggtaccggcggaggcggatctggcggcggaggtagcggtggcggaggatctgaattcgacatccagatgacacagagccctagcagcctgtctgccagcgtgggagacagagtgaccatcacatgcaaggccagcgaccacatcaacaactggctggcctggtatcagcagaagcctggcaaggcccctaagctgctgatctacggcgctaccacactggaaacaggcgtgcccagcagattttctggcagcggctctggcaccgacttcaccctgacaatatccagcctccagcctgaggacttcgccacctactactgtcagcagagctggaacaccccttggacattcggccagggcaccaaggtggaaatcaagagactcgaggacctgaagaacgtgttcccacctgaggtggccgtgttcgagcctagcgaggccgagatcagccacacccagaaagccaccctcgtgtgcctggctaccggcttctaccccgaccatgtggaactgtcttggtgggtcaacggcaaagaggtgcacagcggcgtgtgtaccgacccccagccactgaaagaacagcccgccctgaacgacagccggtactgcctgagcagcagactgagagtgtccgccaccttctggcagaacccccggaaccacttcagatgccaggtgcagttctacggcctgagcgagaacgacgagtggacccaggacagagccaagcccgtgacccagatcgtgtctgccgaagcctggggcagagccgattgcggctttaccagcgagagctaccagcagggcgtgctgagcgccaccatcctgtacgagatcctgctgggcaaggccaccctgtacgccgtgctggtgtctgccctggtgctgatggctatggtcaagcggaaggacagccggggaagggccaagcgatctggatctggagcaacaaacttctcactactcaaacaagcaggtgacgtggaggagaatcccgggcctactagtgccaccatggactggatttggcgcatccttttccttgtcggcgctgctaccggcgcccattccttcgaagaagttcagctggttgaatctggcggcggactggttcaacctggcggatctctgagactgagctgtgccgcctctggctacgcctttagcaactactgggtcaactgggttcgacaggcccctggcaaaggactggaatgggtcgcccaaatctatcccggcgacggcgacaccaactacaacggcaagttcaagggcagattcaccatcagccgggacaacagcaagaacaccctgtacctccagatgaactccctgagagccgaggacaccgccgtgtactattgtgccagatccatcaccaccgtcgtgggctgcgctatggattattggggccagggaaccctggtcaccgtgtcctctacgcgtatccagaaccctgatcctgccgtgtaccagctgcgggatagcaagagcagcgacaagagcgtgtgtctgttcaccgacttcgacagccagaccaacgtgtcccagagcaaggactccgacgtgtacatcaccgataagtgcgtgctggacatgcggagcatggacttcaagagcaactccgccgtggcctggtccaacaagtccgatttcgcctgcgccaacgccttcaacaacagcattatccccgaggacacattcttcccaagccccgagagcagctgcgacgtgaagctggtggaaaagagcttcgagacagacaccaacctgaacttccagaacctgagcgtgatcggcttcagaatcctgctgctgaaagtggccggctttaacctgctgatgaccctgcggctgtggtccagctaa

SEQ ID NO: 36358 - DNA, 2307 bp, synthetic construct
  source 1..2307: mol_type = other DNA
atggccttaccagtgaccgccttgctcctgccgctggccttgctgctccacgccgccaggccgcaagttcagctggtggaaagcggtggtggcgttgtgcaacctggtggaagtctgaggctgagctgtgccgcttctggcctgagctttagcacctacactgtggcctggttcaggcaggctcccggaaagggtcttgaaggcgtggccgccattccttacaccagccagcacatggtgtacacagacagcgtcagaggccggttcaccatcagcagagacaactccaagaatacgctctatctccagatgaactctctgcgcgccgaagatacagccgtgtattactgcgccaccgacagacggcctggcacctctatgctggctatcaacggctacaacagatggggacagggaaccaccgtgaccgtgtcatctggtaccggcggaggcggatctggcggcggaggtagcggtggcggaggatctgaattcgacatccagatgacacagagccctagcagcctgtctgccagcgtgggagacagagtgaccatcacatgcaaggccagcgaccacatcaacaactggctggcctggtatcagcagaagcctggcaaggcccctaagctgctgatctacggcgctaccacactggaaacaggcgtgcccagcagattttctggcagcggctctggcaccgacttcaccctgacaatatccagcctccagcctgaggacttcgccacctactactgtcagcagagctggaacaccccttggacattcggccagggcaccaaggtggaaatcaagagactcgaggacctgaagaacgtgttcccacctgaggtggccgtgttcgagcctagcgaggccgagatcagccacacccagaaagccaccctcgtgtgcctggctaccggcttctaccccgaccatgtggaactgtcttggtgggtcaacggcaaagaggtgcacagcggcgtgtgtaccgacccccagccactgaaagaacagcccgccctgaacgacagccggtactgcctgagcagcagactgagagtgtccgccaccttctggcagaacccccggaaccacttcagatgccaggtgcagttctacggcctgagcgagaacgacgagtggacccaggacagagccaagcccgtgacccagatcgtgtctgccgaagcctggggcagagccgattgcggctttaccagcgagagctaccagcagggcgtgctgagcgccaccatcctgtacgagatcctgctgggcaaggccaccctgtacgccgtgctggtgtctgccctggtgctgatggctatggtcaagcggaaggacagccggggaagggccaagcgatctggatctggagcaacaaacttctcactactcaaacaagcaggtgacgtggaggagaatcccgggcctactagtgccaccatggactggatttggcgcatccttttccttgtcggcgctgctaccggcgcccattccttcgaagaagttcagctggttgaatctggcggcggactggttcaacctggcggatctctgagactgagctgtgccgcctctggctacgcctttagcaactactgggtcaactgggttcgacaggcccctggcaaaggactggaatgggtcgcccaaatctatcccggcgacggcgacaccaactacaacggcaagttcaagggcagattcaccatcagccgggacaacagcaagaacaccctgtacctccagatgaactccctgagagccgaggacaccgccgtgtactattgtgccagatccatcaccaccgtcgtgggctgcgctatggattattggggccagggaaccctggtcaccgtgtcctctacgcgtatccagaaccctgatcctgccgtgtaccagctgcgggatagcaagagcagcgacaagagcgtgtgtctgttcaccgacttcgacagccagaccaacgtgtcccagagcaaggactccgacgtgtacatcaccgataagtgcgtgctggacatgcggagcatggacttcaagagcaactccgccgtggcctggtccaacaagtccgatttcgcctgcgccaacgccttcaacaacagcattatccccgaggacacattcttcccaagccccgagagcagctgcgacgtgaagctggtggaaaagagcttcgagacagacaccaacctgaacttccagaacctgagcgtgatcggcttcagaatcctgctgctgaaagtggccggctttaacctgctgatgaccctgcggctgtggtccagctaa

SEQ ID NO: 36359 - DNA, 2304 bp, synthetic construct
  source 1..2304: mol_type = other DNA
atggccttaccagtgaccgccttgctcctgccgctggccttgctgctccacgccgccaggccggacatccagatgacacagagccctagcagcctgtctgccagcgtgggagacagagtgaccatcacatgcaaggccagcgaccacatcaacaactggctggcctggtatcagcagaagcctggcaaggcccctaagctgctgatctacggcgctaccacactggaaacaggcgtgcccagcagattttctggcagcggctctggcaccgacttcaccctgacaatatccagcctccagcctgaggacttcgccacctactactgtcagcagagctggaacaccccttggacattcggccagggcaccaaggtggaaatcaagagactcgaggacctgaagaacgtgttcccacctgaggtggccgtgttcgagcctagcgaggccgagatcagccacacccagaaagccaccctcgtgtgcctggctaccggcttctaccccgaccatgtggaactgtcttggtgggtcaacggcaaagaggtgcacagcggcgtgtgtaccgacccccagccactgaaagaacagcccgccctgaacgacagccggtactgcctgagcagcagactgagagtgtccgccaccttctggcagaacccccggaaccacttcagatgccaggtgcagttctacggcctgagcgagaacgacgagtggacccaggacagagccaagcccgtgacccagatcgtgtctgccgaagcctggggcagagccgattgcggctttaccagcgagagctaccagcagggcgtgctgagcgccaccatcctgtacgagatcctgctgggcaaggccaccctgtacgccgtgctggtgtctgccctggtgctgatggctatggtcaagcggaaggacagccggggaagggccaagcgatctggatctggagcaacaaacttctcactactcaaacaagcaggtgacgtggaggagaatcccgggcctactagtaccatggactggatttggcgcatccttttccttgtcggcgctgctaccggcgcccattccgggccccaagttcagctggtggaaagcggtggtggcgttgtgcaacctggtggaagtctgaggctgagctgtgccgcttctggcctgagctttagcacctacactgtggcctggttcaggcaggctcccggaaagggtcttgaaggcgtggccgccattccttacaccagccagcacatggtgtacacagacagcgtcagaggccggttcaccatcagcagagacaactccaagaatacgctctatctccagatgaactctctgcgcgccgaagatacagccgtgtattactgcgccaccgacagacggcctggcacctctatgctggctatcaacggctacaacagatggggacagggaaccaccgtgaccgtgtcatctggatccggcggcggaggatctggcggaggcggatctgggggcggaggctctttcgaagaagttcagctggttgaatctggcggcggactggttcaacctggcggatctctgagactgagctgtgccgcctctggctacgcctttagcaactactgggtcaactgggttcgacaggcccctggcaaaggactggaatgggtcgcccaaatctatcccggcgacggcgacaccaactacaacggcaagttcaagggcagattcaccatcagccgggacaacagcaagaacaccctgtacctccagatgaactccctgagagccgaggacaccgccgtgtactattgtgccagatccatcaccaccgtcgtgggctgcgctatggattattggggccagggaaccctggtcaccgtgtcctctacgcgtatccagaaccctgatcctgccgtgtaccagctgcgggatagcaagagcagcgacaagagcgtgtgtctgttcaccgacttcgacagccagaccaacgtgtcccagagcaaggactccgacgtgtacatcaccgataagtgcgtgctggacatgcggagcatggacttcaagagcaactccgccgtggcctggtccaacaagtccgatttcgcctgcgccaacgccttcaacaacagcattatccccgaggacacattcttcccaagccccgagagcagctgcgacgtgaagctggtggaaaagagcttcgagacagacaccaacctgaacttccagaacctgagcgtgatcggcttcagaatcctgctgctgaaagtggccggctttaacctgctgatgaccctgcggctgtggtccagctaa

SEQ ID NO: 36360 - DNA, 2310 bp, synthetic construct
  source 1..2310: mol_type = other DNA
atggccttaccagtgaccgccttgctcctgccgctggccttgctgctccacgccgccaggccggacatccagatgacacagagccctagcagcctgtctgccagcgtgggagacagagtgaccatcacatgcaaggccagcgaccacatcaacaactggctggcctggtatcagcagaagcctggcaaggcccctaagctgctgatctacggcgctaccacactggaaacaggcgtgcccagcagattttctggcagcggctctggcaccgacttcaccctgacaatatccagcctccagcctgaggacttcgccacctactactgtcagcagagctggaacaccccttggacattcggccagggcaccaaggtggaaatcaagagactcgaggacctgaagaacgtgttcccacctgaggtggccgtgttcgagcctagcgaggccgagatcagccacacccagaaagccaccctcgtgtgcctggctaccggcttctaccccgaccatgtggaactgtcttggtgggtcaacggcaaagaggtgcacagcggcgtgtgtaccgacccccagccactgaaagaacagcccgccctgaacgacagccggtactgcctgagcagcagactgagagtgtccgccaccttctggcagaacccccggaaccacttcagatgccaggtgcagttctacggcctgagcgagaacgacgagtggacccaggacagagccaagcccgtgacccagatcgtgtctgccgaagcctggggcagagccgattgcggctttaccagcgagagctaccagcagggcgtgctgagcgccaccatcctgtacgagatcctgctgggcaaggccaccctgtacgccgtgctggtgtctgccctggtgctgatggctatggtcaagcggaaggacagccggggaagggccaagcgatctggatctggagcaacaaacttctcactactcaaacaagcaggtgacgtggaggagaatcccgggcctactagtaccatggactggatttggcgcatccttttccttgtcggcgctgctaccggcgcccattccgggcccgaggtgcagctggttgaatctggcggaggatctgttcaggctggcggctctctgagactgtcttgtgccgccagcggctacacctacagcatcaactgcatgggctggttcagacaggcccctggcaaagagagagaaggcgttgccgccatctctaccggcggaggcagaaccgattaccgggattctgtgaagggcagattcaccatcagccaggacaacgccaagaacaccgtgtacctccagatgaacagcctgaagcctgaggacaccgccatgtactactgtgccggcaagaccacctatcctggctacggatgtggcctgggcagaagcgcctacaattattggggccagggcacccaagtgaccgtgtcatctggatccggcggcggaggatctggcggaggcggatctgggggcggaggctctttcgaagaagttcagctggttgaatctggcggcggactggttcaacctggcggatctctgagactgagctgtgccgcctctggctacgcctttagcaactactgggtcaactgggttcgacaggcccctggcaaaggactggaatgggtcgcccaaatctatcccggcgacggcgacaccaactacaacggcaagttcaagggcagattcaccatcagccgggacaacagcaagaacaccctgtacctccagatgaactccctgagagccgaggacaccgccgtgtactattgtgccagatccatcaccaccgtcgtgggctgcgctatggattattggggccagggaaccctggtcaccgtgtcctctacgcgtatccagaaccctgatcctgccgtgtaccagctgcgggatagcaagagcagcgacaagagcgtgtgtctgttcaccgacttcgacagccagaccaacgtgtcccagagcaaggactccgacgtgtacatcaccgataagtgcgtgctggacatgcggagcatggacttcaagagcaactccgccgtggcctggtccaacaagtccgatttcgcctgcgccaacgccttcaacaacagcattatccccgaggacacattcttcccaagccccgagagcagctgcgacgtgaagctggtggaaaagagcttcgagacagacaccaacctgaacttccagaacctgagcgtgatcggcttcagaatcctgctgctgaaagtggccggctttaacctgctgatgaccctgcggctgtggtccagctaa

SEQ ID NO: 36361 - DNA, 1866 bp, synthetic construct
  source 1..1866: mol_type = other DNA
atggccttaccagtgaccgccttgctcctgccgctggccttgctgctccacgccgccaggccggacatccagatgacacagagccctagcagcctgtctgccagcgtgggagacagagtgaccatcacatgcaaggccagcgaccacatcaacaactggctggcctggtatcagcagaagcctggcaaggcccctaagctgctgatctacggcgctaccacactggaaacaggcgtgcccagcagattttctggcagcggctctggcaccgacttcaccctgacaatatccagcctccagcctgaggacttcgccacctactactgtcagcagagctggaacaccccttggacattcggccagggcaccaaggtggaaatcaagagactcgaggacctgaagcacgtgttcccacctgaggtggccgtgttcgagcctagcgacgccgagatctggcacacccagaaagccaccctcgtgtgcctggctaccggcttctaccccgaccatgtggaactgtcttggtgggtcaacggcaaagaggtgcacagcggcgtgtctaccgacccccagccactgaaagaacagcccgccctgaacgacagccggtactgcctgagcagcagactgagagtgtccgccaccttctggcagaacccccggaaccacttcagatgccaggtgcagttctacggcctgagcgagaacgacgagtggacccaggacagagccaagcccgtgacccagatcgtgtctgccgaagcctggggcagagccgattgcggctttaccagcgagagctaccagcagggcgtgctgagcgccaccatcctgtacgagatcctgctgggcaaggccaccctgtacgccgtgctggtgtctgccctggtgctgatggctatggtcaagcggaaggacagccggggaagggccaagcgatctggatctggagcaacaaacttctcactactcaaacaagcaggtgacgtggaggagaatcccgggcctactagtatggactggatttggcgcatccttttccttgtcggcgctgctaccggcgcgcattccttcgaagaagttcagctggttgaatctggcggcggactggttcaacctggcggatctctgagactgagctgtgccgcctctggctacgcctttagcaactactgggtcaactgggttcgacaggcccctggcaaaggactggaatgggtcgcccaaatctatcccggcgacggcgacaccaactacaacggcaagttcaagggcagattcaccatcagccgggacaacagcaagaacaccctgtacctccagatgaactccctgagagccgaggacaccgccgtgtactattgtgccagatccatcaccaccgtcgtgggctgcgctatggattattggggccagggaaccctggtcaccgtgtcctctacgcgtatccagaaccctgatcctgccgtgtaccagctgcgggatagcaagagcagcgacaagagcgtgtgtctgttcaccgacttcgacagccagaccaacgtgtcccagagcaaggactccgacgtgtacatcaccgataagaccgtgctggacatgcggagcatggacttcaagagcaactccgccgtggcctggtccagcaagtccgatttcgcctgcgccaacgccttcaacaacagcattatccccgaggacacattcttcccaagccccgagatggcctgcgacgtgaagctggtggaaaagagcttcgagacagacaccaacctgaacttccagaacctgctcgtgatctggctgagaatcctgctgctgaaagtggccggctttaacctgctgatgaccctgcggctgtggtccagc

SEQ ID NO: 36362 - DNA, 1866 bp, synthetic construct
  source 1..1866: mol_type = other DNA
atggccttaccagtgaccgccttgctcctgccgctggccttgctgctccacgccgccaggccggacatccagatgacacagagccctagcagcctgtctgccagcgtgggagacagagtgaccatcacatgcaaggccagcgaccacatcaacaactggctggcctggtatcagcagaagcctggcaaggcccctaagctgctgatctacggcgctaccacactggaaacaggcgtgcccagcagattttctggcagcggctctggcaccgacttcaccctgacaatatccagcctccagcctgaggacttcgccacctactactgtcagcagagctggaacaccccttggacattcggccagggcaccaaggtggaaatcaagagactcgaggacctgaagcacgtgttcccacctgaggtggccgtgttcgagcctagcgacgccgagatctggcacacccagaaagccaccctcgtgtgcctggctaccggcttctaccccgaccatgtggaactgtcttggtgggtcaacggcaaagaggtgcacagcggcgtgtctaccgacccccagccactgaaagaacagcccgccctgaacgacagccggtactgcctgagcagcagactgagagtgtccgccaccttctggcagaacccccggaaccacttcagatgccaggtgcagttctacggcctgagcgagaacgacgagtggacccaggacagagccaagcccgtgacccagatcgtgtctgccgaagcctggggcagagccgattgcggctttaccagcgagagctaccagcagggcgtgctgagcgccaccatcctgtacgagatcctgctgggcaaggccaccctgtacgccgtgctggtgtctgccctggtgctgatggctatggtcaagcggaaggacagccggggaagggccaagcgatctggatctggagcaacaaacttctcactactcaaacaagcaggtgacgtggaggagaatcccgggcctactagtatggactggatttggcgcatccttttccttgtcggcgctgctaccggcgcgcattccttcgaagaagttcagctggttgaatctggcggcggactggttcaacctggcggatctctgagactgagctgtgccgcctctggctacgcctttagcaactactgggtcaactgggttcgacaggcccctggcaaaggactggaatgggtcgcccaaatctatcccggcgacggcgacaccaactacaacggcaagttcaagggcagattcaccatcagccgggacaacagcaagaacaccctgtacctccagatgaactccctgagagccgaggacaccgccgtgtactattgtgccagatccatcaccaccgtcgtgggctgcgctatggattattggggccagggaaccctggtcaccgtgtcctctacgcgtatccagaaccctgatcctgccgtgtaccagctgcgggatagcaagagcagcgacaagagcgtgtgtctgttcaccgacttcgacagccagaccaacgtgtcccagagcaaggactccgacgtgtacatcaccgataagaccgtgctggacatgcggagcatggacttcaagagcaactccgccgtggcctggtccaccaagtccgatttcgcctgcgccaacgccttcaacaacagcattatccccgaggacacattcttcccaagccccgaggtggtgtgcgacgtgaagctggtggaaaagagcttcgagacagacaccaacctgaacttccagaacctggtggtgatcggcgccagaatcctgctgctgaaagtggccggctttaacctgctgatgaccctgcggctgtggtccagc

SEQ ID NO: 36363 - DNA, 1866 bp, synthetic construct
  source 1..1866: mol_type = other DNA
atggccttaccagtgaccgccttgctcctgccgctggccttgctgctccacgccgccaggccggacatccagatgacacagagccctagcagcctgtctgccagcgtgggagacagagtgaccatcacatgcaaggccagcgaccacatcaacaactggctggcctggtatcagcagaagcctggcaaggcccctaagctgctgatctacggcgctaccacactggaaacaggcgtgcccagcagattttctggcagcggctctggcaccgacttcaccctgacaatatccagcctccagcctgaggacttcgccacctactactgtcagcagagctggaacaccccttggacattcggccagggcaccaaggtggaaatcaagagactcgaggacctgaagaacgtgttcccacctgaggtggccgtgttcgagcctagcaaggccgagatcagcagaacccagaaagccaccctcgtgtgcctggctaccggcttctaccctcctcatgtggaactgtcttggtgggtcaacggcaaagaggtgcacgacggcgtgtgtaccgacccccagccactgaaagaacagcccgccctgaacgacagccggtactgcctgagcagcagactgagagtgtccgccaccttctggcagaacccccggaaccacttcagatgccaggtgcagttctacggcctgagcgagaacgacgagtggacccaggacagagccaagcccgtgacccagatcgtgtctgccgaagcctggggcagagccgattgcggctttaccagcgagagctaccagcagggcgtgctgagcgccaccatcctgtacgagatcctgctgggcaaggccaccctgtacgccgtgctggtgtctgccctggtgctgatggctatggtcaagcggaaggacagccggggaagggccaagcgatctggatctggagcaacaaacttctcactactcaaacaagcaggtgacgtggaggagaatcccgggcctactagtatggactggatttggcgcatccttttccttgtcggcgctgctaccggcgcgcattccttcgaagaagttcagctggttgaatctggcggcggactggttcaacctggcggatctctgagactgagctgtgccgcctctggctacgcctttagcaactactgggtcaactgggttcgacaggcccctggcaaaggactggaatgggtcgcccaaatctatcccggcgacggcgacaccaactacaacggcaagttcaagggcagattcaccatcagccgggacaacagcaagaacaccctgtacctccagatgaactccctgagagccgaggacaccgccgtgtactattgtgccagatccatcaccaccgtcgtgggctgcgctatggattattggggccagggaaccctggtcaccgtgtcctctacgcgtatccagaaccctgatcctgccgtgtaccagctgcgggatagcaagagcagcgacaagttcgtgtgtctgttcaccgacttcgacagccagatcaacgtgtcccagagcaaggactccgacgtgtacatcaccgataagtgcgtgctggacatgcggagcatggacttcaagagcaactccgccgtggcctggtccaacaagtccgatttcacctgcgccaacgccttcaacaacagcattatccccgaggacacattcttcccaagccccgagagcagctgcgacgtgaagctggtggaaaagagcttcgagacagacaccaacctgaacttccagaacctgagcgtgatcggcttcagaatcctgctgctgaaagtggccggctttaacctgctgatgaccctgcggctgtggtccagc

SEQ ID NO: 36364 - DNA, 2292 bp, synthetic construct
  source 1..2292: mol_type = other DNA
atggccttaccagtgaccgccttgctcctgccgctggccttgctgctccacgccgccaggccggacatccagatgacacagagccctagcagcctgtctgccagcgtgggagacagagtgaccatcacatgcaaggccagcgaccacatcaacaactggctggcctggtatcagcagaagcctggcaaggcccctaagctgctgatctacggcgctaccacactggaaacaggcgtgcccagcagattttctggcagcggctctggcaccgacttcaccctgacaatatccagcctccagcctgaggacttcgccacctactactgtcagcagagctggaacaccccttggacattcggccagggcaccaaggtggaaatcaagagactcgaggacctgaagaacgtgttcccacctgaggtggccgtgttcgagcctagcgaggccgagatcagccacacccagaaagccaccctcgtgtgcctggctaccggcttctaccccgaccatgtggaactgtcttggtgggtcaacggcaaagaggtgcacagcggcgtgtgtaccgacccccagccactgaaagaacagcccgccctgaacgacagccggtactgcctgagcagcagactgagagtgtccgccaccttctggcagaacccccggaaccacttcagatgccaggtgcagttctacggcctgagcgagaacgacgagtggacccaggacagagccaagcccgtgacccagatcgtgtctgccgaagcctggggcagagccgattgcggctttaccagcgagagctaccagcagggcgtgctgagcgccaccatcctgtacgagatcctgctgggcaaggccaccctgtacgccgtgctggtgtctgccctggtgctgatggctatggtcaagcggaaggacagccggggaagggccaagcgatctggatctggagcaacaaacttctcactactcaaacaagcaggtgacgtggaggagaatcccgggcctactagtaccatggactggatttggcgcatccttttccttgtcggcgctgctaccggcgcccattccgggccccaggtgcagctccaagaaagcggacccggactggttaagccctctcagaccctgtctctgacctgcacagttagcggagccagcattaccacaggcgagtattattggaattggtttcggcagccaccaggcaaggggcttgagtggatgggtgctattgctgcctctggcagcaccacctactctcccagctttgagagcagaacctccatcagccgggacacctccaaaaaccagttctctctgaagctgtcctccgtgaccgctgctgacaccgccgtctattattgtggccggtctttcggcgtggcagctgtgaccacaggacagaacagaggccagggaacacttgtgaccgtgtcctctggatccggcggcggaggatctggcggaggcggatctgggggcggaggctctttcgaagaagttcagctggttgaatctggcggcggactggttcaacctggcggatctctgagactgagctgtgccgcctctggctacgcctttagcaactactgggtcaactgggttcgacaggcccctggcaaaggactggaatgggtcgcccaaatctatcccggcgacggcgacaccaactacaacggcaagttcaagggcagattcaccatcagccgggacaacagcaagaacaccctgtacctccagatgaactccctgagagccgaggacaccgccgtgtactattgtgccagatccatcaccaccgtcgtgggctgcgctatggattattggggccagggaaccctggtcaccgtgtcctctacgcgtatccagaaccctgatcctgccgtgtaccagctgcgggatagcaagagcagcgacaagagcgtgtgtctgttcaccgacttcgacagccagaccaacgtgtcccagagcaaggactccgacgtgtacatcaccgataagtgcgtgctggacatgcggagcatggacttcaagagcaactccgccgtggcctggtccaacaagtccgatttcgcctgcgccaacgccttcaacaacagcattatccccgaggacacattcttcccaagccccgagagcagctgcgacgtgaagctggtggaaaagagcttcgagacagacaccaacctgaacttccagaacctgagcgtgatcggcttcagaatcctgctgctgaaagtggccggctttaacctgctgatgaccctgcggctgtggtccagc

SEQ ID NO: 36365 - DNA, 2715 bp, synthetic construct
  source 1..2715: mol_type = other DNA
atggccttaccagtgaccgccttgctcctgccgctggccttgctgctccacgccgccaggccgcaggttcagctgcaagagtctggccctggcctggtcaagcctagccaaacactgagcctgacctgtaccgtgtctggcggctctatcaccaccggcgagttctactggaactggttcagacagcctcctggcaaaggactggaatggatgggagccattgccgccagcggcagcacaacatacagccctagcttcgagagccggaccagcatcagcagagacaccagcaagaatcagttcagcctgaagctgagcagcgtgacagccgccgatacagccgtgtattactgcggcagatcctttggagtggccgccgtgacaaccggccagaatagaggacagggcaccctggtcacagtgtctagcggtaccggcggaggcggatctggcggcggaggtagcggtggcggaggatctgaattcgacatccagatgacacagagccctagcagcctgtctgccagcgtgggagacagagtgaccatcacatgcaaggccagcgaccacatcaacaactggctggcctggtatcagcagaagcctggcaaggcccctaagctgctgatctacggcgctaccacactggaaacaggcgtgcccagcagattttctggcagcggctctggcaccgacttcaccctgacaatatccagcctccagcctgaggacttcgccacctactactgtcagcagagctggaacaccccttggacattcggccagggcaccaaggtggaaatcaagagactcgagatccagaaccctgatcctgccgtgtaccagctgcgggatagcaagagcagcgacaagagcgtgtgtctgttcaccgacttcgacagccagaccaacgtgtcccagagcaaggactccgacgtgtacatcaccgataagtgcgtgctggacatgcggagcatggacttcaagagcaactccgccgtggcctggtccaacaagtccgatttcgcctgcgccaacgccttcaacaacagcattatccccgaggacacattcttcccaagcagcgacgtgccctgcgacgtgaagctggtggaaaagagcttcgagacagacaccaacctgaacttccagaacctgagcgtgatcggcttcagaatcctgctgctgaaagtggccggctttaacctgctgatgaccctgcggctgtggtccagccgcgccaagagaagcggatctggcgtgaagcagaccctgaatttcgacctgctgaagctggctggcgacgtggaatccaacccaggccctactagtaccatggactggatttggcgcatccttttccttgtcggcgctgctaccggcgcccattccgggcccgaagtgcaactggttgaatccggtggcggcctggtgcaacccggcggatctctcagacttagctgtgccgcctccggcagaaccttcacaatgggatggtacaggcaggctccagggaaagagagagagttcgtcgccgccatctctctgtctcccacactggcctactacgccgactctgtgaaaggccggttcaccatctccagagataatagcaagaacaccgtggtgctgcaaatgaactctctgagagccgaggatacagccctgtactattgtgccgctgaccggaagtccgtgatgagcatcagacccgattactggggacagggcacactggtcacagtgtctagtggatccggcggcggaggatctggcggaggcggatctgggggcggaggctctttcgaagaagttcagctggttgaatctggcggcggactggttcaacctggcggatctctgagactgagctgtgccgcctctggctacgcctttagcaactactgggtcaactgggttcgacaggcccctggcaaaggactggaatgggtcgcccaaatctatcccggcgacggcgacaccaactacaacggcaagttcaagggcagattcaccatcagccgggacaacagcaagaacaccctgtacctccagatgaactccctgagagccgaggacaccgccgtgtactattgtgccagatccatcaccaccgtcgtgggctgcgctatggattattggggccagggaaccctggtcaccgtgtcctctacgcgtgaggacctgaagaacgtgttcccacctgaggtggccgtgttcgagcctagcaaggccgagatcgcccacacccagaaagccaccctcgtgtgcctggctaccggcttctaccccgaccatgtggaactgtcttggtgggtcaacggcaaagaggtgcacagcggcgtgtgtaccgacccccagccactgaaagaacagcccgccctgaacgacagccggtactgcctgagcagcagactgagagtgtccgccaccttctggcagaacccccggaaccacttcagatgccaggtgcagttctacggcctgagcgagaacgacgagtggacccaggacagagccaagcccgtgacccagatcgtgtctgccgaagcctggggcagagccgattgcggcatcaccagcgccagctaccaccagggcgtgctgagcgccaccatcctgtacgagatcctgctgggcaaggccaccctgtacgccgtgctggtgtctgccctggtgctgatggctatggtcaagcggaaggacagccgggga

SEQ ID NO: 36366 - DNA, 2304 bp, synthetic construct
  source 1..2304: mol_type = other DNA
atggccttaccagtgaccgccttgctcctgccgctggccttgctgctccacgccgccaggccgcaggttcagctgcaagagtctggccctggcctggtcaagcctagccaaacactgagcctgacctgtaccgtgtctggcggctctatcaccaccggcgagttctactggaactggttcagacagcctcctggcaaaggactggaatggatgggagccattgccgccagcggcagcacaacatacagccctagcttcgagagccggaccagcatcagcagagacaccagcaagaatcagttcagcctgaagctgagcagcgtgacagccgccgatacagccgtgtattactgcggcagatcctttggagtggccgccgtgacaaccggccagaatagaggacagggcaccctggtcacagtgtctagcggtaccggcggaggcggatctggcggcggaggtagcggtggcggaggatctgaattcgacatccagatgacacagagccctagcagcctgtctgccagcgtgggagacagagtgaccatcacatgcaaggccagcgaccacatcaacaactggctggcctggtatcagcagaagcctggcaaggcccctaagctgctgatctacggcgctaccacactggaaacaggcgtgcccagcagattttctggcagcggctctggcaccgacttcaccctgacaatatccagcctccagcctgaggacttcgccacctactactgtcagcagagctggaacaccccttggacattcggccagggcaccaaggtggaaatcaagagactcgagatccagaaccctgatcctgccgtgtaccagctgcgggatagcaagagcagcgacaagagcgtgtgtctgttcaccgacttcgacagccagaccaacgtgtcccagagcaaggactccgacgtgtacatcaccgataagtgcgtgctggacatgcggagcatggacttcaagagcaactccgccgtggcctggtccaacaagtccgatttcgcctgcgccaacgccttcaacaacagcattatccccgaggacacattcttcccaagcagcgacgtgccctgcgacgtgaagctggtggaaaagagcttcgagacagacaccaacctgaacttccagaacctgagcgtgatcggcttcagaatcctgctgctgaaagtggccggctttaacctgctgatgaccctgcggctgtggtccagccgcgccaagagaagcggatctggcgtgaagcagaccctgaatttcgacctgctgaagctggctggcgacgtggaatccaacccaggccctactagtaccatggactggatttggcgcatccttttccttgtcggcgctgctaccggcgcccattccttcgaagaagttcagctggttgaatctggcggcggactggttcaacctggcggatctctgagactgagctgtgccgcctctggctacgcctttagcaactactgggtcaactgggttcgacaggcccctggcaaaggactggaatgggtcgcccaaatctatcccggcgacggcgacaccaactacaacggcaagttcaagggcagattcaccatcagccgggacaacagcaagaacaccctgtacctccagatgaactccctgagagccgaggacaccgccgtgtactattgtgccagatccatcaccaccgtcgtgggctgcgctatggattattggggccagggaaccctggtcaccgtgtcctctacgcgtgaggacctgaagaacgtgttcccacctgaggtggccgtgttcgagcctagcaaggccgagatcgcccacacccagaaagccaccctcgtgtgcctggctaccggcttctaccccgaccatgtggaactgtcttggtgggtcaacggcaaagaggtgcacagcggcgtgtgtaccgacccccagccactgaaagaacagcccgccctgaacgacagccggtactgcctgagcagcagactgagagtgtccgccaccttctggcagaacccccggaaccacttcagatgccaggtgcagttctacggcctgagcgagaacgacgagtggacccaggacagagccaagcccgtgacccagatcgtgtctgccgaagcctggggcagagccgattgcggcatcaccagcgccagctaccaccagggcgtgctgagcgccaccatcctgtacgagatcctgctgggcaaggccaccctgtacgccgtgctggtgtctgccctggtgctgatggctatggtcaagcggaaggacagccgggga

SEQ ID NO: 36367 - DNA, 2703 bp, synthetic construct
  source 1..2703: mol_type = other DNA
atggccttaccagtgaccgccttgctcctgccgctggccttgctgctccacgccgccaggccggaagtgcagctggttgaatctggcggaggactggttcaggctggcggatctctgagactgtcttgtgccgccagcggcagaacctttagcatgggctggtttagacaggcccctggcaaagagagagagttcgtcgccgccatcacatactctggcggcagcccttactacgccgactctgtgaagggcagattcaccatcagccgggacaacgccaagaacaccgtgtacctccagatgaacagcctgaagcctgaggacaccgccgtgtactactgcgccgccaatccaacatacggcagcgactggaacgccgagaattggggccagggaacccaagtgacagtgtctagcggtaccggcggaggcggatctggcggcggaggtagcggtggcggaggatctgaattcgacatccagatgacacagagccctagcagcctgtctgccagcgtgggagacagagtgaccatcacatgcaaggccagcgaccacatcaacaactggctggcctggtatcagcagaagcctggcaaggcccctaagctgctgatctacggcgctaccacactggaaacaggcgtgcccagcagattttctggcagcggctctggcaccgacttcaccctgacaatatccagcctccagcctgaggacttcgccacctactactgtcagcagagctggaacaccccttggacattcggccagggcaccaaggtggaaatcaagagactcgaggacctgaagaacgtgttcccacctgaggtggccgtgttcgagcctagcgaggccgagatcagccacacccagaaagccaccctcgtgtgcctggctaccggcttctaccccgaccatgtggaactgtcttggtgggtcaacggcaaagaggtgcacagcggcgtgtgtaccgacccccagccactgaaagaacagcccgccctgaacgacagccggtactgcctgagcagcagactgagagtgtccgccaccttctggcagaacccccggaaccacttcagatgccaggtgcagttctacggcctgagcgagaacgacgagtggacccaggacagagccaagcccgtgacccagatcgtgtctgccgaagcctggggcagagccgattgcggctttaccagcgagagctaccagcagggcgtgctgagcgccaccatcctgtacgagatcctgctgggcaaggccaccctgtacgccgtgctggtgtctgccctggtgctgatggctatggtcaagcggaaggacagccggggaagggccaagcgatctggatctggagcaacaaacttctcactactcaaacaagcaggtgacgtggaggagaatcccgggcctactagtaccatggactggatttggcgcatccttttccttgtcggcgctgctaccggcgcccattccgggccccaggtgcagctccaagaaagcggacccggactggttaagccctctcagaccctgtctctgacctgcacagttagcggagccagcattaccacaggcgagtattattggaattggtttcggcagccaccaggcaaggggcttgagtggatgggtgctattgctgcctctggcagcaccacctactctcccagctttgagagcagaacctccatcagccgggacacctccaaaaaccagttctctctgaagctgtcctccgtgaccgctgctgacaccgccgtctattattgtggccggtctttcggcgtggcagctgtgaccacaggacagaacagaggccagggaacacttgtgaccgtgtcctctggatccggcggcggaggatctggcggaggcggatctgggggcggaggctctttcgaagaagttcagctggttgaatctggcggcggactggttcaacctggcggatctctgagactgagctgtgccgcctctggctacgcctttagcaactactgggtcaactgggttcgacaggcccctggcaaaggactggaatgggtcgcccaaatctatcccggcgacggcgacaccaactacaacggcaagttcaagggcagattcaccatcagccgggacaacagcaagaacaccctgtacctccagatgaactccctgagagccgaggacaccgccgtgtactattgtgccagatccatcaccaccgtcgtgggctgcgctatggattattggggccagggaaccctggtcaccgtgtcctctacgcgtatccagaaccctgatcctgccgtgtaccagctgcgggatagcaagagcagcgacaagagcgtgtgtctgttcaccgacttcgacagccagaccaacgtgtcccagagcaaggactccgacgtgtacatcaccgataagtgcgtgctggacatgcggagcatggacttcaagagcaactccgccgtggcctggtccaacaagtccgatttcgcctgcgccaacgccttcaacaacagcattatccccgaggacacattcttcccaagccccgagagcagctgcgacgtgaagctggtggaaaagagcttcgagacagacaccaacctgaacttccagaacctgagcgtgatcggcttcagaatcctgctgctgaaagtggccggctttaacctgctgatgaccctgcggctgtggtccagc

SEQ ID NO: 36368 - DNA, 2724 bp, synthetic construct
  source 1..2724: mol_type = other DNA
atggccttaccagtgaccgccttgctcctgccgctggccttgctgctccacgccgccaggccggaagtgcagctggttgaatctggcggaggactggttcaggctggcggatctctgagactgtcttgtgccgccagcggcagaacctttagcatgggctggtttagacaggcccctggcaaagagagagagttcgtcgccgccatcacatactctggcggcagcccttactacgccgactctgtgaagggcagattcaccatcagccgggacaacgccaagaacaccgtgtacctccagatgaacagcctgaagcctgaggacaccgccgtgtactactgcgccgccaatccaacatacggcagcgactggaacgccgagaattggggccagggaacccaagtgacagtgtctagcggtaccggcggaggcggatctggcggcggaggtagcggtggcggaggatctgaattcgacatccagatgacacagagccctagcagcctgtctgccagcgtgggagacagagtgaccatcacatgcaaggccagcgaccacatcaacaactggctggcctggtatcagcagaagcctggcaaggcccctaagctgctgatctacggcgctaccacactggaaacaggcgtgcccagcagattttctggcagcggctctggcaccgacttcaccctgacaatatccagcctccagcctgaggacttcgccacctactactgtcagcagagctggaacaccccttggacattcggccagggcaccaaggtggaaatcaagagactcgagatccagaaccctgatcctgccgtgtaccagctgcgggatagcaagagcagcgacaagagcgtgtgtctgttcaccgacttcgacagccagaccaacgtgtcccagagcaaggactccgacgtgtacatcaccgataagtgcgtgctggacatgcggagcatggacttcaagagcaactccgccgtggcctggtccaacaagtccgatttcgcctgcgccaacgccttcaacaacagcattatccccgaggacacattcttcccaagcagcgacgtgccctgcgacgtgaagctggtggaaaagagcttcgagacagacaccaacctgaacttccagaacctgagcgtgatcggcttcagaatcctgctgctgaaagtggccggctttaacctgctgatgaccctgcggctgtggtccagccgcgccaagagaagcggatctggcgtgaagcagaccctgaatttcgacctgctgaagctggctggcgacgtggaatccaacccaggccctactagtaccatggactggatttggcgcatccttttccttgtcggcgctgctaccggcgcccattccgggccccaggtgcagctggttgaatctggcggaggactggttcagcctggcggatctctgagactgtcttgtgccgccagcggcaacatcaacagcagaaactgcatgggctggttcagacaggcccctggcaagggaagagaaggcgtggcagctatcggccaagtgaccggcagaacctactacgtggacagcgtgaagggcagattcaccatcagcctggacaacagcaagaacaccctgtacctccagatgaacagcctgagagccgaggacaccgccgtgtactattgtgctgctgcccctggctgtctgctgtctgcacttagaagcgccgactacagaaactggggccagggcacactggtcaccgtttcttctggatccggcggcggaggatctggcggaggcggatctgggggcggaggctctttcgaagaagttcagctggttgaatctggcggcggactggttcaacctggcggatctctgagactgagctgtgccgcctctggctacgcctttagcaactactgggtcaactgggttcgacaggcccctggcaaaggactggaatgggtcgcccaaatctatcccggcgacggcgacaccaactacaacggcaagttcaagggcagattcaccatcagccgggacaacagcaagaacaccctgtacctccagatgaactccctgagagccgaggacaccgccgtgtactattgtgccagatccatcaccaccgtcgtgggctgcgctatggattattggggccagggaaccctggtcaccgtgtcctctacgcgtgaggacctgaagaacgtgttcccacctgaggtggccgtgttcgagcctagcaaggccgagatcgcccacacccagaaagccaccctcgtgtgcctggctaccggcttctaccccgaccatgtggaactgtcttggtgggtcaacggcaaagaggtgcacagcggcgtgtgtaccgacccccagccactgaaagaacagcccgccctgaacgacagccggtactgcctgagcagcagactgagagtgtccgccaccttctggcagaacccccggaaccacttcagatgccaggtgcagttctacggcctgagcgagaacgacgagtggacccaggacagagccaagcccgtgacccagatcgtgtctgccgaagcctggggcagagccgattgcggcatcaccagcgccagctaccaccagggcgtgctgagcgccaccatcctgtacgagatcctgctgggcaaggccaccctgtacgccgtgctggtgtctgccctggtgctgatggctatggtcaagcggaaggacagccgggga

SEQ ID NO: 36369 - DNA, 2712 bp, synthetic construct
  source 1..2712: mol_type = other DNA
atggccttaccagtgaccgccttgctcctgccgctggccttgctgctccacgccgccaggccggaagtgcagctggttgaatctggcggaggactggttcaggctggcggatctctgagactgtcttgtgccgccagcggcagaacctttagcatgggctggtttagacaggcccctggcaaagagagagagttcgtcgccgccatcacatactctggcggcagcccttactacgccgactctgtgaagggcagattcaccatcagccgggacaacgccaagaacaccgtgtacctccagatgaacagcctgaagcctgaggacaccgccgtgtactactgcgccgccaatccaacatacggcagcgactggaacgccgagaattggggccagggaacccaagtgacagtgtctagcggtaccggcggaggcggatctggcggcggaggtagcggtggcggaggatctgaattcgacatccagatgacacagagccctagcagcctgtctgccagcgtgggagacagagtgaccatcacatgcaaggccagcgaccacatcaacaactggctggcctggtatcagcagaagcctggcaaggcccctaagctgctgatctacggcgctaccacactggaaacaggcgtgcccagcagattttctggcagcggctctggcaccgacttcaccctgacaatatccagcctccagcctgaggacttcgccacctactactgtcagcagagctggaacaccccttggacattcggccagggcaccaaggtggaaatcaagagactcgaggacctgaagaacgtgttcccacctgaggtggccgtgttcgagcctagcgaggccgagatcagccacacccagaaagccaccctcgtgtgcctggctaccggcttctaccccgaccatgtggaactgtcttggtgggtcaacggcaaagaggtgcacagcggcgtgtgtaccgacccccagccactgaaagaacagcccgccctgaacgacagccggtactgcctgagcagcagactgagagtgtccgccaccttctggcagaacccccggaaccacttcagatgccaggtgcagttctacggcctgagcgagaacgacgagtggacccaggacagagccaagcccgtgacccagatcgtgtctgccgaagcctggggcagagccgattgcggctttaccagcgagagctaccagcagggcgtgctgagcgccaccatcctgtacgagatcctgctgggcaaggccaccctgtacgccgtgctggtgtctgccctggtgctgatggctatggtcaagcggaaggacagccggggaagggccaagcgatctggatctggagcaacaaacttctcactactcaaacaagcaggtgacgtggaggagaatcccgggcctactagtaccatggactggatttggcgcatccttttccttgtcggcgctgctaccggcgcccattccgggccccaggtgcagctggttgaatctggcggaggactggttcagcctggcggatctctgagactgtcttgtgccgccagcggcaacatcaacagcagaaactgcatgggctggttcagacaggcccctggcaagggaagagaaggcgtggcagctatcggccaagtgaccggcagaacctactacgtggacagcgtgaagggcagattcaccatcagcctggacaacagcaagaacaccctgtacctccagatgaacagcctgagagccgaggacaccgccgtgtactattgtgctgctgcccctggctgtctgctgtctgcacttagaagcgccgactacagaaactggggccagggcacactggtcaccgtttcttctggatccggcggcggaggatctggcggaggcggatctgggggcggaggctctttcgaagaagttcagctggttgaatctggcggcggactggttcaacctggcggatctctgagactgagctgtgccgcctctggctacgcctttagcaactactgggtcaactgggttcgacaggcccctggcaaaggactggaatgggtcgcccaaatctatcccggcgacggcgacaccaactacaacggcaagttcaagggcagattcaccatcagccgggacaacagcaagaacaccctgtacctccagatgaactccctgagagccgaggacaccgccgtgtactattgtgccagatccatcaccaccgtcgtgggctgcgctatggattattggggccagggaaccctggtcaccgtgtcctctacgcgtatccagaaccctgatcctgccgtgtaccagctgcgggatagcaagagcagcgacaagagcgtgtgtctgttcaccgacttcgacagccagaccaacgtgtcccagagcaaggactccgacgtgtacatcaccgataagtgcgtgctggacatgcggagcatggacttcaagagcaactccgccgtggcctggtccaacaagtccgatttcgcctgcgccaacgccttcaacaacagcattatccccgaggacacattcttcccaagccccgagagcagctgcgacgtgaagctggtggaaaagagcttcgagacagacaccaacctgaacttccagaacctgagcgtgatcggcttcagaatcctgctgctgaaagtggccggctttaacctgctgatgaccctgcggctgtggtccagc

SEQ ID NO: 36370 - DNA, 2712 bp, synthetic construct
  source 1..2712: mol_type = other DNA
atggccttaccagtgaccgccttgctcctgccgctggccttgctgctccacgccgccaggccggaagtgcaactggttgaatccggtggcggcctggtgcaagcaggcggatctctcagacttagctgtgccgcctccggcagaaccttcacaatgggatggtttaggcaggctccagggaaagagagagagttcgtcgccgccatctctctgtctcccacactggcctactacgccgactctgtgaaaggccggttcaccatctccagagataatgccaagaacaccgtggtgctgcaaatgaactctctgaaacccgaggatacagccctgtactattgtgccgctgaccggaagtccgtgatgagcatcagacccgattactggggacagggcacacaagtcacagtgtcctctggtaccggcggaggcggatctggcggcggaggtagcggtggcggaggatctgaattcgacatccagatgacacagagccctagcagcctgtctgccagcgtgggagacagagtgaccatcacatgcaaggccagcgaccacatcaacaactggctggcctggtatcagcagaagcctggcaaggcccctaagctgctgatctacggcgctaccacactggaaacaggcgtgcccagcagattttctggcagcggctctggcaccgacttcaccctgacaatatccagcctccagcctgaggacttcgccacctactactgtcagcagagctggaacaccccttggacattcggccagggcaccaaggtggaaatcaagagactcgaggacctgaagaacgtgttcccacctgaggtggccgtgttcgagcctagcgaggccgagatcagccacacccagaaagccaccctcgtgtgcctggctaccggcttctaccccgaccatgtggaactgtcttggtgggtcaacggcaaagaggtgcacagcggcgtgtgtaccgacccccagccactgaaagaacagcccgccctgaacgacagccggtactgcctgagcagcagactgagagtgtccgccaccttctggcagaacccccggaaccacttcagatgccaggtgcagttctacggcctgagcgagaacgacgagtggacccaggacagagccaagcccgtgacccagatcgtgtctgccgaagcctggggcagagccgattgcggctttaccagcgagagctaccagcagggcgtgctgagcgccaccatcctgtacgagatcctgctgggcaaggccaccctgtacgccgtgctggtgtctgccctggtgctgatggctatggtcaagcggaaggacagccggggaagggccaagcgatctggatctggagcaacaaacttctcactactcaaacaagcaggtgacgtggaggagaatcccgggcctactagtaccatggactggatttggcgcatccttttccttgtcggcgctgctaccggcgcccattccgggccccaggtgcagctggttgaatctggcggaggactggttcagcctggcggatctctgagactgtcttgtgccgccagcggcaacatcaacagcagaaactgcatgggctggttcagacaggcccctggcaagggaagagaaggcgtggcagctatcggccaagtgaccggcagaacctactacgtggacagcgtgaagggcagattcaccatcagcctggacaacagcaagaacaccctgtacctccagatgaacagcctgagagccgaggacaccgccgtgtactattgtgctgctgcccctggctgtctgctgtctgcacttagaagcgccgactacagaaactggggccagggcacactggtcaccgtttcttctggatccggcggcggaggatctggcggaggcggatctgggggcggaggctctttcgaagaagttcagctggttgaatctggcggcggactggttcaacctggcggatctctgagactgagctgtgccgcctctggctacgcctttagcaactactgggtcaactgggttcgacaggcccctggcaaaggactggaatgggtcgcccaaatctatcccggcgacggcgacaccaactacaacggcaagttcaagggcagattcaccatcagccgggacaacagcaagaacaccctgtacctccagatgaactccctgagagccgaggacaccgccgtgtactattgtgccagatccatcaccaccgtcgtgggctgcgctatggattattggggccagggaaccctggtcaccgtgtcctctacgcgtatccagaaccctgatcctgccgtgtaccagctgcgggatagcaagagcagcgacaagagcgtgtgtctgttcaccgacttcgacagccagaccaacgtgtcccagagcaaggactccgacgtgtacatcaccgataagtgcgtgctggacatgcggagcatggacttcaagagcaactccgccgtggcctggtccaacaagtccgatttcgcctgcgccaacgccttcaacaacagcattatccccgaggacacattcttcccaagccccgagagcagctgcgacgtgaagctggtggaaaagagcttcgagacagacaccaacctgaacttccagaacctgagcgtgatcggcttcagaatcctgctgctgaaagtggccggctttaacctgctgatgaccctgcggctgtggtccagc

SEQ ID NO: 36371 - DNA, 2724 bp, synthetic construct
  source 1..2724: mol_type = other DNA
atggccttaccagtgaccgccttgctcctgccgctggccttgctgctccacgccgccaggccgcaggttcagctgcaagagtctggccctggcctggtcaagcctagccaaacactgagcctgacctgtaccgtgtctggcggctctatcaccaccggcgagttctactggaactggttcagacagcctcctggcaaaggactggaatggatgggagccattgccgccagcggcagcacaacatacagccctagcttcgagagccggaccagcatcagcagagacaccagcaagaatcagttcagcctgaagctgagcagcgtgacagccgccgatacagccgtgtattactgcggcagatcctttggagtggccgccgtgacaaccggccagaatagaggacagggcaccctggtcacagtgtctagcggtaccggcggaggcggatctggcggcggaggtagcggtggcggaggatctgaattcgacatccagatgacacagagccctagcagcctgtctgccagcgtgggagacagagtgaccatcacatgcaaggccagcgaccacatcaacaactggctggcctggtatcagcagaagcctggcaaggcccctaagctgctgatctacggcgctaccacactggaaacaggcgtgcccagcagattttctggcagcggctctggcaccgacttcaccctgacaatatccagcctccagcctgaggacttcgccacctactactgtcagcagagctggaacaccccttggacattcggccagggcaccaaggtggaaatcaagagactcgaggacctgaagaacgtgttcccacctgaggtggccgtgttcgagcctagcgaggccgagatcagccacacccagaaagccaccctcgtgtgcctggctaccggcttctaccccgaccatgtggaactgtcttggtgggtcaacggcaaagaggtgcacagcggcgtgtgtaccgacccccagccactgaaagaacagcccgccctgaacgacagccggtactgcctgagcagcagactgagagtgtccgccaccttctggcagaacccccggaaccacttcagatgccaggtgcagttctacggcctgagcgagaacgacgagtggacccaggacagagccaagcccgtgacccagatcgtgtctgccgaagcctggggcagagccgattgcggctttaccagcgagagctaccagcagggcgtgctgagcgccaccatcctgtacgagatcctgctgggcaaggccaccctgtacgccgtgctggtgtctgccctggtgctgatggctatggtcaagcggaaggacagccggggaagggccaagcgatctggatctggagcaacaaacttctcactactcaaacaagcaggtgacgtggaggagaatcccgggcctactagtaccatggactggatttggcgcatccttttccttgtcggcgctgctaccggcgcccattccgggccccaggtgcagctggttgaatctggcggaggactggttcagcctggcggatctctgagactgtcttgtgccgccagcggcaacatcaacagcagaaactgcatgggctggttcagacaggcccctggcaagggaagagaaggcgtggcagctatcggccaagtgaccggcagaacctactacgtggacagcgtgaagggcagattcaccatcagcctggacaacagcaagaacaccctgtacctccagatgaacagcctgagagccgaggacaccgccgtgtactattgtgctgctgcccctggctgtctgctgtctgcacttagaagcgccgactacagaaactggggccagggcacactggtcaccgtttcttctggatccggcggcggaggatctggcggaggcggatctgggggcggaggctctttcgaagaagttcagctggttgaatctggcggcggactggttcaacctggcggatctctgagactgagctgtgccgcctctggctacgcctttagcaactactgggtcaactgggttcgacaggcccctggcaaaggactggaatgggtcgcccaaatctatcccggcgacggcgacaccaactacaacggcaagttcaagggcagattcaccatcagccgggacaacagcaagaacaccctgtacctccagatgaactccctgagagccgaggacaccgccgtgtactattgtgccagatccatcaccaccgtcgtgggctgcgctatggattattggggccagggaaccctggtcaccgtgtcctctacgcgtatccagaaccctgatcctgccgtgtaccagctgcgggatagcaagagcagcgacaagagcgtgtgtctgttcaccgacttcgacagccagaccaacgtgtcccagagcaaggactccgacgtgtacatcaccgataagtgcgtgctggacatgcggagcatggacttcaagagcaactccgccgtggcctggtccaacaagtccgatttcgcctgcgccaacgccttcaacaacagcattatccccgaggacacattcttcccaagccccgagagcagctgcgacgtgaagctggtggaaaagagcttcgagacagacaccaacctgaacttccagaacctgagcgtgatcggcttcagaatcctgctgctgaaagtggccggctttaacctgctgatgaccctgcggctgtggtccagc

SEQ ID NO: 36372 - DNA, 1452 bp, synthetic construct
  source 1..1452: mol_type = other DNA
atggccttaccagtgaccgccttgctcctgccgctggccttgctgctccacgccgccaggccggacatccagatgacacagagccctagcagcctgtctgccagcgtgggagacagagtgaccatcacatgcaagagcagccagagcctgctggactccgatggcaagacctacctgaactggtatcagcagaagcccggcaaggcccctaagctgctgatctacctggtgtccaagctggatagcggcgtgcccagcagattttctggcagcggcagcggaaccgacttcaccctgacaatatccagcctccagcctgaggacttcgccacctactactgcttccaaggcacccactttccattcaccttcggccagggcaccaaggtggaaatcaaaagaggcggaggcggaagtggaggcggaggatctggcggcggaggctctgaagtgcagctggttgaatcaggcggaggactggttcagcctggcggatctctgagactgtcttgtgccgccagcggctacaccttcaccagctactggatgaactgggtccgacaggcccctggcaaaggactggaatgggtcggaatgatcgaccccagcgacagcgagacacactacaaccacatcttcaaggaccgcttcaccatcagcgccgacaccagcaagaataccgcctacctccagatgaactccctgagagccgaggacaccgccgtgtactactgcgccagaaacctgtatctgttcggccagggaaccctggtcacagtgtcatctacgcgtaaaattgaagttatgtatcctcctccttacctagacaatgagaagagcaatggaaccattatccatgtgaaagggaaacacctttgtccaagtcccctatttcccggaccttctaagcccttttgggtgctggtggtggttgggggagtcctggcttgctatagcttgctagtaacagtggcctttattattttctgggtgaggagtaagaggagcaggctcctgcacagtgactacatgaacatgactccacgccgccccggacccacccgcaagcattaccagccctatgccccaccacgcgacttcgcagcctatcgctccagagtgaagttcagcaggagcgcagacgcccccgcgtaccagcagggccagaaccagctctataacgagctcaatctaggacgaagagaggagtacgatgttttggacaagagacgtggccgggaccctgagatggggggaaagccgagaaggaagaaccctcaggaaggcctgtacaatgaactgcagaaagataagatggcggaggcctacagtgagattgggatgaaaggcgagcgccggaggggcaaggggcacgatggcctttaccagggtctcagtacagccaccaaggacacctacgacgcccttcacatgcaggccctgccccctcgc

SEQ ID NO: 36373 - DNA, 1470 bp, synthetic construct
  source 1..1470: mol_type = other DNA
atggccttaccagtgaccgccttgctcctgccgctggccttgctgctccacgccgccaggccggacatccagatgacacagagccctagcagcctgtctgccagcgtgggagacagagtgaccatcacatgcaagagcagccagagcctgctggactccgatggcaagacctacctgaactggtatcagcagaagcccggcaaggcccctaagctgctgatctacctggtgtccaagctggatagcggcgtgcccagcagattttctggcagcggcagcggaaccgacttcaccctgacaatatccagcctccagcctgaggacttcgccacctactactgcttccaaggcacccactttccattcaccttcggccagggcaccaaggtggaaatcaaaagaggcggaggcggaagtggaggcggaggatctggcggcggaggctctgaagtgcagctggttgaatcaggcggaggactggttcagcctggcggatctctgagactgtcttgtgccgccagcggctacaccttcaccagctactggatgaactgggtccgacaggcccctggcaaaggactggaatgggtcggaatgatcgaccccagcgacagcgagacacactacaaccacatcttcaaggaccgcttcaccatcagcgccgacaccagcaagaataccgcctacctccagatgaactccctgagagccgaggacaccgccgtgtactactgcgccagaaacctgtatctgttcggccagggaaccctggtcacagtgtcatctacgcgtgcgaagcccaccacgacgccagcgccgcgaccaccaacaccggcgcccaccatcgcgtcgcagcccctgtccctgcgcccagaggcgtgccggccagcggcggggggcgcagtgcacacgagggggctggacttcgcctgtgacatctacatctgggcgcccttggccgggacttgtggggtccttctcctgtcactggttatcaccctttactgcaaacggggcagaaagaaactcctgtatatattcaaacaaccatttatgagaccagtacaaactactcaagaggaagatggctgtagctgccgatttccagaagaagaagaaggaggatgtgaactgagagtgaagttcagcaggagcgcagacgcccccgcgtaccagcagggccagaaccagctctataacgagctgaatctaggacgaagagaggagtacgatgttttggacaagagacgtggccgggaccctgagatggggggaaagccgagaaggaagaaccctcaggaaggcctgtacaatgaactgcagaaagataagatggcggaggcctacagtgagattgggatgaaaggcgagcgccggaggggcaaggggcacgatggcctttaccagggtctcagtacagccaccaaggacacctacgacgcccttcacatgcaggccctgccccctcgc

SEQ ID NO: 36374 - DNA, 1470 bp, synthetic construct
  source 1..1470: mol_type = other DNA
atggccttaccagtgaccgccttgctcctgccgctggccttgctgctccacgccgccaggccggaagtgcagctggttgaatcaggcggaggactggttcagcctggcggatctctgagactgtcttgtgccgccagcggctacaccttcaccagctactggatgaactgggtccgacaggcccctggcaaaggactggaatgggtcggaatgatcgaccccagcgacagcgagacacactacaaccacatcttcaaggaccgcttcaccatcagcgccgacaccagcaagaataccgcctacctccagatgaactccctgagagccgaggacaccgccgtgtactactgcgccagaaacctgtatctgttcggccagggaaccctggtcacagtgtcatctggcggaggcggaagtggaggcggaggatctggcggcggaggctctgacatccagatgacacagagccctagcagcctgtctgccagcgtgggagacagagtgaccatcacatgcaagagcagccagagcctgctggactccgatggcaagacctacctgaactggtatcagcagaagcccggcaaggcccctaagctgctgatctacctggtgtccaagctggatagcggcgtgcccagcagattttctggcagcggcagcggaaccgacttcaccctgacaatatccagcctccagcctgaggacttcgccacctactactgcttccaaggcacccactttccattcaccttcggccagggcaccaaggtggaaatcaaaagaacgcgtgcgaagcccaccacgacgccagcgccgcgaccaccaacaccggcgcccaccatcgcgtcgcagcccctgtccctgcgcccagaggcgtgccggccagcggcggggggcgcagtgcacacgagggggctggacttcgcctgtgacatctacatctgggcgcccttggccgggacttgtggggtccttctcctgtcactggttatcaccctttactgcaaacggggcagaaagaaactcctgtatatattcaaacaaccatttatgagaccagtacaaactactcaagaggaagatggctgtagctgccgatttccagaagaagaagaaggaggatgtgaactgagagtgaagttcagcaggagcgcagacgcccccgcgtaccagcagggccagaaccagctctataacgagctgaatctaggacgaagagaggagtacgatgttttggacaagagacgtggccgggaccctgagatggggggaaagccgagaaggaagaaccctcaggaaggcctgtacaatgaactgcagaaagataagatggcggaggcctacagtgagattgggatgaaaggcgagcgccggaggggcaaggggcacgatggcctttaccagggtctcagtacagccaccaaggacacctacgacgcccttcacatgcaggccctgccccctcgc

SEQ ID NO: 36375 - DNA, 1869 bp, synthetic construct
  source 1..1869: mol_type = other DNA
atggccttaccagtgaccgccttgctcctgccgctggccttgctgctccacgccgccaggccggacatccagatgacacagagccctagcagcctgtctgccagcgtgggagacagagtgaccatcacatgcaagagcagccagagcctgctggactccgatggcaagacctacctgaactggtatcagcagaagcccggcaaggcccctaagctgctgatctacctggtgtccaagctggatagcggcgtgcccagcagattttctggcagcggcagcggaaccgacttcaccctgacaatatccagcctccagcctgaggacttcgccacctactactgcttccaaggcacccactttccattcaccttcggccagggcaccaaggtggaaatcaaaagactcgagatccagaaccctgatcctgccgtgtaccagctgcgggatagcaagagcagcgacaagagcgtgtgtctgttcaccgacttcgacagccagaccaacgtgtcccagagcaaggactccgacgtgtacatcaccgataagtgcgtgctggacatgcggagcatggacttcaagagcaactccgccgtggcctggtccaacaagtccgatttcgcctgcgccaacgccttcaacaacagcattatccccgaggacacattcttcccaagcagcgacgtgccctgcgacgtgaagctggtggaaaagagcttcgagacagacaccaacctgaacttccagaacctgagcgtgatcggcttcagaatcctgctgctgaaagtggccggctttaacctgctgatgaccctgcggctgtggtccagccgcgccaagagaagcggatctggcgtgaagcagaccctgaatttcgacctgctgaagctggctggcgacgtggaatccaacccaggccctactagtatggactggatttggcgcatccttttccttgtcggcgctgctaccggcgcgcattccttcgaagaagtgcagctggttgaatcaggcggaggactggttcagcctggcggatctctgagactgtcttgtgccgccagcggctacaccttcaccagctactggatgaactgggtccgacaggcccctggcaaaggactggaatgggtcggaatgatcgaccccagcgacagcgagacacactacaaccacatcttcaaggaccgcttcaccatcagcgccgacaccagcaagaataccgcctacctccagatgaactccctgagagccgaggacaccgccgtgtactactgcgccagaaacctgtatctgttcggccagggaaccctggtcacagtgtcatctacgcgtgaggacctgaagaacgtgttcccacctgaggtggccgtgttcgagcctagcaaggccgagatcgcccacacccagaaagccaccctcgtgtgcctggctaccggcttctaccccgaccatgtggaactgtcttggtgggtcaacggcaaagaggtgcacagcggcgtgtgtaccgacccccagccactgaaagaacagcccgccctgaacgacagccggtactgcctgagcagcagactgagagtgtccgccaccttctggcagaacccccggaaccacttcagatgccaggtgcagttctacggcctgagcgagaacgacgagtggacccaggacagagccaagcccgtgacccagatcgtgtctgccgaagcctggggcagagccgattgcggcatcaccagcgccagctaccaccagggcgtgctgagcgccaccatcctgtacgagatcctgctgggcaaggccaccctgtacgccgtgctggtgtctgccctggtgctgatggctatggtcaagcggaaggacagccgggga

SEQ ID NO: 36376 - DNA, 1857 bp, synthetic construct
  source 1..1857: mol_type = other DNA
atggccttaccagtgaccgccttgctcctgccgctggccttgctgctccacgccgccaggccggacatccagatgacacagagccctagcagcctgtctgccagcgtgggagacagagtgaccatcacatgcaagagcagccagagcctgctggactccgatggcaagacctacctgaactggtatcagcagaagcccggcaaggcccctaagctgctgatctacctggtgtccaagctggatagcggcgtgcccagcagattttctggcagcggcagcggaaccgacttcaccctgacaatatccagcctccagcctgaggacttcgccacctactactgcttccaaggcacccactttccattcaccttcggccagggcaccaaggtggaaatcaaaagactcgaggacctgaagaacgtgttcccacctgaggtggccgtgttcgagcctagcaaggccgagatcgcccacacccagaaagccaccctcgtgtgcctggctaccggcttctaccccgaccatgtggaactgtcttggtgggtcaacggcaaagaggtgcacagcggcgtgtgtaccgacccccagccactgaaagaacagcccgccctgaacgacagccggtactgcctgagcagcagactgagagtgtccgccaccttctggcagaacccccggaaccacttcagatgccaggtgcagttctacggcctgagcgagaacgacgagtggacccaggacagagccaagcccgtgacccagatcgtgtctgccgaagcctggggcagagccgattgcggcatcaccagcgccagctaccaccagggcgtgctgagcgccaccatcctgtacgagatcctgctgggcaaggccaccctgtacgccgtgctggtgtctgccctggtgctgatggctatggtcaagcggaaggacagccggggaagggccaagcgatctggatctggagcaacaaacttctcactactcaaacaagcaggtgacgtggaggagaatcccgggcctactagtatggactggatttggcgcatccttttccttgtcggcgctgctaccggcgcgcattccttcgaagaagtgcagctggttgaatcaggcggaggactggttcagcctggcggatctctgagactgtcttgtgccgccagcggctacaccttcaccagctactggatgaactgggtccgacaggcccctggcaaaggactggaatgggtcggaatgatcgaccccagcgacagcgagacacactacaaccacatcttcaaggaccgcttcaccatcagcgccgacaccagcaagaataccgcctacctccagatgaactccctgagagccgaggacaccgccgtgtactactgcgccagaaacctgtatctgttcggccagggaaccctggtcacagtgtcatctacgcgtatccagaaccctgatcctgccgtgtaccagctgcgggatagcaagagcagcgacaagagcgtgtgtctgttcaccgacttcgacagccagaccaacgtgtcccagagcaaggactccgacgtgtacatcaccgataagtgcgtgctggacatgcggagcatggacttcaagagcaactccgccgtggcctggtccaacaagtccgatttcgcctgcgccaacgccttcaacaacagcattatccccgaggacacattcttcccaagcagcgacgtgccctgcgacgtgaagctggtggaaaagagcttcgagacagacaccaacctgaacttccagaacctgagcgtgatcggcttcagaatcctgctgctgaaagtggccggctttaacctgctgatgaccctgcggctgtggtccagc

SEQ ID NO: 36377 - DNA, 1857 bp, synthetic construct
  source 1..1857: mol_type = other DNA
atggccttaccagtgaccgccttgctcctgccgctggccttgctgctccacgccgccaggccggacatccagatgacacagagccctagcagcctgtctgccagcgtgggagacagagtgaccatcacatgcaagagcagccagagcctgctggactccgatggcaagacctacctgaactggtatcagcagaagcccggcaaggcccctaagctgctgatctacctggtgtccaagctggatagcggcgtgcccagcagattttctggcagcggcagcggaaccgacttcaccctgacaatatccagcctccagcctgaggacttcgccacctactactgcttccaaggcacccactttccattcaccttcggccagggcaccaaggtggaaatcaaaagactcgaggacctgaagaacgtgttcccacctgaggtggccgtgttcgagcctagcgaggccgagatcagccacacccagaaagccaccctcgtgtgcctggctaccggcttctaccccgaccatgtggaactgtcttggtgggtcaacggcaaagaggtgcacagcggcgtgtgtaccgacccccagccactgaaagaacagcccgccctgaacgacagccggtactgcctgagcagcagactgagagtgtccgccaccttctggcagaacccccggaaccacttcagatgccaggtgcagttctacggcctgagcgagaacgacgagtggacccaggacagagccaagcccgtgacccagatcgtgtctgccgaagcctggggcagagccgattgcggctttaccagcgagagctaccagcagggcgtgctgagcgccaccatcctgtacgagatcctgctgggcaaggccaccctgtacgccgtgctggtgtctgccctggtgctgatggctatggtcaagcggaaggacagccggggaagggccaagcgatctggatctggagcaacaaacttctcactactcaaacaagcaggtgacgtggaggagaatcccgggcctactagtatggactggatttggcgcatccttttccttgtcggcgctgctaccggcgcgcattccttcgaagaagtgcagctggttgaatcaggcggaggactggttcagcctggcggatctctgagactgtcttgtgccgccagcggctacaccttcaccagctactggatgaactgggtccgacaggcccctggcaaaggactggaatgggtcggaatgatcgaccccagcgacagcgagacacactacaaccacatcttcaaggaccgcttcaccatcagcgccgacaccagcaagaataccgcctacctccagatgaactccctgagagccgaggacaccgccgtgtactactgcgccagaaacctgtatctgttcggccagggaaccctggtcacagtgtcatctacgcgtatccagaaccctgatcctgccgtgtaccagctgcgggatagcaagagcagcgacaagagcgtgtgtctgttcaccgacttcgacagccagaccaacgtgtcccagagcaaggactccgacgtgtacatcaccgataagtgcgtgctggacatgcggagcatggacttcaagagcaactccgccgtggcctggtccaacaagtccgatttcgcctgcgccaacgccttcaacaacagcattatccccgaggacacattcttcccaagccccgagagcagctgcgacgtgaagctggtggaaaagagcttcgagacagacaccaacctgaacttccagaacctgagcgtgatcggcttcagaatcctgctgctgaaagtggccggctttaacctgctgatgaccctgcggctgtggtccagc

SEQ ID NO: 36378 - DNA, 1869 bp, synthetic construct
  source 1..1869: mol_type = other DNA
atggccttaccagtgaccgccttgctcctgccgctggccttgctgctccacgccgccaggccggacatccagatgacacagagccctagcagcctgtctgccagcgtgggagacagagtgaccatcacatgcaagagcagccagagcctgctggactccgatggcaagacctacctgaactggtatcagcagaagcccggcaaggcccctaagctgctgatctacctggtgtccaagctggatagcggcgtgcccagcagattttctggcagcggcagcggaaccgacttcaccctgacaatatccagcctccagcctgaggacttcgccacctactactgcttccaaggcacccactttccattcaccttcggccagggcaccaaggtggaaatcaaaagactcgagatccagaaccctgatcctgccgtgtaccagctgcgggatagcaagagcagcgacaagagcgtgtgtctgttcaccgacttcgacagccagaccaacgtgtcccagagcaaggactccgacgtgtacatcaccgataagtgcgtgctggacatgcggagcatggacttcaagagcaactccgccgtggcctggtccaacaagtccgatttcgcctgcgccaacgccttcaacaacagcattatccccgaggacacattcttcccaagccccgagagcagctgcgacgtgaagctggtggaaaagagcttcgagacagacaccaacctgaacttccagaacctgagcgtgatcggcttcagaatcctgctgctgaaagtggccggctttaacctgctgatgaccctgcggctgtggtccagccgcgccaagagaagcggatctggcgtgaagcagaccctgaatttcgacctgctgaagctggctggcgacgtggaatccaacccaggccctactagtatggactggatttggcgcatccttttccttgtcggcgctgctaccggcgcgcattccttcgaagaagtgcagctggttgaatcaggcggaggactggttcagcctggcggatctctgagactgtcttgtgccgccagcggctacaccttcaccagctactggatgaactgggtccgacaggcccctggcaaaggactggaatgggtcggaatgatcgaccccagcgacagcgagacacactacaaccacatcttcaaggaccgcttcaccatcagcgccgacaccagcaagaataccgcctacctccagatgaactccctgagagccgaggacaccgccgtgtactactgcgccagaaacctgtatctgttcggccagggaaccctggtcacagtgtcatctacgcgtgaggacctgaagaacgtgttcccacctgaggtggccgtgttcgagcctagcgaggccgagatcagccacacccagaaagccaccctcgtgtgcctggctaccggcttctaccccgaccatgtggaactgtcttggtgggtcaacggcaaagaggtgcacagcggcgtgtgtaccgacccccagccactgaaagaacagcccgccctgaacgacagccggtactgcctgagcagcagactgagagtgtccgccaccttctggcagaacccccggaaccacttcagatgccaggtgcagttctacggcctgagcgagaacgacgagtggacccaggacagagccaagcccgtgacccagatcgtgtctgccgaagcctggggcagagccgattgcggctttaccagcgagagctaccagcagggcgtgctgagcgccaccatcctgtacgagatcctgctgggcaaggccaccctgtacgccgtgctggtgtctgccctggtgctgatggctatggtcaagcggaaggacagccgggga

SEQ ID NO: 36379 - DNA, 1905 bp, synthetic construct
  source 1..1905: mol_type = other DNA
atggccttaccagtgaccgccttgctcctgccgctggccttgctgctccacgccgccaggccgctcgaggaggacctgaagaacgtgttcccacctgaggtggccgtgttcgagcctagcaaggccgagatcgcccacacccagaaagccaccctcgtgtgcctggctaccggcttctaccccgaccatgtggaactgtcttggtgggtcaacggcaaagaggtgcacagcggcgtgtgtaccgacccccagccactgaaagaacagcccgccctgaacgacagccggtactgcctgagcagcagactgagagtgtccgccaccttctggcagaacccccggaaccacttcagatgccaggtgcagttctacggcctgagcgagaacgacgagtggacccaggacagagccaagcccgtgacccagatcgtgtctgccgaagcctggggcagagccgattgcggcatcaccagcgccagctaccaccagggcgtgctgagcgccaccatcctgtacgagatcctgctgggcaaggccaccctgtacgccgtgctggtgtctgccctggtgctgatggctatggtcaagcggaaggacagccggggaagggccaagcgatctggatctggagcaacaaacttctcactactcaaacaagcaggtgacgtggaggagaatcccgggcctactagcatggccttaccagtgaccgccttgctcctgccgctggccttgctgctccacgccgccaggccggacatccagatgacacagagccctagcagcctgtctgccagcgtgggagacagagtgaccatcacatgcaagagcagccagagcctgctggactccgatggcaagacctacctgaactggtatcagcagaagcccggcaaggcccctaagctgctgatctacctggtgtccaagctggatagcggcgtgcccagcagattttctggcagcggcagcggaaccgacttcaccctgacaatatccagcctccagcctgaggacttcgccacctactactgcttccaaggcacccactttccattcaccttcggccagggcaccaaggtggaaatcaaaagaggcggaggcggaagtggaggcggaggatctggcggcggaggctctgaagtgcagctggttgaatcaggcggaggactggttcagcctggcggatctctgagactgtcttgtgccgccagcggctacaccttcaccagctactggatgaactgggtccgacaggcccctggcaaaggactggaatgggtcggaatgatcgaccccagcgacagcgagacacactacaaccacatcttcaaggaccgcttcaccatcagcgccgacaccagcaagaataccgcctacctccagatgaactccctgagagccgaggacaccgccgtgtactactgcgccagaaacctgtatctgttcggccagggaaccctggtcacagtgtcatctacgcgtatccagaaccctgatcctgccgtgtaccagctgcgggatagcaagagcagcgacaagagcgtgtgtctgttcaccgacttcgacagccagaccaacgtgtcccagagcaaggactccgacgtgtacatcaccgataagtgcgtgctggacatgcggagcatggacttcaagagcaactccgccgtggcctggtccaacaagtccgatttcgcctgcgccaacgccttcaacaacagcattatccccgaggacacattcttcccaagcagcgacgtgccctgcgacgtgaagctggtggaaaagagcttcgagacagacaccaacctgaacttccagaacctgagcgtgatcggcttcagaatcctgctgctgaaagtggccggctttaacctgctgatgaccctgcggctgtggtccagc

SEQ ID NO: 36380 - DNA, 1926 bp, synthetic construct
  source 1..1926: mol_type = other DNA
atggccttaccagtgaccgccttgctcctgccgctggccttgctgctccacgccgccaggccgctcgagggctccggcgatcgccctgatcctgccgtgtaccagctgcgggatagcaagagcagcgacaagagcgtgtgtctgttcaccgacttcgacagccagaccaacgtgtcccagagcaaggactccgacgtgtacatcaccgataagtgcgtgctggacatgcggagcatggacttcaagagcaactccgccgtggcctggtccaacaagtccgatttcgcctgcgccaacgccttcaacaacagcattatccccgaggacacattcttcccaagccccgagagcagctgcgacgtgaagctggtggaaaagagcttcgagacagacaccaacctgaacttccagaacctgagcgtgatcggcttcagaatcctgctgctgaaagtggccggctttaacctgctgatgaccctgcggctgtggtccagctctagtcgcgccaagagaagcggatctggcgtgaagcagaccctgaatttcgacctgctgaagctggctggcgacgtggaatccaacccaggccccactagcatggccttaccagtgaccgccttgctcctgccgctggccttgctgctccacgccgccaggccggacatccagatgacacagagccctagcagcctgtctgccagcgtgggagacagagtgaccatcacatgcaagagcagccagagcctgctggactccgatggcaagacctacctgaactggtatcagcagaagcccggcaaggcccctaagctgctgatctacctggtgtccaagctggatagcggcgtgcccagcagattttctggcagcggcagcggaaccgacttcaccctgacaatatccagcctccagcctgaggacttcgccacctactactgcttccaaggcacccactttccattcaccttcggccagggcaccaaggtggaaatcaaaagaggcggaggcggaagtggaggcggaggatctggcggcggaggctctgaagtgcagctggttgaatcaggcggaggactggttcagcctggcggatctctgagactgtcttgtgccgccagcggctacaccttcaccagctactggatgaactgggtccgacaggcccctggcaaaggactggaatgggtcggaatgatcgaccccagcgacagcgagacacactacaaccacatcttcaaggaccgcttcaccatcagcgccgacaccagcaagaataccgcctacctccagatgaactccctgagagccgaggacaccgccgtgtactactgcgccagaaacctgtatctgttcggccagggaaccctggtcacagtgtcatctacgcgtgaggacctgaagaacgtgttcccacctgaggtggccgtgttcgagcctagcgaggccgagatcagccacacccagaaagccaccctcgtgtgcctggctaccggcttctaccccgaccatgtggaactgtcttggtgggtcaacggcaaagaggtgcacagcggcgtgtgtaccgacccccagccactgaaagaacagcccgccctgaacgacagccggtactgcctgagcagcagactgagagtgtccgccaccttctggcagaacccccggaaccacttcagatgccaggtgcagttctacggcctgagcgagaacgacgagtggacccaggacagagccaagcccgtgacccagatcgtgtctgccgaagcctggggcagagccgattgcggctttaccagcgagagctaccagcagggcgtgctgagcgccaccatcctgtacgagatcctgctgggcaaggccaccctgtacgccgtgctggtgtctgccctggtgctgatggctatggtcaagcggaaggacagccgggga

SEQ ID NO: 36381 - DNA, 1857 bp, synthetic construct
  source 1..1857: mol_type = other DNA
atggccttaccagtgaccgccttgctcctgccgctggccttgctgctccacgccgccaggccggacatccagatgacacagagccctagcagcctgtctgccagcgtgggagacagagtgaccatcacatgcaagagcagccagagcctgctggactccgatggcaagacctacctgaactggtatcagcagaagcccggcaaggcccctaagctgctgatctacctggtgtccaagctggatagcggcgtgcccagcagattttctggcagcggcagcggaaccgacttcaccctgacaatatccagcctccagcctgaggacttcgccacctactactgcttccaaggcacccactttccattcaccttcggccagggcaccaaggtggaaatcaaaagactcgaggacctgaagaacgtgttcccacctgaggtggccgtgttcgagcctagcgaggccgagatcagccacacccagaaagccaccctcgtgtgcctggctaccggcttctaccccgaccatgtggaactgtcttggtgggtcaacggcaaagaggtgcacagcggcgtgtctaccgacccccagccactgaaagaacagcccgccctgaacgacagccggtactgcctgagcagcagactgagagtgtccgccaccttctggcagaacccccggaaccacttcagatgccaggtgcagttctacggcctgagcgagaacgacgagtggacccaggacagagccaagcccgtgacccagatcgtgtctgccgaagcctggggcagagccgattgcggctttaccagcgagagctaccagcagggcgtgctgagcgccaccatcctgtacgagatcctgctgggcaaggccaccctgtacgccgtgctggtgtctgccctggtgctgatggctatggtcaagcggaaggacagccggggaagggccaagcgatctggatctggagcaacaaacttctcactactcaaacaagcaggtgacgtggaggagaatcccgggcctactagtatggactggatttggcgcatccttttccttgtcggcgctgctaccggcgcgcattccttcgaagaagtgcagctggttgaatcaggcggaggactggttcagcctggcggatctctgagactgtcttgtgccgccagcggctacaccttcaccagctactggatgaactgggtccgacaggcccctggcaaaggactggaatgggtcggaatgatcgaccccagcgacagcgagacacactacaaccacatcttcaaggaccgcttcaccatcagcgccgacaccagcaagaataccgcctacctccagatgaactccctgagagccgaggacaccgccgtgtactactgcgccagaaacctgtatctgttcggccagggaaccctggtcacagtgtcatctacgcgtatccagaaccctgatcctgccgtgtaccagctgcgggatagcaagagcagcgacaagagcgtgtgtctgttcaccgacttcgacagccagaccaacgtgtcccagagcaaggactccgacgtgtacatcaccgataagaccgtgctggacatgcggagcatggacttcaagagcaactccgccgtggcctggtccaacaagtccgatttcgcctgcgccaacgccttcaacaacagcattatccccgaggacacattcttcccaagccccgagagcagctgcgacgtgaagctggtggaaaagagcttcgagacagacaccaacctgaacttccagaacctgagcgtgatcggcttcagaatcctgctgctgaaagtggccggctttaacctgctgatgaccctgcggctgtggtccagc

SEQ ID NO: 36382 - DNA, 1881 bp, synthetic construct
  source 1..1881: mol_type = other DNA
atggccttaccagtgaccgccttgctcctgccgctggccttgctgctccacgccgccaggccggacatccagatgacacagagccctagcagcctgtctgccagcgtgggagacagagtgaccatcacatgcaagagcagccagagcctgctggactccgatggcaagacctacctgaactggtatcagcagaagcccggcaaggcccctaagctgctgatctacctggtgtccaagctggatagcggcgtgcccagcagattttctggcagcggcagcggaaccgacttcaccctgacaatatccagcctccagcctgaggacttcgccacctactactgcttccaaggcacccactttccattcaccttcggccagggcaccaaggtggaaatcaaaagactcgaggacaagcagctggacgccgacgtgtcccccaagcctaccatcttcctgccctctatcgccgagacaaagctccagaaggccggcacctacctgtgcctgctggaaaagttcttcccagatgtgattaagatccactggcaggaaaagaagtccaacaccatcctgggcagccaggaaggcaacaccatgaagaccaacgacacctacatgaagttcagctggctgaccgtgcccgagaagtccctggacaaagaacacagatgcatcgtgcggcacgaaaacaacaagaacggcgtggaccaggaaatcatcttcccacccatcaagaccgatgtgattacaatggaccccaaggacaactgctccaaggacgccaacgataccctgctgctccagctgaccaacaccagcgcctactacatgtacttgttgctgctgctgaagtccgtggtgtacttcgccatcatcacatgctgcctgctgcggagaaccgccttctgctgcaacggcgagaagtctagggccaagcgatctggatctggagcaacaaacttctcactactcaaacaagcaggtgacgtggaggagaatcccgggcctactagtatggactggatttggcgcatccttttccttgtcggcgctgctaccggcgcgcattccttcgaagaagtgcagctggttgaatcaggcggaggactggttcagcctggcggatctctgagactgtcttgtgccgccagcggctacaccttcaccagctactggatgaactgggtccgacaggcccctggcaaaggactggaatgggtcggaatgatcgaccccagcgacagcgagacacactacaaccacatcttcaaggaccgcttcaccatcagcgccgacaccagcaagaataccgcctacctccagatgaactccctgagagccgaggacaccgccgtgtactactgcgccagaaacctgtatctgttcggccagggaaccctggtcacagtgtcatctacgcgtagccagcctcacaccaagcccagcgtgttcgtgatgaagaacggcaccaacgtggcctgcctcgtgaaagagttctaccccaaggacatcaggatcaacctggtgtccagcaagaagatcaccgagttcgaccccgccatcgtgatctcccccagcggcaagtacaacgccgtgaagctggggaagtacgaggacagcaacagcgtgacctgctccgtgcagcacgacaacaagaccgtgcacagcaccgactttgaagtgaaaaccgactccaccgaccacgtgaagcccaaagagacagagaacaccaagcagcccagcaagagctgccacaagcccaaggccatcgtgcacaccgagaaagtgaacatgatgagcctgaccgtgctgggcctgcggatgctgttcgccaaaaccgtggccgtgaacttcctgctgaccgccaagctgttcttcctc

SEQ ID NO: 36383 - DNA, 1881 bp, synthetic construct
  source 1..1881: mol_type = other DNA
atggccttaccagtgaccgccttgctcctgccgctggccttgctgctccacgccgccaggccggacatccagatgacacagagccctagcagcctgtctgccagcgtgggagacagagtgaccatcacatgcaagagcagccagagcctgctggactccgatggcaagacctacctgaactggtatcagcagaagcccggcaaggcccctaagctgctgatctacctggtgtccaagctggatagcggcgtgcccagcagattttctggcagcggcagcggaaccgacttcaccctgacaatatccagcctccagcctgaggacttcgccacctactactgcttccaaggcacccactttccattcaccttcggccagggcaccaaggtggaaatcaaaagactcgagagccagcctcacaccaagcccagcgtgttcgtgatgaagaacggcaccaacgtggcctgcctcgtgaaagagttctaccccaaggacatcaggatcaacctggtgtccagcaagaagatcaccgagttcgaccccgccatcgtgatctcccccagcggcaagtacaacgccgtgaagctggggaagtacgaggacagcaacagcgtgacctgctccgtgcagcacgacaacaagaccgtgcacagcaccgactttgaagtgaaaaccgactccaccgaccacgtgaagcccaaagagacagagaacaccaagcagcccagcaagagctgccacaagcccaaggccatcgtgcacaccgagaaagtgaacatgatgagcctgaccgtgctgggcctgcggatgctgttcgccaaaaccgtggccgtgaacttcctgctgaccgccaagctgttcttcctcagggccaagcgatctggatctggagcaacaaacttctcactactcaaacaagcaggtgacgtggaggagaatcccgggcctactagtatggactggatttggcgcatccttttccttgtcggcgctgctaccggcgcgcattccttcgaagaagtgcagctggttgaatcaggcggaggactggttcagcctggcggatctctgagactgtcttgtgccgccagcggctacaccttcaccagctactggatgaactgggtccgacaggcccctggcaaaggactggaatgggtcggaatgatcgaccccagcgacagcgagacacactacaaccacatcttcaaggaccgcttcaccatcagcgccgacaccagcaagaataccgcctacctccagatgaactccctgagagccgaggacaccgccgtgtactactgcgccagaaacctgtatctgttcggccagggaaccctggtcacagtgtcatctacgcgtgacaagcagctggacgccgacgtgtcccccaagcctaccatcttcctgccctctatcgccgagacaaagctccagaaggccggcacctacctgtgcctgctggaaaagttcttcccagatgtgattaagatccactggcaggaaaagaagtccaacaccatcctgggcagccaggaaggcaacaccatgaagaccaacgacacctacatgaagttcagctggctgaccgtgcccgagaagtccctggacaaagaacacagatgcatcgtgcggcacgaaaacaacaagaacggcgtggaccaggaaatcatcttcccacccatcaagaccgatgtgattacaatggaccccaaggacaactgctccaaggacgccaacgataccctgctgctccagctgaccaacaccagcgcctactacatgtacttgttgctgctgctgaagtccgtggtgtacttcgccatcatcacatgctgcctgctgcggagaaccgccttctgctgcaacggcgagaagtct

SEQ ID NO: 36384 - DNA, 1926 bp, synthetic construct
  source 1..1926: mol_type = other DNA
atggccttaccagtgaccgccttgctcctgccgctggccttgctgctccacgccgccaggccgctcgaggacaagcagctggacgccgacgtgtcccccaagcctaccatcttcctgccctctatcgccgagacaaagctccagaaggccggcacctacctgtgcctgctggaaaagttcttcccagatgtgattaagatccactggcaggaaaagaagtccaacaccatcctgggcagccaggaaggcaacaccatgaagaccaacgacacctacatgaagttcagctggctgaccgtgcccgagaagtccctggacaaagaacacagatgcatcgtgcggcacgaaaacaacaagaacggcgtggaccaggaaatcatcttcccacccatcaagaccgatgtgattacaatggaccccaaggacaactgctccaaggacgccaacgataccctgctgctccagctgaccaacaccagcgcctactacatgtacttgttgctgctgctgaagtccgtggtgtacttcgccatcatcacatgctgcctgctgcggagaaccgccttctgctgcaacggcgagaagtctagggccaagcgatctggatctggagcaacaaacttctcactactcaaacaagcaggtgacgtggaggagaatcccgggcctactagcatggccttaccagtgaccgccttgctcctgccgctggccttgctgctccacgccgccaggccggacatccagatgacacagagccctagcagcctgtctgccagcgtgggagacagagtgaccatcacatgcaagagcagccagagcctgctggactccgatggcaagacctacctgaactggtatcagcagaagcccggcaaggcccctaagctgctgatctacctggtgtccaagctggatagcggcgtgcccagcagattttctggcagcggcagcggaaccgacttcaccctgacaatatccagcctccagcctgaggacttcgccacctactactgcttccaaggcacccactttccattcaccttcggccagggcaccaaggtggaaatcaaaagaggcggaggcggaagtggaggcggaggatctggcggcggaggctctgaagtgcagctggttgaatcaggcggaggactggttcagcctggcggatctctgagactgtcttgtgccgccagcggctacaccttcaccagctactggatgaactgggtccgacaggcccctggcaaaggactggaatgggtcggaatgatcgaccccagcgacagcgagacacactacaaccacatcttcaaggaccgcttcaccatcagcgccgacaccagcaagaataccgcctacctccagatgaactccctgagagccgaggacaccgccgtgtactactgcgccagaaacctgtatctgttcggccagggaaccctggtcacagtgtcatctacgcgtagccagcctcacaccaagcccagcgtgttcgtgatgaagaacggcaccaacgtggcctgcctcgtgaaagagttctaccccaaggacatcaggatcaacctggtgtccagcaagaagatcaccgagttcgaccccgccatcgtgatctcccccagcggcaagtacaacgccgtgaagctggggaagtacgaggacagcaacagcgtgacctgctccgtgcagcacgacaacaagaccgtgcacagcaccgactttgaagtgaaaaccgactccaccgaccacgtgaagcccaaagagacagagaacaccaagcagcccagcaagagctgccacaagcccaaggccatcgtgcacaccgagaaagtgaacatgatgagcctgaccgtgctgggcctgcggatgctgttcgccaaaaccgtggccgtgaacttcctgctgaccgccaagctgttcttcctc

SEQ ID NO: 36385 - DNA, 2388 bp, synthetic construct
  source 1..2388: mol_type = other DNA
atggccttaccagtgaccgccttgctcctgccgctggccttgctgctccacgccgccaggccggacatccagatgacacagagccctagcagcctgtctgccagcgtgggagacagagtgaccatcacatgcaagagcagccagagcctgctggactccgatggcaagacctacctgaactggtatcagcagaagcccggcaaggcccctaagctgctgatctacctggtgtccaagctggatagcggcgtgcccagcagattttctggcagcggcagcggaaccgacttcaccctgacaatatccagcctccagcctgaggacttcgccacctactactgcttccaaggcacccactttccattcaccttcggccagggcaccaaggtggaaatcaaaagaggacagcctaaggccaatcctaccgtgacactgttccctccaagcagcgaagaactccaggccaacaaggccacacttgtgtgcctgatctccgacttctaccctggggctgtgacagtggcttggaaggccgatggatctcctgtgaaagccggcgtggaaaccaccaagccatccaagcagagcaacaacaaatacgccgccagctcctacctgagcctgacacctgagcagtggaagtcccacagatcctacagctgccaagtgacccacgaaggcagcaccgtggaaaagacagtggcccctacagagtgcagcggatcccagagcttcggcctgctggaccccaagctgtgctacctgctggatggcatcctgttcatctacggcgtgatcctgaccgccctgttcctgagagtgaagttcagcagaagcgccgacgcccctgcctaccagcagggacagaaccaactgtacaacgagctgaacctgggcagacgggaagagtacgacgtgctggacaagcggagaggcagggaccctgagatgggcggaaagccccagcggagaaagaacccccaggaaggactgtataacgaactccagaaagacaagatggccgaagcctacagcgagatcggcatgaagggcgagcggagaagaggcaagggccacgatggcctgtaccagggcctgagcaccgccaccaaggacacctatgacgccctgcacatgcaggccctgcctccaagaagggccaagcgatctggatctggagcaacaaacttctcactactcaaacaagcaggtgacgtggaggagaatcccgggcctactagtatggactggatttggcgcatccttttccttgtcggcgctgctaccggcgcgcattccttcgaagaagtgcagctggttgaatcaggcggaggactggttcagcctggcggatctctgagactgtcttgtgccgccagcggctacaccttcaccagctactggatgaactgggtccgacaggcccctggcaaaggactggaatgggtcggaatgatcgaccccagcgacagcgagacacactacaaccacatcttcaaggaccgcttcaccatcagcgccgacaccagcaagaataccgcctacctccagatgaactccctgagagccgaggacaccgccgtgtactactgcgccagaaacctgtatctgttcggccagggaaccctggtcacagtgtcatctgcctctacaaagggaccctccgtgtttcctctggctcccagcagcaagtctacaagcggaggaacagccgctctgggctgcctggtcaaggattactttcccgagcctgtgaccgtgtcctggaatagcggagcactgacaagcggcgtgcacacctttccagccgtgctgcaaagcagcggcctgtactctctgagcagcgtggtcacagtgcctagctctagcctgggcacccagacctacatctgcaatgtgaaccacaagcctagcaacaccaaggtggacaagagagtggaacccaagagctgtggtacccagagttttgggttgttggaccctaaattgtgctatctgttggacggaatcctgttcatttacggagtgatcctgaccgcattgttcctgcgggttaagttttccagatccgcagacgcacccgcttaccaacaagggcagaaccaactctacaatgaacttaatttggggcggagggaagagtacgacgttctggacaaaaggaggggacgagatcccgagatgggcggaaagcctcagcgaaggaagaatccgcaagaggggctttataacgaactccagaaagataaaatggcagaagcctatagtgagattgggatgaagggagaaaggaggaggggtaaaggtcacgatgggttgtaccaaggattgagcacagccactaaagatacctatgatgcgctccacatgcaggccctgccgccaaga

SEQ ID NO: 36386 - DNA, 2445 bp, synthetic construct
  source 1..2445: mol_type = other DNA
atggccttaccagtgaccgccttgctcctgccgctggccttgctgctccacgccgccaggccggacatccagatgacacagagccctagcagcctgtctgccagcgtgggagacagagtgaccatcacatgcaagagcagccagagcctgctggactccgatggcaagacctacctgaactggtatcagcagaagcccggcaaggcccctaagctgctgatctacctggtgtccaagctggatagcggcgtgcccagcagattttctggcagcggcagcggaaccgacttcaccctgacaatatccagcctccagcctgaggacttcgccacctactactgcttccaaggcacccactttccattcaccttcggccagggcaccaaggtggaaatcaaaagactcgaggacctgaagaacgtgttcccacctgaggtggccgtgttcgagcctagcgaggccgagatcagccacacccagaaagccaccctcgtgtgcctggctaccggcttctaccccgaccatgtggaactgtcttggtgggtcaacggcaaagaggtgcacagcggcgtgtctaccgacccccagccactgaaagaacagcccgccctgaacgacagccggtactgcctgagcagcagactgagagtgtccgccaccttctggcagaacccccggaaccacttcagatgccaggtgcagttctacggcctgagcgagaacgacgagtggacccaggacagagccaagcccgtgacccagatcgtgtctgccgaagcctggggcagagccgattgcggatcccagagcttcggcctgctggaccccaagctgtgctacctgctggatggcatcctgttcatctacggcgtgatcctgaccgccctgttcctgagagtgaagttcagcagaagcgccgacgcccctgcctaccagcagggacagaaccaactgtacaacgagctgaacctgggcagacgggaagagtacgacgtgctggacaagcggagaggcagggaccctgagatgggcggaaagccccagcggagaaagaacccccaggaaggactgtataacgaactccagaaagacaagatggccgaagcctacagcgagatcggcatgaagggcgagcggagaagaggcaagggccacgatggcctgtaccagggcctgagcaccgccaccaaggacacctatgacgccctgcacatgcaggccctgcctccaagaagggccaagcgatctggatctggagcaacaaacttctcactactcaaacaagcaggtgacgtggaggagaatcccgggcctactagtatggactggatttggcgcatccttttccttgtcggcgctgctaccggcgcgcattccttcgaagaagtgcagctggttgaatcaggcggaggactggttcagcctggcggatctctgagactgtcttgtgccgccagcggctacaccttcaccagctactggatgaactgggtccgacaggcccctggcaaaggactggaatgggtcggaatgatcgaccccagcgacagcgagacacactacaaccacatcttcaaggaccgcttcaccatcagcgccgacaccagcaagaataccgcctacctccagatgaactccctgagagccgaggacaccgccgtgtactactgcgccagaaacctgtatctgttcggccagggaaccctggtcacagtgtcatctacgcgtatccagaaccctgatcctgccgtgtaccagctgcgggatagcaagagcagcgacaagagcgtgtgtctgttcaccgacttcgacagccagaccaacgtgtcccagagcaaggactccgacgtgtacatcaccgataagaccgtgctggacatgcggagcatggacttcaagagcaactccgccgtggcctggtccaacaagtccgatttcgcctgcgccaacgccttcaacaacagcattatccccgaggacacattcttcccaagccccgagagcagctgcggtacccagagttttgggttgttggaccctaaattgtgctatctgttggacggaatcctgttcatttacggagtgatcctgaccgcattgttcctgcgggttaagttttccagatccgcagacgcacccgcttaccaacaagggcagaaccaactctacaatgaacttaatttggggcggagggaagagtacgacgttctggacaaaaggaggggacgagatcccgagatgggcggaaagcctcagcgaaggaagaatccgcaagaggggctttataacgaactccagaaagataaaatggcagaagcctatagtgagattgggatgaagggagaaaggaggaggggtaaaggtcacgatgggttgtaccaaggattgagcacagccactaaagatacctatgatgcgctccacatgcaggccctgccgccaaga

SEQ ID NO: 36387 - DNA, 2571 bp, synthetic construct
  source 1..2571: mol_type = other DNA
atggccttaccagtgaccgccttgctcctgccgctggccttgctgctccacgccgccaggccggacatccagatgacacagagccctagcagcctgtctgccagcgtgggagacagagtgaccatcacatgcaagagcagccagagcctgctggactccgatggcaagacctacctgaactggtatcagcagaagcccggcaaggcccctaagctgctgatctacctggtgtccaagctggatagcggcgtgcccagcagattttctggcagcggcagcggaaccgacttcaccctgacaatatccagcctccagcctgaggacttcgccacctactactgcttccaaggcacccactttccattcaccttcggccagggcaccaaggtggaaatcaaaagactcgaggaggacctgaagaacgtgttcccacctgaggtggccgtgttcgagcctagcgaggccgagatcagccacacccagaaagccaccctcgtgtgcctggctaccggcttctaccccgaccatgtggaactgtcttggtgggtcaacggcaaagaggtgcacagcggcgtgtctaccgacccccagccactgaaagaacagcccgccctgaacgacagccggtactgcctgagcagcagactgagagtgtccgccaccttctggcagaacccccggaaccacttcagatgccaggtgcagttctacggcctgagcgagaacgacgagtggacccaggacagagccaagcccgtgacccagatcgtgtctgccgaagcctggggcagagccgattgcggatcccagagcttcggcctgctggaccccaagctgtgctacctgctggatggcatcctgttcatctacggcgtgatcctgaccgccctgttcctgagagtgaagttcagcagaagcgccgacgcccctgcctaccagcagggacagaaccaactgtacaacgagctgaacctgggcagacgggaagagtacgacgtgctggacaagcggagaggcagggaccctgagatgggcggaaagccccagcggagaaagaacccccaggaaggactgtataacgaactccagaaagacaagatggccgaagcctacagcgagatcggcatgaagggcgagcggagaagaggcaagggccacgatggcctgtaccagggcctgagcaccgccaccaaggacacctatgacgccctgcacatgcaggccctgcctccaagaagggccaagcgatctggatctggagcaacaaacttctcactactcaaacaagcaggtgacgtggaggagaatcccgggcctactagtatggactggatttggcgcatccttttccttgtcggcgctgctaccggcgcgcattccttcgaagaagtgcagctggttgaatcaggcggaggactggttcagcctggcggatctctgagactgtcttgtgccgccagcggctacaccttcaccagctactggatgaactgggtccgacaggcccctggcaaaggactggaatgggtcggaatgatcgaccccagcgacagcgagacacactacaaccacatcttcaaggaccgcttcaccatcagcgccgacaccagcaagaataccgcctacctccagatgaactccctgagagccgaggacaccgccgtgtactactgcgccagaaacctgtatctgttcggccagggaaccctggtcacagtgtcatctacgcgtatccagaaccctgatcctgccgtgtaccagctgcgggatagcaagagcagcgacaagagcgtgtgtctgttcaccgacttcgacagccagaccaacgtgtcccagagcaaggactccgacgtgtacatcaccgataagaccgtgctggacatgcggagcatggacttcaagagcaactccgccgtggcctggtccaacaagtccgatttcgcctgcgccaacgccttcaacaacagcattatccccgaggacacattcttcccaagccccgagagcagctgcggtacccagagttttgggttgttggaccctaaattgtgctatctgttggacggaatcctgttcatttacggagtgatcctgaccgcattgttcctgaggagcaagcggtcacggctgctccacagcgattacatgaatatgacaccacgaagaccgggtcctactcgcaaacactaccaaccctacgcacctccccgcgactttgcagcgtaccgatctcgggttaagttttccagatccgcagacgcacccgcttaccaacaagggcagaaccaactctacaatgaacttaatttggggcggagggaagagtacgacgttctggacaaaaggaggggacgagatcccgagatgggcggaaagcctcagcgaaggaagaatccgcaagaggggctttataacgaactccagaaagataaaatggcagaagcctatagtgagattgggatgaagggagaaaggaggaggggtaaaggtcacgatgggttgtaccaaggattgagcacagccactaaagatacctatgatgcgctccacatgcaggccctgccgccaaga

SEQ ID NO: 36388 - DNA, 2700 bp, synthetic construct
  source 1..2700: mol_type = other DNA
atggccttaccagtgaccgccttgctcctgccgctggccttgctgctccacgccgccaggccggacatccagatgacacagagccctagcagcctgtctgccagcgtgggagacagagtgaccatcacatgcaagagcagccagagcctgctggactccgatggcaagacctacctgaactggtatcagcagaagcccggcaaggcccctaagctgctgatctacctggtgtccaagctggatagcggcgtgcccagcagattttctggcagcggcagcggaaccgacttcaccctgacaatatccagcctccagcctgaggacttcgccacctactactgcttccaaggcacccactttccattcaccttcggccagggcaccaaggtggaaatcaaaagactcgaggaggacctgaagaacgtgttcccacctgaggtggccgtgttcgagcctagcgaggccgagatcagccacacccagaaagccaccctcgtgtgcctggctaccggcttctaccccgaccatgtggaactgtcttggtgggtcaacggcaaagaggtgcacagcggcgtgtctaccgacccccagccactgaaagaacagcccgccctgaacgacagccggtactgcctgagcagcagactgagagtgtccgccaccttctggcagaacccccggaaccacttcagatgccaggtgcagttctacggcctgagcgagaacgacgagtggacccaggacagagccaagcccgtgacccagatcgtgtctgccgaagcctggggcagagccgattgcggatcccagagcttcggcctgctggaccccaagctgtgctacctgctggatggcatcctgttcatctacggcgtgatcctgaccgccctgttcctgaaacggggcagaaagaaactcctgtatatattcaaacaaccatttatgagaccagtacaaactactcaagaggaagatggctgtagctgccgatttccagaagaagaagaaggaggatgtgaactgagagtgaagttcagcagaagcgccgacgcccctgcctaccagcagggacagaaccaactgtacaacgagctgaacctgggcagacgggaagagtacgacgtgctggacaagcggagaggcagggaccctgagatgggcggaaagccccagcggagaaagaacccccaggaaggactgtataacgaactccagaaagacaagatggccgaagcctacagcgagatcggcatgaagggcgagcggagaagaggcaagggccacgatggcctgtaccagggcctgagcaccgccaccaaggacacctatgacgccctgcacatgcaggccctgcctccaagaagggccaagcgatctggatctggagcaacaaacttctcactactcaaacaagcaggtgacgtggaggagaatcccgggcctactagtatggactggatttggcgcatccttttccttgtcggcgctgctaccggcgcgcattccttcgaagaagtgcagctggttgaatcaggcggaggactggttcagcctggcggatctctgagactgtcttgtgccgccagcggctacaccttcaccagctactggatgaactgggtccgacaggcccctggcaaaggactggaatgggtcggaatgatcgaccccagcgacagcgagacacactacaaccacatcttcaaggaccgcttcaccatcagcgccgacaccagcaagaataccgcctacctccagatgaactccctgagagccgaggacaccgccgtgtactactgcgccagaaacctgtatctgttcggccagggaaccctggtcacagtgtcatctacgcgtatccagaaccctgatcctgccgtgtaccagctgcgggatagcaagagcagcgacaagagcgtgtgtctgttcaccgacttcgacagccagaccaacgtgtcccagagcaaggactccgacgtgtacatcaccgataagaccgtgctggacatgcggagcatggacttcaagagcaactccgccgtggcctggtccaacaagtccgatttcgcctgcgccaacgccttcaacaacagcattatccccgaggacacattcttcccaagccccgagagcagctgcggtacccagagttttgggttgttggaccctaaattgtgctatctgttggacggaatcctgttcatttacggagtgatcctgaccgcattgttcctgaagagaggccggaagaagctgctgtacatcttcaagcagcctttcatgcggcccgtgcagaccacccaggaagaggacggctgctcctgccggttccccgaggaagaagaaggcggctgcgagctgcgggttaagttttccagatccgcagacgcacccgcttaccaacaagggcagaaccaactctacaatgaacttaatttggggcggagggaagagtacgacgttctggacaaaaggaggggacgagatcccgagatgggcggaaagcctcagcgaaggaagaatccgcaagaggggctttataacgaactccagaaagataaaatggcagaagcctatagtgagattgggatgaagggagaaaggaggaggggtaaaggtcacgatgggttgtaccaaggattgagcacagccactaaagatacctatgatgcgctccacatgcaggccctgccgccaaga

SEQ ID NO: 36389 - DNA, 1761 bp, synthetic construct
  source 1..1761: mol_type = other DNA
atggccttaccagtgaccgccttgctcctgccgctggccttgctgctccacgccgccaggccggacatccagatgacacagagccctagcagcctgtctgccagcgtgggagacagagtgaccatcacatgcaagagcagccagagcctgctggactccgatggcaagacctacctgaactggtatcagcagaagcccggcaaggcccctaagctgctgatctacctggtgtccaagctggatagcggcgtgcccagcagattttctggcagcggcagcggaaccgacttcaccctgacaatatccagcctccagcctgaggacttcgccacctactactgcttccaaggcacccactttccattcaccttcggccagggcaccaaggtggaaatcaaaagactcgagcagagcttcggcctgctggaccccaagctgtgctacctgctggatggcatcctgttcatctacggcgtgatcctgaccgccctgttcctgagagtgaagttcagcagaagcgccgacgcccctgcctaccagcagggacagaaccaactgtacaacgagctgaacctgggcagacgggaagagtacgacgtgctggacaagcggagaggcagggaccctgagatgggcggaaagccccagcggagaaagaacccccaggaaggactgtataacgaactccagaaagacaagatggccgaagcctacagcgagatcggcatgaagggcgagcggagaagaggcaagggccacgatggcctgtaccagggcctgagcaccgccaccaaggacacctatgacgccctgcacatgcaggccctgcctccaagaagggccaagcgatctggatctggagcaacaaacttctcactactcaaacaagcaggtgacgtggaggagaatcccgggcctactagtatggactggatttggcgcatccttttccttgtcggcgctgctaccggcgcgcattccttcgaagaagtgcagctggttgaatcaggcggaggactggttcagcctggcggatctctgagactgtcttgtgccgccagcggctacaccttcaccagctactggatgaactgggtccgacaggcccctggcaaaggactggaatgggtcggaatgatcgaccccagcgacagcgagacacactacaaccacatcttcaaggaccgcttcaccatcagcgccgacaccagcaagaataccgcctacctccagatgaactccctgagagccgaggacaccgccgtgtactactgcgccagaaacctgtatctgttcggccagggaaccctggtcacagtgtcatctacgcgtcagagttttgggttgttggaccctaaattgtgctatctgttggacggaatcctgttcatttacggagtgatcctgaccgcattgttcctgcgggttaagttttccagatccgcagacgcacccgcttaccaacaagggcagaaccaactctacaatgaacttaatttggggcggagggaagagtacgacgttctggacaaaaggaggggacgagatcccgagatgggcggaaagcctcagcgaaggaagaatccgcaagaggggctttataacgaactccagaaagataaaatggcagaagcctatagtgagattgggatgaagggagaaaggaggaggggtaaaggtcacgatgggttgtaccaaggattgagcacagccactaaagatacctatgatgcgctccacatgcaggccctgccgccaaga

SEQ ID NO: 36390 - DNA, 1935 bp, synthetic construct
  source 1..1935: mol_type = other DNA
atggccttaccagtgaccgccttgctcctgccgctggccttgctgctccacgccgccaggccggacatccagatgacacagagccctagcagcctgtctgccagcgtgggagacagagtgaccatcacatgcaagagcagccagagcctgctggactccgatggcaagacctacctgaactggtatcagcagaagcccggcaaggcccctaagctgctgatctacctggtgtccaagctggatagcggcgtgcccagcagattttctggcagcggcagcggaaccgacttcaccctgacaatatccagcctccagcctgaggacttcgccacctactactgcttccaaggcacccactttccattcaccttcggccagggcaccaaggtggaaatcaaaagactcgagggacagcctaaggccaatcctaccgtgacactgttccctccaagcagcgaagaactccaggccaacaaggccacacttgtgtgcctgatctccgacttctaccctggggctgtgacagtggcttggaaggccgatggatctcctgtgaaagccggcgtggaaaccaccaagccatccaagcagagcaacaacaaatacgccgccagctcctacctgagcctgacacctgagcagtggaagtcccacagatcctacagctgccaagtgacccacgaaggcagcaccgtggaaaagacagtggcccctacagagtgcagccccatcaagaccgatgtgattacaatggaccccaaggacaactgctccaaggacgccaacgataccctgctgctccagctgaccaacaccagcgcctactacatgtacttgttgctgctgctgaagtccgtggtgtacttcgccatcatcacatgctgcctgctgcggagaaccgccttctgctgcaacggcgagaagtctagggccaagcgatctggatctggagcaacaaacttctcactactcaaacaagcaggtgacgtggaggagaatcccgggcctactagtatggactggatttggcgcatccttttccttgtcggcgctgctaccggcgcgcattccttcgaagaagtgcagctggttgaatcaggcggaggactggttcagcctggcggatctctgagactgtcttgtgccgccagcggctacaccttcaccagctactggatgaactgggtccgacaggcccctggcaaaggactggaatgggtcggaatgatcgaccccagcgacagcgagacacactacaaccacatcttcaaggaccgcttcaccatcagcgccgacaccagcaagaataccgcctacctccagatgaactccctgagagccgaggacaccgccgtgtactactgcgccagaaacctgtatctgttcggccagggaaccctggtcacagtgtcatctacgcgtgcctctacaaagggaccctccgtgtttcctctggctcccagcagcaagtctacaagcggaggaacagccgctctgggctgcctggtcaaggattactttcccgagcctgtgaccgtgtcctggaatagcggagcactgacaagcggcgtgcacacctttccagccgtgctgcaaagcagcggcctgtactctctgagcagcgtggtcacagtgcctagctctagcctgggcacccagacctacatctgcaatgtgaaccacaagcctagcaacaccaaggtggacaagagagtggaacccaagagctgtgaagtgaaaaccgactccaccgaccacgtgaagcccaaagagacagagaacaccaagcagcccagcaagagctgccacaagcccaaggccatcgtgcacaccgagaaagtgaacatgatgagcctgaccgtgctgggcctgcggatgctgttcgccaaaaccgtggccgtgaacttcctgctgaccgccaagctgttcttcctc

SEQ ID NO: 36391 - DNA, 1869 bp, synthetic construct
  source 1..1869: mol_type = other DNA
atggccttaccagtgaccgccttgctcctgccgctggccttgctgctccacgccgccaggccggacatccagatgacacagagccctagcagcctgtctgccagcgtgggagacagagtgaccatcacatgcaagagcagccagagcctgctggactccgatggcaagacctacctgaactggtatcagcagaagcccggcaaggcccctaagctgctgatctacctggtgtccaagctggatagcggcgtgcccagcagattttctggcagcggcagcggaaccgacttcaccctgacaatatccagcctccagcctgaggacttcgccacctactactgcttccaaggcacccactttccattcaccttcggccagggcaccaaggtggaaatcaaaagactcgagggacagcctaaggccaatcctaccgtgacactgttccctccaagcagcgaagaactccaggccaacaaggccacacttgtgtgcctgatctccgacttctaccctggggctgtgacagtggcttggaaggccgatggatctcctgtgaaagccggcgtggaaaccaccaagccatccaagcagagcaacaacaaatacgccgccagctcctacctgagcctgacacctgagcagtggaagtcccacagatcctacagctgccaagtgacccacgaaggcagcaccgtggaaaagacagtggcccctacagagtgcagcggcagagccgattgcggcatcaccagcgccagctaccaccagggcgtgctgagcgccaccatcctgtacgagatcctgctgggcaaggccaccctgtacgccgtgctggtgtctgccctggtgctgatggctatggtcaagcggaaggacagccggggaagggccaagcgatctggatctggagcaacaaacttctcactactcaaacaagcaggtgacgtggaggagaatcccgggcctactagtatggactggatttggcgcatccttttccttgtcggcgctgctaccggcgcgcattccttcgaagaagtgcagctggttgaatcaggcggaggactggttcagcctggcggatctctgagactgtcttgtgccgccagcggctacaccttcaccagctactggatgaactgggtccgacaggcccctggcaaaggactggaatgggtcggaatgatcgaccccagcgacagcgagacacactacaaccacatcttcaaggaccgcttcaccatcagcgccgacaccagcaagaataccgcctacctccagatgaactccctgagagccgaggacaccgccgtgtactactgcgccagaaacctgtatctgttcggccagggaaccctggtcacagtgtcatctacgcgtgcctctacaaagggaccctccgtgtttcctctggctcccagcagcaagtctacaagcggaggaacagccgctctgggctgcctggtcaaggattactttcccgagcctgtgaccgtgtcctggaatagcggagcactgacaagcggcgtgcacacctttccagccgtgctgcaaagcagcggcctgtactctctgagcagcgtggtcacagtgcctagctctagcctgggcacccagacctacatctgcaatgtgaaccacaagcctagcaacaccaaggtggacaagagagtggaacccaagagctgtatccccgaggacacattcttcccaagcagcgacgtgccctgcgacgtgaagctggtggaaaagagcttcgagacagacaccaacctgaacttccagaacctgagcgtgatcggcttcagaatcctgctgctgaaagtggccggctttaacctgctgatgaccctgcggctgtggtccagc

SEQ ID NO: 36392 - DNA, 1869 bp, synthetic construct
  source 1..1869: mol_type = other DNA
atggccttaccagtgaccgccttgctcctgccgctggccttgctgctccacgccgccaggccggacatccagatgacacagagccctagcagcctgtctgccagcgtgggagacagagtgaccatcacatgcaagagcagccagagcctgctggactccgatggcaagacctacctgaactggtatcagcagaagcccggcaaggcccctaagctgctgatctacctggtgtccaagctggatagcggcgtgcccagcagattttctggcagcggcagcggaaccgacttcaccctgacaatatccagcctccagcctgaggacttcgccacctactactgcttccaaggcacccactttccattcaccttcggccagggcaccaaggtggaaatcaaaagactcgagggacagcctaaggccaatcctaccgtgacactgttccctccaagcagcgaagaactccaggccaacaaggccacacttgtgtgcctgatctccgacttctaccctggggctgtgacagtggcttggaaggccgatggatctcctgtgaaagccggcgtggaaaccaccaagccatccaagcagagcaacaacaaatacgccgccagctcctacctgagcctgacacctgagcagtggaagtcccacagatcctacagctgccaagtgacccacgaaggcagcaccgtggaaaagacagtggcccctacagagtgcagcggcagagccgattgcggctttaccagcgagagctaccagcagggcgtgctgagcgccaccatcctgtacgagatcctgctgggcaaggccaccctgtacgccgtgctggtgtctgccctggtgctgatggctatggtcaagcggaaggacagccggggaagggccaagcgatctggatctggagcaacaaacttctcactactcaaacaagcaggtgacgtggaggagaatcccgggcctactagtatggactggatttggcgcatccttttccttgtcggcgctgctaccggcgcgcattccttcgaagaagtgcagctggttgaatcaggcggaggactggttcagcctggcggatctctgagactgtcttgtgccgccagcggctacaccttcaccagctactggatgaactgggtccgacaggcccctggcaaaggactggaatgggtcggaatgatcgaccccagcgacagcgagacacactacaaccacatcttcaaggaccgcttcaccatcagcgccgacaccagcaagaataccgcctacctccagatgaactccctgagagccgaggacaccgccgtgtactactgcgccagaaacctgtatctgttcggccagggaaccctggtcacagtgtcatctacgcgtgcctctacaaagggaccctccgtgtttcctctggctcccagcagcaagtctacaagcggaggaacagccgctctgggctgcctggtcaaggattactttcccgagcctgtgaccgtgtcctggaatagcggagcactgacaagcggcgtgcacacctttccagccgtgctgcaaagcagcggcctgtactctctgagcagcgtggtcacagtgcctagctctagcctgggcacccagacctacatctgcaatgtgaaccacaagcctagcaacaccaaggtggacaagagagtggaacccaagagctgtatccccgaggacacattcttcccaagccccgagagcagctgcgacgtgaagctggtggaaaagagcttcgagacagacaccaacctgaacttccagaacctgagcgtgatcggcttcagaatcctgctgctgaaagtggccggctttaacctgctgatgaccctgcggctgtggtccagc

SEQ ID NO: 36393 - DNA, 1347 bp, synthetic construct
  source 1..1347: mol_type = other DNA
atggccttaccagtgaccgccttgctcctgccgctggccttgctgctccacgccgccaggccggacatccagatgacacagagccctagcagcctgtctgccagcgtgggagacagagtgaccatcacatgcaagagcagccagagcctgctggactccgatggcaagacctacctgaactggtatcagcagaagcccggcaaggcccctaagctgctgatctacctggtgtccaagctggatagcggcgtgcccagcagattttctggcagcggcagcggaaccgacttcaccctgacaatatccagcctccagcctgaggacttcgccacctactactgcttccaaggcacccactttccattcaccttcggccagggcaccaaggtggaaatcaaaagaggcggaggcggaagtggaggcggaggatctggcggcggaggctctgaagtgcagctggttgaatcaggcggaggactggttcagcctggcggatctctgagactgtcttgtgccgccagcggctacaccttcaccagctactggatgaactgggtccgacaggcccctggcaaaggactggaatgggtcggaatgatcgaccccagcgacagcgagacacactacaaccacatcttcaaggaccgcttcaccatcagcgccgacaccagcaagaataccgcctacctccagatgaactccctgagagccgaggacaccgccgtgtactactgcgccagaaacctgtatctgttcggccagggaaccctggtcacagtgtcatctacgcgtgacggtaacgaggagatgggaggaatcactcaaaccccttacaaagtctcaatttcaggaacaactgttatccttacatgtccccagtatcctggcagcgagatcctttggcagcataacgacaagaatatagggggagatgaagacgataagaatatcggatctgacgaggatcacttgagcctgaaagagttctccgagcttgaacaaagcggatattatgtgtgctatccgcgcgggtcaaagccggaagacgctaacttttacctttatctccgagccagagtgtgcgaaaattgcatggaaatggacgttatgtccgttgctacaatagttatcgtagatatatgcatcacgggtggactgcttctgctggtttattattggtccaagaatagaaaggccaaagctaaacccgtgaccagaggcgctggcgcaggcggaaggcaaaggggacaaaacaaagaacggccaccaccagtgccaaatccagattatgagcctattcggaaaggacagagggacctgtactctggcctgaatcagagaagaatc

SEQ ID NO: 36394 - DNA, 1242 bp, synthetic construct
  source 1..1242: mol_type = other DNA
atggccttaccagtgaccgccttgctcctgccgctggccttgctgctccacgccgccaggccggacatccagatgacacagagccctagcagcctgtctgccagcgtgggagacagagtgaccatcacatgcaagagcagccagagcctgctggactccgatggcaagacctacctgaactggtatcagcagaagcccggcaaggcccctaagctgctgatctacctggtgtccaagctggatagcggcgtgcccagcagattttctggcagcggcagcggaaccgacttcaccctgacaatatccagcctccagcctgaggacttcgccacctactactgcttccaaggcacccactttccattcaccttcggccagggcaccaaggtggaaatcaaaagaggcggaggcggaagtggaggcggaggatctggcggcggaggctctgaagtgcagctggttgaatcaggcggaggactggttcagcctggcggatctctgagactgtcttgtgccgccagcggctacaccttcaccagctactggatgaactgggtccgacaggcccctggcaaaggactggaatgggtcggaatgatcgaccccagcgacagcgagacacactacaaccacatcttcaaggaccgcttcaccatcagcgccgacaccagcaagaataccgcctacctccagatgaactccctgagagccgaggacaccgccgtgtactactgcgccagaaacctgtatctgttcggccagggaaccctggtcacagtgtcatctacgcgtttcaagatccccatcgaggaactggaagatcgggtgttcgtgaactgcaacacctctatcacctgggtggaaggcaccgtgggaacactgctgagcgacatcaccagactggacctcggcaagcggattctggaccctcggggcatctacagatgcaacggcaccgacatctacaaggacaaagaaagcaccgtgcaggtccactacagaatgtgccagtcctgcgtggaactggaccctgctacagtggccggcatcatcgtgaccgatgtgatcgctactctgctgctggctctgggagtgttctgcttcgccggacacgaaacaggcagactgtctggcgctgccgatacacaggccctgctgagaaacgaccaagtgtatcagcccctgcgcgacagagatgatgcccagtattctcacctcggcggcaactgggctagaaacaag

SEQ ID NO: 36395 - DNA, 1272 bp, synthetic construct
  source 1..1272: mol_type = other DNA
atggccttaccagtgaccgccttgctcctgccgctggccttgctgctccacgccgccaggccggacatccagatgacacagagccctagcagcctgtctgccagcgtgggagacagagtgaccatcacatgcaagagcagccagagcctgctggactccgatggcaagacctacctgaactggtatcagcagaagcccggcaaggcccctaagctgctgatctacctggtgtccaagctggatagcggcgtgcccagcagattttctggcagcggcagcggaaccgacttcaccctgacaatatccagcctccagcctgaggacttcgccacctactactgcttccaaggcacccactttccattcaccttcggccagggcaccaaggtggaaatcaaaagaggcggaggcggaagtggaggcggaggatctggcggcggaggctctgaagtgcagctggttgaatcaggcggaggactggttcagcctggcggatctctgagactgtcttgtgccgccagcggctacaccttcaccagctactggatgaactgggtccgacaggcccctggcaaaggactggaatgggtcggaatgatcgaccccagcgacagcgagacacactacaaccacatcttcaaggaccgcttcaccatcagcgccgacaccagcaagaataccgcctacctccagatgaactccctgagagccgaggacaccgccgtgtactactgcgccagaaacctgtatctgttcggccagggaaccctggtcacagtgtcatctacgcgtcagagcatcaagggcaaccacctggtcaaggtgtacgactaccaagaggacggcagcgtgctgctgacatgtgatgccgaggccaagaacatcacctggtttaaggacggcaagatgatcggcttcctgaccgaggacaagaagaagtggaacctgggcagcaacgctaaggaccccagaggcatgtatcagtgcaagggcagccagaacaagagcaagcccctccaggtgtactaccggatgtgccagaactgcatcgagctgaacgccgctaccatcagcggctttctgttcgccgagatcgtgtccatcttcgtgctggccgtgggcgtgtactttatcgctggacaggatggcgtgcggcagagcagagcttccgataagcaaaccctgctgcctaacgaccagctgtaccagcctctgaaggacagagaggacgaccagtacagccacctccagggcaatcagctgagaagaaac

SEQ ID NO: 36396 - DNA, 1221 bp, synthetic construct
  source 1..1221: mol_type = other DNA
atggccttaccagtgaccgccttgctcctgccgctggccttgctgctccacgccgccaggccggacatccagatgacacagagccctagcagcctgtctgccagcgtgggagacagagtgaccatcacatgcaagagcagccagagcctgctggactccgatggcaagacctacctgaactggtatcagcagaagcccggcaaggcccctaagctgctgatctacctggtgtccaagctggatagcggcgtgcccagcagattttctggcagcggcagcggaaccgacttcaccctgacaatatccagcctccagcctgaggacttcgccacctactactgcttccaaggcacccactttccattcaccttcggccagggcaccaaggtggaaatcaaaagaggcggaggcggaagtggaggcggaggatctggcggcggaggctctgaagtgcagctggttgaatcaggcggaggactggttcagcctggcggatctctgagactgtcttgtgccgccagcggctacaccttcaccagctactggatgaactgggtccgacaggcccctggcaaaggactggaatgggtcggaatgatcgaccccagcgacagcgagacacactacaaccacatcttcaaggaccgcttcaccatcagcgccgacaccagcaagaataccgcctacctccagatgaactccctgagagccgaggacaccgccgtgtactactgcgccagaaacctgtatctgttcggccagggaaccctggtcacagtgtcatctacgcgtcagagttttgggttgttggaccctaaattgtgctatctgttggacggaatcctgttcatttacggagtgatcctgaccgcattgttcctgcgggttaagttttccagatccgcagacgcacccgcttaccaacaagggcagaaccaactctacaatgaacttaatttggggcggagggaagagtacgacgttctggacaaaaggaggggacgagatcccgagatgggcggaaagcctcagcgaaggaagaatccgcaagaggggctttataacgaactccagaaagataaaatggcagaagcctatagtgagattgggatgaagggagaaaggaggaggggtaaaggtcacgatgggttgtaccaaggattgagcacagccactaaagatacctatgatgcgctccacatgcaggccctgccgccaaga

SEQ ID NO: 36397 - DNA, 1506 bp, synthetic construct
  source 1..1506: mol_type = other DNA
atggccttaccagtgaccgccttgctcctgccgctggccttgctgctccacgccgccaggccggacatccagatgacacagagccctagcagcctgtctgccagcgtgggagacagagtgaccatcacatgcaagagcagccagagcctgctggactccgatggcaagacctacctgaactggtatcagcagaagcccggcaaggcccctaagctgctgatctacctggtgtccaagctggatagcggcgtgcccagcagattttctggcagcggcagcggaaccgacttcaccctgacaatatccagcctccagcctgaggacttcgccacctactactgcttccaaggcacccactttccattcaccttcggccagggcaccaaggtggaaatcaaaagaggcggaggcggaagtggaggcggaggatctggcggcggaggctctgaagtgcagctggttgaatcaggcggaggactggttcagcctggcggatctctgagactgtcttgtgccgccagcggctacaccttcaccagctactggatgaactgggtccgacaggcccctggcaaaggactggaatgggtcggaatgatcgaccccagcgacagcgagacacactacaaccacatcttcaaggaccgcttcaccatcagcgccgacaccagcaagaataccgcctacctccagatgaactccctgagagccgaggacaccgccgtgtactactgcgccagaaacctgtatctgttcggccagggaaccctggtcacagtgtcatctacgcgtggaatgaggactgaggatcttcccaaagctgtcgtctttctcgaaccccaatggtatcgggtgctcgaaaaagactctgtgacactgaaatgccaaggggcctactctcccgaggacaactccacacagtggtttcataatgagtccctcatcagctctcaggccagctcttatttcattgatgccgctacagtggacgactccggcgagtatcggtgtcagaccaatctgtctacactgtctgaccccgtgcagcttgaggtccacattggatggttgctcttgcaagccccacgctgggttttcaaagaggaagatccaatccatctgcggtgccacagctggaaaaacaccgctctccacaaagtcacatacctgcaaaatggcaaaggacgcaaatacttccatcacaattccgatttttacattccgaaggctaccctgaaagacagcggcagctatttctgccggggactcgtcggctccaagaatgtgtcctccgaaaccgtgaatatcacgattacccaaggactggctgtgcctacaatctctagcttctttccgcctggataccaagtctccttctgtcttgtgatggtcctcctgtttgctgtggacacaggactgtacttttccgtgaaaacgaacatccgcagctccacacgcgattggaaagatcacaagtttaaatggcgcaaagatccccaggacaag

SEQ ID NO: 36398 - DNA, 1431 bp, synthetic construct
  source 1..1431: mol_type = other DNA
atggccttaccagtgaccgccttgctcctgccgctggccttgctgctccacgccgccaggccggacatccagatgacacagagccctagcagcctgtctgccagcgtgggagacagagtgaccatcacatgcaagagcagccagagcctgctggactccgatggcaagacctacctgaactggtatcagcagaagcccggcaaggcccctaagctgctgatctacctggtgtccaagctggatagcggcgtgcccagcagattttctggcagcggcagcggaaccgacttcaccctgacaatatccagcctccagcctgaggacttcgccacctactactgcttccaaggcacccactttccattcaccttcggccagggcaccaaggtggaaatcaaaagaggcggaggcggaagtggaggcggaggatctggcggcggaggctctgaagtgcagctggttgaatcaggcggaggactggttcagcctggcggatctctgagactgtcttgtgccgccagcggctacaccttcaccagctactggatgaactgggtccgacaggcccctggcaaaggactggaatgggtcggaatgatcgaccccagcgacagcgagacacactacaaccacatcttcaaggaccgcttcaccatcagcgccgacaccagcaagaataccgcctacctccagatgaactccctgagagccgaggacaccgccgtgtactactgcgccagaaacctgtatctgttcggccagggaaccctggtcacagtgtcatctacgcgtggaatgaggactgaggatcttcccaaagctgtcgtctttctcgaaccccaatggtatcgggtgctcgaaaaagactctgtgacactgaaatgccaaggggcctactctcccgaggacaactccacacagtggtttcataatgagtccctcatcagctctcaggccagctcttatttcattgatgccgctacagtggacgactccggcgagtatcggtgtcagaccaatctgtctacactgtctgaccccgtgcagcttgaggtccacattggatggttgctcttgcaagccccacgctgggttttcaaagaggaagatccaatccatctgcggtgccacagctggaaaaacaccgctctccacaaagtcacatacctgcaaaatggcaaaggacgcaaatacttccatcacaattccgatttttacattccgaaggctaccctgaaagacagcggcagctatttctgccggggactcgtcggctccaagaatgtgtcctccgaaaccgtgaatatcacgattacccaaggactggctgtgcctacaatctctagcttctttccgcctggataccaagtctccttctgtcttgtgatggtcctcctgtttgctgtggacacaggactgtacttttccgtg

SEQ ID NO: 36399 - DNA, 1434 bp, synthetic construct
  source 1..1434: mol_type = other DNA
atggccttaccagtgaccgccttgctcctgccgctggccttgctgctccacgccgccaggccggacatccagatgacacagagccctagcagcctgtctgccagcgtgggagacagagtgaccatcacatgcaagagcagccagagcctgctggactccgatggcaagacctacctgaactggtatcagcagaagcccggcaaggcccctaagctgctgatctacctggtgtccaagctggatagcggcgtgcccagcagattttctggcagcggcagcggaaccgacttcaccctgacaatatccagcctccagcctgaggacttcgccacctactactgcttccaaggcacccactttccattcaccttcggccagggcaccaaggtggaaatcaaaagaggcggaggcggaagtggaggcggaggatctggcggcggaggctctgaagtgcagctggttgaatcaggcggaggactggttcagcctggcggatctctgagactgtcttgtgccgccagcggctacaccttcaccagctactggatgaactgggtccgacaggcccctggcaaaggactggaatgggtcggaatgatcgaccccagcgacagcgagacacactacaaccacatcttcaaggaccgcttcaccatcagcgccgacaccagcaagaataccgcctacctccagatgaactccctgagagccgaggacaccgccgtgtactactgcgccagaaacctgtatctgttcggccagggaaccctggtcacagtgtcatctacgcgtggaatgaggactgaggatcttcccaaagctgtcgtctttctcgaaccccaatggtatcgggtgctcgaaaaagactctgtgacactgaaatgccaaggggcctactctcccgaggacaactccacacagtggtttcataatgagtccctcatcagctctcaggccagctcttatttcattgatgccgctacagtggacgactccggcgagtatcggtgtcagaccaatctgtctacactgtctgaccccgtgcagcttgaggtccacattggatggttgctcttgcaagccccacgctgggttttcaaagaggaagatccaatccatctgcggtgccacagctggaaaaacaccgctctccacaaagtcacatacctgcaaaatggcaaaggacgcaaatacttccatcacaattccgatttttacattccgaaggctaccctgaaagacagcggcagctatttctgccggggactcgtcggctccaagaatgtgtcctccgaaaccgtgaatatcacgattacccaaggactggctgtgcctacaatctctagcttctttccgcctggataccaagtctccttctgtcttgtgatggtcctcctgtttgctgtggacacaggactgtacttttccgtgaaa

SEQ ID NO: 36400 - DNA, 2166 bp, synthetic construct
  source 1..2166: mol_type = other DNA
atggccttaccagtgaccgccttgctcctgccgctggccttgctgctccacgccgccaggccggacatccagatgacacagagccctagcagcctgtctgccagcgtgggagacagagtgaccatcacatgcaagagcagccagagcctgctggactccgatggcaagacctacctgaactggtatcagcagaagcccggcaaggcccctaagctgctgatctacctggtgtccaagctggatagcggcgtgcccagcagattttctggcagcggcagcggaaccgacttcaccctgacaatatccagcctccagcctgaggacttcgccacctactactgcttccaaggcacccactttccattcaccttcggccagggcaccaaggtggaaatcaaaagactcgagggacagcctaaggccaatcctaccgtgacactgttccctccaagcagcgaagaactccaggccaacaaggccacacttgtgtgcctgatctccgacttctaccctggggctgtgacagtggcttggaaggccgatggatctcctgtgaaagccggcgtggaaaccaccaagccatccaagcagagcaacaacaaatacgccgccagctcctacctgagcctgacacctgagcagtggaagtcccacagatcctacagctgccaagtgacccacgaaggcagcaccgtggaaaagacagtggcccctacagagtgcagcggatcccagagcttcggcctgctggaccccaagctgtgctacctgctggatggcatcctgttcatctacggcgtgatcctgaccgccctgttcctgagagtgaagttcagcagaagcgccgacgcccctgcctaccagcagggacagaaccaactgtacaacgagctgaacctgggcagacgggaagagtacgacgtgctggacaagcggagaggcagggaccctgagatgggcggaaagccccagcggagaaagaacccccaggaaggactgtataacgaactccagaaagacaagatggccgaagcctacagcgagatcggcatgaagggcgagcggagaagaggcaagggccacgatggcctgtaccagggcctgagcaccgccaccaaggacacctatgacgccctgcacatgcaggccctgcctccaagaagggccaagcgatctggatctggagcaacaaacttctcactactcaaacaagcaggtgacgtggaggagaatcccgggcctactagtatggactggatttggcgcatccttttccttgtcggcgctgctaccggcgcgcattccttcgaagaagtgcagctggttgaatcaggcggaggactggttcagcctggcggatctctgagactgtcttgtgccgccagcggctacaccttcaccagctactggatgaactgggtccgacaggcccctggcaaaggactggaatgggtcggaatgatcgaccccagcgacagcgagacacactacaaccacatcttcaaggaccgcttcaccatcagcgccgacaccagcaagaataccgcctacctccagatgaactccctgagagccgaggacaccgccgtgtactactgcgccagaaacctgtatctgttcggccagggaaccctggtcacagtgtcatctacgcgtgcctctacaaagggaccctccgtgtttcctctggctcccagcagcaagtctacaagcggaggaacagccgctctgggctgcctggtcaaggattactttcccgagcctgtgaccgtgtcctggaatagcggagcactgacaagcggcgtgcacacctttccagccgtgctgcaaagcagcggcctgtactctctgagcagcgtggtcacagtgcctagctctagcctgggcacccagacctacatctgcaatgtgaaccacaagcctagcaacaccaaggtggacaagagagtggaacccaagagctgtggtaccatcactcaaggtttggcagtgtcaaccatctcatcattctttccacctggctaccaagtgtccttctgcctggtcatggtgctgctgttcgccgtggataccggcctgtacttcagcgtcaagaccaacatccggtccagcaccagagactggaaggaccacaagttcaagtggcggaaggaccctcaggacaag

SEQ ID NO: 36401 - DNA, 2211 bp, synthetic construct
  source 1..2211: mol_type = other DNA
atggccttaccagtgaccgccttgctcctgccgctggccttgctgctccacgccgccaggccggacatccagatgacacagagccctagcagcctgtctgccagcgtgggagacagagtgaccatcacatgcaagagcagccagagcctgctggactccgatggcaagacctacctgaactggtatcagcagaagcccggcaaggcccctaagctgctgatctacctggtgtccaagctggatagcggcgtgcccagcagattttctggcagcggcagcggaaccgacttcaccctgacaatatccagcctccagcctgaggacttcgccacctactactgcttccaaggcacccactttccattcaccttcggccagggcaccaaggtggaaatcaaaagactcgaggacctgaagaacgtgttcccacctgaggtggccgtgttcgagcctagcgaggccgagatcagccacacccagaaagccaccctcgtgtgcctggctaccggcttctaccccgaccatgtggaactgtcttggtgggtcaacggcaaagaggtgcacagcggcgtgtctaccgacccccagccactgaaagaacagcccgccctgaacgacagccggtactgcctgagcagcagactgagagtgtccgccaccttctggcagaacccccggaaccacttcagatgccaggtgcagttctacggcctgagcgagaacgacgagtggacccaggacagagccaagcccgtgacccagatcgtgtctgccgaagcctggggcagagccgattgcggatcccagagcttcggcctgctggaccccaagctgtgctacctgctggatggcatcctgttcatctacggcgtgatcctgaccgccctgttcctgagagtgaagttcagcagaagcgccgacgcccctgcctaccagcagggacagaaccaactgtacaacgagctgaacctgggcagacgggaagagtacgacgtgctggacaagcggagaggcagggaccctgagatgggcggaaagccccagcggagaaagaacccccaggaaggactgtataacgaactccagaaagacaagatggccgaagcctacagcgagatcggcatgaagggcgagcggagaagaggcaagggccacgatggcctgtaccagggcctgagcaccgccaccaaggacacctatgacgccctgcacatgcaggccctgcctccaagaagggccaagcgatctggatctggagcaacaaacttctcactactcaaacaagcaggtgacgtggaggagaatcccgggcctactagtatggactggatttggcgcatccttttccttgtcggcgctgctaccggcgcgcattccttcgaagaagtgcagctggttgaatcaggcggaggactggttcagcctggcggatctctgagactgtcttgtgccgccagcggctacaccttcaccagctactggatgaactgggtccgacaggcccctggcaaaggactggaatgggtcggaatgatcgaccccagcgacagcgagacacactacaaccacatcttcaaggaccgcttcaccatcagcgccgacaccagcaagaataccgcctacctccagatgaactccctgagagccgaggacaccgccgtgtactactgcgccagaaacctgtatctgttcggccagggaaccctggtcacagtgtcatctacgcgtatccagaaccctgatcctgccgtgtaccagctgcgggatagcaagagcagcgacaagagcgtgtgtctgttcaccgacttcgacagccagaccaacgtgtcccagagcaaggactccgacgtgtacatcaccgataagaccgtgctggacatgcggagcatggacttcaagagcaactccgccgtggcctggtccaacaagtccgatttcgcctgcgccaacgccttcaacaacagcattatccccgaggacacattcttcccaagccccgagagcagctgcggtaccatcactcaaggtttggcagtgtcaaccatctcatcattctttccacctggctaccaagtgtccttctgcctggtcatggtgctgctgttcgccgtggataccggcctgtacttcagcgtcaagaccaacatccggtccagcaccagagactggaaggaccacaagttcaagtggcggaaggaccctcaggacaag

SEQ ID NO: 36402 - DNA, 2136 bp, synthetic construct
  source 1..2136: mol_type = other DNA
atggccttaccagtgaccgccttgctcctgccgctggccttgctgctccacgccgccaggccggacatccagatgacacagagccctagcagcctgtctgccagcgtgggagacagagtgaccatcacatgcaagagcagccagagcctgctggactccgatggcaagacctacctgaactggtatcagcagaagcccggcaaggcccctaagctgctgatctacctggtgtccaagctggatagcggcgtgcccagcagattttctggcagcggcagcggaaccgacttcaccctgacaatatccagcctccagcctgaggacttcgccacctactactgcttccaaggcacccactttccattcaccttcggccagggcaccaaggtggaaatcaaaagactcgaggacctgaagaacgtgttcccacctgaggtggccgtgttcgagcctagcgaggccgagatcagccacacccagaaagccaccctcgtgtgcctggctaccggcttctaccccgaccatgtggaactgtcttggtgggtcaacggcaaagaggtgcacagcggcgtgtctaccgacccccagccactgaaagaacagcccgccctgaacgacagccggtactgcctgagcagcagactgagagtgtccgccaccttctggcagaacccccggaaccacttcagatgccaggtgcagttctacggcctgagcgagaacgacgagtggacccaggacagagccaagcccgtgacccagatcgtgtctgccgaagcctggggcagagccgattgcggatcccagagcttcggcctgctggaccccaagctgtgctacctgctggatggcatcctgttcatctacggcgtgatcctgaccgccctgttcctgagagtgaagttcagcagaagcgccgacgcccctgcctaccagcagggacagaaccaactgtacaacgagctgaacctgggcagacgggaagagtacgacgtgctggacaagcggagaggcagggaccctgagatgggcggaaagccccagcggagaaagaacccccaggaaggactgtataacgaactccagaaagacaagatggccgaagcctacagcgagatcggcatgaagggcgagcggagaagaggcaagggccacgatggcctgtaccagggcctgagcaccgccaccaaggacacctatgacgccctgcacatgcaggccctgcctccaagaagggccaagcgatctggatctggagcaacaaacttctcactactcaaacaagcaggtgacgtggaggagaatcccgggcctactagtatggactggatttggcgcatccttttccttgtcggcgctgctaccggcgcgcattccttcgaagaagtgcagctggttgaatcaggcggaggactggttcagcctggcggatctctgagactgtcttgtgccgccagcggctacaccttcaccagctactggatgaactgggtccgacaggcccctggcaaaggactggaatgggtcggaatgatcgaccccagcgacagcgagacacactacaaccacatcttcaaggaccgcttcaccatcagcgccgacaccagcaagaataccgcctacctccagatgaactccctgagagccgaggacaccgccgtgtactactgcgccagaaacctgtatctgttcggccagggaaccctggtcacagtgtcatctacgcgtatccagaaccctgatcctgccgtgtaccagctgcgggatagcaagagcagcgacaagagcgtgtgtctgttcaccgacttcgacagccagaccaacgtgtcccagagcaaggactccgacgtgtacatcaccgataagaccgtgctggacatgcggagcatggacttcaagagcaactccgccgtggcctggtccaacaagtccgatttcgcctgcgccaacgccttcaacaacagcattatccccgaggacacattcttcccaagccccgagagcagctgcggtaccatcactcaaggtttggcagtgtcaaccatctcatcattctttccacctggctaccaagtgtccttctgcctggtcatggtgctgctgttcgccgtggataccggcctgtacttcagcgtc

SEQ ID NO: 36403 - DNA, 2139 bp, synthetic construct
  source 1..2139: mol_type = other DNA
atggccttaccagtgaccgccttgctcctgccgctggccttgctgctccacgccgccaggccggacatccagatgacacagagccctagcagcctgtctgccagcgtgggagacagagtgaccatcacatgcaagagcagccagagcctgctggactccgatggcaagacctacctgaactggtatcagcagaagcccggcaaggcccctaagctgctgatctacctggtgtccaagctggatagcggcgtgcccagcagattttctggcagcggcagcggaaccgacttcaccctgacaatatccagcctccagcctgaggacttcgccacctactactgcttccaaggcacccactttccattcaccttcggccagggcaccaaggtggaaatcaaaagactcgaggacctgaagaacgtgttcccacctgaggtggccgtgttcgagcctagcgaggccgagatcagccacacccagaaagccaccctcgtgtgcctggctaccggcttctaccccgaccatgtggaactgtcttggtgggtcaacggcaaagaggtgcacagcggcgtgtctaccgacccccagccactgaaagaacagcccgccctgaacgacagccggtactgcctgagcagcagactgagagtgtccgccaccttctggcagaacccccggaaccacttcagatgccaggtgcagttctacggcctgagcgagaacgacgagtggacccaggacagagccaagcccgtgacccagatcgtgtctgccgaagcctggggcagagccgattgcggatcccagagcttcggcctgctggaccccaagctgtgctacctgctggatggcatcctgttcatctacggcgtgatcctgaccgccctgttcctgagagtgaagttcagcagaagcgccgacgcccctgcctaccagcagggacagaaccaactgtacaacgagctgaacctgggcagacgggaagagtacgacgtgctggacaagcggagaggcagggaccctgagatgggcggaaagccccagcggagaaagaacccccaggaaggactgtataacgaactccagaaagacaagatggccgaagcctacagcgagatcggcatgaagggcgagcggagaagaggcaagggccacgatggcctgtaccagggcctgagcaccgccaccaaggacacctatgacgccctgcacatgcaggccctgcctccaagaagggccaagcgatctggatctggagcaacaaacttctcactactcaaacaagcaggtgacgtggaggagaatcccgggcctactagtatggactggatttggcgcatccttttccttgtcggcgctgctaccggcgcgcattccttcgaagaagtgcagctggttgaatcaggcggaggactggttcagcctggcggatctctgagactgtcttgtgccgccagcggctacaccttcaccagctactggatgaactgggtccgacaggcccctggcaaaggactggaatgggtcggaatgatcgaccccagcgacagcgagacacactacaaccacatcttcaaggaccgcttcaccatcagcgccgacaccagcaagaataccgcctacctccagatgaactccctgagagccgaggacaccgccgtgtactactgcgccagaaacctgtatctgttcggccagggaaccctggtcacagtgtcatctacgcgtatccagaaccctgatcctgccgtgtaccagctgcgggatagcaagagcagcgacaagagcgtgtgtctgttcaccgacttcgacagccagaccaacgtgtcccagagcaaggactccgacgtgtacatcaccgataagaccgtgctggacatgcggagcatggacttcaagagcaactccgccgtggcctggtccaacaagtccgatttcgcctgcgccaacgccttcaacaacagcattatccccgaggacacattcttcccaagccccgagagcagctgcggtaccatcactcaaggtttggcagtgtcaaccatctcatcattctttccacctggctaccaagtgtccttctgcctggtcatggtgctgctgttcgccgtggataccggcctgtacttcagcgtcaag

SEQ ID NO: 36404 - DNA, 2142 bp, synthetic construct
  source 1..2142: mol_type = other DNA
atggccttaccagtgaccgccttgctcctgccgctggccttgctgctccacgccgccaggccggacatccagatgacacagagccctagcagcctgtctgccagcgtgggagacagagtgaccatcacatgcaagagcagccagagcctgctggactccgatggcaagacctacctgaactggtatcagcagaagcccggcaaggcccctaagctgctgatctacctggtgtccaagctggatagcggcgtgcccagcagattttctggcagcggcagcggaaccgacttcaccctgacaatatccagcctccagcctgaggacttcgccacctactactgcttccaaggcacccactttccattcaccttcggccagggcaccaaggtggaaatcaaaagactcgaggacctgaagaacgtgttcccacctgaggtggccgtgttcgagcctagcgaggccgagatcagccacacccagaaagccaccctcgtgtgcctggctaccggcttctaccccgaccatgtggaactgtcttggtgggtcaacggcaaagaggtgcacagcggcgtgtctaccgacccccagccactgaaagaacagcccgccctgaacgacagccggtactgcctgagcagcagactgagagtgtccgccaccttctggcagaacccccggaaccacttcagatgccaggtgcagttctacggcctgagcgagaacgacgagtggacccaggacagagccaagcccgtgacccagatcgtgtctgccgaagcctggggcagagccgattgcggatcccagagcttcggcctgctggaccccaagctgtgctacctgctggatggcatcctgttcatctacggcgtgatcctgaccgccctgttcctgagagtgaagttcagcagaagcgccgacgcccctgcctaccagcagggacagaaccaactgtacaacgagctgaacctgggcagacgggaagagtacgacgtgctggacaagcggagaggcagggaccctgagatgggcggaaagccccagcggagaaagaacccccaggaaggactgtataacgaactccagaaagacaagatggccgaagcctacagcgagatcggcatgaagggcgagcggagaagaggcaagggccacgatggcctgtaccagggcctgagcaccgccaccaaggacacctatgacgccctgcacatgcaggccctgcctccaagaagggccaagcgatctggatctggagcaacaaacttctcactactcaaacaagcaggtgacgtggaggagaatcccgggcctactagtatggactggatttggcgcatccttttccttgtcggcgctgctaccggcgcgcattccttcgaagaagtgcagctggttgaatcaggcggaggactggttcagcctggcggatctctgagactgtcttgtgccgccagcggctacaccttcaccagctactggatgaactgggtccgacaggcccctggcaaaggactggaatgggtcggaatgatcgaccccagcgacagcgagacacactacaaccacatcttcaaggaccgcttcaccatcagcgccgacaccagcaagaataccgcctacctccagatgaactccctgagagccgaggacaccgccgtgtactactgcgccagaaacctgtatctgttcggccagggaaccctggtcacagtgtcatctacgcgtatccagaaccctgatcctgccgtgtaccagctgcgggatagcaagagcagcgacaagagcgtgtgtctgttcaccgacttcgacagccagaccaacgtgtcccagagcaaggactccgacgtgtacatcaccgataagaccgtgctggacatgcggagcatggacttcaagagcaactccgccgtggcctggtccaacaagtccgatttcgcctgcgccaacgccttcaacaacagcattatccccgaggacacattcttcccaagccccgagagcagctgcggtaccatcactcaaggtttggcagtgtcaaccatctcatcattctttccacctggctaccaagtgtccttctgcctggtcatggtgctgctgttcgccgtggataccggcctgtacttcagcgtcaagacc

SEQ ID NO: 36405 - DNA, 1953 bp, synthetic construct
  source 1..1953: mol_type = other DNA
atggccttaccagtgaccgccttgctcctgccgctggccttgctgctccacgccgccaggccggacatccagatgacacagagccctagcagcctgtctgccagcgtgggagacagagtgaccatcacatgcaagagcagccagagcctgctggactccgatggcaagacctacctgaactggtatcagcagaagcccggcaaggcccctaagctgctgatctacctggtgtccaagctggatagcggcgtgcccagcagattttctggcagcggcagcggaaccgacttcaccctgacaatatccagcctccagcctgaggacttcgccacctactactgcttccaaggcacccactttccattcaccttcggccagggcaccaaggtggaaatcaaaagactcgagggacagcctaaggccaatcctaccgtgacactgttccctccaagcagcgaagaactccaggccaacaaggccacacttgtgtgcctgatctccgacttctaccctggggctgtgacagtggcttggaaggccgatggatctcctgtgaaagccggcgtggaaaccaccaagccatccaagcagagcaacaacaaatacgccgccagctcctacctgagcctgacacctgagcagtggaagtcccacagatcctacagctgccaagtgacccacgaaggcagcaccgtggaaaagacagtggcccctacagagtgcagcggatccctgggagagcctcagctgtgctatatcctggacgccatcctgtttctgtacggcatcgtgctgaccctgctgtactgccggctgaagatccaagtgcggaaggccgccatcaccagctacgagaaatccgacggcgtgtacaccggcctgagcaccagaaatcaagagacatacgagacactgaagcacgaaaagcctccacaaagggccaagcgatctggatctggagcaacaaacttctcactactcaaacaagcaggtgacgtggaggagaatcccgggcctactagtatggactggatttggcgcatccttttccttgtcggcgctgctaccggcgcgcattccttcgaagaagtgcagctggttgaatcaggcggaggactggttcagcctggcggatctctgagactgtcttgtgccgccagcggctacaccttcaccagctactggatgaactgggtccgacaggcccctggcaaaggactggaatgggtcggaatgatcgaccccagcgacagcgagacacactacaaccacatcttcaaggaccgcttcaccatcagcgccgacaccagcaagaataccgcctacctccagatgaactccctgagagccgaggacaccgccgtgtactactgcgccagaaacctgtatctgttcggccagggaaccctggtcacagtgtcatctacgcgtgcctctacaaagggaccctccgtgtttcctctggctcccagcagcaagtctacaagcggaggaacagccgctctgggctgcctggtcaaggattactttcccgagcctgtgaccgtgtcctggaatagcggagcactgacaagcggcgtgcacacctttccagccgtgctgcaaagcagcggcctgtactctctgagcagcgtggtcacagtgcctagctctagcctgggcacccagacctacatctgcaatgtgaaccacaagcctagcaacaccaaggtggacaagagagtggaacccaagagctgtggtaccctcggagaaccacagctctgttacattctggatgctatcctgttcctctatgggatcgtcctgacactcctgtattgcagactcaaaattcaagttcgcaaagccgccattacctcttacgagaagagtgatggggtgtacacaggactgtctacccggaatcaagaaacctacgaaaccctcaaacatgagaagccacctcagtaa

SEQ ID NO: 36406 - DNA, 1860 bp, synthetic construct
  source 1..1860: mol_type = other DNA
atggccttaccagtgaccgccttgctcctgccgctggccttgctgctccacgccgccaggccggacatccagatgacacagagccctagcagcctgtctgccagcgtgggagacagagtgaccatcacatgcaagagcagccagagcctgctggactccgatggcaagacctacctgaactggtatcagcagaagcccggcaaggcccctaagctgctgatctacctggtgtccaagctggatagcggcgtgcccagcagattttctggcagcggcagcggaaccgacttcaccctgacaatatccagcctccagcctgaggacttcgccacctactactgcttccaaggcacccactttccattcaccttcggccagggcaccaaggtggaaatcaaaagactcgaggacctgaagaacgtgttcccacctgaggtggccgtgttcgagcctagcgaggccgagatcagccacacccagaaagccaccctcgtgtgcctggctaccggcttctaccccgaccatgtggaactgtcttggtgggtcaacggcaaagaggtgcacagcggcgtgtgtaccgacccccagccactgaaagaacagcccgccctgaacgacagccggtactgcctgagcagcagactgagagtgtccgccaccttctggcagaacccccggaaccacttcagatgccaggtgcagttctacggcctgagcgagaacgacgagtggacccaggacagagccaagcccgtgacccagatcgtgtctgccgaagcctggggcagagccgattgcggctttaccagcgagagctaccagcagggcgtgctgagcgcctactacatgtacttgttgctgctgctgaagtccgtggtgtacttcgccatcatcacatgctgcctgctgcggagaaccgccttctgctgcaacggcgagaagtctagggccaagcgatctggatctggagcaacaaacttctcactactcaaacaagcaggtgacgtggaggagaatcccgggcctactagtatggactggatttggcgcatccttttccttgtcggcgctgctaccggcgcgcattccttcgaagaagtgcagctggttgaatcaggcggaggactggttcagcctggcggatctctgagactgtcttgtgccgccagcggctacaccttcaccagctactggatgaactgggtccgacaggcccctggcaaaggactggaatgggtcggaatgatcgaccccagcgacagcgagacacactacaaccacatcttcaaggaccgcttcaccatcagcgccgacaccagcaagaataccgcctacctccagatgaactccctgagagccgaggacaccgccgtgtactactgcgccagaaacctgtatctgttcggccagggaaccctggtcacagtgtcatctacgcgtatccagaaccctgatcctgccgtgtaccagctgcgggatagcaagagcagcgacaagagcgtgtgtctgttcaccgacttcgacagccagaccaacgtgtcccagagcaaggactccgacgtgtacatcaccgataagtgcgtgctggacatgcggagcatggacttcaagagcaactccgccgtggcctggtccaacaagtccgatttcgcctgcgccaacgccttcaacaacagcattatccccgaggacacattcttcccaagccccgagagcagctgcgacgtgaagctggtggaaaagagcttcgagacagacaccaacctgaacttccagaacctgagcgtgatcggcttcagaatcctgctgctgaaagtggccggctttaacctgctgatgaccctgcggctgtggtccagc

SEQ ID NO: 36407 - DNA, 1881 bp, synthetic construct
  source 1..1881: mol_type = other DNA
atggccttaccagtgaccgccttgctcctgccgctggccttgctgctccacgccgccaggccggacatccagatgacacagagccctagcagcctgtctgccagcgtgggagacagagtgaccatcacatgcaagagcagccagagcctgctggactccgatggcaagacctacctgaactggtatcagcagaagcccggcaaggcccctaagctgctgatctacctggtgtccaagctggatagcggcgtgcccagcagattttctggcagcggcagcggaaccgacttcaccctgacaatatccagcctccagcctgaggacttcgccacctactactgcttccaaggcacccactttccattcaccttcggccagggcaccaaggtggaaatcaaaagactcgaggacaagcagctggacgccgacgtgtcccccaagcctaccatcttcctgccctctatcgccgagacaaagctccagaaggccggcacctacctgtgcctgctggaaaagttcttcccagatgtgattaagatccactggcaggaaaagaagtccaacaccatcctgggcagccaggaaggcaacaccatgaagaccaacgacacctacatgaagttcagctggctgaccgtgcccgagaagtccctggacaaagaacacagatgcatcgtgcggcacgaaaacaacaagaacggcgtggaccaggaaatcatcttcccacccatcaagaccgatgtgattacaatggaccccaaggacaactgctccaaggacgccaacgataccctgctgctccagctgaccaacaccagcgcctactacatgtacgagatcctgctgggcaaggccaccctgtacgccgtgctggtgtctgccctggtgctgatggctatggtcaagcggaaggacagccggggaagggccaagcgatctggatctggagcaacaaacttctcactactcaaacaagcaggtgacgtggaggagaatcccgggcctactagtatggactggatttggcgcatccttttccttgtcggcgctgctaccggcgcgcattccttcgaagaagtgcagctggttgaatcaggcggaggactggttcagcctggcggatctctgagactgtcttgtgccgccagcggctacaccttcaccagctactggatgaactgggtccgacaggcccctggcaaaggactggaatgggtcggaatgatcgaccccagcgacagcgagacacactacaaccacatcttcaaggaccgcttcaccatcagcgccgacaccagcaagaataccgcctacctccagatgaactccctgagagccgaggacaccgccgtgtactactgcgccagaaacctgtatctgttcggccagggaaccctggtcacagtgtcatctacgcgtagccagcctcacaccaagcccagcgtgttcgtgatgaagaacggcaccaacgtggcctgcctcgtgaaagagttctaccccaaggacatcaggatcaacctggtgtccagcaagaagatcaccgagttcgaccccgccatcgtgatctcccccagcggcaagtacaacgccgtgaagctggggaagtatgaggacagcaacagcgtgacctgctccgtgcagcacgacaacaagaccgtgcacagcaccgactttgaagtgaaaaccgactccaccgaccacgtgaagcccaaagagacagagaacaccaagcagcccagcaagagctgccacaagcccaaggccatcgtgcacaccgagaaagtgaacatgatgagcctgaccgtgatcggcttcagaatcctgctgctgaaagtggccggctttaacctgctgatgaccctgcggctgtggtccagctaa

SEQ ID NO: 36408 - DNA, 1881 bp, synthetic construct
  source 1..1881: mol_type = other DNA
atggccttaccagtgaccgccttgctcctgccgctggccttgctgctccacgccgccaggccggacatccagatgacacagagccctagcagcctgtctgccagcgtgggagacagagtgaccatcacatgcaagagcagccagagcctgctggactccgatggcaagacctacctgaactggtatcagcagaagcccggcaaggcccctaagctgctgatctacctggtgtccaagctggatagcggcgtgcccagcagattttctggcagcggcagcggaaccgacttcaccctgacaatatccagcctccagcctgaggacttcgccacctactactgcttccaaggcacccactttccattcaccttcggccagggcaccaaggtggaaatcaaaagactcgaggacaagcagctggacgccgacgtgtcccccaagcctaccatcttcctgccctctatcgccgagacaaagctccagaaggccggcacctacctgtgcctgctggaaaagttcttcccagatgtgattaagatccactggcaggaaaagaagtccaacaccatcctgggcagccaggaaggcaacaccatgaagaccaacgacacctacatgaagttcagctggctgaccgtgcccgagaagtccctggacaaagaacacagatgcatcgtgcggcacgaaaacaacaagaacggcgtggaccaggaaatcatcttcccacccatcaagaccgatgtgattacaatggaccccaaggacaactgctccaaggacgccaacgataccctgctgctccagctgaccaacaccagcgccaccatcctgtacgagatcctgctgggcaaggccaccctgtacgccgtgctggtgtctgccctggtgctgatggctatggtcaagcggaaggacagccggggaagggccaagcgatctggatctggagcaacaaacttctcactactcaaacaagcaggtgacgtggaggagaatcccgggcctactagtatggactggatttggcgcatccttttccttgtcggcgctgctaccggcgcgcattccttcgaagaagtgcagctggttgaatcaggcggaggactggttcagcctggcggatctctgagactgtcttgtgccgccagcggctacaccttcaccagctactggatgaactgggtccgacaggcccctggcaaaggactggaatgggtcggaatgatcgaccccagcgacagcgagacacactacaaccacatcttcaaggaccgcttcaccatcagcgccgacaccagcaagaataccgcctacctccagatgaactccctgagagccgaggacaccgccgtgtactactgcgccagaaacctgtatctgttcggccagggaaccctggtcacagtgtcatctacgcgtagccagcctcacaccaagcccagcgtgttcgtgatgaagaacggcaccaacgtggcctgcctcgtgaaagagttctaccccaaggacatcaggatcaacctggtgtccagcaagaagatcaccgagttcgaccccgccatcgtgatctcccccagcggcaagtacaacgccgtgaagctggggaagtatgaggacagcaacagcgtgacctgctccgtgcagcacgacaacaagaccgtgcacagcaccgactttgaagtgaaaaccgactccaccgaccacgtgaagcccaaagagacagagaacaccaagcagcccagcaagagctgccacaagcccaaggccatcgtgcacaccgagaaagtgaacatgatgagcctgaccgtgatcggcttcagaatcctgctgctgaaagtggccggctttaacctgctgatgaccctgcggctgtggtccagctaa

SEQ ID NO: 36409 - DNA, 1881 bp, synthetic construct
  source 1..1881: mol_type = other DNA
atggccttaccagtgaccgccttgctcctgccgctggccttgctgctccacgccgccaggccggacatccagatgacacagagccctagcagcctgtctgccagcgtgggagacagagtgaccatcacatgcaagagcagccagagcctgctggactccgatggcaagacctacctgaactggtatcagcagaagcccggcaaggcccctaagctgctgatctacctggtgtccaagctggatagcggcgtgcccagcagattttctggcagcggcagcggaaccgacttcaccctgacaatatccagcctccagcctgaggacttcgccacctactactgcttccaaggcacccactttccattcaccttcggccagggcaccaaggtggaaatcaaaagactcgaggacaagcagctggacgccgacgtgtcccccaagcctaccatcttcctgccctctatcgccgagacaaagctccagaaggccggcacctacctgtgcctgctggaaaagttcttcccagatgtgattaagatccactggcaggaaaagaagtccaacaccatcctgggcagccaggaaggcaacaccatgaagaccaacgacacctacatgaagttcagctggctgaccgtgcccgagaagtccctggacaaagaacacagatgcatcgtgcggcacgaaaacaacaagaacggcgtggaccaggaaatcatcttcccacccatcaagaccgatgtgattacaatggaccccaaggacaactgctccaaggacgccaacgataccctgctgctccagctgaccaacaccagcgcctactacatgtacgagatcctgctgggcaaggccaccctgtacgccgtgctggtgtctgccctggtgctgatggctatggtcaagcggaaggacagccggggaagggccaagcgatctggatctggagcaacaaacttctcactactcaaacaagcaggtgacgtggaggagaatcccgggcctactagtatggactggatttggcgcatccttttccttgtcggcgctgctaccggcgcgcattccttcgaagaagtgcagctggttgaatcaggcggaggactggttcagcctggcggatctctgagactgtcttgtgccgccagcggctacaccttcaccagctactggatgaactgggtccgacaggcccctggcaaaggactggaatgggtcggaatgatcgaccccagcgacagcgagacacactacaaccacatcttcaaggaccgcttcaccatcagcgccgacaccagcaagaataccgcctacctccagatgaactccctgagagccgaggacaccgccgtgtactactgcgccagaaacctgtatctgttcggccagggaaccctggtcacagtgtcatctacgcgtagccagcctcacaccaagcccagcgtgttcgtgatgaagaacggcaccaacgtggcctgcctcgtgaaagagttctaccccaaggacatcaggatcaacctggtgtccagcaagaagatcaccgagttcgaccccgccatcgtgatctcccccagcggcaagtacaacgccgtgaagctggggaagtacgaggacagcaacagcgtgacctgctccgtgcagcacgacaacaagaccgtgcacagcaccgactttgaagtgaaaaccgactccaccgaccacgtgaagcccaaagagacagagaacaccaagcagcccagcaagagctgccacaagcccaaggccatcgtgcacaccgagaaagtgaacatgatgagcctgaccgtgctgggcttcagaatcctgctgctgaaagtggccggctttaacctgctgatgaccctgcggctgtggtccagctaa

SEQ ID NO: 36410 - DNA, 1881 bp, synthetic construct
  source 1..1881: mol_type = other DNA
atggccttaccagtgaccgccttgctcctgccgctggccttgctgctccacgccgccaggccggacatccagatgacacagagccctagcagcctgtctgccagcgtgggagacagagtgaccatcacatgcaagagcagccagagcctgctggactccgatggcaagacctacctgaactggtatcagcagaagcccggcaaggcccctaagctgctgatctacctggtgtccaagctggatagcggcgtgcccagcagattttctggcagcggcagcggaaccgacttcaccctgacaatatccagcctccagcctgaggacttcgccacctactactgcttccaaggcacccactttccattcaccttcggccagggcaccaaggtggaaatcaaaagactcgaggacaagcagctggacgccgacgtgtcccccaagcctaccatcttcctgccctctatcgccgagacaaagctccagaaggccggcacctacctgtgcctgctggaaaagttcttcccagatgtgattaagatccactggcaggaaaagaagtccaacaccatcctgggcagccaggaaggcaacaccatgaagaccaacgacacctacatgaagttcagctggctgaccgtgcccgagaagtccctggacaaagaacacagatgcatcgtgcggcacgaaaacaacaagaacggcgtggaccaggaaatcatcttcccacccatcaagaccgatgtgattacaatggaccccaaggacaactgctccaaggacgccaacgataccctgctgctccagctgaccaacaccagcgccaccatcctgtacgagatcctgctgggcaaggccaccctgtacgccgtgctggtgtctgccctggtgctgatggctatggtcaagcggaaggacagccggggaagggccaagcgatctggatctggagcaacaaacttctcactactcaaacaagcaggtgacgtggaggagaatcccgggcctactagtatggactggatttggcgcatccttttccttgtcggcgctgctaccggcgcgcattccttcgaagaagtgcagctggttgaatcaggcggaggactggttcagcctggcggatctctgagactgtcttgtgccgccagcggctacaccttcaccagctactggatgaactgggtccgacaggcccctggcaaaggactggaatgggtcggaatgatcgaccccagcgacagcgagacacactacaaccacatcttcaaggaccgcttcaccatcagcgccgacaccagcaagaataccgcctacctccagatgaactccctgagagccgaggacaccgccgtgtactactgcgccagaaacctgtatctgttcggccagggaaccctggtcacagtgtcatctacgcgtagccagcctcacaccaagcccagcgtgttcgtgatgaagaacggcaccaacgtggcctgcctcgtgaaagagttctaccccaaggacatcaggatcaacctggtgtccagcaagaagatcaccgagttcgaccccgccatcgtgatctcccccagcggcaagtacaacgccgtgaagctggggaagtacgaggacagcaacagcgtgacctgctccgtgcagcacgacaacaagaccgtgcacagcaccgactttgaagtgaaaaccgactccaccgaccacgtgaagcccaaagagacagagaacaccaagcagcccagcaagagctgccacaagcccaaggccatcgtgcacaccgagaaagtgaacatgatgagcctgaccgtgctgggcttcagaatcctgctgctgaaagtggccggctttaacctgctgatgaccctgcggctgtggtccagctaa

SEQ ID NO: 36411 - DNA, 1863 bp, synthetic construct
  source 1..1863: mol_type = other DNA
atggccttaccagtgaccgccttgctcctgccgctggccttgctgctccacgccgccaggccggacatccagatgacacagagccctagcagcctgtctgccagcgtgggagacagagtgaccatcacatgcaagagcagccagagcctgctggactccgatggcaagacctacctgaactggtatcagcagaagcccggcaaggcccctaagctgctgatctacctggtgtccaagctggatagcggcgtgcccagcagattttctggcagcggcagcggaaccgacttcaccctgacaatatccagcctccagcctgaggacttcgccacctactactgcttccaaggcacccactttccattcaccttcggccagggcaccaaggtggaaatcaaaagactcgaggacctgaagaacgtgttcccacctgaggtggccgtgttcgagcctagcgaggccgagatcagccacacccagaaagccaccctcgtgtgcctggctaccggcttctaccccgaccatgtggaactgtcttggtgggtcaacggcaaagaggtgcacagcggcgtgtgtaccgacccccagccactgaaagaacagcccgccctgaacgacagccggtactgcctgagcagcagactgagagtgtccgccaccttctggcagaacccccggaaccacttcagatgccaggtgcagttctacggcctgagcgagaacgacgagtggacccaggacagagccaagcccgtgacccagatcgtgtctgccgaagcctggggcagagccgattgcggctttaccagcgagagctaccagcagggcgtgctgagcgccaccatcctgtacttgttgctgctgctgaagtccgtggtgtacttcgccatcatcacatgctgcctgctgcggagaaccgccttctgctgcaacggcgagaagtctagggccaagcgatctggatctggagcaacaaacttctcactactcaaacaagcaggtgacgtggaggagaatcccgggcctactagtatggactggatttggcgcatccttttccttgtcggcgctgctaccggcgcgcattccttcgaagaagtgcagctggttgaatcaggcggaggactggttcagcctggcggatctctgagactgtcttgtgccgccagcggctacaccttcaccagctactggatgaactgggtccgacaggcccctggcaaaggactggaatgggtcggaatgatcgaccccagcgacagcgagacacactacaaccacatcttcaaggaccgcttcaccatcagcgccgacaccagcaagaataccgcctacctccagatgaactccctgagagccgaggacaccgccgtgtactactgcgccagaaacctgtatctgttcggccagggaaccctggtcacagtgtcatctacgcgtatccagaaccctgatcctgccgtgtaccagctgcgggatagcaagagcagcgacaagagcgtgtgtctgttcaccgacttcgacagccagaccaacgtgtcccagagcaaggactccgacgtgtacatcaccgataagtgcgtgctggacatgcggagcatggacttcaagagcaactccgccgtggcctggtccaacaagtccgatttcgcctgcgccaacgccttcaacaacagcattatccccgaggacacattcttcccaagccccgagagcagctgcgacgtgaagctggtggaaaagagcttcgagacagacaccaacctgaacttccagaacctgagcgtgatcggcctgcggatgctgttcgccaaaaccgtggccgtgaacttcctgctgaccgccaagctgttcttcctctaa

SEQ ID NO: 36412 - DNA, 1950 bp, synthetic construct
  source 1..1950: mol_type = other DNA
atggccttaccagtgaccgccttgctcctgccgctggccttgctgctccacgccgccaggccggacatccagatgacacagagccctagcagcctgtctgccagcgtgggagacagagtgaccatcacatgcaagagcagccagagcctgctggactccgatggcaagacctacctgaactggtatcagcagaagcccggcaaggcccctaagctgctgatctacctggtgtccaagctggatagcggcgtgcccagcagattttctggcagcggcagcggaaccgacttcaccctgacaatatccagcctccagcctgaggacttcgccacctactactgcttccaaggcacccactttccattcaccttcggccagggcaccaaggtggaaatcaaaagactcgaggacctgaagaacgtgttcccacctgaggtggccgtgttcgagcctagcgaggccgagatcagccacacccagaaagccaccctcgtgtgcctggctaccggcttctaccccgaccatgtggaactgtcttggtgggtcaacggcaaagaggtgcacagcggcgtgtctaccgacccccagccactgaaagaacagcccgccctgaacgacagccggtactgcctgagcagcagactgagagtgtccgccaccttctggcagaacccccggaaccacttcagatgccaggtgcagttctacggcctgagcgagaacgacgagtggacccaggacagagccaagcccgtgacccagatcgtgtctgccgaagcctggggcagagccgattgcggatcctccaaggacgccaacgataccctgctgctccagctgaccaacaccagcgcctactacatgtacttgttgctgctgctgaagtccgtggtgtacttcgccatcatcacatgctgcctgctgcggagaaccgccttctgctgcaacggcgagaagtctagggccaagcgatctggatctggagcaacaaacttctcactactcaaacaagcaggtgacgtggaggagaatcccgggcctactagtatggactggatttggcgcatccttttccttgtcggcgctgctaccggcgcgcattccttcgaagaagtgcagctggttgaatcaggcggaggactggttcagcctggcggatctctgagactgtcttgtgccgccagcggctacaccttcaccagctactggatgaactgggtccgacaggcccctggcaaaggactggaatgggtcggaatgatcgaccccagcgacagcgagacacactacaaccacatcttcaaggaccgcttcaccatcagcgccgacaccagcaagaataccgcctacctccagatgaactccctgagagccgaggacaccgccgtgtactactgcgccagaaacctgtatctgttcggccagggaaccctggtcacagtgtcatctacgcgtatccagaaccctgatcctgccgtgtaccagctgcgggatagcaagagcagcgacaagagcgtgtgtctgttcaccgacttcgacagccagaccaacgtgtcccagagcaaggactccgacgtgtacatcaccgataagaccgtgctggacatgcggagcatggacttcaagagcaactccgccgtggcctggtccaacaagtccgatttcgcctgcgccaacgccttcaacaacagcattatccccgaggacacattcttcccaagccccgagagcagctgcggtaccgaagtgaaaaccgactccaccgaccacgtgaagcccaaagagacagagaacaccaagcagcccagcaagagctgccacaagcccaaggccatcgtgcacaccgagaaagtgaacatgatgagcctgaccgtgctgggcctgcggatgctgttcgccaaaaccgtggccgtgaacttcctgctgaccgccaagctgttcttcctctaa

SEQ ID NO: 36413 - DNA, 1860 bp, synthetic construct
  source 1..1860: mol_type = other DNA
atggccttaccagtgaccgccttgctcctgccgctggccttgctgctccacgccgccaggccggacatccagatgacacagagccctagcagcctgtctgccagcgtgggagacagagtgaccatcacatgcaagagcagccagagcctgctggactccgatggcaagacctacctgaactggtatcagcagaagcccggcaaggcccctaagctgctgatctacctggtgtccaagctggatagcggcgtgcccagcagattttctggcagcggcagcggaaccgacttcaccctgacaatatccagcctccagcctgaggacttcgccacctactactgcttccaaggcacccactttccattcaccttcggccagggcaccaaggtggaaatcaaaagactcgaggacctgaagaacgtgttcccacctgaggtggccgtgttcgagcctagcgaggccgagatcagccacacccagaaagccaccctcgtgtgcctggctaccggcttctaccccgaccatgtggaactgtcttggtgggtcaacggcaaagaggtgcacagcggcgtgtgtaccgacccccagccactgaaagaacagcccgccctgaacgacagccggtactgcctgagcagcagactgagagtgtccgccaccttctggcagaacccccggaaccacttcagatgccaggtgcagttctacggcctgagcgagaacgacgagtggacccaggacagagccaagcccgtgacccagatcgtgtctgccgaagcctggggcagagccgattgcgacgtgaagctggtggaaaagagcttcgagacagacaccaacctgaacttccagaacctgagcgtgatcggcttcagaatcctgctgctgaaagtggccggctttaacctgctgatgaccctgcggctgtggtccagcagggccaagcgatctggatctggagcaacaaacttctcactactcaaacaagcaggtgacgtggaggagaatcccgggcctactagtatggactggatttggcgcatccttttccttgtcggcgctgctaccggcgcgcattccttcgaagaagtgcagctggttgaatcaggcggaggactggttcagcctggcggatctctgagactgtcttgtgccgccagcggctacaccttcaccagctactggatgaactgggtccgacaggcccctggcaaaggactggaatgggtcggaatgatcgaccccagcgacagcgagacacactacaaccacatcttcaaggaccgcttcaccatcagcgccgacaccagcaagaataccgcctacctccagatgaactccctgagagccgaggacaccgccgtgtactactgcgccagaaacctgtatctgttcggccagggaaccctggtcacagtgtcatctacgcgtatccagaaccctgatcctgccgtgtaccagctgcgggatagcaagagcagcgacaagagcgtgtgtctgttcaccgacttcgacagccagaccaacgtgtcccagagcaaggactccgacgtgtacatcaccgataagtgcgtgctggacatgcggagcatggacttcaagagcaactccgccgtggcctggtccaacaagtccgatttcgcctgcgccaacgccttcaacaacagcattatccccgaggacacattcttcccaagccccgagagcagctgcggctttaccagcgagagctaccagcagggcgtgctgagcgccaccatcctgtacgagatcctgctgggcaaggccaccctgtacgccgtgctggtgtctgccctggtgctgatggctatggtcaagcggaaggacagccggggataa

SEQ ID NO: 36414 - DNA, 1860 bp, synthetic construct
  source 1..1860: mol_type = other DNA
atggccttaccagtgaccgccttgctcctgccgctggccttgctgctccacgccgccaggccggacatccagatgacacagagccctagcagcctgtctgccagcgtgggagacagagtgaccatcacatgcaagagcagccagagcctgctggactccgatggcaagacctacctgaactggtatcagcagaagcccggcaaggcccctaagctgctgatctacctggtgtccaagctggatagcggcgtgcccagcagattttctggcagcggcagcggaaccgacttcaccctgacaatatccagcctccagcctgaggacttcgccacctactactgcttccaaggcacccactttccattcaccttcggccagggcaccaaggtggaaatcaaaagactcgaggacctgaagaacgtgttcccacctgaggtggccgtgttcgagcctagcgaggccgagatcagccacacccagaaagccaccctcgtgtgcctggctaccggcttctaccccgaccatgtggaactgtcttggtgggtcaacggcaaagaggtgcacagcggcgtgtgtaccgacccccagccactgaaagaacagcccgccctgaacgacagccggtactgcctgagcagcagactgagagtgtccgccaccttctggcagaacccccggaaccacttcagatgccaggtgcagttctacggcctgagcgagaacgacgagtggacccaggacagagccaagcccgtgacccagatcgtgtctgccgaagcctggggcagagccgattgcggctttaccagcgagagctaccagcagggcgtgctgagcgccaccaacctgagcgtgatcggcttcagaatcctgctgctgaaagtggccggctttaacctgctgatgaccctgcggctgtggtccagcagggccaagcgatctggatctggagcaacaaacttctcactactcaaacaagcaggtgacgtggaggagaatcccgggcctactagtatggactggatttggcgcatccttttccttgtcggcgctgctaccggcgcgcattccttcgaagaagtgcagctggttgaatcaggcggaggactggttcagcctggcggatctctgagactgtcttgtgccgccagcggctacaccttcaccagctactggatgaactgggtccgacaggcccctggcaaaggactggaatgggtcggaatgatcgaccccagcgacagcgagacacactacaaccacatcttcaaggaccgcttcaccatcagcgccgacaccagcaagaataccgcctacctccagatgaactccctgagagccgaggacaccgccgtgtactactgcgccagaaacctgtatctgttcggccagggaaccctggtcacagtgtcatctacgcgtatccagaaccctgatcctgccgtgtaccagctgcgggatagcaagagcagcgacaagagcgtgtgtctgttcaccgacttcgacagccagaccaacgtgtcccagagcaaggactccgacgtgtacatcaccgataagtgcgtgctggacatgcggagcatggacttcaagagcaactccgccgtggcctggtccaacaagtccgatttcgcctgcgccaacgccttcaacaacagcattatccccgaggacacattcttcccaagccccgagagcagctgcgacgtgaagctggtggaaaagagcttcgagacagacaccaacctgaacttccagatcctgtacgagatcctgctgggcaaggccaccctgtacgccgtgctggtgtctgccctggtgctgatggctatggtcaagcggaaggacagccggggataa

SEQ ID NO: 36415 - DNA, 1860 bp, synthetic construct; identical to SEQ ID NO: 36413
  source 1..1860: mol_type = other DNA

SEQ ID NO: 36416 - DNA, 1860 bp, synthetic construct; identical to SEQ ID NO: 36414
  source 1..1860: mol_type = other DNA

SEQ ID NO: 36417 - DNA, 1857 bp, synthetic construct
  source 1..1857: mol_type = other DNA
atggccttaccagtgaccgccttgctcctgccgctggccttgctgctccacgccgccaggccggacatccagatgacacagagccctagcagcctgtctgccagcgtgggagacagagtgaccatcacatgcaagagcagccagagcctgctggactccgatggcaagacctacctgaactggtatcagcagaagcccggcaaggcccctaagctgctgatctacctggtgtccaagctggatagcggcgtgcccagcagattttctggcagcggcagcggaaccgacttcaccctgacaatatccagcctccagcctgaggacttcgccacctactactgcttccaaggcacccactttccattcaccttcggccagggcaccaaggtggaaatcaaaagactcgaggacctgaagaacgtgttcccacctgaggtggccgtgttcgagcctagcgaggccgagatcagccacacccagaaagccaccctcgtgtgcctggctaccggcttctaccccgaccatgtggaactgtcttggtgggtcaacggcaaagaggtgcacagcggcgtgtgtaccgacccccagccactgaaagaacagcccgccctgaacgacagccggtactgcctgagcagcagactgagagtgtccgccaccttctggcagaacccccggaaccacttcagatgccaggtgcagttctacggcctgagcgagaacgacgagtggacccaggacagagccaagcccgtgacccagatcgtgtctgccgaagcctggggcagagccgattgcgacgtgaagctggtggaaaagagcttcgagacagacaccaacctgaacttccagaacctgagcgtgatcggcttcagaatcctgctgctgaaagtggccggctttaacctgctgatgaccctgcggctgtggtccagcagggccaagcgatctggatctggagcaacaaacttctcactactcaaacaagcaggtgacgtggaggagaatcccgggcctactagtatggactggatttggcgcatccttttccttgtcggcgctgctaccggcgcgcattccttcgaagaagtgcagctggttgaatcaggcggaggactggttcagcctggcggatctctgagactgtcttgtgccgccagcggctacaccttcaccagctactggatgaactgggtccgacaggcccctggcaaaggactggaatgggtcggaatgatcgaccccagcgacagcgagacacactacaaccacatcttcaaggaccgcttcaccatcagcgccgacaccagcaagaataccgcctacctccagatgaactccctgagagccgaggacaccgccgtgtactactgcgccagaaacctgtatctgttcggccagggaaccctggtcacagtgtcatctacgcgtatccagaaccctgatcctgccgtgtaccagctgcgggatagcaagagcagcgacaagagcgtgtgtctgttcaccgacttcgacagccagaccaacgtgtcccagagcaaggactccgacgtgtacatcaccgataagtgcgtgctggacatgcggagcatggacttcaagagcaactccgccgtggcctggtccaacaagtccgatttcgcctgcgccaacgccttcaacaacagcattatccccgaggacacattcttcccaagccccgagagcagctgcggctttaccagcgagagctaccagcagggcgtgctgagcgccaccatcctgtacgagatcctgctgggcaaggccaccctgtacgccgtgctggtgtctgccctggtgctgatggctatggtcaagcggaaggacagccgggga

SEQ ID NO: 36418 - DNA, 1869 bp, synthetic construct
  source 1..1869: mol_type = other DNA
atggccttaccagtgaccgccttgctcctgccgctggccttgctgctccacgccgccaggccggacatccagatgacacagagccctagcagcctgtctgccagcgtgggagacagagtgaccatcacatgcaagagcagccagagcctgctggactccgatggcaagacctacctgaactggtatcagcagaagcccggcaaggcccctaagctgctgatctacctggtgtccaagctggatagcggcgtgcccagcagattttctggcagcggcagcggaaccgacttcaccctgacaatatccagcctccagcctgaggacttcgccacctactactgcttccaaggcacccactttccattcaccttcggccagggcaccaaggtggaaatcaaaagactcgaggccgacgtgtcccccaagcctaccatcttcctgccctctatcgccgagacaaagctccagaaggccggcacctacctgtgcctgctggaaaagttcttcccagatgtgattaagatccactggcaggaaaagaagtccaacaccatcctgggcagccaggaaggcaacaccatgaagaccaacgacacctacatgaagttcagctggctgaccgtgcccgagaagtccctggacaaagaacacagatgcatcgtgcggcacgaaaacaacaagaacggcgtggaccaggaaatcatcttcccacccatcaagaccgatgtgattacaatggaccccaaggacaactgctccaaggacgccaacgataccctgctgctccagctgaccaacaccagcgcctactacatgtacttgttgctgctgctgaagtccgtggtgtacttcgccatcatcacatgctgcctgctgcggagaaccgccttctgctgcaacggcgagaagtctagggccaagcgatctggatctggagcaacaaacttctcactactcaaacaagcaggtgacgtggaggagaatcccgggcctactagtatggactggatttggcgcatccttttccttgtcggcgctgctaccggcgcgcattccttcgaagaagtgcagctggttgaatcaggcggaggactggttcagcctggcggatctctgagactgtcttgtgccgccagcggctacaccttcaccagctactggatgaactgggtccgacaggcccctggcaaaggactggaatgggtcggaatgatcgaccccagcgacagcgagacacactacaaccacatcttcaaggaccgcttcaccatcagcgccgacaccagcaagaataccgcctacctccagatgaactccctgagagccgaggacaccgccgtgtactactgcgccagaaacctgtatctgttcggccagggaaccctggtcacagtgtcatctacgcgtagccagcctcacaccaagcccagcgtgttcgtgatgaagaacggcaccaacgtggcctgcctcgtgaaagagttctaccccaaggacatcaggatcaacctggtgtccagcaagaagatcaccgagttcgaccccgccatcgtgatctcccccagcggcaagtacaacgccgtgaagctggggaagtatgaggacagcaacagcgtgacctgctccgtgcagcacgacaacaagaccgtgcacagcaccgactttgaagtgaaaaccgactccaccgaccacgtgaagcccaaagagacagagaacaccaagcagcccagcaagagctgccacaagcccaaggccatcgtgcacaccgagaaagtgaacatgatgagcctgaccgtgatcggcttcagaatcctgctgctgaaagtggccggctttaacctgctgatgaccctgcggctgtggtccagctaa

SEQ ID NO: 36419 - DNA, 1869 bp, synthetic construct
  source 1..1869: mol_type = other DNA
atggccttaccagtgaccgccttgctcctgccgctggccttgctgctccacgccgccaggccggacatccagatgacacagagccctagcagcctgtctgccagcgtgggagacagagtgaccatcacatgcaagagcagccagagcctgctggactccgatggcaagacctacctgaactggtatcagcagaagcccggcaaggcccctaagctgctgatctacctggtgtccaagctggatagcggcgtgcccagcagattttctggcagcggcagcggaaccgacttcaccctgacaatatccagcctccagcctgaggacttcgccacctactactgcttccaaggcacccactttccattcaccttcggccagggcaccaaggtggaaatcaaaagactcgaggccgacgtgtcccccaagcctaccatcttcctgccctctatcgccgagacaaagctccagaaggccggcacctacctgtgcctgctggaaaagttcttcccagatgtgattaagatccactggcaggaaaagaagtccaacaccatcctgggcagccaggaaggcaacaccatgaagaccaacgacacctacatgaagttcagctggctgaccgtgcccgagaagtccctggacaaagaacacagatgcatcgtgcggcacgaaaacaacaagaacggcgtggaccaggaaatcatcttcccacccatcaagaccgatgtgattacaatggaccccaaggacaactgctccaaggacgccaacgataccctgctgctccagctgaccaacaccagcgcctactacatgtacttgttgctgctgctgaagtccgtggtgtacttcgccatcatcacatgctgcctgctgcggagaaccgccttctgctgcaacggcgagaagtctagggccaagcgatctggatctggagcaacaaacttctcactactcaaacaagcaggtgacgtggaggagaatcccgggcctactagtatggactggatttggcgcatccttttccttgtcggcgctgctaccggcgcgcattccttcgaagaagtgcagctggttgaatcaggcggaggactggttcagcctggcggatctctgagactgtcttgtgccgccagcggctacaccttcaccagctactggatgaactgggtccgacaggcccctggcaaaggactggaatgggtcggaatgatcgaccccagcgacagcgagacacactacaaccacatcttcaaggaccgcttcaccatcagcgccgacaccagcaagaataccgcctacctccagatgaactccctgagagccgaggacaccgccgtgtactactgcgccagaaacctgtatctgttcggccagggaaccctggtcacagtgtcatctacgcgtagccagcctcacaccaagcccagcgtgttcgtgatgaagaacggcaccaacgtggcctgcctcgtgaaagagttctaccccaaggacatcaggatcaacctggtgtccagcaagaagatcaccgagttcgaccccgccatcgtgatctcccccagcggcaagtacaacgccgtgaagctggggaagtacgaggacagcaacagcgtgacctgctccgtgcagcacgacaacaagaccgtgcacagcaccgactttgaagtgaaaaccgactccaccgaccacgtgaagcccaaagagacagagaacaccaagcagcccagcaagagctgccacaagcccaaggccatcgtgcacaccgagaaagtgaacatgatgagcctgaccgtgctgggcttcagaatcctgctgctgaaagtggccggctttaacctgctgatgaccctgcggctgtggtccagctaa

SEQ ID NO: 36420 - DNA, 1857 bp, synthetic construct; identical to SEQ ID NO: 36417
  source 1..1857: mol_type = other DNA

SEQ ID NO: 36421 - DNA, 1869 bp, synthetic construct
  source 1..1869: mol_type = other DNA
atggccttaccagtgaccgccttgctcctgccgctggccttgctgctccacgccgccaggccggacatccagatgacacagagccctagcagcctgtctgccagcgtgggagacagagtgaccatcacatgcaagagcagccagagcctgctggactccgatggcaagacctacctgaactggtatcagcagaagcccggcaaggcccctaagctgctgatctacctggtgtccaagctggatagcggcgtgcccagcagattttctggcagcggcagcggaaccgacttcaccctgacaatatccagcctccagcctgaggacttcgccacctactactgcttccaaggcacccactttccattcaccttcggccagggcaccaaggtggaaatcaaaagactcgagatccagaaccctgatcctgccgtgtaccagctgcgggatagcaagagcagcgacaagagcgtgtgtctgttcaccgacttcgacagccagaccaacgtgtcccagagcaaggactccgacgtgtacatcaccgataagtgcgtgctggacatgcggagcatggacttcaagagcaactccgccgtggcctggtccaacaagtccgatttcgcctgcgccaacgccttcaacaacagcattatccccgaggacacattcttcccaagccccgagagcagctgcggctttaccagcgagagctaccagcagggcgtgctgagcgccaccatcctgtacgagatcctgctgggcaaggccaccctgtacgccgtgctggtgtctgccctggtgctgatggctatggtcaagcggaaggacagccggggacgcgccaagagaagcggatctggcgtgaagcagaccctgaatttcgacctgctgaagctggctggcgacgtggaatccaacccaggccctactagtatggactggatttggcgcatccttttccttgtcggcgctgctaccggcgcgcattccttcgaagaagtgcagctggttgaatcaggcggaggactggttcagcctggcggatctctgagactgtcttgtgccgccagcggctacaccttcaccagctactggatgaactgggtccgacaggcccctggcaaaggactggaatgggtcggaatgatcgaccccagcgacagcgagacacactacaaccacatcttcaaggaccgcttcaccatcagcgccgacaccagcaagaataccgcctacctccagatgaactccctgagagccgaggacaccgccgtgtactactgcgccagaaacctgtatctgttcggccagggaaccctggtcacagtgtcatctacgcgtgaggacctgaagaacgtgttcccacctgaggtggccgtgttcgagcctagcgaggccgagatcagccacacccagaaagccaccctcgtgtgcctggctaccggcttctaccccgaccatgtggaactgtcttggtgggtcaacggcaaagaggtgcacagcggcgtgtgtaccgacccccagccactgaaagaacagcccgccctgaacgacagccggtactgcctgagcagcagactgagagtgtccgccaccttctggcagaacccccggaaccacttcagatgccaggtgcagttctacggcctgagcgagaacgacgagtggacccaggacagagccaagcccgtgacccagatcgtgtctgccgaagcctggggcagagccgattgcgacgtgaagctggtggaaaagagcttcgagacagacaccaacctgaacttccagaacctgagcgtgatcggcttcagaatcctgctgctgaaagtggccggctttaacctgctgatgaccctgcggctgtggtccagc

SEQ ID NO: 36422 - DNA, 2262 bp, synthetic construct
  source 1..2262: mol_type = other DNA
atggccttaccagtgaccgccttgctcctgccgctggccttgctgctccacgccgccaggccggaagtgcagctggttgaatctggcggaggactggttcagcctggcggatctctgagactgtcttgtgccgccagcggcttcagcttcagcgacttttggatgagctgggtccgacaggcccctggcaaaggacttgaatgggtcgccacaatcagccaggccggcagcgagaaggactacgtggactctgtgaagggcagattcaccatcagccgggacaacgccaagaagtccctgtacctccagatgaacagcctgagagccgaggacaccgccgtgtactattgtgcctctggcgtgtacagcttcgactacagaggccagggcaccctggtcacagtctcttctggtaccggcggaggcggatctggcggcggaggtagcggtggcggaggatctgaattcgacatccagatgacacagagccctagcagcctgtctgccagcgtgggagacagagtgaccatcacatgcaagagcagccagagcctgctggactccgatggcaagacctacctgaactggtatcagcagaagcccggcaaggcccctaagctgctgatctacctggtgtccaagctggatagcggcgtgcccagcagattttctggcagcggcagcggaaccgacttcaccctgacaatatccagcctccagcctgaggacttcgccacctactactgcttccaaggcacccactttccattcaccttcggccagggcaccaaggtggaaatcaaaagactcgaggacctgaagaacgtgttcccacctgaggtggccgtgttcgagcctagcgaggccgagatcagccacacccagaaagccaccctcgtgtgcctggctaccggcttctaccccgaccatgtggaactgtcttggtgggtcaacggcaaagaggtgcacagcggcgtgtgtaccgacccccagccactgaaagaacagcccgccctgaacgacagccggtactgcctgagcagcagactgagagtgtccgccaccttctggcagaacccccggaaccacttcagatgccaggtgcagttctacggcctgagcgagaacgacgagtggacccaggacagagccaagcccgtgacccagatcgtgtctgccgaagcctggggcagagccgattgcgacgtgaagctggtggaaaagagcttcgagacagacaccaacctgaacttccagaacctgagcgtgatcggcttcagaatcctgctgctgaaagtggccggctttaacctgctgatgaccctgcggctgtggtccagcagggccaagcgatctggatctggagcaacaaacttctcactactcaaacaagcaggtgacgtggaggagaatcccgggcctactagtatggactggatttggcgcatccttttccttgtcggcgctgctaccggcgcgcattccttcgaagaagtgcagctggttgaatcaggcggaggactggttcagcctggcggatctctgagactgtcttgtgccgccagcggctacaccttcaccagctactggatgaactgggtccgacaggcccctggcaaaggactggaatgggtcggaatgatcgaccccagcgacagcgagacacactacaaccacatcttcaaggaccgcttcaccatcagcgccgacaccagcaagaataccgcctacctccagatgaactccctgagagccgaggacaccgccgtgtactactgcgccagaaacctgtatctgttcggccagggaaccctggtcacagtgtcatctacgcgtatccagaaccctgatcctgccgtgtaccagctgcgggatagcaagagcagcgacaagagcgtgtgtctgttcaccgacttcgacagccagaccaacgtgtcccagagcaaggactccgacgtgtacatcaccgataagtgcgtgctggacatgcggagcatggacttcaagagcaactccgccgtggcctggtccaacaagtccgatttcgcctgcgccaacgccttcaacaacagcattatccccgaggacacattcttcccaagccccgagagcagctgcggctttaccagcgagagctaccagcagggcgtgctgagcgccaccatcctgtacgagatcctgctgggcaaggccaccctgtacgccgtgctggtgtctgccctggtgctgatggctatggtcaagcggaaggacagccgggga

SEQ ID NO: 36423 - DNA, 2274 bp, synthetic construct
  source 1..2274: mol_type = other DNA
atggccttaccagtgaccgccttgctcctgccgctggccttgctgctccacgccgccaggccggaagtgcagctggttgaatctggcggaggactggttcagcctggcggatctctgagactgtcttgtgccgccagcggcttcagcttcagcgacttttggatgagctgggtccgacaggcccctggcaaaggacttgaatgggtcgccacaatcagccaggccggcagcgagaaggactacgtggactctgtgaagggcagattcaccatcagccgggacaacgccaagaagtccctgtacctccagatgaacagcctgagagccgaggacaccgccgtgtactattgtgcctctggcgtgtacagcttcgactacagaggccagggcaccctggtcacagtctcttctggtaccggcggaggcggatctggcggcggaggtagcggtggcggaggatctgaattcgacatccagatgacacagagccctagcagcctgtctgccagcgtgggagacagagtgaccatcacatgcaagagcagccagagcctgctggactccgatggcaagacctacctgaactggtatcagcagaagcccggcaaggcccctaagctgctgatctacctggtgtccaagctggatagcggcgtgcccagcagattttctggcagcggcagcggaaccgacttcaccctgacaatatccagcctccagcctgaggacttcgccacctactactgcttccaaggcacccactttccattcaccttcggccagggcaccaaggtggaaatcaaaagactcgagatccagaaccctgatcctgccgtgtaccagctgcgggatagcaagagcagcgacaagagcgtgtgtctgttcaccgacttcgacagccagaccaacgtgtcccagagcaaggactccgacgtgtacatcaccgataagtgcgtgctggacatgcggagcatggacttcaagagcaactccgccgtggcctggtccaacaagtccgatttcgcctgcgccaacgccttcaacaacagcattatccccgaggacacattcttcccaagccccgagagcagctgcggctttaccagcgagagctaccagcagggcgtgctgagcgccaccatcctgtacgagatcctgctgggcaaggccaccctgtacgccgtgctggtgtctgccctggtgctgatggctatggtcaagcggaaggacagccggggacgcgccaagagaagcggatctggcgtgaagcagaccctgaatttcgacctgctgaagctggctggcgacgtggaatccaacccaggccctactagtatggactggatttggcgcatccttttccttgtcggcgctgctaccggcgcgcattccttcgaagaagtgcagctggttgaatcaggcggaggactggttcagcctggcggatctctgagactgtcttgtgccgccagcggctacaccttcaccagctactggatgaactgggtccgacaggcccctggcaaaggactggaatgggtcggaatgatcgaccccagcgacagcgagacacactacaaccacatcttcaaggaccgcttcaccatcagcgccgacaccagcaagaataccgcctacctccagatgaactccctgagagccgaggacaccgccgtgtactactgcgccagaaacctgtatctgttcggccagggaaccctggtcacagtgtcatctacgcgtgaggacctgaagaacgtgttcccacctgaggtggccgtgttcgagcctagcgaggccgagatcagccacacccagaaagccaccctcgtgtgcctggctaccggcttctaccccgaccatgtggaactgtcttggtgggtcaacggcaaagaggtgcacagcggcgtgtgtaccgacccccagccactgaaagaacagcccgccctgaacgacagccggtactgcctgagcagcagactgagagtgtccgccaccttctggcagaacccccggaaccacttcagatgccaggtgcagttctacggcctgagcgagaacgacgagtggacccaggacagagccaagcccgtgacccagatcgtgtctgccgaagcctggggcagagccgattgcgacgtgaagctggtggaaaagagcttcgagacagacaccaacctgaacttccagaacctgagcgtgatcggcttcagaatcctgctgctgaaagtggccggctttaacctgctgatgaccctgcggctgtggtccagc

SEQ ID NO: 36424 - DNA, 2673 bp, synthetic construct
  source 1..2673: mol_type = other DNA
atggccttaccagtgaccgccttgctcctgccgctggccttgctgctccacgccgccaggccggaagtgcagctggttgaatctggcggaggactggttcagcctggcggatctctgagactgtcttgtgccgccagcggcttcagcttcagcgacttttggatgagctgggtccgacaggcccctggcaaaggacttgaatgggtcgccacaatcagccaggccggcagcgagaaggactacgtggactctgtgaagggcagattcaccatcagccgggacaacgccaagaagtccctgtacctccagatgaacagcctgagagccgaggacaccgccgtgtactattgtgcctctggcgtgtacagcttcgactacagaggccagggcaccctggtcacagtctcttctggtaccggcggaggcggatctggcggcggaggtagcggtggcggaggatctgaattcgacatccagatgacacagagccctagcagcctgtctgccagcgtgggagacagagtgaccatcacatgcaagagcagccagagcctgctggactccgatggcaagacctacctgaactggtatcagcagaagcccggcaaggcccctaagctgctgatctacctggtgtccaagctggatagcggcgtgcccagcagattttctggcagcggcagcggaaccgacttcaccctgacaatatccagcctccagcctgaggacttcgccacctactactgcttccaaggcacccactttccattcaccttcggccagggcaccaaggtggaaatcaaaagactcgaggacctgaagaacgtgttcccacctgaggtggccgtgttcgagcctagcgaggccgagatcagccacacccagaaagccaccctcgtgtgcctggctaccggcttctaccccgaccatgtggaactgtcttggtgggtcaacggcaaagaggtgcacagcggcgtgtgtaccgacccccagccactgaaagaacagcccgccctgaacgacagccggtactgcctgagcagcagactgagagtgtccgccaccttctggcagaacccccggaaccacttcagatgccaggtgcagttctacggcctgagcgagaacgacgagtggacccaggacagagccaagcccgtgacccagatcgtgtctgccgaagcctggggcagagccgattgcgacgtgaagctggtggaaaagagcttcgagacagacaccaacctgaacttccagaacctgagcgtgatcggcttcagaatcctgctgctgaaagtggccggctttaacctgctgatgaccctgcggctgtggtccagcagggccaagcgatctggatctggagcaacaaacttctcactactcaaacaagcaggtgacgtggaggagaatcccgggcctactagtatggactggatttggcgcatccttttccttgtcggcgctgctaccggcgcgcattccgggccccagctccagctgcaagagtctggacctggcctggtcaagcctagcgagacactgagcctgacctgtaccgtgtccggcgatagcatcagcagcggcgattactactggggctggatcagacagcctcctggcaaaggactggaatggatcggccacatctactacagcggcgtgacctactacaaccccagcctgaagtccagagtgaccatcagcgtggacaccagccggaaccagttctccctgaagctgtctagcgtgacagccgccgataccgccgtgtactactgcaccagagaggacagcagcaactggcggagtagaggccagggaacactggtcacagttagctctggatccggcggaggcggaagtggaggcggaggatctggcggcggaggctctttcgaagaagtgcagctggttgaatcaggcggaggactggttcagcctggcggatctctgagactgtcttgtgccgccagcggctacaccttcaccagctactggatgaactgggtccgacaggcccctggcaaaggactggaatgggtcggaatgatcgaccccagcgacagcgagacacactacaaccacatcttcaaggaccgcttcaccatcagcgccgacaccagcaagaataccgcctacctccagatgaactccctgagagccgaggacaccgccgtgtactactgcgccagaaacctgtatctgttcggccagggaaccctggtcacagtgtcatctacgcgtatccagaaccctgatcctgccgtgtaccagctgcgggatagcaagagcagcgacaagagcgtgtgtctgttcaccgacttcgacagccagaccaacgtgtcccagagcaaggactccgacgtgtacatcaccgataagtgcgtgctggacatgcggagcatggacttcaagagcaactccgccgtggcctggtccaacaagtccgatttcgcctgcgccaacgccttcaacaacagcattatccccgaggacacattcttcccaagccccgagagcagctgcggctttaccagcgagagctaccagcagggcgtgctgagcgccaccatcctgtacgagatcctgctgggcaaggccaccctgtacgccgtgctggtgtctgccctggtgctgatggctatggtcaagcggaaggacagccgggga

SEQ ID NO: 36425 - DNA, 2685 bp, synthetic construct
  source 1..2685: mol_type = other DNA
atggccttaccagtgaccgccttgctcctgccgctggccttgctgctccacgccgccaggccggaagtgcagctggttgaatctggcggaggactggttcagcctggcggatctctgagactgtcttgtgccgccagcggcttcagcttcagcgacttttggatgagctgggtccgacaggcccctggcaaaggacttgaatgggtcgccacaatcagccaggccggcagcgagaaggactacgtggactctgtgaagggcagattcaccatcagccgggacaacgccaagaagtccctgtacctccagatgaacagcctgagagccgaggacaccgccgtgtactattgtgcctctggcgtgtacagcttcgactacagaggccagggcaccctggtcacagtctcttctggtaccggcggaggcggatctggcggcggaggtagcggtggcggaggatctgaattcgacatccagatgacacagagccctagcagcctgtctgccagcgtgggagacagagtgaccatcacatgcaagagcagccagagcctgctggactccgatggcaagacctacctgaactggtatcagcagaagcccggcaaggcccctaagctgctgatctacctggtgtccaagctggatagcggcgtgcccagcagattttctggcagcggcagcggaaccgacttcaccctgacaatatccagcctccagcctgaggacttcgccacctactactgcttccaaggcacccactttccattcaccttcggccagggcaccaaggtggaaatcaaaagactcgagatccagaaccctgatcctgccgtgtaccagctgcgggatagcaagagcagcgacaagagcgtgtgtctgttcaccgacttcgacagccagaccaacgtgtcccagagcaaggactccgacgtgtacatcaccgataagtgcgtgctggacatgcggagcatggacttcaagagcaactccgccgtggcctggtccaacaagtccgatttcgcctgcgccaacgccttcaacaacagcattatccccgaggacacattcttcccaagccccgagagcagctgcggctttaccagcgagagctaccagcagggcgtgctgagcgccaccatcctgtacgagatcctgctgggcaaggccaccctgtacgccgtgctggtgtctgccctggtgctgatggctatggtcaagcggaaggacagccggggacgcgccaagagaagcggatctggcgtgaagcagaccctgaatttcgacctgctgaagctggctggcgacgtggaatccaacccaggccctactagtatggactggatttggcgcatccttttccttgtcggcgctgctaccggcgcgcattccgggccccagctccagctgcaagagtctggacctggcctggtcaagcctagcgagacactgagcctgacctgtaccgtgtccggcgatagcatcagcagcggcgattactactggggctggatcagacagcctcctggcaaaggactggaatggatcggccacatctactacagcggcgtgacctactacaaccccagcctgaagtccagagtgaccatcagcgtggacaccagccggaaccagttctccctgaagctgtctagcgtgacagccgccgataccgccgtgtactactgcaccagagaggacagcagcaactggcggagtagaggccagggaacactggtcacagttagctctggatccggcggaggcggaagtggaggcggaggatctggcggcggaggctctttcgaagaagtgcagctggttgaatcaggcggaggactggttcagcctggcggatctctgagactgtcttgtgccgccagcggctacaccttcaccagctactggatgaactgggtccgacaggcccctggcaaaggactggaatgggtcggaatgatcgaccccagcgacagcgagacacactacaaccacatcttcaaggaccgcttcaccatcagcgccgacaccagcaagaataccgcctacctccagatgaactccctgagagccgaggacaccgccgtgtactactgcgccagaaacctgtatctgttcggccagggaaccctggtcacagtgtcatctacgcgtgaggacctgaagaacgtgttcccacctgaggtggccgtgttcgagcctagcgaggccgagatcagccacacccagaaagccaccctcgtgtgcctggctaccggcttctaccccgaccatgtggaactgtcttggtgggtcaacggcaaagaggtgcacagcggcgtgtgtaccgacccccagccactgaaagaacagcccgccctgaacgacagccggtactgcctgagcagcagactgagagtgtccgccaccttctggcagaacccccggaaccacttcagatgccaggtgcagttctacggcctgagcgagaacgacgagtggacccaggacagagccaagcccgtgacccagatcgtgtctgccgaagcctggggcagagccgattgcgacgtgaagctggtggaaaagagcttcgagacagacaccaacctgaacttccagaacctgagcgtgatcggcttcagaatcctgctgctgaaagtggccggctttaacctgctgatgaccctgcggctgtggtccagc

SEQ ID NO: 36426 - DNA, 2067 bp, synthetic construct
  source 1..2067: mol_type = other DNA
atggccttaccagtgaccgccttgctcctgccgctggccttgctgctccacgccgccaggccggacatccagatgacacagagccctagcagcctgtctgccagcgtgggagacagagtgaccatcacatgcaagagcagccagagcctgctggactccgatggcaagacctacctgaactggtatcagcagaagcccggcaaggcccctaagctgctgatctacctggtgtccaagctggatagcggcgtgcccagcagattttctggcagcggcagcggaaccgacttcaccctgacaatatccagcctccagcctgaggacttcgccacctactactgcttccaaggcacccactttccattcaccttcggccagggcaccaaggtggaaatcaaaagactcgaggacctgaagaacgtgttcccacctgaggtggccgtgttcgagcctagcgaggccgagatcagccacacccagaaagccaccctcgtgtgcctggctaccggcttctaccccgaccatgtggaactgtcttggtgggtcaacggcaaagaggtgcacagcggcgtgtgtaccgacccccagccactgaaagaacagcccgccctgaacgacagccggtactgcctgagcagcagactgagagtgtccgccaccttctggcagaacccccggaaccacttcagatgccaggtgcagttctacggcctgagcgagaacgacgagtggacccaggacagagccaagcccgtgacccagatcgtgtctgccgaagcctggggcagagccgattgcgacgtgaagctggtggaaaagagcttcgagacagacaccaacctgaacttccagaacctgagcgtgatcggcttcagaatcctgctgctgaaagtggccggctttaacctgctgatgaccctgcggctgtggtccagcagggccaagcgatctggatctggagcaacaaacttctcactactcaaacaagcaggtgacgtggaggagaatcccgggcctactagtatggactggatttggcgcatccttttccttgtcggcgctgctaccggcgcccattccgggcccatggaccccgacctggaaatcagagccgccttcctgcggcagagaaacacagccctgagaacagaggtggccgagctggaacaagaggtgcagcggctggaaaacgaggtgtcccagtacgagacaagatacggccctctcggaggcggaaaaggatccggcggcggaggatctggcggaggcggatctgggggcggaggctctttcgaagaagtgcagctggttgaatcaggcggaggactggttcagcctggcggatctctgagactgtcttgtgccgccagcggctacaccttcaccagctactggatgaactgggtccgacaggcccctggcaaaggactggaatgggtcggaatgatcgaccccagcgacagcgagacacactacaaccacatcttcaaggaccgcttcaccatcagcgccgacaccagcaagaataccgcctacctccagatgaactccctgagagccgaggacaccgccgtgtactactgcgccagaaacctgtatctgttcggccagggaaccctggtcacagtgtcatctacgcgtatccagaaccctgatcctgccgtgtaccagctgcgggatagcaagagcagcgacaagagcgtgtgtctgttcaccgacttcgacagccagaccaacgtgtcccagagcaaggactccgacgtgtacatcaccgataagtgcgtgctggacatgcggagcatggacttcaagagcaactccgccgtggcctggtccaacaagtccgatttcgcctgcgccaacgccttcaacaacagcattatccccgaggacacattcttcccaagccccgagagcagctgcggctttaccagcgagagctaccagcagggcgtgctgagcgccaccatcctgtacgagatcctgctgggcaaggccaccctgtacgccgtgctggtgtctgccctggtgctgatggctatggtcaagcggaaggacagccgggga

SEQ ID NO: 36427 - DNA, 2079 bp, synthetic construct
  source 1..2079: mol_type = other DNA
atggccttaccagtgaccgccttgctcctgccgctggccttgctgctccacgccgccaggccggacatccagatgacacagagccctagcagcctgtctgccagcgtgggagacagagtgaccatcacatgcaagagcagccagagcctgctggactccgatggcaagacctacctgaactggtatcagcagaagcccggcaaggcccctaagctgctgatctacctggtgtccaagctggatagcggcgtgcccagcagattttctggcagcggcagcggaaccgacttcaccctgacaatatccagcctccagcctgaggacttcgccacctactactgcttccaaggcacccactttccattcaccttcggccagggcaccaaggtggaaatcaaaagactcgagatccagaaccctgatcctgccgtgtaccagctgcgggatagcaagagcagcgacaagagcgtgtgtctgttcaccgacttcgacagccagaccaacgtgtcccagagcaaggactccgacgtgtacatcaccgataagtgcgtgctggacatgcggagcatggacttcaagagcaactccgccgtggcctggtccaacaagtccgatttcgcctgcgccaacgccttcaacaacagcattatccccgaggacacattcttcccaagccccgagagcagctgcggctttaccagcgagagctaccagcagggcgtgctgagcgccaccatcctgtacgagatcctgctgggcaaggccaccctgtacgccgtgctggtgtctgccctggtgctgatggctatggtcaagcggaaggacagccggggacgcgccaagagaagcggatctggcgtgaagcagaccctgaatttcgacctgctgaagctggctggcgacgtggaatccaacccaggccctactagtatggactggatttggcgcatccttttccttgtcggcgctgctaccggcgcccattccgggcccatggaccccgacctggaaatcagagccgccttcctgcggcagagaaacacagccctgagaacagaggtggccgagctggaacaagaggtgcagcggctggaaaacgaggtgtcccagtacgagacaagatacggccctctcggaggcggaaaaggatccggcggcggaggatctggcggaggcggatctgggggcggaggctctttcgaagaagtgcagctggttgaatcaggcggaggactggttcagcctggcggatctctgagactgtcttgtgccgccagcggctacaccttcaccagctactggatgaactgggtccgacaggcccctggcaaaggactggaatgggtcggaatgatcgaccccagcgacagcgagacacactacaaccacatcttcaaggaccgcttcaccatcagcgccgacaccagcaagaataccgcctacctccagatgaactccctgagagccgaggacaccgccgtgtactactgcgccagaaacctgtatctgttcggccagggaaccctggtcacagtgtcatctacgcgtgaggacctgaagaacgtgttcccacctgaggtggccgtgttcgagcctagcgaggccgagatcagccacacccagaaagccaccctcgtgtgcctggctaccggcttctaccccgaccatgtggaactgtcttggtgggtcaacggcaaagaggtgcacagcggcgtgtgtaccgacccccagccactgaaagaacagcccgccctgaacgacagccggtactgcctgagcagcagactgagagtgtccgccaccttctggcagaacccccggaaccacttcagatgccaggtgcagttctacggcctgagcgagaacgacgagtggacccaggacagagccaagcccgtgacccagatcgtgtctgccgaagcctggggcagagccgattgcgacgtgaagctggtggaaaagagcttcgagacagacaccaacctgaacttccagaacctgagcgtgatcggcttcagaatcctgctgctgaaagtggccggctttaacctgctgatgaccctgcggctgtggtccagc

SEQ ID NO: 36428 - DNA, 1998 bp, synthetic construct
  source 1..1998: mol_type = other DNA
atggccttaccagtgaccgccttgctcctgccgctggccttgctgctccacgccgccaggccggacatccagatgacacagagccctagcagcctgtctgccagcgtgggagacagagtgaccatcacatgcaagagcagccagagcctgctggactccgatggcaagacctacctgaactggtatcagcagaagcccggcaaggcccctaagctgctgatctacctggtgtccaagctggatagcggcgtgcccagcagattttctggcagcggcagcggaaccgacttcaccctgacaatatccagcctccagcctgaggacttcgccacctactactgcttccaaggcacccactttccattcaccttcggccagggcaccaaggtggaaatcaaaagactcgaggacctgaagaacgtgttcccacctgaggtggccgtgttcgagcctagcgaggccgagatcagccacacccagaaagccaccctcgtgtgcctggctaccggcttctaccccgaccatgtggaactgtcttggtgggtcaacggcaaagaggtgcacagcggcgtgtgtaccgacccccagccactgaaagaacagcccgccctgaacgacagccggtactgcctgagcagcagactgagagtgtccgccaccttctggcagaacccccggaaccacttcagatgccaggtgcagttctacggcctgagcgagaacgacgagtggacccaggacagagccaagcccgtgacccagatcgtgtctgccgaagcctggggcagagccgattgcgacgtgaagctggtggaaaagagcttcgagacagacaccaacctgaacttccagaacctgagcgtgatcggcttcagaatcctgctgctgaaagtggccggctttaacctgctgatgaccctgcggctgtggtccagcagggccaagcgatctggatctggagcaacaaacttctcactactcaaacaagcaggtgacgtggaggagaatcccgggcctactagtatggactggatttggcgcatccttttccttgtcggcgctgctaccggcgcccattccgggcccgaagttgctgccctcgagaaggaggtagcagctttggaaaaagaagtcgcagcccttgagaaagaagttgcggctctggagaagggatccggcggcggaggatctggcggaggcggatctgggggcggaggctctttcgaagaagtgcagctggttgaatcaggcggaggactggttcagcctggcggatctctgagactgtcttgtgccgccagcggctacaccttcaccagctactggatgaactgggtccgacaggcccctggcaaaggactggaatgggtcggaatgatcgaccccagcgacagcgagacacactacaaccacatcttcaaggaccgcttcaccatcagcgccgacaccagcaagaataccgcctacctccagatgaactccctgagagccgaggacaccgccgtgtactactgcgccagaaacctgtatctgttcggccagggaaccctggtcacagtgtcatctacgcgtatccagaaccctgatcctgccgtgtaccagctgcgggatagcaagagcagcgacaagagcgtgtgtctgttcaccgacttcgacagccagaccaacgtgtcccagagcaaggactccgacgtgtacatcaccgataagtgcgtgctggacatgcggagcatggacttcaagagcaactccgccgtggcctggtccaacaagtccgatttcgcctgcgccaacgccttcaacaacagcattatccccgaggacacattcttcccaagccccgagagcagctgcggctttaccagcgagagctaccagcagggcgtgctgagcgccaccatcctgtacgagatcctgctgggcaaggccaccctgtacgccgtgctggtgtctgccctggtgctgatggctatggtcaagcggaaggacagccgggga

SEQ ID NO: 36429 - DNA, 2010 bp, synthetic construct
  source 1..2010: mol_type = other DNA
atggccttaccagtgaccgccttgctcctgccgctggccttgctgctccacgccgccaggccggacatccagatgacacagagccctagcagcctgtctgccagcgtgggagacagagtgaccatcacatgcaagagcagccagagcctgctggactccgatggcaagacctacctgaactggtatcagcagaagcccggcaaggcccctaagctgctgatctacctggtgtccaagctggatagcggcgtgcccagcagattttctggcagcggcagcggaaccgacttcaccctgacaatatccagcctccagcctgaggacttcgccacctactactgcttccaaggcacccactttccattcaccttcggccagggcaccaaggtggaaatcaaaagactcgagatccagaaccctgatcctgccgtgtaccagctgcgggatagcaagagcagcgacaagagcgtgtgtctgttcaccgacttcgacagccagaccaacgtgtcccagagcaaggactccgacgtgtacatcaccgataagtgcgtgctggacatgcggagcatggacttcaagagcaactccgccgtggcctggtccaacaagtccgatttcgcctgcgccaacgccttcaacaacagcattatccccgaggacacattcttcccaagccccgagagcagctgcggctttaccagcgagagctaccagcagggcgtgctgagcgccaccatcctgtacgagatcctgctgggcaaggccaccctgtacgccgtgctggtgtctgccctggtgctgatggctatggtcaagcggaaggacagccggggacgcgccaagagaagcggatctggcgtgaagcagaccctgaatttcgacctgctgaagctggctggcgacgtggaatccaacccaggccctactagtatggactggatttggcgcatccttttccttgtcggcgctgctaccggcgcccattccgggcccgaagttgctgccctcgagaaggaggtagcagctttggaaaaagaagtcgcagcccttgagaaagaagttgcggctctggagaagggatccggcggcggaggatctggcggaggcggatctgggggcggaggctctttcgaagaagtgcagctggttgaatcaggcggaggactggttcagcctggcggatctctgagactgtcttgtgccgccagcggctacaccttcaccagctactggatgaactgggtccgacaggcccctggcaaaggactggaatgggtcggaatgatcgaccccagcgacagcgagacacactacaaccacatcttcaaggaccgcttcaccatcagcgccgacaccagcaagaataccgcctacctccagatgaactccctgagagccgaggacaccgccgtgtactactgcgccagaaacctgtatctgttcggccagggaaccctggtcacagtgtcatctacgcgtgaggacctgaagaacgtgttcccacctgaggtggccgtgttcgagcctagcgaggccgagatcagccacacccagaaagccaccctcgtgtgcctggctaccggcttctaccccgaccatgtggaactgtcttggtgggtcaacggcaaagaggtgcacagcggcgtgtgtaccgacccccagccactgaaagaacagcccgccctgaacgacagccggtactgcctgagcagcagactgagagtgtccgccaccttctggcagaacccccggaaccacttcagatgccaggtgcagttctacggcctgagcgagaacgacgagtggacccaggacagagccaagcccgtgacccagatcgtgtctgccgaagcctggggcagagccgattgcgacgtgaagctggtggaaaagagcttcgagacagacaccaacctgaacttccagaacctgagcgtgatcggcttcagaatcctgctgctgaaagtggccggctttaacctgctgatgaccctgcggctgtggtccagc

SEQ ID NO: 36430 - DNA, 2268 bp, synthetic construct
  source 1..2268: mol_type = other DNA
atggccttaccagtgaccgccttgctcctgccgctggccttgctgctccacgccgccaggccggacatccagatgacacagagccctagcagcctgtctgccagcgtgggagacagagtgaccatcacatgcaagagcagccagagcctgctggactccgatggcaagacctacctgaactggtatcagcagaagcccggcaaggcccctaagctgctgatctacctggtgtccaagctggatagcggcgtgcccagcagattttctggcagcggcagcggaaccgacttcaccctgacaatatccagcctccagcctgaggacttcgccacctactactgcttccaaggcacccactttccattcaccttcggccagggcaccaaggtggaaatcaaaagactcgaggacctgaagaacgtgttcccacctgaggtggccgtgttcgagcctagcgaggccgagatcagccacacccagaaagccaccctcgtgtgcctggctaccggcttctaccccgaccatgtggaactgtcttggtgggtcaacggcaaagaggtgcacagcggcgtgtgtaccgacccccagccactgaaagaacagcccgccctgaacgacagccggtactgcctgagcagcagactgagagtgtccgccaccttctggcagaacccccggaaccacttcagatgccaggtgcagttctacggcctgagcgagaacgacgagtggacccaggacagagccaagcccgtgacccagatcgtgtctgccgaagcctggggcagagccgattgcgacgtgaagctggtggaaaagagcttcgagacagacaccaacctgaacttccagaacctgagcgtgatcggcttcagaatcctgctgctgaaagtggccggctttaacctgctgatgaccctgcggctgtggtccagcagggccaagcgatctggatctggagcaacaaacttctcactactcaaacaagcaggtgacgtggaggagaatcccgggcctactagtatggactggatttggcgcatccttttccttgtcggcgctgctaccggcgcccattccgggccccaggttcagctgcaagagtctggcggaggacttgctcaagctggcggaagcctgagactgtcttgtgccgcctctggcagaaccttcagcatgggctggtttagacaggcccctggcaaagagagagagttcgtcgccgccatcacatacagcggcggcagcccttactacgcctcttctgtcagaggccggttcaccatcagccgggacaacgccaagaacaccgtgtacctccagatgaacagcctgaagccagaggacaccgccgtgtactactgtgccgccaatccaacctacggcagcgactggaatgccgagaattggggccagggcacccaagtgacagtgtctagtggatccggcggcggaggatctggcggaggcggatctgggggcggaggctctttcgaagaagtgcagctggttgaatcaggcggaggactggttcagcctggcggatctctgagactgtcttgtgccgccagcggctacaccttcaccagctactggatgaactgggtccgacaggcccctggcaaaggactggaatgggtcggaatgatcgaccccagcgacagcgagacacactacaaccacatcttcaaggaccgcttcaccatcagcgccgacaccagcaagaataccgcctacctccagatgaactccctgagagccgaggacaccgccgtgtactactgcgccagaaacctgtatctgttcggccagggaaccctggtcacagtgtcatctacgcgtatccagaaccctgatcctgccgtgtaccagctgcgggatagcaagagcagcgacaagagcgtgtgtctgttcaccgacttcgacagccagaccaacgtgtcccagagcaaggactccgacgtgtacatcaccgataagtgcgtgctggacatgcggagcatggacttcaagagcaactccgccgtggcctggtccaacaagtccgatttcgcctgcgccaacgccttcaacaacagcattatccccgaggacacattcttcccaagccccgagagcagctgcggctttaccagcgagagctaccagcagggcgtgctgagcgccaccatcctgtacgagatcctgctgggcaaggccaccctgtacgccgtgctggtgtctgccctggtgctgatggctatggtcaagcggaaggacagccgggga

SEQ ID NO: 36431 - DNA, 2280 bp, synthetic construct
  source 1..2280: mol_type = other DNA
atggccttaccagtgaccgccttgctcctgccgctggccttgctgctccacgccgccaggccggacatccagatgacacagagccctagcagcctgtctgccagcgtgggagacagagtgaccatcacatgcaagagcagccagagcctgctggactccgatggcaagacctacctgaactggtatcagcagaagcccggcaaggcccctaagctgctgatctacctggtgtccaagctggatagcggcgtgcccagcagattttctggcagcggcagcggaaccgacttcaccctgacaatatccagcctccagcctgaggacttcgccacctactactgcttccaaggcacccactttccattcaccttcggccagggcaccaaggtggaaatcaaaagactcgagatccagaaccctgatcctgccgtgtaccagctgcgggatagcaagagcagcgacaagagcgtgtgtctgttcaccgacttcgacagccagaccaacgtgtcccagagcaaggactccgacgtgtacatcaccgataagtgcgtgctggacatgcggagcatggacttcaagagcaactccgccgtggcctggtccaacaagtccgatttcgcctgcgccaacgccttcaacaacagcattatccccgaggacacattcttcccaagccccgagagcagctgcggctttaccagcgagagctaccagcagggcgtgctgagcgccaccatcctgtacgagatcctgctgggcaaggccaccctgtacgccgtgctggtgtctgccctggtgctgatggctatggtcaagcggaaggacagccggggacgcgccaagagaagcggatctggcgtgaagcagaccctgaatttcgacctgctgaagctggctggcgacgtggaatccaacccaggccctactagtatggactggatttggcgcatccttttccttgtcggcgctgctaccggcgcccattccgggccccaggttcagctgcaagagtctggcggaggacttgctcaagctggcggaagcctgagactgtcttgtgccgcctctggcagaaccttcagcatgggctggtttagacaggcccctggcaaagagagagagttcgtcgccgccatcacatacagcggcggcagcccttactacgcctcttctgtcagaggccggttcaccatcagccgggacaacgccaagaacaccgtgtacctccagatgaacagcctgaagccagaggacaccgccgtgtactactgtgccgccaatccaacctacggcagcgactggaatgccgagaattggggccagggcacccaagtgacagtgtctagtggatccggcggcggaggatctggcggaggcggatctgggggcggaggctctttcgaagaagtgcagctggttgaatcaggcggaggactggttcagcctggcggatctctgagactgtcttgtgccgccagcggctacaccttcaccagctactggatgaactgggtccgacaggcccctggcaaaggactggaatgggtcggaatgatcgaccccagcgacagcgagacacactacaaccacatcttcaaggaccgcttcaccatcagcgccgacaccagcaagaataccgcctacctccagatgaactccctgagagccgaggacaccgccgtgtactactgcgccagaaacctgtatctgttcggccagggaaccctggtcacagtgtcatctacgcgtgaggacctgaagaacgtgttcccacctgaggtggccgtgttcgagcctagcgaggccgagatcagccacacccagaaagccaccctcgtgtgcctggctaccggcttctaccccgaccatgtggaactgtcttggtgggtcaacggcaaagaggtgcacagcggcgtgtgtaccgacccccagccactgaaagaacagcccgccctgaacgacagccggtactgcctgagcagcagactgagagtgtccgccaccttctggcagaacccccggaaccacttcagatgccaggtgcagttctacggcctgagcgagaacgacgagtggacccaggacagagccaagcccgtgacccagatcgtgtctgccgaagcctggggcagagccgattgcgacgtgaagctggtggaaaagagcttcgagacagacaccaacctgaacttccagaacctgagcgtgatcggcttcagaatcctgctgctgaaagtggccggctttaacctgctgatgaccctgcggctgtggtccagc

SEQ ID NO: 36432 - DNA, 2286 bp, synthetic construct
  source 1..2286: mol_type = other DNA
atggccttaccagtgaccgccttgctcctgccgctggccttgctgctccacgccgccaggccggaagtgcaactggtggaatctggaggctctctggtgcagccagggggaagcctgagactgtcttgtgccgcttccggcttcaccttcgacgactacgccatgagctgggtgcgccaggtgccaggcaaaggcctggaatgggtgtccagcatcaactggagcggcacccacaccgattacgccgactccgtgaaaggcagattcacaatcagcagaaacaacgccaacaataccctgtacctgcagatgaactccctgaagtctgaggatacagcagtgtattattgcgccaagaactggcgggacgccggcaccacttggtttgagaaaagcggctctgccggacagggaacccaagtgacagtgtcctccggtaccggcggaggcggatctggcggcggaggtagcggtggcggaggatctgaattcgacatccagatgacacagagccctagcagcctgtctgccagcgtgggagacagagtgaccatcacatgcaagagcagccagagcctgctggactccgatggcaagacctacctgaactggtatcagcagaagcccggcaaggcccctaagctgctgatctacctggtgtccaagctggatagcggcgtgcccagcagattttctggcagcggcagcggaaccgacttcaccctgacaatatccagcctccagcctgaggacttcgccacctactactgcttccaaggcacccactttccattcaccttcggccagggcaccaaggtggaaatcaaaagactcgaggacctgaagaacgtgttcccacctgaggtggccgtgttcgagcctagcgaggccgagatcagccacacccagaaagccaccctcgtgtgcctggctaccggcttctaccccgaccatgtggaactgtcttggtgggtcaacggcaaagaggtgcacagcggcgtgtgtaccgacccccagccactgaaagaacagcccgccctgaacgacagccggtactgcctgagcagcagactgagagtgtccgccaccttctggcagaacccccggaaccacttcagatgccaggtgcagttctacggcctgagcgagaacgacgagtggacccaggacagagccaagcccgtgacccagatcgtgtctgccgaagcctggggcagagccgattgcgacgtgaagctggtggaaaagagcttcgagacagacaccaacctgaacttccagaacctgagcgtgatcggcttcagaatcctgctgctgaaagtggccggctttaacctgctgatgaccctgcggctgtggtccagcagggccaagcgatctggatctggagcaacaaacttctcactactcaaacaagcaggtgacgtggaggagaatcccgggcctactagtatggactggatttggcgcatccttttccttgtcggcgctgctaccggcgcgcattccttcgaagaagtgcagctggttgaatcaggcggaggactggttcagcctggcggatctctgagactgtcttgtgccgccagcggctacaccttcaccagctactggatgaactgggtccgacaggcccctggcaaaggactggaatgggtcggaatgatcgaccccagcgacagcgagacacactacaaccacatcttcaaggaccgcttcaccatcagcgccgacaccagcaagaataccgcctacctccagatgaactccctgagagccgaggacaccgccgtgtactactgcgccagaaacctgtatctgttcggccagggaaccctggtcacagtgtcatctacgcgtatccagaaccctgatcctgccgtgtaccagctgcgggatagcaagagcagcgacaagagcgtgtgtctgttcaccgacttcgacagccagaccaacgtgtcccagagcaaggactccgacgtgtacatcaccgataagtgcgtgctggacatgcggagcatggacttcaagagcaactccgccgtggcctggtccaacaagtccgatttcgcctgcgccaacgccttcaacaacagcattatccccgaggacacattcttcccaagccccgagagcagctgcggctttaccagcgagagctaccagcagggcgtgctgagcgccaccatcctgtacgagatcctgctgggcaaggccaccctgtacgccgtgctggtgtctgccctggtgctgatggctatggtcaagcggaaggacagccgggga

SEQ ID NO: 36433 - DNA, 2298 bp, synthetic construct
  source 1..2298: mol_type = other DNA
atggccttaccagtgaccgccttgctcctgccgctggccttgctgctccacgccgccaggccggaagtgcaactggtggaatctggaggctctctggtgcagccagggggaagcctgagactgtcttgtgccgcttccggcttcaccttcgacgactacgccatgagctgggtgcgccaggtgccaggcaaaggcctggaatgggtgtccagcatcaactggagcggcacccacaccgattacgccgactccgtgaaaggcagattcacaatcagcagaaacaacgccaacaataccctgtacctgcagatgaactccctgaagtctgaggatacagcagtgtattattgcgccaagaactggcgggacgccggcaccacttggtttgagaaaagcggctctgccggacagggaacccaagtgacagtgtcctccggtaccggcggaggcggatctggcggcggaggtagcggtggcggaggatctgaattcgacatccagatgacacagagccctagcagcctgtctgccagcgtgggagacagagtgaccatcacatgcaagagcagccagagcctgctggactccgatggcaagacctacctgaactggtatcagcagaagcccggcaaggcccctaagctgctgatctacctggtgtccaagctggatagcggcgtgcccagcagattttctggcagcggcagcggaaccgacttcaccctgacaatatccagcctccagcctgaggacttcgccacctactactgcttccaaggcacccactttccattcaccttcggccagggcaccaaggtggaaatcaaaagactcgagatccagaaccctgatcctgccgtgtaccagctgcgggatagcaagagcagcgacaagagcgtgtgtctgttcaccgacttcgacagccagaccaacgtgtcccagagcaaggactccgacgtgtacatcaccgataagtgcgtgctggacatgcggagcatggacttcaagagcaactccgccgtggcctggtccaacaagtccgatttcgcctgcgccaacgccttcaacaacagcattatccccgaggacacattcttcccaagccccgagagcagctgcggctttaccagcgagagctaccagcagggcgtgctgagcgccaccatcctgtacgagatcctgctgggcaaggccaccctgtacgccgtgctggtgtctgccctggtgctgatggctatggtcaagcggaaggacagccggggacgcgccaagagaagcggatctggcgtgaagcagaccctgaatttcgacctgctgaagctggctggcgacgtggaatccaacccaggccctactagtatggactggatttggcgcatccttttccttgtcggcgctgctaccggcgcgcattccttcgaagaagtgcagctggttgaatcaggcggaggactggttcagcctggcggatctctgagactgtcttgtgccgccagcggctacaccttcaccagctactggatgaactgggtccgacaggcccctggcaaaggactggaatgggtcggaatgatcgaccccagcgacagcgagacacactacaaccacatcttcaaggaccgcttcaccatcagcgccgacaccagcaagaataccgcctacctccagatgaactccctgagagccgaggacaccgccgtgtactactgcgccagaaacctgtatctgttcggccagggaaccctggtcacagtgtcatctacgcgtgaggacctgaagaacgtgttcccacctgaggtggccgtgttcgagcctagcgaggccgagatcagccacacccagaaagccaccctcgtgtgcctggctaccggcttctaccccgaccatgtggaactgtcttggtgggtcaacggcaaagaggtgcacagcggcgtgtgtaccgacccccagccactgaaagaacagcccgccctgaacgacagccggtactgcctgagcagcagactgagagtgtccgccaccttctggcagaacccccggaaccacttcagatgccaggtgcagttctacggcctgagcgagaacgacgagtggacccaggacagagccaagcccgtgacccagatcgtgtctgccgaagcctggggcagagccgattgcgacgtgaagctggtggaaaagagcttcgagacagacaccaacctgaacttccagaacctgagcgtgatcggcttcagaatcctgctgctgaaagtggccggctttaacctgctgatgaccctgcggctgtggtccagc

SEQ ID NO: 36434 - DNA, 2280 bp, synthetic construct
  source 1..2280: mol_type = other DNA
atggccttaccagtgaccgccttgctcctgccgctggccttgctgctccacgccgccaggccggaagttcagctgcttgagtctggcggaggactggttcaacctggcggaagcctgagactgtcttgtgccgccagcggcttcatcttcagcagctacgccatgagctgggtccgacaggctcctggaaagggccaagaatgggtttccggcgttagcggcacaggcgtgaacacctactacgccgatagcgtgaagggcagattcaccatcagccgggacaacagcaagaacaccctgtacctccagatgaacagcctgagagccgaggacaccgccgtgtactattgtgcctctggcaaaggctgggacagcggctcttggtacgaggactatagaggccagggcaccctggtcacagtttcttcaggtaccggcggaggcggatctggcggcggaggtagcggtggcggaggatctgaattcgacatccagatgacacagagccctagcagcctgtctgccagcgtgggagacagagtgaccatcacatgcaagagcagccagagcctgctggactccgatggcaagacctacctgaactggtatcagcagaagcccggcaaggcccctaagctgctgatctacctggtgtccaagctggatagcggcgtgcccagcagattttctggcagcggcagcggaaccgacttcaccctgacaatatccagcctccagcctgaggacttcgccacctactactgcttccaaggcacccactttccattcaccttcggccagggcaccaaggtggaaatcaaaagactcgaggacctgaagaacgtgttcccacctgaggtggccgtgttcgagcctagcgaggccgagatcagccacacccagaaagccaccctcgtgtgcctggctaccggcttctaccccgaccatgtggaactgtcttggtgggtcaacggcaaagaggtgcacagcggcgtgtgtaccgacccccagccactgaaagaacagcccgccctgaacgacagccggtactgcctgagcagcagactgagagtgtccgccaccttctggcagaacccccggaaccacttcagatgccaggtgcagttctacggcctgagcgagaacgacgagtggacccaggacagagccaagcccgtgacccagatcgtgtctgccgaagcctggggcagagccgattgcgacgtgaagctggtggaaaagagcttcgagacagacaccaacctgaacttccagaacctgagcgtgatcggcttcagaatcctgctgctgaaagtggccggctttaacctgctgatgaccctgcggctgtggtccagcagggccaagcgatctggatctggagcaacaaacttctcactactcaaacaagcaggtgacgtggaggagaatcccgggcctactagtatggactggatttggcgcatccttttccttgtcggcgctgctaccggcgcgcattccttcgaagaagtgcagctggttgaatcaggcggaggactggttcagcctggcggatctctgagactgtcttgtgccgccagcggctacaccttcaccagctactggatgaactgggtccgacaggcccctggcaaaggactggaatgggtcggaatgatcgaccccagcgacagcgagacacactacaaccacatcttcaaggaccgcttcaccatcagcgccgacaccagcaagaataccgcctacctccagatgaactccctgagagccgaggacaccgccgtgtactactgcgccagaaacctgtatctgttcggccagggaaccctggtcacagtgtcatctacgcgtatccagaaccctgatcctgccgtgtaccagctgcgggatagcaagagcagcgacaagagcgtgtgtctgttcaccgacttcgacagccagaccaacgtgtcccagagcaaggactccgacgtgtacatcaccgataagtgcgtgctggacatgcggagcatggacttcaagagcaactccgccgtggcctggtccaacaagtccgatttcgcctgcgccaacgccttcaacaacagcattatccccgaggacacattcttcccaagccccgagagcagctgcggctttaccagcgagagctaccagcagggcgtgctgagcgccaccatcctgtacgagatcctgctgggcaaggccaccctgtacgccgtgctggtgtctgccctggtgctgatggctatggtcaagcggaaggacagccgggga

SEQ ID NO: 36435 - DNA, 2292 bp, synthetic construct
  source 1..2292: mol_type = other DNA
atggccttaccagtgaccgccttgctcctgccgctggccttgctgctccacgccgccaggccggaagttcagctgcttgagtctggcggaggactggttcaacctggcggaagcctgagactgtcttgtgccgccagcggcttcatcttcagcagctacgccatgagctgggtccgacaggctcctggaaagggccaagaatgggtttccggcgttagcggcacaggcgtgaacacctactacgccgatagcgtgaagggcagattcaccatcagccgggacaacagcaagaacaccctgtacctccagatgaacagcctgagagccgaggacaccgccgtgtactattgtgcctctggcaaaggctgggacagcggctcttggtacgaggactatagaggccagggcaccctggtcacagtttcttcaggtaccggcggaggcggatctggcggcggaggtagcggtggcggaggatctgaattcgacatccagatgacacagagccctagcagcctgtctgccagcgtgggagacagagtgaccatcacatgcaagagcagccagagcctgctggactccgatggcaagacctacctgaactggtatcagcagaagcccggcaaggcccctaagctgctgatctacctggtgtccaagctggatagcggcgtgcccagcagattttctggcagcggcagcggaaccgacttcaccctgacaatatccagcctccagcctgaggacttcgccacctactactgcttccaaggcacccactttccattcaccttcggccagggcaccaaggtggaaatcaaaagactcgagatccagaaccctgatcctgccgtgtaccagctgcgggatagcaagagcagcgacaagagcgtgtgtctgttcaccgacttcgacagccagaccaacgtgtcccagagcaaggactccgacgtgtacatcaccgataagtgcgtgctggacatgcggagcatggacttcaagagcaactccgccgtggcctggtccaacaagtccgatttcgcctgcgccaacgccttcaacaacagcattatccccgaggacacattcttcccaagccccgagagcagctgcggctttaccagcgagagctaccagcagggcgtgctgagcgccaccatcctgtacgagatcctgctgggcaaggccaccctgtacgccgtgctggtgtctgccctggtgctgatggctatggtcaagcggaaggacagccggggacgcgccaagagaagcggatctggcgtgaagcagaccctgaatttcgacctgctgaagctggctggcgacgtggaatccaacccaggccctactagtatggactggatttggcgcatccttttccttgtcggcgctgctaccggcgcgcattccttcgaagaagtgcagctggttgaatcaggcggaggactggttcagcctggcggatctctgagactgtcttgtgccgccagcggctacaccttcaccagctactggatgaactgggtccgacaggcccctggcaaaggactggaatgggtcggaatgatcgaccccagcgacagcgagacacactacaaccacatcttcaaggaccgcttcaccatcagcgccgacaccagcaagaataccgcctacctccagatgaactccctgagagccgaggacaccgccgtgtactactgcgccagaaacctgtatctgttcggccagggaaccctggtcacagtgtcatctacgcgtgaggacctgaagaacgtgttcccacctgaggtggccgtgttcgagcctagcgaggccgagatcagccacacccagaaagccaccctcgtgtgcctggctaccggcttctaccccgaccatgtggaactgtcttggtgggtcaacggcaaagaggtgcacagcggcgtgtgtaccgacccccagccactgaaagaacagcccgccctgaacgacagccggtactgcctgagcagcagactgagagtgtccgccaccttctggcagaacccccggaaccacttcagatgccaggtgcagttctacggcctgagcgagaacgacgagtggacccaggacagagccaagcccgtgacccagatcgtgtctgccgaagcctggggcagagccgattgcgacgtgaagctggtggaaaagagcttcgagacagacaccaacctgaacttccagaacctgagcgtgatcggcttcagaatcctgctgctgaaagtggccggctttaacctgctgatgaccctgcggctgtggtccagc

SEQ ID NO: 36436 - DNA, 2184 bp, synthetic construct
  source 1..2184: mol_type = other DNA
atggccttaccagtgaccgccttgctcctgccgctggccttgctgctccacgccgccaggccgatgctgcccgctcctaagaatctggtggtgtccagaatcaccgaggacagcgccagactgtcttggacagctcctgatgccgccttcgacagcttccccatccggtacatcgagacactgatctggggcgaagccatctggctggatgtgcctggaagcgagagaagctacgacctgaccggactgaagcctggcacagagtatgccgtggtcatcaccggcgtgaaaggcggcagattctctagccctctggtggcctctttcaccaccggtaccggcggaggcggatctggcggcggaggtagcggtggcggaggatctgaattcgacatccagatgacacagagccctagcagcctgtctgccagcgtgggagacagagtgaccatcacatgcaagagcagccagagcctgctggactccgatggcaagacctacctgaactggtatcagcagaagcccggcaaggcccctaagctgctgatctacctggtgtccaagctggatagcggcgtgcccagcagattttctggcagcggcagcggaaccgacttcaccctgacaatatccagcctccagcctgaggacttcgccacctactactgcttccaaggcacccactttccattcaccttcggccagggcaccaaggtggaaatcaaaagactcgaggacctgaagaacgtgttcccacctgaggtggccgtgttcgagcctagcgaggccgagatcagccacacccagaaagccaccctcgtgtgcctggctaccggcttctaccccgaccatgtggaactgtcttggtgggtcaacggcaaagaggtgcacagcggcgtgtgtaccgacccccagccactgaaagaacagcccgccctgaacgacagccggtactgcctgagcagcagactgagagtgtccgccaccttctggcagaacccccggaaccacttcagatgccaggtgcagttctacggcctgagcgagaacgacgagtggacccaggacagagccaagcccgtgacccagatcgtgtctgccgaagcctggggcagagccgattgcgacgtgaagctggtggaaaagagcttcgagacagacaccaacctgaacttccagaacctgagcgtgatcggcttcagaatcctgctgctgaaagtggccggctttaacctgctgatgaccctgcggctgtggtccagcagggccaagcgatctggatctggagcaacaaacttctcactactcaaacaagcaggtgacgtggaggagaatcccgggcctactagtatggactggatttggcgcatccttttccttgtcggcgctgctaccggcgcgcattccttcgaagaagtgcagctggttgaatcaggcggaggactggttcagcctggcggatctctgagactgtcttgtgccgccagcggctacaccttcaccagctactggatgaactgggtccgacaggcccctggcaaaggactggaatgggtcggaatgatcgaccccagcgacagcgagacacactacaaccacatcttcaaggaccgcttcaccatcagcgccgacaccagcaagaataccgcctacctccagatgaactccctgagagccgaggacaccgccgtgtactactgcgccagaaacctgtatctgttcggccagggaaccctggtcacagtgtcatctacgcgtatccagaaccctgatcctgccgtgtaccagctgcgggatagcaagagcagcgacaagagcgtgtgtctgttcaccgacttcgacagccagaccaacgtgtcccagagcaaggactccgacgtgtacatcaccgataagtgcgtgctggacatgcggagcatggacttcaagagcaactccgccgtggcctggtccaacaagtccgatttcgcctgcgccaacgccttcaacaacagcattatccccgaggacacattcttcccaagccccgagagcagctgcggctttaccagcgagagctaccagcagggcgtgctgagcgccaccatcctgtacgagatcctgctgggcaaggccaccctgtacgccgtgctggtgtctgccctggtgctgatggctatggtcaagcggaaggacagccgggga

SEQ ID NO: 36437 - DNA, 2196 bp, synthetic construct
  source 1..2196: mol_type = other DNA
atggccttaccagtgaccgccttgctcctgccgctggccttgctgctccacgccgccaggccgatgctgcccgctcctaagaatctggtggtgtccagaatcaccgaggacagcgccagactgtcttggacagctcctgatgccgccttcgacagcttccccatccggtacatcgagacactgatctggggcgaagccatctggctggatgtgcctggaagcgagagaagctacgacctgaccggactgaagcctggcacagagtatgccgtggtcatcaccggcgtgaaaggcggcagattctctagccctctggtggcctctttcaccaccggtaccggcggaggcggatctggcggcggaggtagcggtggcggaggatctgaattcgacatccagatgacacagagccctagcagcctgtctgccagcgtgggagacagagtgaccatcacatgcaagagcagccagagcctgctggactccgatggcaagacctacctgaactggtatcagcagaagcccggcaaggcccctaagctgctgatctacctggtgtccaagctggatagcggcgtgcccagcagattttctggcagcggcagcggaaccgacttcaccctgacaatatccagcctccagcctgaggacttcgccacctactactgcttccaaggcacccactttccattcaccttcggccagggcaccaaggtggaaatcaaaagactcgagatccagaaccctgatcctgccgtgtaccagctgcgggatagcaagagcagcgacaagagcgtgtgtctgttcaccgacttcgacagccagaccaacgtgtcccagagcaaggactccgacgtgtacatcaccgataagtgcgtgctggacatgcggagcatggacttcaagagcaactccgccgtggcctggtccaacaagtccgatttcgcctgcgccaacgccttcaacaacagcattatccccgaggacacattcttcccaagccccgagagcagctgcggctttaccagcgagagctaccagcagggcgtgctgagcgccaccatcctgtacgagatcctgctgggcaaggccaccctgtacgccgtgctggtgtctgccctggtgctgatggctatggtcaagcggaaggacagccggggacgcgccaagagaagcggatctggcgtgaagcagaccctgaatttcgacctgctgaagctggctggcgacgtggaatccaacccaggccctactagtatggactggatttggcgcatccttttccttgtcggcgctgctaccggcgcgcattccttcgaagaagtgcagctggttgaatcaggcggaggactggttcagcctggcggatctctgagactgtcttgtgccgccagcggctacaccttcaccagctactggatgaactgggtccgacaggcccctggcaaaggactggaatgggtcggaatgatcgaccccagcgacagcgagacacactacaaccacatcttcaaggaccgcttcaccatcagcgccgacaccagcaagaataccgcctacctccagatgaactccctgagagccgaggacaccgccgtgtactactgcgccagaaacctgtatctgttcggccagggaaccctggtcacagtgtcatctacgcgtgaggacctgaagaacgtgttcccacctgaggtggccgtgttcgagcctagcgaggccgagatcagccacacccagaaagccaccctcgtgtgcctggctaccggcttctaccccgaccatgtggaactgtcttggtgggtcaacggcaaagaggtgcacagcggcgtgtgtaccgacccccagccactgaaagaacagcccgccctgaacgacagccggtactgcctgagcagcagactgagagtgtccgccaccttctggcagaacccccggaaccacttcagatgccaggtgcagttctacggcctgagcgagaacgacgagtggacccaggacagagccaagcccgtgacccagatcgtgtctgccgaagcctggggcagagccgattgcgacgtgaagctggtggaaaagagcttcgagacagacaccaacctgaacttccagaacctgagcgtgatcggcttcagaatcctgctgctgaaagtggccggctttaacctgctgatgaccctgcggctgtggtccagc

SEQ ID NO: 36438 - DNA, 2271 bp, synthetic construct
  source 1..2271: mol_type = other DNA
atggccttaccagtgaccgccttgctcctgccgctggccttgctgctccacgccgccaggccggaggtgcagctggttgaatctggcggaggactggttcagcctggcggatctctgagactgtcttgtgccgccagcggcttcaacatcaaggatacctgtatcggctgggttcgcagagcccctggcaaagaggaagaactggtcgccaaaatctgcaagtacagcggccacaccagatacgccgacagcgtgaagggcagattcaccatcagcgccgacaccagcaagaacaccgcctacctccagatgaacagcctgagagccgaggacaccgccgtgtactattgtgccgctgtgtccgtcagagatgggcactacaattactggggccagggcaccaccgtgaccgtttcttcaggtaccggcggaggcggatctggcggcggaggtagcggtggcggaggatctgaattcgacatccagatgacacagagccctagcagcctgtctgccagcgtgggagacagagtgaccatcacatgcaagagcagccagagcctgctggactccgatggcaagacctacctgaactggtatcagcagaagcccggcaaggcccctaagctgctgatctacctggtgtccaagctggatagcggcgtgcccagcagattttctggcagcggcagcggaaccgacttcaccctgacaatatccagcctccagcctgaggacttcgccacctactactgcttccaaggcacccactttccattcaccttcggccagggcaccaaggtggaaatcaaaagactcgaggacctgaagaacgtgttcccacctgaggtggccgtgttcgagcctagcgaggccgagatcagccacacccagaaagccaccctcgtgtgcctggctaccggcttctaccccgaccatgtggaactgtcttggtgggtcaacggcaaagaggtgcacagcggcgtgtgtaccgacccccagccactgaaagaacagcccgccctgaacgacagccggtactgcctgagcagcagactgagagtgtccgccaccttctggcagaacccccggaaccacttcagatgccaggtgcagttctacggcctgagcgagaacgacgagtggacccaggacagagccaagcccgtgacccagatcgtgtctgccgaagcctggggcagagccgattgcgacgtgaagctggtggaaaagagcttcgagacagacaccaacctgaacttccagaacctgagcgtgatcggcttcagaatcctgctgctgaaagtggccggctttaacctgctgatgaccctgcggctgtggtccagcagggccaagcgatctggatctggagcaacaaacttctcactactcaaacaagcaggtgacgtggaggagaatcccgggcctactagtatggactggatttggcgcatccttttccttgtcggcgctgctaccggcgcgcattccttcgaagaagtgcagctggttgaatcaggcggaggactggttcagcctggcggatctctgagactgtcttgtgccgccagcggctacaccttcaccagctactggatgaactgggtccgacaggcccctggcaaaggactggaatgggtcggaatgatcgaccccagcgacagcgagacacactacaaccacatcttcaaggaccgcttcaccatcagcgccgacaccagcaagaataccgcctacctccagatgaactccctgagagccgaggacaccgccgtgtactactgcgccagaaacctgtatctgttcggccagggaaccctggtcacagtgtcatctacgcgtatccagaaccctgatcctgccgtgtaccagctgcgggatagcaagagcagcgacaagagcgtgtgtctgttcaccgacttcgacagccagaccaacgtgtcccagagcaaggactccgacgtgtacatcaccgataagtgcgtgctggacatgcggagcatggacttcaagagcaactccgccgtggcctggtccaacaagtccgatttcgcctgcgccaacgccttcaacaacagcattatccccgaggacacattcttcccaagccccgagagcagctgcggctttaccagcgagagctaccagcagggcgtgctgagcgccaccatcctgtacgagatcctgctgggcaaggccaccctgtacgccgtgctggtgtctgccctggtgctgatggctatggtcaagcggaaggacagccgggga

SEQ ID NO: 36439 - DNA, 2283 bp, synthetic construct
  source 1..2283: mol_type = other DNA
atggccttaccagtgaccgccttgctcctgccgctggccttgctgctccacgccgccaggccggaggtgcagctggttgaatctggcggaggactggttcagcctggcggatctctgagactgtcttgtgccgccagcggcttcaacatcaaggatacctgtatcggctgggttcgcagagcccctggcaaagaggaagaactggtcgccaaaatctgcaagtacagcggccacaccagatacgccgacagcgtgaagggcagattcaccatcagcgccgacaccagcaagaacaccgcctacctccagatgaacagcctgagagccgaggacaccgccgtgtactattgtgccgctgtgtccgtcagagatgggcactacaattactggggccagggcaccaccgtgaccgtttcttcaggtaccggcggaggcggatctggcggcggaggtagcggtggcggaggatctgaattcgacatccagatgacacagagccctagcagcctgtctgccagcgtgggagacagagtgaccatcacatgcaagagcagccagagcctgctggactccgatggcaagacctacctgaactggtatcagcagaagcccggcaaggcccctaagctgctgatctacctggtgtccaagctggatagcggcgtgcccagcagattttctggcagcggcagcggaaccgacttcaccctgacaatatccagcctccagcctgaggacttcgccacctactactgcttccaaggcacccactttccattcaccttcggccagggcaccaaggtggaaatcaaaagactcgagatccagaaccctgatcctgccgtgtaccagctgcgggatagcaagagcagcgacaagagcgtgtgtctgttcaccgacttcgacagccagaccaacgtgtcccagagcaaggactccgacgtgtacatcaccgataagtgcgtgctggacatgcggagcatggacttcaagagcaactccgccgtggcctggtccaacaagtccgatttcgcctgcgccaacgccttcaacaacagcattatccccgaggacacattcttcccaagccccgagagcagctgcggctttaccagcgagagctaccagcagggcgtgctgagcgccaccatcctgtacgagatcctgctgggcaaggccaccctgtacgccgtgctggtgtctgccctggtgctgatggctatggtcaagcggaaggacagccggggacgcgccaagagaagcggatctggcgtgaagcagaccctgaatttcgacctgctgaagctggctggcgacgtggaatccaacccaggccctactagtatggactggatttggcgcatccttttccttgtcggcgctgctaccggcgcgcattccttcgaagaagtgcagctggttgaatcaggcggaggactggttcagcctggcggatctctgagactgtcttgtgccgccagcggctacaccttcaccagctactggatgaactgggtccgacaggcccctggcaaaggactggaatgggtcggaatgatcgaccccagcgacagcgagacacactacaaccacatcttcaaggaccgcttcaccatcagcgccgacaccagcaagaataccgcctacctccagatgaactccctgagagccgaggacaccgccgtgtactactgcgccagaaacctgtatctgttcggccagggaaccctggtcacagtgtcatctacgcgtgaggacctgaagaacgtgttcccacctgaggtggccgtgttcgagcctagcgaggccgagatcagccacacccagaaagccaccctcgtgtgcctggctaccggcttctaccccgaccatgtggaactgtcttggtgggtcaacggcaaagaggtgcacagcggcgtgtgtaccgacccccagccactgaaagaacagcccgccctgaacgacagccggtactgcctgagcagcagactgagagtgtccgccaccttctggcagaacccccggaaccacttcagatgccaggtgcagttctacggcctgagcgagaacgacgagtggacccaggacagagccaagcccgtgacccagatcgtgtctgccgaagcctggggcagagccgattgcgacgtgaagctggtggaaaagagcttcgagacagacaccaacctgaacttccagaacctgagcgtgatcggcttcagaatcctgctgctgaaagtggccggctttaacctgctgatgaccctgcggctgtggtccagc

SEQ ID NO: 36440 - DNA, 3387 bp, synthetic construct
  source 1..3387: mol_type = other DNA
atggccttaccagtgaccgccttgctcctgccgctggccttgctgctccacgccgccaggccggaagtgcagctggttgaatctggcggaggactggttcaggctggcggatctctgagactgtcttgtgccgccagcggcagaacctttagcatgggctggtttagacaggcccctggcaaagagagagagttcgtcgccgccatcacatactctggcggcagcccttactacgccgactctgtgaagggcagattcaccatcagccgggacaacgccaagaacaccgtgtacctccagatgaacagcctgaagcctgaggacaccgccgtgtactactgcgccgccaatccaacatacggcagcgactggaacgccgagaattggggccagggaacccaagtgacagtgtctagcggtaccggcggaggcggatctggcggcggaggtagcggtggcggaggatctgaattcgacatccagatgacacagagccctagcagcctgtctgccagcgtgggagacagagtgaccatcacatgcaagagcagccagagcctgctggactccgatggcaagacctacctgaactggtatcagcagaagcccggcaaggcccctaagctgctgatctacctggtgtccaagctggatagcggcgtgcccagcagattttctggcagcggcagcggaaccgacttcaccctgacaatatccagcctccagcctgaggacttcgccacctactactgcttccaaggcacccactttccattcaccttcggccagggcaccaaggtggaaatcaaaagactcgaggacctgaagaacgtgttcccacctgaggtggccgtgttcgagcctagcgaggccgagatcagccacacccagaaagccaccctcgtgtgcctggctaccggcttctaccccgaccatgtggaactgtcttggtgggtcaacggcaaagaggtgcacagcggcgtgtgtaccgacccccagccactgaaagaacagcccgccctgaacgacagccggtactgcctgagcagcagactgagagtgtccgccaccttctggcagaacccccggaaccacttcagatgccaggtgcagttctacggcctgagcgagaacgacgagtggacccaggacagagccaagcccgtgacccagatcgtgtctgccgaagcctggggcagagccgattgcgacgtgaagctggtggaaaagagcttcgagacagacaccaacctgaacttccagaacctgagcgtgatcggcttcagaatcctgctgctgaaagtggccggctttaacctgctgatgaccctgcggctgtggtccagcagggccaagcgatctggatctggagcaacaaacttctcactactcaaacaagcaggtgacgtggaggagaatcccgggcctactagtgccaccatggactggatttggcgcatccttttccttgtcggcgctgctaccggcgcccattccgggcccgaagtgcaactggttgaatccggtggcggcctggtgcaagcaggcggatctctcagacttagctgtgccgcctccggcagaaccttcacaatgggatggtttaggcaggctccagggaaagagagagagttcgtcgccgccatctctctgtctcccacactggcctactacgccgactctgtgaaaggccggttcaccatctccagagataatgccaagaacaccgtggtgctgcaaatgaactctctgaaacccgaggatacagccctgtactattgtgccgctgaccggaagtccgtgatgagcatcagacccgattactggggacagggcacacaagtcacagtgtcctctggatccggcggcggaggatctggcggaggcggatctgggggcggaggctctttcgaagaagtgcagctggttgaatcaggcggaggactggttcagcctggcggatctctgagactgtcttgtgccgccagcggctacaccttcaccagctactggatgaactgggtccgacaggcccctggcaaaggactggaatgggtcggaatgatcgaccccagcgacagcgagacacactacaaccacatcttcaaggaccgcttcaccatcagcgccgacaccagcaagaataccgcctacctccagatgaactccctgagagccgaggacaccgccgtgtactactgcgccagaaacctgtatctgttcggccagggaaccctggtcacagtgtcatctacgcgtatccagaaccctgatcctgccgtgtaccagctgcgggatagcaagagcagcgacaagagcgtgtgtctgttcaccgacttcgacagccagaccaacgtgtcccagagcaaggactccgacgtgtacatcaccgataagtgcgtgctggacatgcggagcatggacttcaagagcaactccgccgtggcctggtccaacaagtccgatttcgcctgcgccaacgccttcaacaacagcattatccccgaggacacattcttcccaagccccgagagcagctgcggctttaccagcgagagctaccagcagggcgtgctgagcgccaccatcctgtacgagatcctgctgggcaaggccaccctgtacgccgtgctggtgtctgccctggtgctgatggctatggtcaagcggaaggacagccggggacgcgccaagagaagcggatctggcgtgaagcagaccctgaatttcgacctgctgaagctggctggcgacgtggaatccaacccaggcccttctagaggccatatgaccgagtacaagcccacggtgcgcctcgccacccgcgacgacgtccccagggccgtacgcaccctcgccgccgcgttcgccgactaccccgccacgcgccacaccgtcgatccggaccgccacatcgagcgggtcaccgagctgcaagaactcttcctcacgcgcgtcgggctcgacatcggcaaggtgtgggtcgcggacgacggcgccgcggtggcggtctggaccacgccggagagcgtcgaagcgggggcggtgttcgccgagatcggcccgcgcatggccgagttgagcggttcccggctggccgcgcagcaacagatggaaggcctcctggcgccgcaccggcccaaggagcccgcgtggttcctggccaccgtcggcgtctcgcccgaccaccagggcaagggtctgggcagcgccgtcgtgctccccggagtggaggcggccgagcgcgccggggtgcccgccttcctggagacctccgcgccccgcaacctccccttctacgagcggctcggcttcaccgtcaccgccgacgtcgaggtgcccgaaggaccgcgcacctggtgcatgacccgcaagcccggtgcctga

SEQ ID NO: 36441 - DNA, 2301 bp, synthetic construct
  source 1..2301: mol_type = other DNA
atggccttaccagtgaccgccttgctcctgccgctggccttgctgctccacgccgccaggccggaagtgcagctggttgaatctggcggaggactggttcagcctggcggatctctgagactgtcttgtgccgcctctggcttcgccagcgactactatatcatcggctggttcagacaggcccctggcaaagagagagagggcgtcagctgtatcagcagcagatacgccaacaccaactacgccgacagcgtgaagggcagattcaccatcagccgggacaacgccaagaacaccgtgtacctccagatgaacagcctgaagcctgaggacaccgccgtgtactactgtgccgccgacaccagaagatacacctgtcctgacattgccaccatgcaccggaacttcgattcttggggccagggcacactggtcaccgtttcttctggtaccggcggaggcggatctggcggcggaggtagcggtggcggaggatctgaattcgacatccagatgacacagagccctagcagcctgtctgccagcgtgggagacagagtgaccatcacatgcaagagcagccagagcctgctggactccgatggcaagacctacctgaactggtatcagcagaagcccggcaaggcccctaagctgctgatctacctggtgtccaagctggatagcggcgtgcccagcagattttctggcagcggcagcggaaccgacttcaccctgacaatatccagcctccagcctgaggacttcgccacctactactgcttccaaggcacccactttccattcaccttcggccagggcaccaaggtggaaatcaaaagactcgaggacctgaagaacgtgttcccacctgaggtggccgtgttcgagcctagcgaggccgagatcagccacacccagaaagccaccctcgtgtgcctggctaccggcttctaccccgaccatgtggaactgtcttggtgggtcaacggcaaagaggtgcacagcggcgtgtgtaccgacccccagccactgaaagaacagcccgccctgaacgacagccggtactgcctgagcagcagactgagagtgtccgccaccttctggcagaacccccggaaccacttcagatgccaggtgcagttctacggcctgagcgagaacgacgagtggacccaggacagagccaagcccgtgacccagatcgtgtctgccgaagcctggggcagagccgattgcgacgtgaagctggtggaaaagagcttcgagacagacaccaacctgaacttccagaacctgagcgtgatcggcttcagaatcctgctgctgaaagtggccggctttaacctgctgatgaccctgcggctgtggtccagcagggccaagcgatctggatctggagcaacaaacttctcactactcaaacaagcaggtgacgtggaggagaatcccgggcctactagtatggactggatttggcgcatccttttccttgtcggcgctgctaccggcgcgcattccttcgaagaagtgcagctggttgaatcaggcggaggactggttcagcctggcggatctctgagactgtcttgtgccgccagcggctacaccttcaccagctactggatgaactgggtccgacaggcccctggcaaaggactggaatgggtcggaatgatcgaccccagcgacagcgagacacactacaaccacatcttcaaggaccgcttcaccatcagcgccgacaccagcaagaataccgcctacctccagatgaactccctgagagccgaggacaccgccgtgtactactgcgccagaaacctgtatctgttcggccagggaaccctggtcacagtgtcatctacgcgtatccagaaccctgatcctgccgtgtaccagctgcgggatagcaagagcagcgacaagagcgtgtgtctgttcaccgacttcgacagccagaccaacgtgtcccagagcaaggactccgacgtgtacatcaccgataagtgcgtgctggacatgcggagcatggacttcaagagcaactccgccgtggcctggtccaacaagtccgatttcgcctgcgccaacgccttcaacaacagcattatccccgaggacacattcttcccaagccccgagagcagctgcggctttaccagcgagagctaccagcagggcgtgctgagcgccaccatcctgtacgagatcctgctgggcaaggccaccctgtacgccgtgctggtgtctgccctggtgctgatggctatggtcaagcggaaggacagccggggataa

SEQ ID NO: 36442 - DNA, 2301 bp, synthetic construct
  source 1..2301: mol_type = other DNA
atggccttaccagtgaccgccttgctcctgccgctggccttgctgctccacgccgccaggccggaagtgcagctggttgaatctggcggaggactggttcagcctggcggatctctgagactgagctgtgaagccagcggcttcgccagcgacgattacatcatcggctggttcagacaggcccctggcaaagagagagagggcgtcagctgcatcagctctaagtacgccaacaccgtgtacaccgacagcgtgaagggcagattcagactgagcagaggcaccgccaagaataccgtgtacctccagatgagcgccctgaagcctgaggataccgccgtgtactactgcgctatggacagccgcagagtgacatgccctgagatcagcaccatgcaccggaacttcgattcttggggccagggcacactggtcacagtgtcatctggtaccggcggaggcggatctggcggcggaggtagcggtggcggaggatctgaattcgacatccagatgacacagagccctagcagcctgtctgccagcgtgggagacagagtgaccatcacatgcaagagcagccagagcctgctggactccgatggcaagacctacctgaactggtatcagcagaagcccggcaaggcccctaagctgctgatctacctggtgtccaagctggatagcggcgtgcccagcagattttctggcagcggcagcggaaccgacttcaccctgacaatatccagcctccagcctgaggacttcgccacctactactgcttccaaggcacccactttccattcaccttcggccagggcaccaaggtggaaatcaaaagactcgaggacctgaagaacgtgttcccacctgaggtggccgtgttcgagcctagcgaggccgagatcagccacacccagaaagccaccctcgtgtgcctggctaccggcttctaccccgaccatgtggaactgtcttggtgggtcaacggcaaagaggtgcacagcggcgtgtgtaccgacccccagccactgaaagaacagcccgccctgaacgacagccggtactgcctgagcagcagactgagagtgtccgccaccttctggcagaacccccggaaccacttcagatgccaggtgcagttctacggcctgagcgagaacgacgagtggacccaggacagagccaagcccgtgacccagatcgtgtctgccgaagcctggggcagagccgattgcgacgtgaagctggtggaaaagagcttcgagacagacaccaacctgaacttccagaacctgagcgtgatcggcttcagaatcctgctgctgaaagtggccggctttaacctgctgatgaccctgcggctgtggtccagcagggccaagcgatctggatctggagcaacaaacttctcactactcaaacaagcaggtgacgtggaggagaatcccgggcctactagtatggactggatttggcgcatccttttccttgtcggcgctgctaccggcgcgcattccttcgaagaagtgcagctggttgaatcaggcggaggactggttcagcctggcggatctctgagactgtcttgtgccgccagcggctacaccttcaccagctactggatgaactgggtccgacaggcccctggcaaaggactggaatgggtcggaatgatcgaccccagcgacagcgagacacactacaaccacatcttcaaggaccgcttcaccatcagcgccgacaccagcaagaataccgcctacctccagatgaactccctgagagccgaggacaccgccgtgtactactgcgccagaaacctgtatctgttcggccagggaaccctggtcacagtgtcatctacgcgtatccagaaccctgatcctgccgtgtaccagctgcgggatagcaagagcagcgacaagagcgtgtgtctgttcaccgacttcgacagccagaccaacgtgtcccagagcaaggactccgacgtgtacatcaccgataagtgcgtgctggacatgcggagcatggacttcaagagcaactccgccgtggcctggtccaacaagtccgatttcgcctgcgccaacgccttcaacaacagcattatccccgaggacacattcttcccaagccccgagagcagctgcggctttaccagcgagagctaccagcagggcgtgctgagcgccaccatcctgtacgagatcctgctgggcaaggccaccctgtacgccgtgctggtgtctgccctggtgctgatggctatggtcaagcggaaggacagccggggataa

SEQ ID NO: 36443 - DNA, 2298 bp, synthetic construct
  source 1..2298: mol_type = other DNA
atggccttaccagtgaccgccttgctcctgccgctggccttgctgctccacgccgccaggccggaagtgcagctggttgaatctggcggaggactggttcagcctggcggatctctgagactgtcttgtgccgcctctggcttcgccagcgactactatatcatcggctggttcagacaggcccctggcaaagagagagagggcgtcagctgtatcagcagcagatacgccaacaccaactacgccgacagcgtgaagggcagattcaccatcagccgggacaacgccaagaacaccgtgtacctccagatgaacagcctgaagcctgaggacaccgccgtgtactactgtgccgccgacaccagaagatacacctgtcctgacattgccaccatgcaccggaacttcgattcttggggccagggcacactggtcaccgtttcttctggtaccggcggaggcggatctggcggcggaggtagcggtggcggaggatctgaattcgacatccagatgacacagagccctagcagcctgtctgccagcgtgggagacagagtgaccatcacatgcaagagcagccagagcctgctggactccgatggcaagacctacctgaactggtatcagcagaagcccggcaaggcccctaagctgctgatctacctggtgtccaagctggatagcggcgtgcccagcagattttctggcagcggcagcggaaccgacttcaccctgacaatatccagcctccagcctgaggacttcgccacctactactgcttccaaggcacccactttccattcaccttcggccagggcaccaaggtggaaatcaaaagactcgagatccagaaccctgatcctgccgtgtaccagctgcgggatagcaagagcagcgacaagagcgtgtgtctgttcaccgacttcgacagccagaccaacgtgtcccagagcaaggactccgacgtgtacatcaccgataagtgcgtgctggacatgcggagcatggacttcaagagcaactccgccgtggcctggtccaacaagtccgatttcgcctgcgccaacgccttcaacaacagcattatccccgaggacacattcttcccaagccccgagagcagctgcggctttaccagcgagagctaccagcagggcgtgctgagcgccaccatcctgtacgagatcctgctgggcaaggccaccctgtacgccgtgctggtgtctgccctggtgctgatggctatggtcaagcggaaggacagccggggaagggccaagcgatctggatctggagcaacaaacttctcactactcaaacaagcaggtgacgtggaggagaatcccgggcctactagtatggactggatttggcgcatccttttccttgtcggcgctgctaccggcgcgcattccttcgaagaagtgcagctggttgaatcaggcggaggactggttcagcctggcggatctctgagactgtcttgtgccgccagcggctacaccttcaccagctactggatgaactgggtccgacaggcccctggcaaaggactggaatgggtcggaatgatcgaccccagcgacagcgagacacactacaaccacatcttcaaggaccgcttcaccatcagcgccgacaccagcaagaataccgcctacctccagatgaactccctgagagccgaggacaccgccgtgtactactgcgccagaaacctgtatctgttcggccagggaaccctggtcacagtgtcatctacgcgtgacctgaagaacgtgttcccacctgaggtggccgtgttcgagcctagcgaggccgagatcagccacacccagaaagccaccctcgtgtgcctggctaccggcttctaccccgaccatgtggaactgtcttggtgggtcaacggcaaagaggtgcacagcggcgtgtgtaccgacccccagccactgaaagaacagcccgccctgaacgacagccggtactgcctgagcagcagactgagagtgtccgccaccttctggcagaacccccggaaccacttcagatgccaggtgcagttctacggcctgagcgagaacgacgagtggacccaggacagagccaagcccgtgacccagatcgtgtctgccgaagcctggggcagagccgattgcgacgtgaagctggtggaaaagagcttcgagacagacaccaacctgaacttccagaacctgagcgtgatcggcttcagaatcctgctgctgaaagtggccggctttaacctgctgatgaccctgcggctgtggtccagc

SEQ ID NO: 36444 - DNA, 2298 bp, synthetic construct
  source 1..2298: mol_type = other DNA
atggccttaccagtgaccgccttgctcctgccgctggccttgctgctccacgccgccaggccggaagtgcagctggttgaatctggcggaggactggttcagcctggcggatctctgagactgagctgtgaagccagcggcttcgccagcgacgattacatcatcggctggttcagacaggcccctggcaaagagagagagggcgtcagctgcatcagctctaagtacgccaacaccgtgtacaccgacagcgtgaagggcagattcagactgagcagaggcaccgccaagaataccgtgtacctccagatgagcgccctgaagcctgaggataccgccgtgtactactgcgctatggacagccgcagagtgacatgccctgagatcagcaccatgcaccggaacttcgattcttggggccagggcacactggtcacagtgtcatctggtaccggcggaggcggatctggcggcggaggtagcggtggcggaggatctgaattcgacatccagatgacacagagccctagcagcctgtctgccagcgtgggagacagagtgaccatcacatgcaagagcagccagagcctgctggactccgatggcaagacctacctgaactggtatcagcagaagcccggcaaggcccctaagctgctgatctacctggtgtccaagctggatagcggcgtgcccagcagattttctggcagcggcagcggaaccgacttcaccctgacaatatccagcctccagcctgaggacttcgccacctactactgcttccaaggcacccactttccattcaccttcggccagggcaccaaggtggaaatcaaaagactcgagatccagaaccctgatcctgccgtgtaccagctgcgggatagcaagagcagcgacaagagcgtgtgtctgttcaccgacttcgacagccagaccaacgtgtcccagagcaaggactccgacgtgtacatcaccgataagtgcgtgctggacatgcggagcatggacttcaagagcaactccgccgtggcctggtccaacaagtccgatttcgcctgcgccaacgccttcaacaacagcattatccccgaggacacattcttcccaagccccgagagcagctgcggctttaccagcgagagctaccagcagggcgtgctgagcgccaccatcctgtacgagatcctgctgggcaaggccaccctgtacgccgtgctggtgtctgccctggtgctgatggctatggtcaagcggaaggacagccggggaagggccaagcgatctggatctggagcaacaaacttctcactactcaaacaagcaggtgacgtggaggagaatcccgggcctactagtatggactggatttggcgcatccttttccttgtcggcgctgctaccggcgcgcattccttcgaagaagtgcagctggttgaatcaggcggaggactggttcagcctggcggatctctgagactgtcttgtgccgccagcggctacaccttcaccagctactggatgaactgggtccgacaggcccctggcaaaggactggaatgggtcggaatgatcgaccccagcgacagcgagacacactacaaccacatcttcaaggaccgcttcaccatcagcgccgacaccagcaagaataccgcctacctccagatgaactccctgagagccgaggacaccgccgtgtactactgcgccagaaacctgtatctgttcggccagggaaccctggtcacagtgtcatctacgcgtgacctgaagaacgtgttcccacctgaggtggccgtgttcgagcctagcgaggccgagatcagccacacccagaaagccaccctcgtgtgcctggctaccggcttctaccccgaccatgtggaactgtcttggtgggtcaacggcaaagaggtgcacagcggcgtgtgtaccgacccccagccactgaaagaacagcccgccctgaacgacagccggtactgcctgagcagcagactgagagtgtccgccaccttctggcagaacccccggaaccacttcagatgccaggtgcagttctacggcctgagcgagaacgacgagtggacccaggacagagccaagcccgtgacccagatcgtgtctgccgaagcctggggcagagccgattgcgacgtgaagctggtggaaaagagcttcgagacagacaccaacctgaacttccagaacctgagcgtgatcggcttcagaatcctgctgctgaaagtggccggctttaacctgctgatgaccctgcggctgtggtccagc

SEQ ID NO: 36445 - DNA, 2271 bp, synthetic construct
  source 1..2271: mol_type = other DNA
atggccttaccagtgaccgccttgctcctgccgctggccttgctgctccacgccgccaggccgcaagtcaaactggaagaaagcggtggcggcctggtgcaacctggcgaatctctgagactgagctgtagcgccagcggctccatcttcaaggtgttcagagtgttcgccatgagctggtacaggcaaggccctggcaagcagagagagctggtcgcctctatcagcagcggcgagacaaccacatacgccgaatctgtgaaaggccggttcaccatcagccgggataatgccaagaataccgcctatctccagatggactccctgaagcctgaagatacagctgtgtactactgcaacgccgaccataccttcaccggcgatttttggggccagggaacccaagtgaccgtgtctagtggtaccggcggaggcggatctggcggcggaggtagcggtggcggaggatctgaattcgacatccagatgacacagagccctagcagcctgtctgccagcgtgggagacagagtgaccatcacatgcaagagcagccagagcctgctggactccgatggcaagacctacctgaactggtatcagcagaagcccggcaaggcccctaagctgctgatctacctggtgtccaagctggatagcggcgtgcccagcagattttctggcagcggcagcggaaccgacttcaccctgacaatatccagcctccagcctgaggacttcgccacctactactgcttccaaggcacccactttccattcaccttcggccagggcaccaaggtggaaatcaaaagactcgagatccagaaccctgatcctgccgtgtaccagctgcgggatagcaagagcagcgacaagagcgtgtgtctgttcaccgacttcgacagccagaccaacgtgtcccagagcaaggactccgacgtgtacatcaccgataagtgcgtgctggacatgcggagcatggacttcaagagcaactccgccgtggcctggtccaacaagtccgatttcgcctgcgccaacgccttcaacaacagcattatccccgaggacacattcttcccaagccccgagagcagctgcggctttaccagcgagagctaccagcagggcgtgctgagcgccaccatcctgtacgagatcctgctgggcaaggccaccctgtacgccgtgctggtgtctgccctggtgctgatggctatggtcaagcggaaggacagccggggaagggccaagcgatctggatctggagcaacaaacttctcactactcaaacaagcaggtgacgtggaggagaatcccgggcctactagtatggactggatttggcgcatccttttccttgtcggcgctgctaccggcgcgcattccttcgaagaagtgcagctggttgaatcaggcggaggactggttcagcctggcggatctctgagactgtcttgtgccgccagcggctacaccttcaccagctactggatgaactgggtccgacaggcccctggcaaaggactggaatgggtcggaatgatcgaccccagcgacagcgagacacactacaaccacatcttcaaggaccgcttcaccatcagcgccgacaccagcaagaataccgcctacctccagatgaactccctgagagccgaggacaccgccgtgtactactgcgccagaaacctgtatctgttcggccagggaaccctggtcacagtgtcatctacgcgtgacctgaagaacgtgttcccacctgaggtggccgtgttcgagcctagcgaggccgagatcagccacacccagaaagccaccctcgtgtgcctggctaccggcttctaccccgaccatgtggaactgtcttggtgggtcaacggcaaagaggtgcacagcggcgtgtgtaccgacccccagccactgaaagaacagcccgccctgaacgacagccggtactgcctgagcagcagactgagagtgtccgccaccttctggcagaacccccggaaccacttcagatgccaggtgcagttctacggcctgagcgagaacgacgagtggacccaggacagagccaagcccgtgacccagatcgtgtctgccgaagcctggggcagagccgattgcgacgtgaagctggtggaaaagagcttcgagacagacaccaacctgaacttccagaacctgagcgtgatcggcttcagaatcctgctgctgaaagtggccggctttaacctgctgatgaccctgcggctgtggtccagc

SEQ ID NO: 36446 - DNA, 2277 bp, synthetic construct
  source 1..2277: mol_type = other DNA
atggccttaccagtgaccgccttgctcctgccgctggccttgctgctccacgccgccaggccggacatccagatgacacagagccctagcagcctgtctgccagcgtgggagacagagtgaccatcacatgcaagagcagccagagcctgctggactccgatggcaagacctacctgaactggtatcagcagaagcccggcaaggcccctaagctgctgatctacctggtgtccaagctggatagcggcgtgcccagcagattttctggcagcggcagcggaaccgacttcaccctgacaatatccagcctccagcctgaggacttcgccacctactactgcttccaaggcacccactttccattcaccttcggccagggcaccaaggtggaaatcaaaagactcgaggacctgaagaacgtgttcccacctgaggtggccgtgttcgagcctagcgaggccgagatcagccacacccagaaagccaccctcgtgtgcctggctaccggcttctaccccgaccatgtggaactgtcttggtgggtcaacggcaaagaggtgcacagcggcgtgtgtaccgacccccagccactgaaagaacagcccgccctgaacgacagccggtactgcctgagcagcagactgagagtgtccgccaccttctggcagaacccccggaaccacttcagatgccaggtgcagttctacggcctgagcgagaacgacgagtggacccaggacagagccaagcccgtgacccagatcgtgtctgccgaagcctggggcagagccgattgcgacgtgaagctggtggaaaagagcttcgagacagacaccaacctgaacttccagaacctgagcgtgatcggcttcagaatcctgctgctgaaagtggccggctttaacctgctgatgaccctgcggctgtggtccagcagggccaagcgatctggatctggagcaacaaacttctcactactcaaacaagcaggtgacgtggaggagaatcccgggcctactagtgccaccatggactggatttggcgcatccttttccttgtcggcgctgctaccggcgcccattccgggcccgaagtgcagctggttgaatctggcggaggactggttcaggctggcggatctctgagactgtcttgtgccgccagcggcagaacctttagcatgggctggtttagacaggcccctggcaaagagagagagttcgtcgccgccatcacatactctggcggcagcccttactacgccgactctgtgaagggcagattcaccatcagccgggacaacgccaagaacaccgtgtacctccagatgaacagcctgaagcctgaggacaccgccgtgtactactgcgccgccaatccaacatacggcagcgactggaacgccgagaattggggccagggaacccaagtgacagtgtctagcggatccggcggcggaggatctggcggaggcggatctgggggcggaggctctttcgaagaagtgcagctggttgaatcaggcggaggactggttcagcctggcggatctctgagactgtcttgtgccgccagcggctacaccttcaccagctactggatgaactgggtccgacaggcccctggcaaaggactggaatgggtcggaatgatcgaccccagcgacagcgagacacactacaaccacatcttcaaggaccgcttcaccatcagcgccgacaccagcaagaataccgcctacctccagatgaactccctgagagccgaggacaccgccgtgtactactgcgccagaaacctgtatctgttcggccagggaaccctggtcacagtgtcatctacgcgtatccagaaccctgatcctgccgtgtaccagctgcgggatagcaagagcagcgacaagagcgtgtgtctgttcaccgacttcgacagccagaccaacgtgtcccagagcaaggactccgacgtgtacatcaccgataagtgcgtgctggacatgcggagcatggacttcaagagcaactccgccgtggcctggtccaacaagtccgatttcgcctgcgccaacgccttcaacaacagcattatccccgaggacacattcttcccaagccccgagagcagctgcggctttaccagcgagagctaccagcagggcgtgctgagcgccaccatcctgtacgagatcctgctgggcaaggccaccctgtacgccgtgctggtgtctgccctggtgctgatggctatggtcaagcggaaggacagccggggataa

SEQ ID NO: 36447 - DNA, 2280 bp, synthetic construct
  source 1..2280: mol_type = other DNA
atggccttaccagtgaccgccttgctcctgccgctggccttgctgctccacgccgccaggccggacatccagatgacacagagccctagcagcctgtctgccagcgtgggagacagagtgaccatcacatgcaagagcagccagagcctgctggactccgatggcaagacctacctgaactggtatcagcagaagcccggcaaggcccctaagctgctgatctacctggtgtccaagctggatagcggcgtgcccagcagattttctggcagcggcagcggaaccgacttcaccctgacaatatccagcctccagcctgaggacttcgccacctactactgcttccaaggcacccactttccattcaccttcggccagggcaccaaggtggaaatcaaaagactcgaggacctgaagaacgtgttcccacctgaggtggccgtgttcgagcctagcgaggccgagatcagccacacccagaaagccaccctcgtgtgcctggctaccggcttctaccccgaccatgtggaactgtcttggtgggtcaacggcaaagaggtgcacagcggcgtgtgtaccgacccccagccactgaaagaacagcccgccctgaacgacagccggtactgcctgagcagcagactgagagtgtccgccaccttctggcagaacccccggaaccacttcagatgccaggtgcagttctacggcctgagcgagaacgacgagtggacccaggacagagccaagcccgtgacccagatcgtgtctgccgaagcctggggcagagccgattgcgacgtgaagctggtggaaaagagcttcgagacagacaccaacctgaacttccagaacctgagcgtgatcggcttcagaatcctgctgctgaaagtggccggctttaacctgctgatgaccctgcggctgtggtccagcagggccaagcgatctggatctggagcaacaaacttctcactactcaaacaagcaggtgacgtggaggagaatcccgggcctactagtgccaccatggactggatttggcgcatccttttccttgtcggcgctgctaccggcgcccattccgggcccgaagtgcaactggtggaatctgggggcggactggtgcagccaggcggaagtctgaggctgtcttgtgccgcctccggcagcatcttcggcttcaacgacatggcctggtatcggcaggctcccggaaaacagcgcgagctggtggctctgattagcagagtgggcgtgaccagcagcgccgactctgtgaagggcagattcacaatctccagagtgaacgccaaggatacagtgtacctccagatgaactctctgaaacctgaggatacagcagtgtactattgctacatggaccagcggctggacggcagcacactggcctactggggacagggaactcaagtgacagtgtctagcggatccggcggcggaggatctggcggaggcggatctgggggcggaggctctttcgaagaagtgcagctggttgaatcaggcggaggactggttcagcctggcggatctctgagactgtcttgtgccgccagcggctacaccttcaccagctactggatgaactgggtccgacaggcccctggcaaaggactggaatgggtcggaatgatcgaccccagcgacagcgagacacactacaaccacatcttcaaggaccgcttcaccatcagcgccgacaccagcaagaataccgcctacctccagatgaactccctgagagccgaggacaccgccgtgtactactgcgccagaaacctgtatctgttcggccagggaaccctggtcacagtgtcatctacgcgtatccagaaccctgatcctgccgtgtaccagctgcgggatagcaagagcagcgacaagagcgtgtgtctgttcaccgacttcgacagccagaccaacgtgtcccagagcaaggactccgacgtgtacatcaccgataagtgcgtgctggacatgcggagcatggacttcaagagcaactccgccgtggcctggtccaacaagtccgatttcgcctgcgccaacgccttcaacaacagcattatccccgaggacacattcttcccaagccccgagagcagctgcggctttaccagcgagagctaccagcagggcgtgctgagcgccaccatcctgtacgagatcctgctgggcaaggccaccctgtacgccgtgctggtgtctgccctggtgctgatggctatggtcaagcggaaggacagccggggataa

SEQ ID NO: 36448 - DNA, 2268 bp, synthetic construct
  source 1..2268: mol_type = other DNA
atggccttaccagtgaccgccttgctcctgccgctggccttgctgctccacgccgccaggccggacatccagatgacacagagccctagcagcctgtctgccagcgtgggagacagagtgaccatcacatgcaagagcagccagagcctgctggactccgatggcaagacctacctgaactggtatcagcagaagcccggcaaggcccctaagctgctgatctacctggtgtccaagctggatagcggcgtgcccagcagattttctggcagcggcagcggaaccgacttcaccctgacaatatccagcctccagcctgaggacttcgccacctactactgcttccaaggcacccactttccattcaccttcggccagggcaccaaggtggaaatcaaaagactcgaggacctgaagaacgtgttcccacctgaggtggccgtgttcgagcctagcgaggccgagatcagccacacccagaaagccaccctcgtgtgcctggctaccggcttctaccccgaccatgtggaactgtcttggtgggtcaacggcaaagaggtgcacagcggcgtgtgtaccgacccccagccactgaaagaacagcccgccctgaacgacagccggtactgcctgagcagcagactgagagtgtccgccaccttctggcagaacccccggaaccacttcagatgccaggtgcagttctacggcctgagcgagaacgacgagtggacccaggacagagccaagcccgtgacccagatcgtgtctgccgaagcctggggcagagccgattgcgacgtgaagctggtggaaaagagcttcgagacagacaccaacctgaacttccagaacctgagcgtgatcggcttcagaatcctgctgctgaaagtggccggctttaacctgctgatgaccctgcggctgtggtccagcagggccaagcgatctggatctggagcaacaaacttctcactactcaaacaagcaggtgacgtggaggagaatcccgggcctactagtgccaccatggactggatttggcgcatccttttccttgtcggcgctgctaccggcgcccattccgggcccgaggtgcagctggttgaatctggcggaggactggttcaggctggcggatctctgagactgtcttgtgccgccagcggctctgtgttcagcggcaatgtgatgggctggtacagacaggcccctggcaaagaaagagagtgggttgccgccattgccagcggcggcagcatctactacagagactctgtgaagggcagattcaccatcagccgggacaacgccaagaacaccgtgtacctccagatgaacagcctgaagcctgaggacaccgccgtgtactactgcaactctcaccctcctacactgccctattggggcctgggaacccaagtgacagtgtcctctggatccggcggcggaggatctggcggaggcggatctgggggcggaggctctttcgaagaagtgcagctggttgaatcaggcggaggactggttcagcctggcggatctctgagactgtcttgtgccgccagcggctacaccttcaccagctactggatgaactgggtccgacaggcccctggcaaaggactggaatgggtcggaatgatcgaccccagcgacagcgagacacactacaaccacatcttcaaggaccgcttcaccatcagcgccgacaccagcaagaataccgcctacctccagatgaactccctgagagccgaggacaccgccgtgtactactgcgccagaaacctgtatctgttcggccagggaaccctggtcacagtgtcatctacgcgtatccagaaccctgatcctgccgtgtaccagctgcgggatagcaagagcagcgacaagagcgtgtgtctgttcaccgacttcgacagccagaccaacgtgtcccagagcaaggactccgacgtgtacatcaccgataagtgcgtgctggacatgcggagcatggacttcaagagcaactccgccgtggcctggtccaacaagtccgatttcgcctgcgccaacgccttcaacaacagcattatccccgaggacacattcttcccaagccccgagagcagctgcggctttaccagcgagagctaccagcagggcgtgctgagcgccaccatcctgtacgagatcctgctgggcaaggccaccctgtacgccgtgctggtgtctgccctggtgctgatggctatggtcaagcggaaggacagccggggataa

SEQ ID NO: 36449 - DNA, 2262 bp, synthetic construct
  source 1..2262: mol_type = other DNA
atggccttaccagtgaccgccttgctcctgccgctggccttgctgctccacgccgccaggccggacatccagatgacacagagccctagcagcctgtctgccagcgtgggagacagagtgaccatcacatgcaagagcagccagagcctgctggactccgatggcaagacctacctgaactggtatcagcagaagcccggcaaggcccctaagctgctgatctacctggtgtccaagctggatagcggcgtgcccagcagattttctggcagcggcagcggaaccgacttcaccctgacaatatccagcctccagcctgaggacttcgccacctactactgcttccaaggcacccactttccattcaccttcggccagggcaccaaggtggaaatcaaaagactcgaggacctgaagaacgtgttcccacctgaggtggccgtgttcgagcctagcgaggccgagatcagccacacccagaaagccaccctcgtgtgcctggctaccggcttctaccccgaccatgtggaactgtcttggtgggtcaacggcaaagaggtgcacagcggcgtgtgtaccgacccccagccactgaaagaacagcccgccctgaacgacagccggtactgcctgagcagcagactgagagtgtccgccaccttctggcagaacccccggaaccacttcagatgccaggtgcagttctacggcctgagcgagaacgacgagtggacccaggacagagccaagcccgtgacccagatcgtgtctgccgaagcctggggcagagccgattgcgacgtgaagctggtggaaaagagcttcgagacagacaccaacctgaacttccagaacctgagcgtgatcggcttcagaatcctgctgctgaaagtggccggctttaacctgctgatgaccctgcggctgtggtccagcagggccaagcgatctggatctggagcaacaaacttctcactactcaaacaagcaggtgacgtggaggagaatcccgggcctactagtgccaccatggactggatttggcgcatccttttccttgtcggcgctgctaccggcgcccattccgggcccgaagttcagctgctggaatctggcggaggactcgttcaacctggcggctctctgagactgagctgtgccgcttctggcttcagcttctctagctacgccctgagctgggttcgacaagctcccggaaagggccttgaatgggtgtccagcatcggcgagaatgacggcaccacagactatgccgatgccgtgaaaggccggtttaccatcagcagagacaattccaagaacacgctctatctgcaaatgaactccctgcgcgtggaagatacagccgtgtattattgcgtgaaggacggcatccactggggacagggaaccctggttacagtgtctagcggatccggcggcggaggatctggcggaggcggatctgggggcggaggctctttcgaagaagtgcagctggttgaatcaggcggaggactggttcagcctggcggatctctgagactgtcttgtgccgccagcggctacaccttcaccagctactggatgaactgggtccgacaggcccctggcaaaggactggaatgggtcggaatgatcgaccccagcgacagcgagacacactacaaccacatcttcaaggaccgcttcaccatcagcgccgacaccagcaagaataccgcctacctccagatgaactccctgagagccgaggacaccgccgtgtactactgcgccagaaacctgtatctgttcggccagggaaccctggtcacagtgtcatctacgcgtatccagaaccctgatcctgccgtgtaccagctgcgggatagcaagagcagcgacaagagcgtgtgtctgttcaccgacttcgacagccagaccaacgtgtcccagagcaaggactccgacgtgtacatcaccgataagtgcgtgctggacatgcggagcatggacttcaagagcaactccgccgtggcctggtccaacaagtccgatttcgcctgcgccaacgccttcaacaacagcattatccccgaggacacattcttcccaagccccgagagcagctgcggctttaccagcgagagctaccagcagggcgtgctgagcgccaccatcctgtacgagatcctgctgggcaaggccaccctgtacgccgtgctggtgtctgccctggtgctgatggctatggtcaagcggaaggacagccggggataa

SEQ ID NO: 36450 - DNA, 3369 bp, synthetic construct
  source 1..3369: mol_type = other DNA
atgggacccagactgctgttttgggctctgctgtgtctgctcggcacaggacctgttgaagctggcgtgacacagagccccacacacctgattaagaccagaggccagcaggccacactgagatgcagccctatcagcggccacaccagcgtgtactggtatcagcaggctctcggactgggcctccagttcctgctttggtacgacgagggcgaagagagaaaccggggcaacttccctcctcggttttccggcagacagttccccaactacagcagcgagctgaacgtgaacgccctggaactggaagatagcgccctgtacctgtgtgcctcttctcttggtggacctcgcggactggctggactgagaggggatgagcagtttttcggccctggcaccagactgaccgtgctggaaggtaccggcggaggcggatctggcggcggagaattcgacatccagatgacacagagccctagcagcctgtctgccagcgtgggagacagagtgaccatcacatgcaagagcagccagagcctgctggactccgatggcaagacctacctgaactggtatcagcagaagcccggcaaggcccctaagctgctgatctacctggtgtccaagctggatagcggcgtgcccagcagattttctggcagcggcagcggaaccgacttcaccctgacaatatccagcctccagcctgaggacttcgccacctactactgcttccaaggcacccactttccattcaccttcggccagggcaccaaggtggaaatcaaaagactcgaggacctgaagaacgtgttcccacctgaggtggccgtgttcgagcctagcgaggccgagatcagccacacccagaaagccaccctcgtgtgcctggctaccggcttctaccccgaccatgtggaactgtcttggtgggtcaacggcaaagaggtgcacagcggcgtgtgtaccgacccccagccactgaaagaacagcccgccctgaacgacagccggtactgcctgagcagcagactgagagtgtccgccaccttctggcagaacccccggaaccacttcagatgccaggtgcagttctacggcctgagcgagaacgacgagtggacccaggacagagccaagcccgtgacccagatcgtgtctgccgaagcctggggcagagccgattgcgacgtgaagctggtggaaaagagcttcgagacagacaccaacctgaacttccagaacctgagcgtgatcggcttcagaatcctgctgctgaaagtggccggctttaacctgctgatgaccctgcggctgtggtccagcagggccaagcgatctggatctggagcaacaaacttctcactactcaaacaagcaggtgacgtggaggagaatcccgggcctactagtgccaccatggactggatttggcgcatccttttccttgtcggcgctgctaccggcgcccattccgggcccgaagtgcagctggttgaatctggcggaggactggttcaggctggcggatctctgagactgtcttgtgccgccagcggcagaacctttagcatgggctggtttagacaggcccctggcaaagagagagagttcgtcgccgccatcacatactctggcggcagcccttactacgccgactctgtgaagggcagattcaccatcagccgggacaacgccaagaacaccgtgtacctccagatgaacagcctgaagcctgaggacaccgccgtgtactactgcgccgccaatccaacatacggcagcgactggaacgccgagaattggggccagggaacccaagtgacagtgtctagcggatccggcggcggaggatctggcggaggcggatctgggggcggaggctctttcgaagaagtgcagctggttgaatcaggcggaggactggttcagcctggcggatctctgagactgtcttgtgccgccagcggctacaccttcaccagctactggatgaactgggtccgacaggcccctggcaaaggactggaatgggtcggaatgatcgaccccagcgacagcgagacacactacaaccacatcttcaaggaccgcttcaccatcagcgccgacaccagcaagaataccgcctacctccagatgaactccctgagagccgaggacaccgccgtgtactactgcgccagaaacctgtatctgttcggccagggaaccctggtcacagtgtcatctacgcgtatccagaaccctgatcctgccgtgtaccagctgcgggatagcaagagcagcgacaagagcgtgtgtctgttcaccgacttcgacagccagaccaacgtgtcccagagcaaggactccgacgtgtacatcaccgataagtgcgtgctggacatgcggagcatggacttcaagagcaactccgccgtggcctggtccaacaagtccgatttcgcctgcgccaacgccttcaacaacagcattatccccgaggacacattcttcccaagccccgagagcagctgcggctttaccagcgagagctaccagcagggcgtgctgagcgccaccatcctgtacgagatcctgctgggcaaggccaccctgtacgccgtgctggtgtctgccctggtgctgatggctatggtcaagcggaaggacagccggggacgcgccaagagaagcggatctggcgtgaagcagaccctgaatttcgacctgctgaagctggctggcgacgtggaatccaacccaggcccttctagaggccatatgaccgagtacaagcccacggtgcgcctcgccacccgcgacgacgtccccagggccgtacgcaccctcgccgccgcgttcgccgactaccccgccacgcgccacaccgtcgatccggaccgccacatcgagcgggtcaccgagctgcaagaactcttcctcacgcgcgtcgggctcgacatcggcaaggtgtgggtcgcggacgacggcgccgcggtggcggtctggaccacgccggagagcgtcgaagcgggggcggtgttcgccgagatcggcccgcgcatggccgagttgagcggttcccggctggccgcgcagcaacagatggaaggcctcctggcgccgcaccggcccaaggagcccgcgtggttcctggccaccgtcggcgtctcgcccgaccaccagggcaagggtctgggcagcgccgtcgtgctccccggagtggaggcggccgagcgcgccggggtgcccgccttcctggagacctccgcgccccgcaacctccccttctacgagcggctcggcttcaccgtcaccgccgacgtcgaggtgcccgaaggaccgcgcacctggtgcatgacccgcaagcccggtgcctga

SEQ ID NO: 36451 - DNA, 3366 bp, synthetic construct
  source 1..3366: mol_type = other DNA
atgggacccagactgctgttttgggctctgctgtgtctgctcggcacaggacctgttgaagctggcgtgacacagagccccacacacctgattaagaccagaggccagcaggccacactgagatgcagccctatcagcggccacaccagcgtgtactggtatcagcaggctctcggactgggcctccagttcctgctttggtacgacgagggcgaagagagaaaccggggcaacttccctcctcggttttccggcagacagttccccaactacagcagcgagctgaacgtgaacgccctggaactggaagatagcgccctgtacctgtgtgccagctctctcggcggagatgaactgggagccgatggcaacgagcagttctttggccctggcaccagactgaccgtgctggaaggtaccggcggaggcggatctggcggcggaagcgaattcgacatccagatgacacagagccctagcagcctgtctgccagcgtgggagacagagtgaccatcacatgcaagagcagccagagcctgctggactccgatggcaagacctacctgaactggtatcagcagaagcccggcaaggcccctaagctgctgatctacctggtgtccaagctggatagcggcgtgcccagcagattttctggcagcggcagcggaaccgacttcaccctgacaatatccagcctccagcctgaggacttcgccacctactactgcttccaaggcacccactttccattcaccttcggccagggcaccaaggtggaaatcaaaagactcgaggacctgaagaacgtgttcccacctgaggtggccgtgttcgagcctagcgaggccgagatcagccacacccagaaagccaccctcgtgtgcctggctaccggcttctaccccgaccatgtggaactgtcttggtgggtcaacggcaaagaggtgcacagcggcgtgtgtaccgacccccagccactgaaagaacagcccgccctgaacgacagccggtactgcctgagcagcagactgagagtgtccgccaccttctggcagaacccccggaaccacttcagatgccaggtgcagttctacggcctgagcgagaacgacgagtggacccaggacagagccaagcccgtgacccagatcgtgtctgccgaagcctggggcagagccgattgcgacgtgaagctggtggaaaagagcttcgagacagacaccaacctgaacttccagaacctgagcgtgatcggcttcagaatcctgctgctgaaagtggccggctttaacctgctgatgaccctgcggctgtggtccagcagggccaagcgatctggatctggagcaacaaacttctcactactcaaacaagcaggtgacgtggaggagaatcccgggcctactagtgccaccatggactggatttggcgcatccttttccttgtcggcgctgctaccggcgcccattccgggcccgaagtgcagctggttgaatctggcggaggactggttcaggctggcggatctctgagactgtcttgtgccgccagcggcagaacctttagcatgggctggtttagacaggcccctggcaaagagagagagttcgtcgccgccatcacatactctggcggcagcccttactacgccgactctgtgaagggcagattcaccatcagccgggacaacgccaagaacaccgtgtacctccagatgaacagcctgaagcctgaggacaccgccgtgtactactgcgccgccaatccaacatacggcagcgactggaacgccgagaattggggccagggaacccaagtgacagtgtctagcggatccggcggcggaggatctggcggaggcggatctgggggcggaggctctttcgaagaagtgcagctggttgaatcaggcggaggactggttcagcctggcggatctctgagactgtcttgtgccgccagcggctacaccttcaccagctactggatgaactgggtccgacaggcccctggcaaaggactggaatgggtcggaatgatcgaccccagcgacagcgagacacactacaaccacatcttcaaggaccgcttcaccatcagcgccgacaccagcaagaataccgcctacctccagatgaactccctgagagccgaggacaccgccgtgtactactgcgccagaaacctgtatctgttcggccagggaaccctggtcacagtgtcatctacgcgtatccagaaccctgatcctgccgtgtaccagctgcgggatagcaagagcagcgacaagagcgtgtgtctgttcaccgacttcgacagccagaccaacgtgtcccagagcaaggactccgacgtgtacatcaccgataagtgcgtgctggacatgcggagcatggacttcaagagcaactccgccgtggcctggtccaacaagtccgatttcgcctgcgccaacgccttcaacaacagcattatccccgaggacacattcttcccaagccccgagagcagctgcggctttaccagcgagagctaccagcagggcgtgctgagcgccaccatcctgtacgagatcctgctgggcaaggccaccctgtacgccgtgctggtgtctgccctggtgctgatggctatggtcaagcggaaggacagccggggacgcgccaagagaagcggatctggcgtgaagcagaccctgaatttcgacctgctgaagctggctggcgacgtggaatccaacccaggcccttctagaggccatatgaccgagtacaagcccacggtgcgcctcgccacccgcgacgacgtccccagggccgtacgcaccctcgccgccgcgttcgccgactaccccgccacgcgccacaccgtcgatccggaccgccacatcgagcgggtcaccgagctgcaagaactcttcctcacgcgcgtcgggctcgacatcggcaaggtgtgggtcgcggacgacggcgccgcggtggcggtctggaccacgccggagagcgtcgaagcgggggcggtgttcgccgagatcggcccgcgcatggccgagttgagcggttcccggctggccgcgcagcaacagatggaaggcctcctggcgccgcaccggcccaaggagcccgcgtggttcctggccaccgtcggcgtctcgcccgaccaccagggcaagggtctgggcagcgccgtcgtgctccccggagtggaggcggccgagcgcgccggggtgcccgccttcctggagacctccgcgccccgcaacctccccttctacgagcggctcggcttcaccgtcaccgccgacgtcgaggtgcccgaaggaccgcgcacctggtgcatgacccgcaagcccggtgcctga

SEQ ID NO: 36452 - DNA, 2841 bp, synthetic construct
  source 1..2841: mol_type = other DNA
atggccttaccagtgaccgccttgctcctgccgctggccttgctgctccacgccgccaggccggacatccagatgacacagagccctagcagcctgtctgccagcgtgggagacagagtgaccatcacatgcaagagcagccagagcctgctggactccgatggcaagacctacctgaactggtatcagcagaagcccggcaaggcccctaagctgctgatctacctggtgtccaagctggatagcggcgtgcccagcagattttctggcagcggcagcggaaccgacttcaccctgacaatatccagcctccagcctgaggacttcgccacctactactgcttccaaggcacccactttccattcaccttcggccagggcaccaaggtggaaatcaaaagactcgaggacctgaagaacgtgttcccacctgaggtggccgtgttcgagcctagcgaggccgagatcagccacacccagaaagccaccctcgtgtgcctggctaccggcttctaccccgaccatgtggaactgtcttggtgggtcaacggcaaagaggtgcacagcggcgtgtgtaccgacccccagccactgaaagaacagcccgccctgaacgacagccggtactgcctgagcagcagactgagagtgtccgccaccttctggcagaacccccggaaccacttcagatgccaggtgcagttctacggcctgagcgagaacgacgagtggacccaggacagagccaagcccgtgacccagatcgtgtctgccgaagcctggggcagagccgattgcgacgtgaagctggtggaaaagagcttcgagacagacaccaacctgaacttccagaacctgagcgtgatcggcttcagaatcctgctgctgaaagtggccggctttaacctgctgatgaccctgcggctgtggtccagcagggccaagcgatctggatctggagcaacaaacttctcactactcaaacaagcaggtgacgtggaggagaatcccgggcctactagtgccaccatggactggatttggcgcatccttttccttgtcggcgctgctaccggcgcccattccgggcccatgggaagctggcttgagttctaccacagactcaacgccattgacagcaggctgtgggcacttggcggaagcgaagctgaactcgccgcttttgaaaaagaaattgccgctttcgagtccgagcttcaggcttacaaaggcaaagggaatcctgaggtcgagagcctgagagatcacgctgcccacattagagagtggttgcaggcataccggcacaatggatccggcggcggaggatctggcggaggcggatctgggggcggaggctctttcgaagaagtgcagctggttgaatcaggcggaggactggttcagcctggcggatctctgagactgtcttgtgccgccagcggctacaccttcaccagctactggatgaactgggtccgacaggcccctggcaaaggactggaatgggtcggaatgatcgaccccagcgacagcgagacacactacaaccacatcttcaaggaccgcttcaccatcagcgccgacaccagcaagaataccgcctacctccagatgaactccctgagagccgaggacaccgccgtgtactactgcgccagaaacctgtatctgttcggccagggaaccctggtcacagtgtcatctacgcgtatccagaaccctgatcctgccgtgtaccagctgcgggatagcaagagcagcgacaagagcgtgtgtctgttcaccgacttcgacagccagaccaacgtgtcccagagcaaggactccgacgtgtacatcaccgataagtgcgtgctggacatgcggagcatggacttcaagagcaactccgccgtggcctggtccaacaagtccgatttcgcctgcgccaacgccttcaacaacagcattatccccgaggacacattcttcccaagccccgagagcagctgcggctttaccagcgagagctaccagcagggcgtgctgagcgccaccatcctgtacgagatcctgctgggcaaggccaccctgtacgccgtgctggtgtctgccctggtgctgatggctatggtcaagcggaaggacagccggggacgcgccaagagaagcggatctggcgtgaagcagaccctgaatttcgacctgctgaagctggctggcgacgtggaatccaacccaggcccttctagaggccatatgaccgagtacaagcccacggtgcgcctcgccacccgcgacgacgtccccagggccgtacgcaccctcgccgccgcgttcgccgactaccccgccacgcgccacaccgtcgatccggaccgccacatcgagcgggtcaccgagctgcaagaactcttcctcacgcgcgtcgggctcgacatcggcaaggtgtgggtcgcggacgacggcgccgcggtggcggtctggaccacgccggagagcgtcgaagcgggggcggtgttcgccgagatcggcccgcgcatggccgagttgagcggttcccggctggccgcgcagcaacagatggaaggcctcctggcgccgcaccggcccaaggagcccgcgtggttcctggccaccgtcggcgtctcgcccgaccaccagggcaagggtctgggcagcgccgtcgtgctccccggagtggaggcggccgagcgcgccggggtgcccgccttcctggagacctccgcgccccgcaacctccccttctacgagcggctcggcttcaccgtcaccgccgacgtcgaggtgcccgaaggaccgcgcacctggtgcatgacccgcaagcccggtgcctga

SEQ ID NO: 36453 - DNA, 2841 bp, synthetic construct
  source 1..2841: mol_type = other DNA
atggccttaccagtgaccgccttgctcctgccgctggccttgctgctccacgccgccaggccggcatgcatgggcagttggttcgagttctacgaccggctgaatgccatcgacgccagactgtgggctctcggaggatctgaagctgagctggccgccttcgagaaagagatcgccgcctttgagagcgagctgcaagcctacaaaggcaagggcaaccccgaggtggaaaacctgagagtgcacgccgctgccatcagagaatggctccaggcttacagacacaacggtaccggcggaggcggatctggcggcggaggtagcggtggcggaggatctgaattcgacatccagatgacacagagccctagcagcctgtctgccagcgtgggagacagagtgaccatcacatgcaagagcagccagagcctgctggactccgatggcaagacctacctgaactggtatcagcagaagcccggcaaggcccctaagctgctgatctacctggtgtccaagctggatagcggcgtgcccagcagattttctggcagcggcagcggaaccgacttcaccctgacaatatccagcctccagcctgaggacttcgccacctactactgcttccaaggcacccactttccattcaccttcggccagggcaccaaggtggaaatcaaaagactcgaggacctgaagaacgtgttcccacctgaggtggccgtgttcgagcctagcgaggccgagatcagccacacccagaaagccaccctcgtgtgcctggctaccggcttctaccccgaccatgtggaactgtcttggtgggtcaacggcaaagaggtgcacagcggcgtgtgtaccgacccccagccactgaaagaacagcccgccctgaacgacagccggtactgcctgagcagcagactgagagtgtccgccaccttctggcagaacccccggaaccacttcagatgccaggtgcagttctacggcctgagcgagaacgacgagtggacccaggacagagccaagcccgtgacccagatcgtgtctgccgaagcctggggcagagccgattgcgacgtgaagctggtggaaaagagcttcgagacagacaccaacctgaacttccagaacctgagcgtgatcggcttcagaatcctgctgctgaaagtggccggctttaacctgctgatgaccctgcggctgtggtccagcagggccaagcgatctggatctggagcaacaaacttctcactactcaaacaagcaggtgacgtggaggagaatcccgggcctactagtatggactggatttggcgcatccttttccttgtcggcgctgctaccggcgcgcattccttcgaagaagtgcagctggttgaatcaggcggaggactggttcagcctggcggatctctgagactgtcttgtgccgccagcggctacaccttcaccagctactggatgaactgggtccgacaggcccctggcaaaggactggaatgggtcggaatgatcgaccccagcgacagcgagacacactacaaccacatcttcaaggaccgcttcaccatcagcgccgacaccagcaagaataccgcctacctccagatgaactccctgagagccgaggacaccgccgtgtactactgcgccagaaacctgtatctgttcggccagggaaccctggtcacagtgtcatctacgcgtatccagaaccctgatcctgccgtgtaccagctgcgggatagcaagagcagcgacaagagcgtgtgtctgttcaccgacttcgacagccagaccaacgtgtcccagagcaaggactccgacgtgtacatcaccgataagtgcgtgctggacatgcggagcatggacttcaagagcaactccgccgtggcctggtccaacaagtccgatttcgcctgcgccaacgccttcaacaacagcattatccccgaggacacattcttcccaagccccgagagcagctgcggctttaccagcgagagctaccagcagggcgtgctgagcgccaccatcctgtacgagatcctgctgggcaaggccaccctgtacgccgtgctggtgtctgccctggtgctgatggctatggtcaagcggaaggacagccggggacgcgccaagagaagcggatctggcgtgaagcagaccctgaatttcgacctgctgaagctggctggcgacgtggaatccaacccaggcccttctagaggccatatgaccgagtacaagcccacggtgcgcctcgccacccgcgacgacgtccccagggccgtacgcaccctcgccgccgcgttcgccgactaccccgccacgcgccacaccgtcgatccggaccgccacatcgagcgggtcaccgagctgcaagaactcttcctcacgcgcgtcgggctcgacatcggcaaggtgtgggtcgcggacgacggcgccgcggtggcggtctggaccacgccggagagcgtcgaagcgggggcggtgttcgccgagatcggcccgcgcatggccgagttgagcggttcccggctggccgcgcagcaacagatggaaggcctcctggcgccgcaccggcccaaggagcccgcgtggttcctggccaccgtcggcgtctcgcccgaccaccagggcaagggtctgggcagcgccgtcgtgctccccggagtggaggcggccgagcgcgccggggtgcccgccttcctggagacctccgcgccccgcaacctccccttctacgagcggctcggcttcaccgtcaccgccgacgtcgaggtgcccgaaggaccgcgcacctggtgcatgacccgcaagcccggtgcctga

SEQ ID NO: 36454 - DNA, 3192 bp, synthetic construct
  source 1..3192: mol_type = other DNA
atggccttaccagtgaccgccttgctcctgccgctggccttgctgctccacgccgccaggccggcatgcatggaccccgacctggaaatcagagccgccttcctgcggcagagaaacacagccctgagaacagaggtggccgagctggaacaagaggtgcagcggctggaaaacgaggtgtcccagtacgagacaagatacggccctctcggaggcggaaaaggtaccggcggaggcggatctggcggcggaggtagcggtggcggaggatctgaattcgacatccagatgacacagagccctagcagcctgtctgccagcgtgggagacagagtgaccatcacatgcaagagcagccagagcctgctggactccgatggcaagacctacctgaactggtatcagcagaagcccggcaaggcccctaagctgctgatctacctggtgtccaagctggatagcggcgtgcccagcagattttctggcagcggcagcggaaccgacttcaccctgacaatatccagcctccagcctgaggacttcgccacctactactgcttccaaggcacccactttccattcaccttcggccagggcaccaaggtggaaatcaaaagactcgaggacctgaagaacgtgttcccacctgaggtggccgtgttcgagcctagcgaggccgagatcagccacacccagaaagccaccctcgtgtgcctggctaccggcttctaccccgaccatgtggaactgtcttggtgggtcaacggcaaagaggtgcacagcggcgtgtgtaccgacccccagccactgaaagaacagcccgccctgaacgacagccggtactgcctgagcagcagactgagagtgtccgccaccttctggcagaacccccggaaccacttcagatgccaggtgcagttctacggcctgagcgagaacgacgagtggacccaggacagagccaagcccgtgacccagatcgtgtctgccgaagcctggggcagagccgattgcgacgtgaagctggtggaaaagagcttcgagacagacaccaacctgaacttccagaacctgagcgtgatcggcttcagaatcctgctgctgaaagtggccggctttaacctgctgatgaccctgcggctgtggtccagcagggccaagcgatctggatctggagcaacaaacttctcactactcaaacaagcaggtgacgtggaggagaatcccgggcctactagtgccaccatggactggatttggcgcatccttttccttgtcggcgctgctaccggcgcccattccgggcccgaagtgcagctggttgaatctggcggaggactggttcaggctggcggatctctgagactgtcttgtgccgccagcggcagaacctttagcatgggctggtttagacaggcccctggcaaagagagagagttcgtcgccgccatcacatactctggcggcagcccttactacgccgactctgtgaagggcagattcaccatcagccgggacaacgccaagaacaccgtgtacctccagatgaacagcctgaagcctgaggacaccgccgtgtactactgcgccgccaatccaacatacggcagcgactggaacgccgagaattggggccagggaacccaagtgacagtgtctagcggatccggcggcggaggatctggcggaggcggatctgggggcggaggctctttcgaagaagtgcagctggttgaatcaggcggaggactggttcagcctggcggatctctgagactgtcttgtgccgccagcggctacaccttcaccagctactggatgaactgggtccgacaggcccctggcaaaggactggaatgggtcggaatgatcgaccccagcgacagcgagacacactacaaccacatcttcaaggaccgcttcaccatcagcgccgacaccagcaagaataccgcctacctccagatgaactccctgagagccgaggacaccgccgtgtactactgcgccagaaacctgtatctgttcggccagggaaccctggtcacagtgtcatctacgcgtatccagaaccctgatcctgccgtgtaccagctgcgggatagcaagagcagcgacaagagcgtgtgtctgttcaccgacttcgacagccagaccaacgtgtcccagagcaaggactccgacgtgtacatcaccgataagtgcgtgctggacatgcggagcatggacttcaagagcaactccgccgtggcctggtccaacaagtccgatttcgcctgcgccaacgccttcaacaacagcattatccccgaggacacattcttcccaagccccgagagcagctgcggctttaccagcgagagctaccagcagggcgtgctgagcgccaccatcctgtacgagatcctgctgggcaaggccaccctgtacgccgtgctggtgtctgccctggtgctgatggctatggtcaagcggaaggacagccggggacgcgccaagagaagcggatctggcgtgaagcagaccctgaatttcgacctgctgaagctggctggcgacgtggaatccaacccaggcccttctagaggccatatgaccgagtacaagcccacggtgcgcctcgccacccgcgacgacgtccccagggccgtacgcaccctcgccgccgcgttcgccgactaccccgccacgcgccacaccgtcgatccggaccgccacatcgagcgggtcaccgagctgcaagaactcttcctcacgcgcgtcgggctcgacatcggcaaggtgtgggtcgcggacgacggcgccgcggtggcggtctggaccacgccggagagcgtcgaagcgggggcggtgttcgccgagatcggcccgcgcatggccgagttgagcggttcccggctggccgcgcagcaacagatggaaggcctcctggcgccgcaccggcccaaggagcccgcgtggttcctggccaccgtcggcgtctcgcccgaccaccagggcaagggtctgggcagcgccgtcgtgctccccggagtggaggcggccgagcgcgccggggtgcccgccttcctggagacctccgcgccccgcaacctccccttctacgagcggctcggcttcaccgtcaccgccgacgtcgaggtgcccgaaggaccgcgcacctggtgcatgacccgcaagcccggtgcctga

SEQ ID NO: 36455 - DNA, 2841 bp, synthetic construct
  source 1..2841: mol_type = other DNA
atggccttaccagtgaccgccttgctcctgccgctggccttgctgctccacgccgccaggccggacatccagatgacacagagccctagcagcctgtctgccagcgtgggagacagagtgaccatcacatgcaagagcagccagagcctgctggactccgatggcaagacctacctgaactggtatcagcagaagcccggcaaggcccctaagctgctgatctacctggtgtccaagctggatagcggcgtgcccagcagattttctggcagcggcagcggaaccgacttcaccctgacaatatccagcctccagcctgaggacttcgccacctactactgcttccaaggcacccactttccattcaccttcggccagggcaccaaggtggaaatcaaaagactcgaggacctgaagaacgtgttcccacctgaggtggccgtgttcgagcctagcgaggccgagatcagccacacccagaaagccaccctcgtgtgcctggctaccggcttctaccccgaccatgtggaactgtcttggtgggtcaacggcaaagaggtgcacagcggcgtgtgtaccgacccccagccactgaaagaacagcccgccctgaacgacagccggtactgcctgagcagcagactgagagtgtccgccaccttctggcagaacccccggaaccacttcagatgccaggtgcagttctacggcctgagcgagaacgacgagtggacccaggacagagccaagcccgtgacccagatcgtgtctgccgaagcctggggcagagccgattgcgacgtgaagctggtggaaaagagcttcgagacagacaccaacctgaacttccagaacctgagcgtgatcggcttcagaatcctgctgctgaaagtggccggctttaacctgctgatgaccctgcggctgtggtccagcagggccaagcgatctggatctggagcaacaaacttctcactactcaaacaagcaggtgacgtggaggagaatcccgggcctactagtgccaccatggactggatttggcgcatccttttccttgtcggcgctgctaccggcgcccattccgggcccatgggatcttggagcgagttttacgatcggctgcacgccattcaccaccggctgtatgctctcggaggaagcgaagctgagctggccgcttttgaaaaagaaattgccgctttcgagtccgagcttcaggcttacaaaggcaaagggaatcctgaggtcgaggccctgagagataccgccgccttcatcagaacccggttgcaggcataccggcacaacggatccggcggcggaggatctggcggaggcggatctgggggcggaggctctttcgaagaagtgcagctggttgaatcaggcggaggactggttcagcctggcggatctctgagactgtcttgtgccgccagcggctacaccttcaccagctactggatgaactgggtccgacaggcccctggcaaaggactggaatgggtcggaatgatcgaccccagcgacagcgagacacactacaaccacatcttcaaggaccgcttcaccatcagcgccgacaccagcaagaataccgcctacctccagatgaactccctgagagccgaggacaccgccgtgtactactgcgccagaaacctgtatctgttcggccagggaaccctggtcacagtgtcatctacgcgtatccagaaccctgatcctgccgtgtaccagctgcgggatagcaagagcagcgacaagagcgtgtgtctgttcaccgacttcgacagccagaccaacgtgtcccagagcaaggactccgacgtgtacatcaccgataagtgcgtgctggacatgcggagcatggacttcaagagcaactccgccgtggcctggtccaacaagtccgatttcgcctgcgccaacgccttcaacaacagcattatccccgaggacacattcttcccaagccccgagagcagctgcggctttaccagcgagagctaccagcagggcgtgctgagcgccaccatcctgtacgagatcctgctgggcaaggccaccctgtacgccgtgctggtgtctgccctggtgctgatggctatggtcaagcggaaggacagccggggacgcgccaagagaagcggatctggcgtgaagcagaccctgaatttcgacctgctgaagctggctggcgacgtggaatccaacccaggcccttctagaggccatatgaccgagtacaagcccacggtgcgcctcgccacccgcgacgacgtccccagggccgtacgcaccctcgccgccgcgttcgccgactaccccgccacgcgccacaccgtcgatccggaccgccacatcgagcgggtcaccgagctgcaagaactcttcctcacgcgcgtcgggctcgacatcggcaaggtgtgggtcgcggacgacggcgccgcggtggcggtctggaccacgccggagagcgtcgaagcgggggcggtgttcgccgagatcggcccgcgcatggccgagttgagcggttcccggctggccgcgcagcaacagatggaaggcctcctggcgccgcaccggcccaaggagcccgcgtggttcctggccaccgtcggcgtctcgcccgaccaccagggcaagggtctgggcagcgccgtcgtgctccccggagtggaggcggccgagcgcgccggggtgcccgccttcctggagacctccgcgccccgcaacctccccttctacgagcggctcggcttcaccgtcaccgccgacgtcgaggtgcccgaaggaccgcgcacctggtgcatgacccgcaagcccggtgcctga

SEQ ID NO: 36456 - DNA, 3471 bp, synthetic construct
  source 1..3471: mol_type = other DNA
atggccttaccagtgaccgccttgctcctgccgctggccttgctgctccacgccgccaggccggacatccagatgacacagagccctagcagcctgtctgccagcgtgggagacagagtgaccatcacatgcaagagcagccagagcctgctggactccgatggcaagacctacctgaactggtatcagcagaagcccggcaaggcccctaagctgctgatctacctggtgtccaagctggatagcggcgtgcccagcagattttctggcagcggcagcggaaccgacttcaccctgacaatatccagcctccagcctgaggacttcgccacctactactgcttccaaggcacccactttccattcaccttcggccagggcaccaaggtggaaatcaaaagactcgaggacctgaagaacgtgttcccacctgaggtggccgtgttcgagcctagcgaggccgagatcagccacacccagaaagccaccctcgtgtgcctggctaccggcttctaccccgaccatgtggaactgtcttggtgggtcaacggcaaagaggtgcacagcggcgtgtgtaccgacccccagccactgaaagaacagcccgccctgaacgacagccggtactgcctgagcagcagactgagagtgtccgccaccttctggcagaacccccggaaccacttcagatgccaggtgcagttctacggcctgagcgagaacgacgagtggacccaggacagagccaagcccgtgacccagatcgtgtctgccgaagcctggggcagagccgattgcgacgtgaagctggtggaaaagagcttcgagacagacaccaacctgaacttccagaacctgagcgtgatcggcttcagaatcctgctgctgaaagtggccggctttaacctgctgatgaccctgcggctgtggtccagcagggccaagcgatctggatctggagcaacaaacttctcactactcaaacaagcaggtgacgtggaggagaatcccgggcctactagtaccatggactggatttggcgcatccttttccttgtcggcgctgctaccggcgcccattccctgttcaatcaagaggtgcagatccctctgaccgagagctactgtggcccctgtcctaagaactggatctgctacaagaacaactgctaccagttcttcgacgagagcaagaattggtacgagagccaggccagctgcatgagccagaatgccagcctgctgaaggtgtacagcaaagaggaccaggacctgctgaaactggtcaagagcgcccactggatgggccttgtgcacatccccaccaatggctcttggcagtgggaggacggcagcattctgagccctaacctgctgaccatcatcgagatgcagaagggcgactgcgccctgtacgccagcagctttaagggctacatcgagaattgcagcaccccgaacacctacatctgtatgcagagaaccgtttctggcggaggcggctctggaggaggcggaagtggcggcggaggcgacctctttaatcaagaagtccagattccactcaccgaatcctactgcggaccttgtccaaaaaattggatttgttataagaacaactgttatcaattctttgatgagtctaaaaattggtatgagtcccaggcttcctgcatgtctcagaacgcttctctgctgaaagtctactctaaagaagatcaggatctcctgaagctcgtcaagtctgcccattggatggggctcgtccacattcctaccaacggaagctggcaatgggaagatggctccatcctgtctccaaatctgctcacgattattgaaatgcagaaaggggattgtgctctctacgccagctccttcaagggatatattgagaactgtagcacgcccaatacttatatctgtatgcaacggaccgtgggatccggcggcggaggatctggcggaggcggatctgggggcggaggctctttcgaagaagtgcagctggttgaatcaggcggaggactggttcagcctggcggatctctgagactgtcttgtgccgccagcggctacaccttcaccagctactggatgaactgggtccgacaggcccctggcaaaggactggaatgggtcggaatgatcgaccccagcgacagcgagacacactacaaccacatcttcaaggaccgcttcaccatcagcgccgacaccagcaagaataccgcctacctccagatgaactccctgagagccgaggacaccgccgtgtactactgcgccagaaacctgtatctgttcggccagggaaccctggtcacagtgtcatctacgcgtatccagaaccctgatcctgccgtgtaccagctgcgggatagcaagagcagcgacaagagcgtgtgtctgttcaccgacttcgacagccagaccaacgtgtcccagagcaaggactccgacgtgtacatcaccgataagtgcgtgctggacatgcggagcatggacttcaagagcaactccgccgtggcctggtccaacaagtccgatttcgcctgcgccaacgccttcaacaacagcattatccccgaggacacattcttcccaagccccgagagcagctgcggctttaccagcgagagctaccagcagggcgtgctgagcgccaccatcctgtacgagatcctgctgggcaaggccaccctgtacgccgtgctggtgtctgccctggtgctgatggctatggtcaagcggaaggacagccggggacgcgccaagagaagcggatctggcgtgaagcagaccctgaatttcgacctgctgaagctggctggcgacgtggaatccaacccaggcccttctagaggccatatgaccgagtacaagcccacggtgcgcctcgccacccgcgacgacgtccccagggccgtacgcaccctcgccgccgcgttcgccgactaccccgccacgcgccacaccgtcgatccggaccgccacatcgagcgggtcaccgagctgcaagaactcttcctcacgcgcgtcgggctcgacatcggcaaggtgtgggtcgcggacgacggcgccgcggtggcggtctggaccacgccggagagcgtcgaagcgggggcggtgttcgccgagatcggcccgcgcatggccgagttgagcggttcccggctggccgcgcagcaacagatggaaggcctcctggcgccgcaccggcccaaggagcccgcgtggttcctggccaccgtcggcgtctcgcccgaccaccagggcaagggtctgggcagcgccgtcgtgctccccggagtggaggcggccgagcgcgccggggtgcccgccttcctggagacctccgcgccccgcaacctccccttctacgagcggctcggcttcaccgtcaccgccgacgtcgaggtgcccgaaggaccgcgcacctggtgcatgacccgcaagcccggtgcctga

SEQ ID NO: 36457 - DNA, 1857 bp, synthetic construct
  source 1..1857: mol_type = other DNA
atggccttaccagtgaccgccttgctcctgccgctggccttgctgctccacgccgccaggccggacatccagatgacacagagccctagcagcctgtctgccagcgtgggagacagagtgaccatcacatgcaagagcagccagagcctgctggactccgatggcaagacctacctgaactggtatcagcagaagcccggcaaggcccctaagctgctgatctacctggtgtccaagctggatagcggcgtgcccagcagattttctggcagcggcagcggaaccgacttcaccctgacaatatccagcctccagcctgaggacttcgccacctactactgcttccaaggcacccactttccattcaccttcggccagggcaccaaggtggaaatcaaaagactcgaggacctgaagaacgtgttcccacctgaggtggccgtgttcgagcctagcgaggccgagatcagccacacccagaaagccaccctcgtgtgcctggctaccggcttctaccccgaccatgtggaactgtcttggtgggtcaacggcaaagaggtgcacagcggcgtgtgtaccgacccccagccactgaaagaacagcccgccctgaacgacagccggtactgcctgagcagcagactgagagtgtccgccaccttctggcagaacccccggaaccacttcagatgccaggtgcagttctacggcctgagcgagaacgacgagtggacccaggacagagccaagcccgtgacccagatcgtgtctgccgaagcctggggcagagccgattgcggctttaccagcgagagctaccagcagggcgtgctgagcgccaccaacctgagcgtgatcggcttcagaatcctgctgctgaaagtggccggctttaacctgctgatgaccctgcggctgtggtccagcagggccaagcgatctggatctggagcaacaaacttctcactactcaaacaagcaggtgacgtggaggagaatcccgggcctactagtatggactggatttggcgcatccttttccttgtcggcgctgctaccggcgcgcattccttcgaagaagtgcagctggttgaatcaggcggaggactggttcagcctggcggatctctgagactgtcttgtgccgccagcggctacaccttcaccagctactggatgaactgggtccgacaggcccctggcaaaggactggaatgggtcggaatgatcgaccccagcgacagcgagacacactacaaccacatcttcaaggaccgcttcaccatcagcgccgacaccagcaagaataccgcctacctccagatgaactccctgagagccgaggacaccgccgtgtactactgcgccagaaacctgtatctgttcggccagggaaccctggtcacagtgtcatctacgcgtatccagaaccctgatcctgccgtgtaccagctgcgggatagcaagagcagcgacaagagcgtgtgtctgttcaccgacttcgacagccagaccaacgtgtcccagagcaaggactccgacgtgtacatcaccgataagtgcgtgctggacatgcggagcatggacttcaagagcaactccgccgtggcctggtccaacaagtccgatttcgcctgcgccaacgccttcaacaacagcattatccccgaggacacattcttcccaagccccgagagcagctgcgacgtgaagctggtggaaaagagcttcgagacagacaccaacctgaacttccagatcctgtacgagatcctgctgggcaaggccaccctgtacgccgtgctggtgtctgccctggtgctgatggctatggtcaagcggaaggacagccgggga

SEQ ID NO: 36458 - DNA, 1869 bp, synthetic construct
  source 1..1869: mol_type = other DNA
atggccttaccagtgaccgccttgctcctgccgctggccttgctgctccacgccgccaggccggacatccagatgacacagagccctagcagcctgtctgccagcgtgggagacagagtgaccatcacatgcaagagcagccagagcctgctggactccgatggcaagacctacctgaactggtatcagcagaagcccggcaaggcccctaagctgctgatctacctggtgtccaagctggatagcggcgtgcccagcagattttctggcagcggcagcggaaccgacttcaccctgacaatatccagcctccagcctgaggacttcgccacctactactgcttccaaggcacccactttccattcaccttcggccagggcaccaaggtggaaatcaaaagactcgagatccagaaccctgatcctgccgtgtaccagctgcgggatagcaagagcagcgacaagagcgtgtgtctgttcaccgacttcgacagccagaccaacgtgtcccagagcaaggactccgacgtgtacatcaccgataagtgcgtgctggacatgcggagcatggacttcaagagcaactccgccgtggcctggtccaacaagtccgatttcgcctgcgccaacgccttcaacaacagcattatccccgaggacacattcttcccaagccccgagagcagctgcgacgtgaagctggtggaaaagagcttcgagacagacaccaacctgaacttccagatcctgtacgagatcctgctgggcaaggccaccctgtacgccgtgctggtgtctgccctggtgctgatggctatggtcaagcggaaggacagccggggacgcgccaagagaagcggatctggcgtgaagcagaccctgaatttcgacctgctgaagctggctggcgacgtggaatccaacccaggccctactagtatggactggatttggcgcatccttttccttgtcggcgctgctaccggcgcgcattccttcgaagaagtgcagctggttgaatcaggcggaggactggttcagcctggcggatctctgagactgtcttgtgccgccagcggctacaccttcaccagctactggatgaactgggtccgacaggcccctggcaaaggactggaatgggtcggaatgatcgaccccagcgacagcgagacacactacaaccacatcttcaaggaccgcttcaccatcagcgccgacaccagcaagaataccgcctacctccagatgaactccctgagagccgaggacaccgccgtgtactactgcgccagaaacctgtatctgttcggccagggaaccctggtcacagtgtcatctacgcgtgaggacctgaagaacgtgttcccacctgaggtggccgtgttcgagcctagcgaggccgagatcagccacacccagaaagccaccctcgtgtgcctggctaccggcttctaccccgaccatgtggaactgtcttggtgggtcaacggcaaagaggtgcacagcggcgtgtgtaccgacccccagccactgaaagaacagcccgccctgaacgacagccggtactgcctgagcagcagactgagagtgtccgccaccttctggcagaacccccggaaccacttcagatgccaggtgcagttctacggcctgagcgagaacgacgagtggacccaggacagagccaagcccgtgacccagatcgtgtctgccgaagcctggggcagagccgattgcggctttaccagcgagagctaccagcagggcgtgctgagcgccaccaacctgagcgtgatcggcttcagaatcctgctgctgaaagtggccggctttaacctgctgatgaccctgcggctgtggtccagc

SEQ ID NO: 36459 - DNA, 2262 bp, synthetic construct
  source 1..2262: mol_type = other DNA
atggccttaccagtgaccgccttgctcctgccgctggccttgctgctccacgccgccaggccggaagtgcagctggttgaatctggcggaggactggttcagcctggcggatctctgagactgtcttgtgccgccagcggcttcagcttcagcgacttttggatgagctgggtccgacaggcccctggcaaaggacttgaatgggtcgccacaatcagccaggccggcagcgagaaggactacgtggactctgtgaagggcagattcaccatcagccgggacaacgccaagaagtccctgtacctccagatgaacagcctgagagccgaggacaccgccgtgtactattgtgcctctggcgtgtacagcttcgactacagaggccagggcaccctggtcacagtctcttctggtaccggcggaggcggatctggcggcggaggtagcggtggcggaggatctgaattcgacatccagatgacacagagccctagcagcctgtctgccagcgtgggagacagagtgaccatcacatgcaagagcagccagagcctgctggactccgatggcaagacctacctgaactggtatcagcagaagcccggcaaggcccctaagctgctgatctacctggtgtccaagctggatagcggcgtgcccagcagattttctggcagcggcagcggaaccgacttcaccctgacaatatccagcctccagcctgaggacttcgccacctactactgcttccaaggcacccactttccattcaccttcggccagggcaccaaggtggaaatcaaaagactcgaggacctgaagaacgtgttcccacctgaggtggccgtgttcgagcctagcgaggccgagatcagccacacccagaaagccaccctcgtgtgcctggctaccggcttctaccccgaccatgtggaactgtcttggtgggtcaacggcaaagaggtgcacagcggcgtgtgtaccgacccccagccactgaaagaacagcccgccctgaacgacagccggtactgcctgagcagcagactgagagtgtccgccaccttctggcagaacccccggaaccacttcagatgccaggtgcagttctacggcctgagcgagaacgacgagtggacccaggacagagccaagcccgtgacccagatcgtgtctgccgaagcctggggcagagccgattgcggctttaccagcgagagctaccagcagggcgtgctgagcgccaccaacctgagcgtgatcggcttcagaatcctgctgctgaaagtggccggctttaacctgctgatgaccctgcggctgtggtccagcagggccaagcgatctggatctggagcaacaaacttctcactactcaaacaagcaggtgacgtggaggagaatcccgggcctactagtatggactggatttggcgcatccttttccttgtcggcgctgctaccggcgcgcattccttcgaagaagtgcagctggttgaatcaggcggaggactggttcagcctggcggatctctgagactgtcttgtgccgccagcggctacaccttcaccagctactggatgaactgggtccgacaggcccctggcaaaggactggaatgggtcggaatgatcgaccccagcgacagcgagacacactacaaccacatcttcaaggaccgcttcaccatcagcgccgacaccagcaagaataccgcctacctccagatgaactccctgagagccgaggacaccgccgtgtactactgcgccagaaacctgtatctgttcggccagggaaccctggtcacagtgtcatctacgcgtatccagaaccctgatcctgccgtgtaccagctgcgggatagcaagagcagcgacaagagcgtgtgtctgttcaccgacttcgacagccagaccaacgtgtcccagagcaaggactccgacgtgtacatcaccgataagtgcgtgctggacatgcggagcatggacttcaagagcaactccgccgtggcctggtccaacaagtccgatttcgcctgcgccaacgccttcaacaacagcattatccccgaggacacattcttcccaagccccgagagcagctgcgacgtgaagctggtggaaaagagcttcgagacagacaccaacctgaacttccagatcctgtacgagatcctgctgggcaaggccaccctgtacgccgtgctggtgtctgccctggtgctgatggctatggtcaagcggaaggacagccgggga

SEQ ID NO: 36460 - DNA, 2274 bp, synthetic construct
  source 1..2274: mol_type = other DNA
atggccttaccagtgaccgccttgctcctgccgctggccttgctgctccacgccgccaggccggaagtgcagctggttgaatctggcggaggactggttcagcctggcggatctctgagactgtcttgtgccgccagcggcttcagcttcagcgacttttggatgagctgggtccgacaggcccctggcaaaggacttgaatgggtcgccacaatcagccaggccggcagcgagaaggactacgtggactctgtgaagggcagattcaccatcagccgggacaacgccaagaagtccctgtacctccagatgaacagcctgagagccgaggacaccgccgtgtactattgtgcctctggcgtgtacagcttcgactacagaggccagggcaccctggtcacagtctcttctggtaccggcggaggcggatctggcggcggaggtagcggtggcggaggatctgaattcgacatccagatgacacagagccctagcagcctgtctgccagcgtgggagacagagtgaccatcacatgcaagagcagccagagcctgctggactccgatggcaagacctacctgaactggtatcagcagaagcccggcaaggcccctaagctgctgatctacctggtgtccaagctggatagcggcgtgcccagcagattttctggcagcggcagcggaaccgacttcaccctgacaatatccagcctccagcctgaggacttcgccacctactactgcttccaaggcacccactttccattcaccttcggccagggcaccaaggtggaaatcaaaagactcgagatccagaaccctgatcctgccgtgtaccagctgcgggatagcaagagcagcgacaagagcgtgtgtctgttcaccgacttcgacagccagaccaacgtgtcccagagcaaggactccgacgtgtacatcaccgataagtgcgtgctggacatgcggagcatggacttcaagagcaactccgccgtggcctggtccaacaagtccgatttcgcctgcgccaacgccttcaacaacagcattatccccgaggacacattcttcccaagccccgagagcagctgcgacgtgaagctggtggaaaagagcttcgagacagacaccaacctgaacttccagatcctgtacgagatcctgctgggcaaggccaccctgtacgccgtgctggtgtctgccctggtgctgatggctatggtcaagcggaaggacagccggggacgcgccaagagaagcggatctggcgtgaagcagaccctgaatttcgacctgctgaagctggctggcgacgtggaatccaacccaggccctactagtatggactggatttggcgcatccttttccttgtcggcgctgctaccggcgcgcattccttcgaagaagtgcagctggttgaatcaggcggaggactggttcagcctggcggatctctgagactgtcttgtgccgccagcggctacaccttcaccagctactggatgaactgggtccgacaggcccctggcaaaggactggaatgggtcggaatgatcgaccccagcgacagcgagacacactacaaccacatcttcaaggaccgcttcaccatcagcgccgacaccagcaagaataccgcctacctccagatgaactccctgagagccgaggacaccgccgtgtactactgcgccagaaacctgtatctgttcggccagggaaccctggtcacagtgtcatctacgcgtgaggacctgaagaacgtgttcccacctgaggtggccgtgttcgagcctagcgaggccgagatcagccacacccagaaagccaccctcgtgtgcctggctaccggcttctaccccgaccatgtggaactgtcttggtgggtcaacggcaaagaggtgcacagcggcgtgtgtaccgacccccagccactgaaagaacagcccgccctgaacgacagccggtactgcctgagcagcagactgagagtgtccgccaccttctggcagaacccccggaaccacttcagatgccaggtgcagttctacggcctgagcgagaacgacgagtggacccaggacagagccaagcccgtgacccagatcgtgtctgccgaagcctggggcagagccgattgcggctttaccagcgagagctaccagcagggcgtgctgagcgccaccaacctgagcgtgatcggcttcagaatcctgctgctgaaagtggccggctttaacctgctgatgaccctgcggctgtggtccagc

SEQ ID NO: 36461 - DNA, 2673 bp, synthetic construct
  source 1..2673: mol_type = other DNA
atggccttaccagtgaccgccttgctcctgccgctggccttgctgctccacgccgccaggccggaagtgcagctggttgaatctggcggaggactggttcagcctggcggatctctgagactgtcttgtgccgccagcggcttcagcttcagcgacttttggatgagctgggtccgacaggcccctggcaaaggacttgaatgggtcgccacaatcagccaggccggcagcgagaaggactacgtggactctgtgaagggcagattcaccatcagccgggacaacgccaagaagtccctgtacctccagatgaacagcctgagagccgaggacaccgccgtgtactattgtgcctctggcgtgtacagcttcgactacagaggccagggcaccctggtcacagtctcttctggtaccggcggaggcggatctggcggcggaggtagcggtggcggaggatctgaattcgacatccagatgacacagagccctagcagcctgtctgccagcgtgggagacagagtgaccatcacatgcaagagcagccagagcctgctggactccgatggcaagacctacctgaactggtatcagcagaagcccggcaaggcccctaagctgctgatctacctggtgtccaagctggatagcggcgtgcccagcagattttctggcagcggcagcggaaccgacttcaccctgacaatatccagcctccagcctgaggacttcgccacctactactgcttccaaggcacccactttccattcaccttcggccagggcaccaaggtggaaatcaaaagactcgaggacctgaagaacgtgttcccacctgaggtggccgtgttcgagcctagcgaggccgagatcagccacacccagaaagccaccctcgtgtgcctggctaccggcttctaccccgaccatgtggaactgtcttggtgggtcaacggcaaagaggtgcacagcggcgtgtgtaccgacccccagccactgaaagaacagcccgccctgaacgacagccggtactgcctgagcagcagactgagagtgtccgccaccttctggcagaacccccggaaccacttcagatgccaggtgcagttctacggcctgagcgagaacgacgagtggacccaggacagagccaagcccgtgacccagatcgtgtctgccgaagcctggggcagagccgattgcggctttaccagcgagagctaccagcagggcgtgctgagcgccaccaacctgagcgtgatcggcttcagaatcctgctgctgaaagtggccggctttaacctgctgatgaccctgcggctgtggtccagcagggccaagcgatctggatctggagcaacaaacttctcactactcaaacaagcaggtgacgtggaggagaatcccgggcctactagtatggactggatttggcgcatccttttccttgtcggcgctgctaccggcgcgcattccgggccccagctccagctgcaagagtctggacctggcctggtcaagcctagcgagacactgagcctgacctgtaccgtgtccggcgatagcatcagcagcggcgattactactggggctggatcagacagcctcctggcaaaggactggaatggatcggccacatctactacagcggcgtgacctactacaaccccagcctgaagtccagagtgaccatcagcgtggacaccagccggaaccagttctccctgaagctgtctagcgtgacagccgccgataccgccgtgtactactgcaccagagaggacagcagcaactggcggagtagaggccagggaacactggtcacagttagctctggatccggcggaggcggaagtggaggcggaggatctggcggcggaggctctttcgaagaagtgcagctggttgaatcaggcggaggactggttcagcctggcggatctctgagactgtcttgtgccgccagcggctacaccttcaccagctactggatgaactgggtccgacaggcccctggcaaaggactggaatgggtcggaatgatcgaccccagcgacagcgagacacactacaaccacatcttcaaggaccgcttcaccatcagcgccgacaccagcaagaataccgcctacctccagatgaactccctgagagccgaggacaccgccgtgtactactgcgccagaaacctgtatctgttcggccagggaaccctggtcacagtgtcatctacgcgtatccagaaccctgatcctgccgtgtaccagctgcgggatagcaagagcagcgacaagagcgtgtgtctgttcaccgacttcgacagccagaccaacgtgtcccagagcaaggactccgacgtgtacatcaccgataagtgcgtgctggacatgcggagcatggacttcaagagcaactccgccgtggcctggtccaacaagtccgatttcgcctgcgccaacgccttcaacaacagcattatccccgaggacacattcttcccaagccccgagagcagctgcgacgtgaagctggtggaaaagagcttcgagacagacaccaacctgaacttccagatcctgtacgagatcctgctgggcaaggccaccctgtacgccgtgctggtgtctgccctggtgctgatggctatggtcaagcggaaggacagccgggga

SEQ ID NO: 36462 - DNA, 2685 bp, synthetic construct
  source 1..2685: mol_type = other DNA
atggccttaccagtgaccgccttgctcctgccgctggccttgctgctccacgccgccaggccggaagtgcagctggttgaatctggcggaggactggttcagcctggcggatctctgagactgtcttgtgccgccagcggcttcagcttcagcgacttttggatgagctgggtccgacaggcccctggcaaaggacttgaatgggtcgccacaatcagccaggccggcagcgagaaggactacgtggactctgtgaagggcagattcaccatcagccgggacaacgccaagaagtccctgtacctccagatgaacagcctgagagccgaggacaccgccgtgtactattgtgcctctggcgtgtacagcttcgactacagaggccagggcaccctggtcacagtctcttctggtaccggcggaggcggatctggcggcggaggtagcggtggcggaggatctgaattcgacatccagatgacacagagccctagcagcctgtctgccagcgtgggagacagagtgaccatcacatgcaagagcagccagagcctgctggactccgatggcaagacctacctgaactggtatcagcagaagcccggcaaggcccctaagctgctgatctacctggtgtccaagctggatagcggcgtgcccagcagattttctggcagcggcagcggaaccgacttcaccctgacaatatccagcctccagcctgaggacttcgccacctactactgcttccaaggcacccactttccattcaccttcggccagggcaccaaggtggaaatcaaaagactcgagatccagaaccctgatcctgccgtgtaccagctgcgggatagcaagagcagcgacaagagcgtgtgtctgttcaccgacttcgacagccagaccaacgtgtcccagagcaaggactccgacgtgtacatcaccgataagtgcgtgctggacatgcggagcatggacttcaagagcaactccgccgtggcctggtccaacaagtccgatttcgcctgcgccaacgccttcaacaacagcattatccccgaggacacattcttcccaagccccgagagcagctgcgacgtgaagctggtggaaaagagcttcgagacagacaccaacctgaacttccagatcctgtacgagatcctgctgggcaaggccaccctgtacgccgtgctggtgtctgccctggtgctgatggctatggtcaagcggaaggacagccggggacgcgccaagagaagcggatctggcgtgaagcagaccctgaatttcgacctgctgaagctggctggcgacgtggaatccaacccaggccctactagtatggactggatttggcgcatccttttccttgtcggcgctgctaccggcgcgcattccgggccccagctccagctgcaagagtctggacctggcctggtcaagcctagcgagacactgagcctgacctgtaccgtgtccggcgatagcatcagcagcggcgattactactggggctggatcagacagcctcctggcaaaggactggaatggatcggccacatctactacagcggcgtgacctactacaaccccagcctgaagtccagagtgaccatcagcgtggacaccagccggaaccagttctccctgaagctgtctagcgtgacagccgccgataccgccgtgtactactgcaccagagaggacagcagcaactggcggagtagaggccagggaacactggtcacagttagctctggatccggcggaggcggaagtggaggcggaggatctggcggcggaggctctttcgaagaagtgcagctggttgaatcaggcggaggactggttcagcctggcggatctctgagactgtcttgtgccgccagcggctacaccttcaccagctactggatgaactgggtccgacaggcccctggcaaaggactggaatgggtcggaatgatcgaccccagcgacagcgagacacactacaaccacatcttcaaggaccgcttcaccatcagcgccgacaccagcaagaataccgcctacctccagatgaactccctgagagccgaggacaccgccgtgtactactgcgccagaaacctgtatctgttcggccagggaaccctggtcacagtgtcatctacgcgtgaggacctgaagaacgtgttcccacctgaggtggccgtgttcgagcctagcgaggccgagatcagccacacccagaaagccaccctcgtgtgcctggctaccggcttctaccccgaccatgtggaactgtcttggtgggtcaacggcaaagaggtgcacagcggcgtgtgtaccgacccccagccactgaaagaacagcccgccctgaacgacagccggtactgcctgagcagcagactgagagtgtccgccaccttctggcagaacccccggaaccacttcagatgccaggtgcagttctacggcctgagcgagaacgacgagtggacccaggacagagccaagcccgtgacccagatcgtgtctgccgaagcctggggcagagccgattgcggctttaccagcgagagctaccagcagggcgtgctgagcgccaccaacctgagcgtgatcggcttcagaatcctgctgctgaaagtggccggctttaacctgctgatgaccctgcggctgtggtccagc

SEQ ID NO: 36463 - DNA, 2169 bp, synthetic construct
  source 1..2169: mol_type = other DNA
atggccttaccagtgaccgccttgctcctgccgctggccttgctgctccacgccgccaggccggacatccagatgacacagagccctagcagcctgtctgccagcgtgggagacagagtgaccatcacatgcaagagcagccagagcctgctggactccgatggcaagacctacctgaactggtatcagcagaagcccggcaaggcccctaagctgctgatctacctggtgtccaagctggatagcggcgtgcccagcagattttctggcagcggcagcggaaccgacttcaccctgacaatatccagcctccagcctgaggacttcgccacctactactgcttccaaggcacccactttccattcaccttcggccagggcaccaaggtggaaatcaaaagactcgaggacctgaagaacgtgttcccacctgaggtggccgtgttcgagcctagcgaggccgagatcagccacacccagaaagccaccctcgtgtgcctggctaccggcttctaccccgaccatgtggaactgtcttggtgggtcaacggcaaagaggtgcacagcggcgtgtgtaccgacccccagccactgaaagaacagcccgccctgaacgacagccggtactgcctgagcagcagactgagagtgtccgccaccttctggcagaacccccggaaccacttcagatgccaggtgcagttctacggcctgagcgagaacgacgagtggacccaggacagagccaagcccgtgacccagatcgtgtctgccgaagcctggggcagagccgatgatgtgattaagatccactggcaggaaaagaagtccaacaccatcctgggcagccaggaaggcaacaccatgaagaccaacgacacctacatgaagttcagctggctgaccgtgcccgagaagtccctggacaaagaacacagatgcatcgtgcggcacgaaaacaacaagaacggcgtggaccaggaaatcatcttcccacccatcaagaccgatgtgattacaatggaccccaaggacaactgctccaaggacgccaacgataccctgctgctccagctgaccaacaccagcgcctactacatgtacttgttgctgctgctgaagtccgtggtgtacttcgccatcatcacatgctgcctgctgatggctatggtcaagcggaaggacagccggggaagggccaagcgatctggatctggagcaacaaacttctcactactcaaacaagcaggtgacgtggaggagaatcccgggcctactagtatggactggatttggcgcatccttttccttgtcggcgctgctaccggcgcgcattccttcgaagaagtgcagctggttgaatcaggcggaggactggttcagcctggcggatctctgagactgtcttgtgccgccagcggctacaccttcaccagctactggatgaactgggtccgacaggcccctggcaaaggactggaatgggtcggaatgatcgaccccagcgacagcgagacacactacaaccacatcttcaaggaccgcttcaccatcagcgccgacaccagcaagaataccgcctacctccagatgaactccctgagagccgaggacaccgccgtgtactactgcgccagaaacctgtatctgttcggccagggaaccctggtcacagtgtcatctacgcgtatccagaaccctgatcctgccgtgtaccagctgcgggatagcaagagcagcgacaagagcgtgtgtctgttcaccgacttcgacagccagaccaacgtgtcccagagcaaggactccgacgtgtacatcaccgataagtgcgtgctggacatgcggagcatggacttcaagagcaactccgccgtggcctggtccaacaagtccgatttcgcctgcgccaacgccttcaacaacagcattatccccgaggacacattcttcccaagccccgagagcagcgactccaccgaccacgtgaagcccaaagagacagagaacaccaagcagcccagcaagagctgccacaagcccaaggccatcgtgcacaccgagaaagtgaacatgatgagcctgaccgtgctgggcctgcggatgctgttcgccaaaaccgtggccgtgaacttcctgctgaccgccaagctgttcttcctcctcaccgcc

SEQ ID NO: 36464 - DNA, 2181 bp, synthetic construct
  source 1..2181: mol_type = other DNA
atggccttaccagtgaccgccttgctcctgccgctggccttgctgctccacgccgccaggccggacatccagatgacacagagccctagcagcctgtctgccagcgtgggagacagagtgaccatcacatgcaagagcagccagagcctgctggactccgatggcaagacctacctgaactggtatcagcagaagcccggcaaggcccctaagctgctgatctacctggtgtccaagctggatagcggcgtgcccagcagattttctggcagcggcagcggaaccgacttcaccctgacaatatccagcctccagcctgaggacttcgccacctactactgcttccaaggcacccactttccattcaccttcggccagggcaccaaggtggaaatcaaaagactcgagatccagaaccctgatcctgccgtgtaccagctgcgggatagcaagagcagcgacaagagcgtgtgtctgttcaccgacttcgacagccagaccaacgtgtcccagagcaaggactccgacgtgtacatcaccgataagtgcgtgctggacatgcggagcatggacttcaagagcaactccgccgtggcctggtccaacaagtccgatttcgcctgcgccaacgccttcaacaacagcattatccccgaggacacattcttcccaagccccgagagcagcgactccaccgaccacgtgaagcccaaagagacagagaacaccaagcagcccagcaagagctgccacaagcccaaggccatcgtgcacaccgagaaagtgaacatgatgagcctgaccgtgctgggcctgcggatgctgttcgccaaaaccgtggccgtgaacttcctgctgaccgccaagctgttcttcctcctcaccgcccgcgccaagagaagcggatctggcgtgaagcagaccctgaatttcgacctgctgaagctggctggcgacgtggaatccaacccaggccctactagtatggactggatttggcgcatccttttccttgtcggcgctgctaccggcgcgcattccttcgaagaagtgcagctggttgaatcaggcggaggactggttcagcctggcggatctctgagactgtcttgtgccgccagcggctacaccttcaccagctactggatgaactgggtccgacaggcccctggcaaaggactggaatgggtcggaatgatcgaccccagcgacagcgagacacactacaaccacatcttcaaggaccgcttcaccatcagcgccgacaccagcaagaataccgcctacctccagatgaactccctgagagccgaggacaccgccgtgtactactgcgccagaaacctgtatctgttcggccagggaaccctggtcacagtgtcatctacgcgtgaggacctgaagaacgtgttcccacctgaggtggccgtgttcgagcctagcgaggccgagatcagccacacccagaaagccaccctcgtgtgcctggctaccggcttctaccccgaccatgtggaactgtcttggtgggtcaacggcaaagaggtgcacagcggcgtgtgtaccgacccccagccactgaaagaacagcccgccctgaacgacagccggtactgcctgagcagcagactgagagtgtccgccaccttctggcagaacccccggaaccacttcagatgccaggtgcagttctacggcctgagcgagaacgacgagtggacccaggacagagccaagcccgtgacccagatcgtgtctgccgaagcctggggcagagccgatgatgtgattaagatccactggcaggaaaagaagtccaacaccatcctgggcagccaggaaggcaacaccatgaagaccaacgacacctacatgaagttcagctggctgaccgtgcccgagaagtccctggacaaagaacacagatgcatcgtgcggcacgaaaacaacaagaacggcgtggaccaggaaatcatcttcccacccatcaagaccgatgtgattacaatggaccccaaggacaactgctccaaggacgccaacgataccctgctgctccagctgaccaacaccagcgcctactacatgtacttgttgctgctgctgaagtccgtggtgtacttcgccatcatcacatgctgcctgctgatggctatggtcaagcggaaggacagccgggga

SEQ ID NO: 36465 - DNA, 2574 bp, synthetic construct
  source 1..2574: mol_type = other DNA
atggccttaccagtgaccgccttgctcctgccgctggccttgctgctccacgccgccaggccggaagtgcagctggttgaatctggcggaggactggttcagcctggcggatctctgagactgtcttgtgccgccagcggcttcagcttcagcgacttttggatgagctgggtccgacaggcccctggcaaaggacttgaatgggtcgccacaatcagccaggccggcagcgagaaggactacgtggactctgtgaagggcagattcaccatcagccgggacaacgccaagaagtccctgtacctccagatgaacagcctgagagccgaggacaccgccgtgtactattgtgcctctggcgtgtacagcttcgactacagaggccagggcaccctggtcacagtctcttctggtaccggcggaggcggatctggcggcggaggtagcggtggcggaggatctgaattcgacatccagatgacacagagccctagcagcctgtctgccagcgtgggagacagagtgaccatcacatgcaagagcagccagagcctgctggactccgatggcaagacctacctgaactggtatcagcagaagcccggcaaggcccctaagctgctgatctacctggtgtccaagctggatagcggcgtgcccagcagattttctggcagcggcagcggaaccgacttcaccctgacaatatccagcctccagcctgaggacttcgccacctactactgcttccaaggcacccactttccattcaccttcggccagggcaccaaggtggaaatcaaaagactcgaggacctgaagaacgtgttcccacctgaggtggccgtgttcgagcctagcgaggccgagatcagccacacccagaaagccaccctcgtgtgcctggctaccggcttctaccccgaccatgtggaactgtcttggtgggtcaacggcaaagaggtgcacagcggcgtgtgtaccgacccccagccactgaaagaacagcccgccctgaacgacagccggtactgcctgagcagcagactgagagtgtccgccaccttctggcagaacccccggaaccacttcagatgccaggtgcagttctacggcctgagcgagaacgacgagtggacccaggacagagccaagcccgtgacccagatcgtgtctgccgaagcctggggcagagccgatgatgtgattaagatccactggcaggaaaagaagtccaacaccatcctgggcagccaggaaggcaacaccatgaagaccaacgacacctacatgaagttcagctggctgaccgtgcccgagaagtccctggacaaagaacacagatgcatcgtgcggcacgaaaacaacaagaacggcgtggaccaggaaatcatcttcccacccatcaagaccgatgtgattacaatggaccccaaggacaactgctccaaggacgccaacgataccctgctgctccagctgaccaacaccagcgcctactacatgtacttgttgctgctgctgaagtccgtggtgtacttcgccatcatcacatgctgcctgctgatggctatggtcaagcggaaggacagccggggaagggccaagcgatctggatctggagcaacaaacttctcactactcaaacaagcaggtgacgtggaggagaatcccgggcctactagtatggactggatttggcgcatccttttccttgtcggcgctgctaccggcgcgcattccttcgaagaagtgcagctggttgaatcaggcggaggactggttcagcctggcggatctctgagactgtcttgtgccgccagcggctacaccttcaccagctactggatgaactgggtccgacaggcccctggcaaaggactggaatgggtcggaatgatcgaccccagcgacagcgagacacactacaaccacatcttcaaggaccgcttcaccatcagcgccgacaccagcaagaataccgcctacctccagatgaactccctgagagccgaggacaccgccgtgtactactgcgccagaaacctgtatctgttcggccagggaaccctggtcacagtgtcatctacgcgtatccagaaccctgatcctgccgtgtaccagctgcgggatagcaagagcagcgacaagagcgtgtgtctgttcaccgacttcgacagccagaccaacgtgtcccagagcaaggactccgacgtgtacatcaccgataagtgcgtgctggacatgcggagcatggacttcaagagcaactccgccgtggcctggtccaacaagtccgatttcgcctgcgccaacgccttcaacaacagcattatccccgaggacacattcttcccaagccccgagagcagcgactccaccgaccacgtgaagcccaaagagacagagaacaccaagcagcccagcaagagctgccacaagcccaaggccatcgtgcacaccgagaaagtgaacatgatgagcctgaccgtgctgggcctgcggatgctgttcgccaaaaccgtggccgtgaacttcctgctgaccgccaagctgttcttcctcctcaccgcc

SEQ ID NO: 36466 - DNA, 2586 bp, synthetic construct
  source 1..2586: mol_type = other DNA
atggccttaccagtgaccgccttgctcctgccgctggccttgctgctccacgccgccaggccggaagtgcagctggttgaatctggcggaggactggttcagcctggcggatctctgagactgtcttgtgccgccagcggcttcagcttcagcgacttttggatgagctgggtccgacaggcccctggcaaaggacttgaatgggtcgccacaatcagccaggccggcagcgagaaggactacgtggactctgtgaagggcagattcaccatcagccgggacaacgccaagaagtccctgtacctccagatgaacagcctgagagccgaggacaccgccgtgtactattgtgcctctggcgtgtacagcttcgactacagaggccagggcaccctggtcacagtctcttctggtaccggcggaggcggatctggcggcggaggtagcggtggcggaggatctgaattcgacatccagatgacacagagccctagcagcctgtctgccagcgtgggagacagagtgaccatcacatgcaagagcagccagagcctgctggactccgatggcaagacctacctgaactggtatcagcagaagcccggcaaggcccctaagctgctgatctacctggtgtccaagctggatagcggcgtgcccagcagattttctggcagcggcagcggaaccgacttcaccctgacaatatccagcctccagcctgaggacttcgccacctactactgcttccaaggcacccactttccattcaccttcggccagggcaccaaggtggaaatcaaaagactcgagatccagaaccctgatcctgccgtgtaccagctgcgggatagcaagagcagcgacaagagcgtgtgtctgttcaccgacttcgacagccagaccaacgtgtcccagagcaaggactccgacgtgtacatcaccgataagtgcgtgctggacatgcggagcatggacttcaagagcaactccgccgtggcctggtccaacaagtccgatttcgcctgcgccaacgccttcaacaacagcattatccccgaggacacattcttcccaagccccgagagcagcgactccaccgaccacgtgaagcccaaagagacagagaacaccaagcagcccagcaagagctgccacaagcccaaggccatcgtgcacaccgagaaagtgaacatgatgagcctgaccgtgctgggcctgcggatgctgttcgccaaaaccgtggccgtgaacttcctgctgaccgccaagctgttcttcctcctcaccgcccgcgccaagagaagcggatctggcgtgaagcagaccctgaatttcgacctgctgaagctggctggcgacgtggaatccaacccaggccctactagtatggactggatttggcgcatccttttccttgtcggcgctgctaccggcgcgcattccttcgaagaagtgcagctggttgaatcaggcggaggactggttcagcctggcggatctctgagactgtcttgtgccgccagcggctacaccttcaccagctactggatgaactgggtccgacaggcccctggcaaaggactggaatgggtcggaatgatcgaccccagcgacagcgagacacactacaaccacatcttcaaggaccgcttcaccatcagcgccgacaccagcaagaataccgcctacctccagatgaactccctgagagccgaggacaccgccgtgtactactgcgccagaaacctgtatctgttcggccagggaaccctggtcacagtgtcatctacgcgtgaggacctgaagaacgtgttcccacctgaggtggccgtgttcgagcctagcgaggccgagatcagccacacccagaaagccaccctcgtgtgcctggctaccggcttctaccccgaccatgtggaactgtcttggtgggtcaacggcaaagaggtgcacagcggcgtgtgtaccgacccccagccactgaaagaacagcccgccctgaacgacagccggtactgcctgagcagcagactgagagtgtccgccaccttctggcagaacccccggaaccacttcagatgccaggtgcagttctacggcctgagcgagaacgacgagtggacccaggacagagccaagcccgtgacccagatcgtgtctgccgaagcctggggcagagccgatgatgtgattaagatccactggcaggaaaagaagtccaacaccatcctgggcagccaggaaggcaacaccatgaagaccaacgacacctacatgaagttcagctggctgaccgtgcccgagaagtccctggacaaagaacacagatgcatcgtgcggcacgaaaacaacaagaacggcgtggaccaggaaatcatcttcccacccatcaagaccgatgtgattacaatggaccccaaggacaactgctccaaggacgccaacgataccctgctgctccagctgaccaacaccagcgcctactacatgtacttgttgctgctgctgaagtccgtggtgtacttcgccatcatcacatgctgcctgctgatggctatggtcaagcggaaggacagccgggga

SEQ ID NO: 36467 - DNA, 2985 bp, synthetic construct
  source 1..2985: mol_type = other DNA
atggccttaccagtgaccgccttgctcctgccgctggccttgctgctccacgccgccaggccggaagtgcagctggttgaatctggcggaggactggttcagcctggcggatctctgagactgtcttgtgccgccagcggcttcagcttcagcgacttttggatgagctgggtccgacaggcccctggcaaaggacttgaatgggtcgccacaatcagccaggccggcagcgagaaggactacgtggactctgtgaagggcagattcaccatcagccgggacaacgccaagaagtccctgtacctccagatgaacagcctgagagccgaggacaccgccgtgtactattgtgcctctggcgtgtacagcttcgactacagaggccagggcaccctggtcacagtctcttctggtaccggcggaggcggatctggcggcggaggtagcggtggcggaggatctgaattcgacatccagatgacacagagccctagcagcctgtctgccagcgtgggagacagagtgaccatcacatgcaagagcagccagagcctgctggactccgatggcaagacctacctgaactggtatcagcagaagcccggcaaggcccctaagctgctgatctacctggtgtccaagctggatagcggcgtgcccagcagattttctggcagcggcagcggaaccgacttcaccctgacaatatccagcctccagcctgaggacttcgccacctactactgcttccaaggcacccactttccattcaccttcggccagggcaccaaggtggaaatcaaaagactcgaggacctgaagaacgtgttcccacctgaggtggccgtgttcgagcctagcgaggccgagatcagccacacccagaaagccaccctcgtgtgcctggctaccggcttctaccccgaccatgtggaactgtcttggtgggtcaacggcaaagaggtgcacagcggcgtgtgtaccgacccccagccactgaaagaacagcccgccctgaacgacagccggtactgcctgagcagcagactgagagtgtccgccaccttctggcagaacccccggaaccacttcagatgccaggtgcagttctacggcctgagcgagaacgacgagtggacccaggacagagccaagcccgtgacccagatcgtgtctgccgaagcctggggcagagccgatgatgtgattaagatccactggcaggaaaagaagtccaacaccatcctgggcagccaggaaggcaacaccatgaagaccaacgacacctacatgaagttcagctggctgaccgtgcccgagaagtccctggacaaagaacacagatgcatcgtgcggcacgaaaacaacaagaacggcgtggaccaggaaatcatcttcccacccatcaagaccgatgtgattacaatggaccccaaggacaactgctccaaggacgccaacgataccctgctgctccagctgaccaacaccagcgcctactacatgtacttgttgctgctgctgaagtccgtggtgtacttcgccatcatcacatgctgcctgctgatggctatggtcaagcggaaggacagccggggaagggccaagcgatctggatctggagcaacaaacttctcactactcaaacaagcaggtgacgtggaggagaatcccgggcctactagtatggactggatttggcgcatccttttccttgtcggcgctgctaccggcgcgcattccgggccccagctccagctgcaagagtctggacctggcctggtcaagcctagcgagacactgagcctgacctgtaccgtgtccggcgatagcatcagcagcggcgattactactggggctggatcagacagcctcctggcaaaggactggaatggatcggccacatctactacagcggcgtgacctactacaaccccagcctgaagtccagagtgaccatcagcgtggacaccagccggaaccagttctccctgaagctgtctagcgtgacagccgccgataccgccgtgtactactgcaccagagaggacagcagcaactggcggagtagaggccagggaacactggtcacagttagctctggatccggcggaggcggaagtggaggcggaggatctggcggcggaggctctttcgaagaagtgcagctggttgaatcaggcggaggactggttcagcctggcggatctctgagactgtcttgtgccgccagcggctacaccttcaccagctactggatgaactgggtccgacaggcccctggcaaaggactggaatgggtcggaatgatcgaccccagcgacagcgagacacactacaaccacatcttcaaggaccgcttcaccatcagcgccgacaccagcaagaataccgcctacctccagatgaactccctgagagccgaggacaccgccgtgtactactgcgccagaaacctgtatctgttcggccagggaaccctggtcacagtgtcatctacgcgtatccagaaccctgatcctgccgtgtaccagctgcgggatagcaagagcagcgacaagagcgtgtgtctgttcaccgacttcgacagccagaccaacgtgtcccagagcaaggactccgacgtgtacatcaccgataagtgcgtgctggacatgcggagcatggacttcaagagcaactccgccgtggcctggtccaacaagtccgatttcgcctgcgccaacgccttcaacaacagcattatccccgaggacacattcttcccaagccccgagagcagcgactccaccgaccacgtgaagcccaaagagacagagaacaccaagcagcccagcaagagctgccacaagcccaaggccatcgtgcacaccgagaaagtgaacatgatgagcctgaccgtgctgggcctgcggatgctgttcgccaaaaccgtggccgtgaacttcctgctgaccgccaagctgttcttcctcctcaccgcc

SEQ ID NO: 36468 - DNA, 2997 bp, synthetic construct
  source 1..2997: mol_type = other DNA
atggccttaccagtgaccgccttgctcctgccgctggccttgctgctccacgccgccaggccggaagtgcagctggttgaatctggcggaggactggttcagcctggcggatctctgagactgtcttgtgccgccagcggcttcagcttcagcgacttttggatgagctgggtccgacaggcccctggcaaaggacttgaatgggtcgccacaatcagccaggccggcagcgagaaggactacgtggactctgtgaagggcagattcaccatcagccgggacaacgccaagaagtccctgtacctccagatgaacagcctgagagccgaggacaccgccgtgtactattgtgcctctggcgtgtacagcttcgactacagaggccagggcaccctggtcacagtctcttctggtaccggcggaggcggatctggcggcggaggtagcggtggcggaggatctgaattcgacatccagatgacacagagccctagcagcctgtctgccagcgtgggagacagagtgaccatcacatgcaagagcagccagagcctgctggactccgatggcaagacctacctgaactggtatcagcagaagcccggcaaggcccctaagctgctgatctacctggtgtccaagctggatagcggcgtgcccagcagattttctggcagcggcagcggaaccgacttcaccctgacaatatccagcctccagcctgaggacttcgccacctactactgcttccaaggcacccactttccattcaccttcggccagggcaccaaggtggaaatcaaaagactcgagatccagaaccctgatcctgccgtgtaccagctgcgggatagcaagagcagcgacaagagcgtgtgtctgttcaccgacttcgacagccagaccaacgtgtcccagagcaaggactccgacgtgtacatcaccgataagtgcgtgctggacatgcggagcatggacttcaagagcaactccgccgtggcctggtccaacaagtccgatttcgcctgcgccaacgccttcaacaacagcattatccccgaggacacattcttcccaagccccgagagcagcgactccaccgaccacgtgaagcccaaagagacagagaacaccaagcagcccagcaagagctgccacaagcccaaggccatcgtgcacaccgagaaagtgaacatgatgagcctgaccgtgctgggcctgcggatgctgttcgccaaaaccgtggccgtgaacttcctgctgaccgccaagctgttcttcctcctcaccgcccgcgccaagagaagcggatctggcgtgaagcagaccctgaatttcgacctgctgaagctggctggcgacgtggaatccaacccaggccctactagtatggactggatttggcgcatccttttccttgtcggcgctgctaccggcgcgcattccgggccccagctccagctgcaagagtctggacctggcctggtcaagcctagcgagacactgagcctgacctgtaccgtgtccggcgatagcatcagcagcggcgattactactggggctggatcagacagcctcctggcaaaggactggaatggatcggccacatctactacagcggcgtgacctactacaaccccagcctgaagtccagagtgaccatcagcgtggacaccagccggaaccagttctccctgaagctgtctagcgtgacagccgccgataccgccgtgtactactgcaccagagaggacagcagcaactggcggagtagaggccagggaacactggtcacagttagctctggatccggcggaggcggaagtggaggcggaggatctggcggcggaggctctttcgaagaagtgcagctggttgaatcaggcggaggactggttcagcctggcggatctctgagactgtcttgtgccgccagcggctacaccttcaccagctactggatgaactgggtccgacaggcccctggcaaaggactggaatgggtcggaatgatcgaccccagcgacagcgagacacactacaaccacatcttcaaggaccgcttcaccatcagcgccgacaccagcaagaataccgcctacctccagatgaactccctgagagccgaggacaccgccgtgtactactgcgccagaaacctgtatctgttcggccagggaaccctggtcacagtgtcatctacgcgtgaggacctgaagaacgtgttcccacctgaggtggccgtgttcgagcctagcgaggccgagatcagccacacccagaaagccaccctcgtgtgcctggctaccggcttctaccccgaccatgtggaactgtcttggtgggtcaacggcaaagaggtgcacagcggcgtgtgtaccgacccccagccactgaaagaacagcccgccctgaacgacagccggtactgcctgagcagcagactgagagtgtccgccaccttctggcagaacccccggaaccacttcagatgccaggtgcagttctacggcctgagcgagaacgacgagtggacccaggacagagccaagcccgtgacccagatcgtgtctgccgaagcctggggcagagccgatgatgtgattaagatccactggcaggaaaagaagtccaacaccatcctgggcagccaggaaggcaacaccatgaagaccaacgacacctacatgaagttcagctggctgaccgtgcccgagaagtccctggacaaagaacacagatgcatcgtgcggcacgaaaacaacaagaacggcgtggaccaggaaatcatcttcccacccatcaagaccgatgtgattacaatggaccccaaggacaactgctccaaggacgccaacgataccctgctgctccagctgaccaacaccagcgcctactacatgtacttgttgctgctgctgaagtccgtggtgtacttcgccatcatcacatgctgcctgctgatggctatggtcaagcggaaggacagccgggga

SEQ ID NO: 36469 - DNA, 2163 bp, synthetic construct
  source 1..2163: mol_type = other DNA
atggccttaccagtgaccgccttgctcctgccgctggccttgctgctccacgccgccaggccggacatccagatgacacagagccctagcagcctgtctgccagcgtgggagacagagtgaccatcacatgcaagagcagccagagcctgctggactccgatggcaagacctacctgaactggtatcagcagaagcccggcaaggcccctaagctgctgatctacctggtgtccaagctggatagcggcgtgcccagcagattttctggcagcggcagcggaaccgacttcaccctgacaatatccagcctccagcctgaggacttcgccacctactactgcttccaaggcacccactttccattcaccttcggccagggcaccaaggtggaaatcaaaagactcgaggacctgaagaacgtgttcccacctgaggtggccgtgttcgagcctagcgaggccgagatcagccacacccagaaagccaccctcgtgtgcctggctaccggcttctaccccgaccatgtggaactgtcttggtgggtcaacggcaaagaggtgcacagcggcgtgtgtaccgacccccagccactgaaagaacagcccgccctgaacgacagccggtactgcctgagcagcagactgagagtgtccgccaccttctggcagaacccccggaaccacttcagatgccaggtgcagttctacggcctgagcgagaacgacgagtggacccaggacagagccaagcccgtgacccagatcgtgtctgccgaagcctggggcagagccgatgatgtgattaagatccactggcaggaaaagaagtccaacaccatcctgggcagccaggaaggcaacaccatgaagaccaacgacacctacatgaagttcagctggctgaccgtgcccgagaagtccctggacaaagaacacagatgcatcgtgcggcacgaaaacaacaagaacggcgtggaccaggaaatcatcttcccacccatcaagaccgatgtgattacaatggaccccaaggacaactgctccaaggacgccaacgataccctgctgctccagctgaccaacaccagcgcctactacatgtacttgttgctgctgctgaagtccgtggtgtacttcgccatcatcacatgctgcctgctgcggagaaccgccttctgctgcaacggcgagaagtctagggccaagcgatctggatctggagcaacaaacttctcactactcaaacaagcaggtgacgtggaggagaatcccgggcctactagtatggactggatttggcgcatccttttccttgtcggcgctgctaccggcgcgcattccttcgaagaagtgcagctggttgaatcaggcggaggactggttcagcctggcggatctctgagactgtcttgtgccgccagcggctacaccttcaccagctactggatgaactgggtccgacaggcccctggcaaaggactggaatgggtcggaatgatcgaccccagcgacagcgagacacactacaaccacatcttcaaggaccgcttcaccatcagcgccgacaccagcaagaataccgcctacctccagatgaactccctgagagccgaggacaccgccgtgtactactgcgccagaaacctgtatctgttcggccagggaaccctggtcacagtgtcatctacgcgtatccagaaccctgatcctgccgtgtaccagctgcgggatagcaagagcagcgacaagagcgtgtgtctgttcaccgacttcgacagccagaccaacgtgtcccagagcaaggactccgacgtgtacatcaccgataagtgcgtgctggacatgcggagcatggacttcaagagcaactccgccgtggcctggtccaacaagtccgatttcgcctgcgccaacgccttcaacaacagcattatccccgaggacacattcttcccaagccccgagagcagcgactccaccgaccacgtgaagcccaaagagacagagaacaccaagcagcccagcaagagctgccacaagcccaaggccatcgtgcacaccgagaaagtgaacatgatgagcctgaccgtgctgggcctgcggatgctgttcgccaaaaccgtggccgtgaacttcctgctgaccgccaagctgttcttcctc

SEQ ID NO: 36470 - DNA, 2175 bp, synthetic construct
  source 1..2175: mol_type = other DNA
atggccttaccagtgaccgccttgctcctgccgctggccttgctgctccacgccgccaggccggacatccagatgacacagagccctagcagcctgtctgccagcgtgggagacagagtgaccatcacatgcaagagcagccagagcctgctggactccgatggcaagacctacctgaactggtatcagcagaagcccggcaaggcccctaagctgctgatctacctggtgtccaagctggatagcggcgtgcccagcagattttctggcagcggcagcggaaccgacttcaccctgacaatatccagcctccagcctgaggacttcgccacctactactgcttccaaggcacccactttccattcaccttcggccagggcaccaaggtggaaatcaaaagactcgagatccagaaccctgatcctgccgtgtaccagctgcgggatagcaagagcagcgacaagagcgtgtgtctgttcaccgacttcgacagccagaccaacgtgtcccagagcaaggactccgacgtgtacatcaccgataagtgcgtgctggacatgcggagcatggacttcaagagcaactccgccgtggcctggtccaacaagtccgatttcgcctgcgccaacgccttcaacaacagcattatccccgaggacacattcttcccaagccccgagagcagcgactccaccgaccacgtgaagcccaaagagacagagaacaccaagcagcccagcaagagctgccacaagcccaaggccatcgtgcacaccgagaaagtgaacatgatgagcctgaccgtgctgggcctgcggatgctgttcgccaaaaccgtggccgtgaacttcctgctgaccgccaagctgttcttcctccgcgccaagagaagcggatctggcgtgaagcagaccctgaatttcgacctgctgaagctggctggcgacgtggaatccaacccaggccctactagtatggactggatttggcgcatccttttccttgtcggcgctgctaccggcgcgcattccttcgaagaagtgcagctggttgaatcaggcggaggactggttcagcctggcggatctctgagactgtcttgtgccgccagcggctacaccttcaccagctactggatgaactgggtccgacaggcccctggcaaaggactggaatgggtcggaatgatcgaccccagcgacagcgagacacactacaaccacatcttcaaggaccgcttcaccatcagcgccgacaccagcaagaataccgcctacctccagatgaactccctgagagccgaggacaccgccgtgtactactgcgccagaaacctgtatctgttcggccagggaaccctggtcacagtgtcatctacgcgtgaggacctgaagaacgtgttcccacctgaggtggccgtgttcgagcctagcgaggccgagatcagccacacccagaaagccaccctcgtgtgcctggctaccggcttctaccccgaccatgtggaactgtcttggtgggtcaacggcaaagaggtgcacagcggcgtgtgtaccgacccccagccactgaaagaacagcccgccctgaacgacagccggtactgcctgagcagcagactgagagtgtccgccaccttctggcagaacccccggaaccacttcagatgccaggtgcagttctacggcctgagcgagaacgacgagtggacccaggacagagccaagcccgtgacccagatcgtgtctgccgaagcctggggcagagccgatgatgtgattaagatccactggcaggaaaagaagtccaacaccatcctgggcagccaggaaggcaacaccatgaagaccaacgacacctacatgaagttcagctggctgaccgtgcccgagaagtccctggacaaagaacacagatgcatcgtgcggcacgaaaacaacaagaacggcgtggaccaggaaatcatcttcccacccatcaagaccgatgtgattacaatggaccccaaggacaactgctccaaggacgccaacgataccctgctgctccagctgaccaacaccagcgcctactacatgtacttgttgctgctgctgaagtccgtggtgtacttcgccatcatcacatgctgcctgctgcggagaaccgccttctgctgcaacggcgagaagtct

SEQ ID NO: 36471 - DNA, 2568 bp, synthetic construct
  source 1..2568: mol_type = other DNA
atggccttaccagtgaccgccttgctcctgccgctggccttgctgctccacgccgccaggccggaagtgcagctggttgaatctggcggaggactggttcagcctggcggatctctgagactgtcttgtgccgccagcggcttcagcttcagcgacttttggatgagctgggtccgacaggcccctggcaaaggacttgaatgggtcgccacaatcagccaggccggcagcgagaaggactacgtggactctgtgaagggcagattcaccatcagccgggacaacgccaagaagtccctgtacctccagatgaacagcctgagagccgaggacaccgccgtgtactattgtgcctctggcgtgtacagcttcgactacagaggccagggcaccctggtcacagtctcttctggtaccggcggaggcggatctggcggcggaggtagcggtggcggaggatctgaattcgacatccagatgacacagagccctagcagcctgtctgccagcgtgggagacagagtgaccatcacatgcaagagcagccagagcctgctggactccgatggcaagacctacctgaactggtatcagcagaagcccggcaaggcccctaagctgctgatctacctggtgtccaagctggatagcggcgtgcccagcagattttctggcagcggcagcggaaccgacttcaccctgacaatatccagcctccagcctgaggacttcgccacctactactgcttccaaggcacccactttccattcaccttcggccagggcaccaaggtggaaatcaaaagactcgaggacctgaagaacgtgttcccacctgaggtggccgtgttcgagcctagcgaggccgagatcagccacacccagaaagccaccctcgtgtgcctggctaccggcttctaccccgaccatgtggaactgtcttggtgggtcaacggcaaagaggtgcacagcggcgtgtgtaccgacccccagccactgaaagaacagcccgccctgaacgacagccggtactgcctgagcagcagactgagagtgtccgccaccttctggcagaacccccggaaccacttcagatgccaggtgcagttctacggcctgagcgagaacgacgagtggacccaggacagagccaagcccgtgacccagatcgtgtctgccgaagcctggggcagagccgatgatgtgattaagatccactggcaggaaaagaagtccaacaccatcctgggcagccaggaaggcaacaccatgaagaccaacgacacctacatgaagttcagctggctgaccgtgcccgagaagtccctggacaaagaacacagatgcatcgtgcggcacgaaaacaacaagaacggcgtggaccaggaaatcatcttcccacccatcaagaccgatgtgattacaatggaccccaaggacaactgctccaaggacgccaacgataccctgctgctccagctgaccaacaccagcgcctactacatgtacttgttgctgctgctgaagtccgtggtgtacttcgccatcatcacatgctgcctgctgcggagaaccgccttctgctgcaacggcgagaagtctagggccaagcgatctggatctggagcaacaaacttctcactactcaaacaagcaggtgacgtggaggagaatcccgggcctactagtatggactggatttggcgcatccttttccttgtcggcgctgctaccggcgcgcattccttcgaagaagtgcagctggttgaatcaggcggaggactggttcagcctggcggatctctgagactgtcttgtgccgccagcggctacaccttcaccagctactggatgaactgggtccgacaggcccctggcaaaggactggaatgggtcggaatgatcgaccccagcgacagcgagacacactacaaccacatcttcaaggaccgcttcaccatcagcgccgacaccagcaagaataccgcctacctccagatgaactccctgagagccgaggacaccgccgtgtactactgcgccagaaacctgtatctgttcggccagggaaccctggtcacagtgtcatctacgcgtatccagaaccctgatcctgccgtgtaccagctgcgggatagcaagagcagcgacaagagcgtgtgtctgttcaccgacttcgacagccagaccaacgtgtcccagagcaaggactccgacgtgtacatcaccgataagtgcgtgctggacatgcggagcatggacttcaagagcaactccgccgtggcctggtccaacaagtccgatttcgcctgcgccaacgccttcaacaacagcattatccccgaggacacattcttcccaagccccgagagcagcgactccaccgaccacgtgaagcccaaagagacagagaacaccaagcagcccagcaagagctgccacaagcccaaggccatcgtgcacaccgagaaagtgaacatgatgagcctgaccgtgctgggcctgcggatgctgttcgccaaaaccgtggccgtgaacttcctgctgaccgccaagctgttcttcctc

SEQ ID NO: 36472 - DNA, 2979 bp, synthetic construct
  source 1..2979: mol_type = other DNA
atggccttaccagtgaccgccttgctcctgccgctggccttgctgctccacgccgccaggccggaagtgcagctggttgaatctggcggaggactggttcagcctggcggatctctgagactgtcttgtgccgccagcggcttcagcttcagcgacttttggatgagctgggtccgacaggcccctggcaaaggacttgaatgggtcgccacaatcagccaggccggcagcgagaaggactacgtggactctgtgaagggcagattcaccatcagccgggacaacgccaagaagtccctgtacctccagatgaacagcctgagagccgaggacaccgccgtgtactattgtgcctctggcgtgtacagcttcgactacagaggccagggcaccctggtcacagtctcttctggtaccggcggaggcggatctggcggcggaggtagcggtggcggaggatctgaattcgacatccagatgacacagagccctagcagcctgtctgccagcgtgggagacagagtgaccatcacatgcaagagcagccagagcctgctggactccgatggcaagacctacctgaactggtatcagcagaagcccggcaaggcccctaagctgctgatctacctggtgtccaagctggatagcggcgtgcccagcagattttctggcagcggcagcggaaccgacttcaccctgacaatatccagcctccagcctgaggacttcgccacctactactgcttccaaggcacccactttccattcaccttcggccagggcaccaaggtggaaatcaaaagactcgaggacctgaagaacgtgttcccacctgaggtggccgtgttcgagcctagcgaggccgagatcagccacacccagaaagccaccctcgtgtgcctggctaccggcttctaccccgaccatgtggaactgtcttggtgggtcaacggcaaagaggtgcacagcggcgtgtgtaccgacccccagccactgaaagaacagcccgccctgaacgacagccggtactgcctgagcagcagactgagagtgtccgccaccttctggcagaacccccggaaccacttcagatgccaggtgcagttctacggcctgagcgagaacgacgagtggacccaggacagagccaagcccgtgacccagatcgtgtctgccgaagcctggggcagagccgatgatgtgattaagatccactggcaggaaaagaagtccaacaccatcctgggcagccaggaaggcaacaccatgaagaccaacgacacctacatgaagttcagctggctgaccgtgcccgagaagtccctggacaaagaacacagatgcatcgtgcggcacgaaaacaacaagaacggcgtggaccaggaaatcatcttcccacccatcaagaccgatgtgattacaatggaccccaaggacaactgctccaaggacgccaacgataccctgctgctccagctgaccaacaccagcgcctactacatgtacttgttgctgctgctgaagtccgtggtgtacttcgccatcatcacatgctgcctgctgcggagaaccgccttctgctgcaacggcgagaagtctagggccaagcgatctggatctggagcaacaaacttctcactactcaaacaagcaggtgacgtggaggagaatcccgggcctactagtatggactggatttggcgcatccttttccttgtcggcgctgctaccggcgcgcattccgggccccagctccagctgcaagagtctggacctggcctggtcaagcctagcgagacactgagcctgacctgtaccgtgtccggcgatagcatcagcagcggcgattactactggggctggatcagacagcctcctggcaaaggactggaatggatcggccacatctactacagcggcgtgacctactacaaccccagcctgaagtccagagtgaccatcagcgtggacaccagccggaaccagttctccctgaagctgtctagcgtgacagccgccgataccgccgtgtactactgcaccagagaggacagcagcaactggcggagtagaggccagggaacactggtcacagttagctctggatccggcggaggcggaagtggaggcggaggatctggcggcggaggctctttcgaagaagtgcagctggttgaatcaggcggaggactggttcagcctggcggatctctgagactgtcttgtgccgccagcggctacaccttcaccagctactggatgaactgggtccgacaggcccctggcaaaggactggaatgggtcggaatgatcgaccccagcgacagcgagacacactacaaccacatcttcaaggaccgcttcaccatcagcgccgacaccagcaagaataccgcctacctccagatgaactccctgagagccgaggacaccgccgtgtactactgcgccagaaacctgtatctgttcggccagggaaccctggtcacagtgtcatctacgcgtatccagaaccctgatcctgccgtgtaccagctgcgggatagcaagagcagcgacaagagcgtgtgtctgttcaccgacttcgacagccagaccaacgtgtcccagagcaaggactccgacgtgtacatcaccgataagtgcgtgctggacatgcggagcatggacttcaagagcaactccgccgtggcctggtccaacaagtccgatttcgcctgcgccaacgccttcaacaacagcattatccccgaggacacattcttcccaagccccgagagcagcgactccaccgaccacgtgaagcccaaagagacagagaacaccaagcagcccagcaagagctgccacaagcccaaggccatcgtgcacaccgagaaagtgaacatgatgagcctgaccgtgctgggcctgcggatgctgttcgccaaaaccgtggccgtgaacttcctgctgaccgccaagctgttcttcctc

SEQ ID NO: 36473 - DNA, 1857 bp, synthetic construct
  source 1..1857: mol_type = other DNA
atggccttaccagtgaccgccttgctcctgccgctggccttgctgctccacgccgccaggccggacatccagatgacacagagccctagcagcctgtctgccagcgtgggagacagagtgaccatcacatgcaagagcagccagagcctgctggactccgatggcaagacctacctgaactggtatcagcagaagcccggcaaggcccctaagctgctgatctacctggtgtccaagctggatagcggcgtgcccagcagattttctggcagcggcagcggaaccgacttcaccctgacaatatccagcctccagcctgaggacttcgccacctactactgcttccaaggcacccactttccattcaccttcggccagggcaccaaggtggaaatcaaaagactcgaggacctgaagaacgtgttcccacctgaggtggccgtgttcgagcctagcgaggccgagatcagccacacccagaaagccaccctcgtgtgcctggctaccggcttctaccccgaccatgtggaactgtcttggtgggtcaacggcaaagaggtgcacagcggcgtgtctaccgacccccagccactgaaagaacagcccgccctgaacgacagccggtactgcctgagcagcagactgagagtgtccgccaccttctggcagaacccccggaaccacttcagatgccaggtgcagttctacggcctgagcgagaacgacgagtggacccaggacagagccaagcccgtgacccagatcgtgtctgccgaagcctggggcagagccgattgcgacgtgaagctggtggaaaagagcttcgagacagacaccaacctgaacttccagaacctgagcgtgatcggcttcagaatcctgctgctgaaagtggccggctttaacctgctgatgaccctgcggctgtggtccagcagggccaagcgatctggatctggagcaacaaacttctcactactcaaacaagcaggtgacgtggaggagaatcccgggcctactagtatggactggatttggcgcatccttttccttgtcggcgctgctaccggcgcgcattccttcgaagaagtgcagctggttgaatcaggcggaggactggttcagcctggcggatctctgagactgtcttgtgccgccagcggctacaccttcaccagctactggatgaactgggtccgacaggcccctggcaaaggactggaatgggtcggaatgatcgaccccagcgacagcgagacacactacaaccacatcttcaaggaccgcttcaccatcagcgccgacaccagcaagaataccgcctacctccagatgaactccctgagagccgaggacaccgccgtgtactactgcgccagaaacctgtatctgttcggccagggaaccctggtcacagtgtcatctacgcgtatccagaaccctgatcctgccgtgtaccagctgcgggatagcaagagcagcgacaagagcgtgtgtctgttcaccgacttcgacagccagaccaacgtgtcccagagcaaggactccgacgtgtacatcaccgataagaccgtgctggacatgcggagcatggacttcaagagcaactccgccgtggcctggtccaacaagtccgatttcgcctgcgccaacgccttcaacaacagcattatccccgaggacacattcttcccaagccccgagagcagctgcggctttaccagcgagagctaccagcagggcgtgctgagcgccaccatcctgtacgagatcctgctgggcaaggccaccctgtacgccgtgctggtgtctgccctggtgctgatggctatggtcaagcggaaggacagccgggga

SEQ ID NO: 36474 - DNA, 1857 bp, synthetic construct
  source 1..1857: mol_type = other DNA
atggccttaccagtgaccgccttgctcctgccgctggccttgctgctccacgccgccaggccggacatccagatgacacagagccctagcagcctgtctgccagcgtgggagacagagtgaccatcacatgcaagagcagccagagcctgctggactccgatggcaagacctacctgaactggtatcagcagaagcccggcaaggcccctaagctgctgatctacctggtgtccaagctggatagcggcgtgcccagcagattttctggcagcggcagcggaaccgacttcaccctgacaatatccagcctccagcctgaggacttcgccacctactactgcttccaaggcacccactttccattcaccttcggccagggcaccaaggtggaaatcaaaagactcgaggacctgaagaacgtgttcccacctgaggtggccgtgttcgagcctagcgaggccgagatcagccacacccagaaagccaccctcgtgtgcctggctaccggcttctaccccgaccatgtggaactgtcttggtgggtcaacggcaaagaggtgcacagcggcgtgtctaccgacccccagccactgaaagaacagcccgccctgaacgacagccggtactgcctgagcagcagactgagagtgtccgccaccttctggcagaacccccggaaccacttcagatgccaggtgcagttctacggcctgagcgagaacgacgagtggacccaggacagagccaagcccgtgacccagatcgtgtctgccgaagcctggggcagagccgattgcggctttaccagcgagagctaccagcagggcgtgctgagcgccaccaacctgagcgtgatcggcttcagaatcctgctgctgaaagtggccggctttaacctgctgatgaccctgcggctgtggtccagcagggccaagcgatctggatctggagcaacaaacttctcactactcaaacaagcaggtgacgtggaggagaatcccgggcctactagtatggactggatttggcgcatccttttccttgtcggcgctgctaccggcgcgcattccttcgaagaagtgcagctggttgaatcaggcggaggactggttcagcctggcggatctctgagactgtcttgtgccgccagcggctacaccttcaccagctactggatgaactgggtccgacaggcccctggcaaaggactggaatgggtcggaatgatcgaccccagcgacagcgagacacactacaaccacatcttcaaggaccgcttcaccatcagcgccgacaccagcaagaataccgcctacctccagatgaactccctgagagccgaggacaccgccgtgtactactgcgccagaaacctgtatctgttcggccagggaaccctggtcacagtgtcatctacgcgtatccagaaccctgatcctgccgtgtaccagctgcgggatagcaagagcagcgacaagagcgtgtgtctgttcaccgacttcgacagccagaccaacgtgtcccagagcaaggactccgacgtgtacatcaccgataagaccgtgctggacatgcggagcatggacttcaagagcaactccgccgtggcctggtccaacaagtccgatttcgcctgcgccaacgccttcaacaacagcattatccccgaggacacattcttcccaagccccgagagcagctgcgacgtgaagctggtggaaaagagcttcgagacagacaccaacctgaacttccagatcctgtacgagatcctgctgggcaaggccaccctgtacgccgtgctggtgtctgccctggtgctgatggctatggtcaagcggaaggacagccgggga

SEQ ID NO: 36475 - DNA, 2169 bp, synthetic construct
  source 1..2169: mol_type = other DNA
atggccttaccagtgaccgccttgctcctgccgctggccttgctgctccacgccgccaggccggacatccagatgacacagagccctagcagcctgtctgccagcgtgggagacagagtgaccatcacatgcaagagcagccagagcctgctggactccgatggcaagacctacctgaactggtatcagcagaagcccggcaaggcccctaagctgctgatctacctggtgtccaagctggatagcggcgtgcccagcagattttctggcagcggcagcggaaccgacttcaccctgacaatatccagcctccagcctgaggacttcgccacctactactgcttccaaggcacccactttccattcaccttcggccagggcaccaaggtggaaatcaaaagactcgaggacctgaagaacgtgttcccacctgaggtggccgtgttcgagcctagcgaggccgagatcagccacacccagaaagccaccctcgtgtgcctggctaccggcttctaccccgaccatgtggaactgtcttggtgggtcaacggcaaagaggtgcacagcggcgtgtctaccgacccccagccactgaaagaacagcccgccctgaacgacagccggtactgcctgagcagcagactgagagtgtccgccaccttctggcagaacccccggaaccacttcagatgccaggtgcagttctacggcctgagcgagaacgacgagtggacccaggacagagccaagcccgtgacccagatcgtgtctgccgaagcctggggcagagccgatgatgtgattaagatccactggcaggaaaagaagtccaacaccatcctgggcagccaggaaggcaacaccatgaagaccaacgacacctacatgaagttcagctggctgaccgtgcccgagaagtccctggacaaagaacacagatgcatcgtgcggcacgaaaacaacaagaacggcgtggaccaggaaatcatcttcccacccatcaagaccgatgtgattacaatggaccccaaggacaactgctccaaggacgccaacgataccctgctgctccagctgaccaacaccagcgcctactacatgtacttgttgctgctgctgaagtccgtggtgtacttcgccatcatcacatgctgcctgctgatggctatggtcaagcggaaggacagccggggaagggccaagcgatctggatctggagcaacaaacttctcactactcaaacaagcaggtgacgtggaggagaatcccgggcctactagtatggactggatttggcgcatccttttccttgtcggcgctgctaccggcgcgcattccttcgaagaagtgcagctggttgaatcaggcggaggactggttcagcctggcggatctctgagactgtcttgtgccgccagcggctacaccttcaccagctactggatgaactgggtccgacaggcccctggcaaaggactggaatgggtcggaatgatcgaccccagcgacagcgagacacactacaaccacatcttcaaggaccgcttcaccatcagcgccgacaccagcaagaataccgcctacctccagatgaactccctgagagccgaggacaccgccgtgtactactgcgccagaaacctgtatctgttcggccagggaaccctggtcacagtgtcatctacgcgtatccagaaccctgatcctgccgtgtaccagctgcgggatagcaagagcagcgacaagagcgtgtgtctgttcaccgacttcgacagccagaccaacgtgtcccagagcaaggactccgacgtgtacatcaccgataagaccgtgctggacatgcggagcatggacttcaagagcaactccgccgtggcctggtccaacaagtccgatttcgcctgcgccaacgccttcaacaacagcattatccccgaggacacattcttcccaagccccgagagcagcgactccaccgaccacgtgaagcccaaagagacagagaacaccaagcagcccagcaagagctgccacaagcccaaggccatcgtgcacaccgagaaagtgaacatgatgagcctgaccgtgctgggcctgcggatgctgttcgccaaaaccgtggccgtgaacttcctgctgaccgccaagctgttcttcctcctcaccgcc

SEQ ID NO: 36476 - DNA, 2163 bp, synthetic construct
  source 1..2163: mol_type = other DNA
atggccttaccagtgaccgccttgctcctgccgctggccttgctgctccacgccgccaggccggacatccagatgacacagagccctagcagcctgtctgccagcgtgggagacagagtgaccatcacatgcaagagcagccagagcctgctggactccgatggcaagacctacctgaactggtatcagcagaagcccggcaaggcccctaagctgctgatctacctggtgtccaagctggatagcggcgtgcccagcagattttctggcagcggcagcggaaccgacttcaccctgacaatatccagcctccagcctgaggacttcgccacctactactgcttccaaggcacccactttccattcaccttcggccagggcaccaaggtggaaatcaaaagactcgaggacctgaagaacgtgttcccacctgaggtggccgtgttcgagcctagcgaggccgagatcagccacacccagaaagccaccctcgtgtgcctggctaccggcttctaccccgaccatgtggaactgtcttggtgggtcaacggcaaagaggtgcacagcggcgtgtctaccgacccccagccactgaaagaacagcccgccctgaacgacagccggtactgcctgagcagcagactgagagtgtccgccaccttctggcagaacccccggaaccacttcagatgccaggtgcagttctacggcctgagcgagaacgacgagtggacccaggacagagccaagcccgtgacccagatcgtgtctgccgaagcctggggcagagccgatgatgtgattaagatccactggcaggaaaagaagtccaacaccatcctgggcagccaggaaggcaacaccatgaagaccaacgacacctacatgaagttcagctggctgaccgtgcccgagaagtccctggacaaagaacacagatgcatcgtgcggcacgaaaacaacaagaacggcgtggaccaggaaatcatcttcccacccatcaagaccgatgtgattacaatggaccccaaggacaactgctccaaggacgccaacgataccctgctgctccagctgaccaacaccagcgcctactacatgtacttgttgctgctgctgaagtccgtggtgtacttcgccatcatcacatgctgcctgctgcggagaaccgccttctgctgcaacggcgagaagtctagggccaagcgatctggatctggagcaacaaacttctcactactcaaacaagcaggtgacgtggaggagaatcccgggcctactagtatggactggatttggcgcatccttttccttgtcggcgctgctaccggcgcgcattccttcgaagaagtgcagctggttgaatcaggcggaggactggttcagcctggcggatctctgagactgtcttgtgccgccagcggctacaccttcaccagctactggatgaactgggtccgacaggcccctggcaaaggactggaatgggtcggaatgatcgaccccagcgacagcgagacacactacaaccacatcttcaaggaccgcttcaccatcagcgccgacaccagcaagaataccgcctacctccagatgaactccctgagagccgaggacaccgccgtgtactactgcgccagaaacctgtatctgttcggccagggaaccctggtcacagtgtcatctacgcgtatccagaaccctgatcctgccgtgtaccagctgcgggatagcaagagcagcgacaagagcgtgtgtctgttcaccgacttcgacagccagaccaacgtgtcccagagcaaggactccgacgtgtacatcaccgataagaccgtgctggacatgcggagcatggacttcaagagcaactccgccgtggcctggtccaacaagtccgatttcgcctgcgccaacgccttcaacaacagcattatccccgaggacacattcttcccaagccccgagagcagcgactccaccgaccacgtgaagcccaaagagacagagaacaccaagcagcccagcaagagctgccacaagcccaaggccatcgtgcacaccgagaaagtgaacatgatgagcctgaccgtgctgggcctgcggatgctgttcgccaaaaccgtggccgtgaacttcctgctgaccgccaagctgttcttcctc

SEQ ID NO: 36477 - DNA, 2595 bp, synthetic construct
  source 1..2595: mol_type = other DNA
atggccttaccagtgaccgccttgctcctgccgctggccttgctgctccacgccgccaggccgctcgaggaggacctgaagaacgtgttcccacctgaggtggccgtgttcgagcctagcgaggccgagatcagccacacccagaaagccaccctcgtgtgcctggctaccggcttctaccccgaccatgtggaactgtcttggtgggtcaacggcaaagaggtgcacagcggcgtgtgtaccgacccccagccactgaaagaacagcccgccctgaacgacagccggtactgcctgagcagcagactgagagtgtccgccaccttctggcagaacccccggaaccacttcagatgccaggtgcagttctacggcctgagcgagaacgacgagtggacccaggacagagccaagcccgtgacccagatcgtgtctgccgaagcctggggcagagccgattgcggctttaccagcgagagctaccagcagggcgtgctgagcgccaccaacctgagcgtgatcggcttcagaatcctgctgctgaaagtggccggctttaacctgctgatgaccctgcggctgtggtccagcagggccaagcgatctggatctggagcaacaaacttctcactactcaaacaagcaggtgacgtggaggagaatcccgggcctactagcatggccttaccagtgaccgccttgctcctgccgctggccttgctgctccacgccgccaggccggacatccagatgacacagagccctagcagcctgtctgccagcgtgggagacagagtgaccatcacatgcaagagcagccagagcctgctggactccgatggcaagacctacctgaactggtatcagcagaagcccggcaaggcccctaagctgctgatctacctggtgtccaagctggatagcggcgtgcccagcagattttctggcagcggcagcggaaccgacttcaccctgacaatatccagcctccagcctgaggacttcgccacctactactgcttccaaggcacccactttccattcaccttcggccagggcaccaaggtggaaatcaaaagaggcggaggcggaagtggaggcggaggatctggcggcggaggctctgaagtgcagctggttgaatcaggcggaggactggttcagcctggcggatctctgagactgtcttgtgccgccagcggctacaccttcaccagctactggatgaactgggtccgacaggcccctggcaaaggactggaatgggtcggaatgatcgaccccagcgacagcgagacacactacaaccacatcttcaaggaccgcttcaccatcagcgccgacaccagcaagaataccgcctacctccagatgaactccctgagagccgaggacaccgccgtgtactactgcgccagaaacctgtatctgttcggccagggaaccctggtcacagtgtcatctacgcgtatccagaaccctgatcctgccgtgtaccagctgcgggatagcaagagcagcgacaagagcgtgtgtctgttcaccgacttcgacagccagaccaacgtgtcccagagcaaggactccgacgtgtacatcaccgataagtgcgtgctggacatgcggagcatggacttcaagagcaactccgccgtggcctggtccaacaagtccgatttcgcctgcgccaacgccttcaacaacagcattatccccgaggacacattcttcccaagccccgagagcagctgcgacgtgaagctggtggaaaagagcttcgagacagacaccaacctgaacttccagatcctgtacgaggtgatcggcttcagaatcctgctgctgaaagtggccggctttaacctgctgatgaccctgcggctgtggtccagccgcgccaagagaagcggatctggcgtgaagcagaccctgaatttcgacctgctgaagctggctggcgacgtggaatccaacccaggcccttctagaggccatatgaccgagtacaagcccacggtgcgcctcgccacccgcgacgacgtccccagggccgtacgcaccctcgccgccgcgttcgccgactaccccgccacgcgccacaccgtcgatccggaccgccacatcgagcgggtcaccgagctgcaagaactcttcctcacgcgcgtcgggctcgacatcggcaaggtgtgggtcgcggacgacggcgccgcggtggcggtctggaccacgccggagagcgtcgaagcgggggcggtgttcgccgagatcggcccgcgcatggccgagttgagcggttcccggctggccgcgcagcaacagatggaaggcctcctggcgccgcaccggcccaaggagcccgcgtggttcctggccaccgtcggcgtctcgcccgaccaccagggcaagggtctgggcagcgccgtcgtgctccccggagtggaggcggccgagcgcgccggggtgcccgccttcctggagacctccgcgccccgcaacctccccttctacgagcggctcggcttcaccgtcaccgccgacgtcgaggtgcccgaaggaccgcgcacctggtgcatgacccgcaagcccggtgcctga

SEQ ID NO: 36478 - DNA, 2595 bp, synthetic construct
  source 1..2595: mol_type = other DNA
atggccttaccagtgaccgccttgctcctgccgctggccttgctgctccacgccgccaggccgctcgagatccagaaccctgatcctgccgtgtaccagctgcgggatagcaagagcagcgacaagagcgtgtgtctgttcaccgacttcgacagccagaccaacgtgtcccagagcaaggactccgacgtgtacatcaccgataagtgcgtgctggacatgcggagcatggacttcaagagcaactccgccgtggcctggtccaacaagtccgatttcgcctgcgccaacgccttcaacaacagcattatccccgaggacacattcttcccaagccccgagagcagctgcgacgtgaagctggtggaaaagagcttcgagacagacaccaacctgaacttccagatcctgtacgaggtgatcggcttcagaatcctgctgctgaaagtggccggctttaacctgctgatgaccctgcggctgtggtccagcagggccaagcgatctggatctggagcaacaaacttctcactactcaaacaagcaggtgacgtggaggagaatcccgggcctactagcatggccttaccagtgaccgccttgctcctgccgctggccttgctgctccacgccgccaggccggacatccagatgacacagagccctagcagcctgtctgccagcgtgggagacagagtgaccatcacatgcaagagcagccagagcctgctggactccgatggcaagacctacctgaactggtatcagcagaagcccggcaaggcccctaagctgctgatctacctggtgtccaagctggatagcggcgtgcccagcagattttctggcagcggcagcggaaccgacttcaccctgacaatatccagcctccagcctgaggacttcgccacctactactgcttccaaggcacccactttccattcaccttcggccagggcaccaaggtggaaatcaaaagaggcggaggcggaagtggaggcggaggatctggcggcggaggctctgaagtgcagctggttgaatcaggcggaggactggttcagcctggcggatctctgagactgtcttgtgccgccagcggctacaccttcaccagctactggatgaactgggtccgacaggcccctggcaaaggactggaatgggtcggaatgatcgaccccagcgacagcgagacacactacaaccacatcttcaaggaccgcttcaccatcagcgccgacaccagcaagaataccgcctacctccagatgaactccctgagagccgaggacaccgccgtgtactactgcgccagaaacctgtatctgttcggccagggaaccctggtcacagtgtcatctacgcgtgaggacctgaagaacgtgttcccacctgaggtggccgtgttcgagcctagcgaggccgagatcagccacacccagaaagccaccctcgtgtgcctggctaccggcttctaccccgaccatgtggaactgtcttggtgggtcaacggcaaagaggtgcacagcggcgtgtgtaccgacccccagccactgaaagaacagcccgccctgaacgacagccggtactgcctgagcagcagactgagagtgtccgccaccttctggcagaacccccggaaccacttcagatgccaggtgcagttctacggcctgagcgagaacgacgagtggacccaggacagagccaagcccgtgacccagatcgtgtctgccgaagcctggggcagagccgattgcggctttaccagcgagagctaccagcagggcgtgctgagcgccaccaacctgagcgtgatcggcttcagaatcctgctgctgaaagtggccggctttaacctgctgatgaccctgcggctgtggtccagccgcgccaagagaagcggatctggcgtgaagcagaccctgaatttcgacctgctgaagctggctggcgacgtggaatccaacccaggcccttctagaggccatatgaccgagtacaagcccacggtgcgcctcgccacccgcgacgacgtccccagggccgtacgcaccctcgccgccgcgttcgccgactaccccgccacgcgccacaccgtcgatccggaccgccacatcgagcgggtcaccgagctgcaagaactcttcctcacgcgcgtcgggctcgacatcggcaaggtgtgggtcgcggacgacggcgccgcggtggcggtctggaccacgccggagagcgtcgaagcgggggcggtgttcgccgagatcggcccgcgcatggccgagttgagcggttcccggctggccgcgcagcaacagatggaaggcctcctggcgccgcaccggcccaaggagcccgcgtggttcctggccaccgtcggcgtctcgcccgaccaccagggcaagggtctgggcagcgccgtcgtgctccccggagtggaggcggccgagcgcgccggggtgcccgccttcctggagacctccgcgccccgcaacctccccttctacgagcggctcggcttcaccgtcaccgccgacgtcgaggtgcccgaaggaccgcgcacctggtgcatgacccgcaagcccggtgcctga

SEQ ID NO: 36479 - DNA, 2595 bp, synthetic construct; identical to SEQ ID NO: 36477
  source 1..2595: mol_type = other DNA

SEQ ID NO: 36480 - DNA, 2919 bp, synthetic construct
  source 1..2919: mol_type = other DNA
atggccttaccagtgaccgccttgctcctgccgctggccttgctgctccacgccgccaggccgctcgaggaggacctgaagaacgtgttcccacctgaggtggccgtgttcgagcctagcgaggccgagatcagccacacccagaaagccaccctcgtgtgcctggctaccggcttctaccccgaccatgtggaactgtcttggtgggtcaacggcaaagaggtgcacagcggcgtgtctaccgacccccagccactgaaagaacagcccgccctgaacgacagccggtactgcctgagcagcagactgagagtgtccgccaccttctggcagaacccccggaaccacttcagatgccaggtgcagttctacggcctgagcgagaacgacgagtggacccaggacagagccaagcccgtgacccagatcgtgtctgccgaagcctggggcagagccgatgatgtgattaagatccactggcaggaaaagaagtccaacaccatcctgggcagccaggaaggcaacaccatgaagaccaacgacacctacatgaagttcagctggctgaccgtgcccgagaagtccctggacaaagaacacagatgcatcgtgcggcacgaaaacaacaagaacggcgtggaccaggaaatcatcttcccacccatcaagaccgatgtgattacaatggaccccaaggacaactgctccaaggacgccaacgataccctgctgctccagctgaccaacaccagcgcctactacatgtacttgttgctgctgctgaagtccgtggtgtacttcgccatcatcacatgctgcctgctgatggctatggtcaagcggaaggacagccggggaagggccaagcgatctggatctggagcaacaaacttctcactactcaaacaagcaggtgacgtggaggagaatcccgggcctactagcatggccttaccagtgaccgccttgctcctgccgctggccttgctgctccacgccgccaggccggacatccagatgacacagagccctagcagcctgtctgccagcgtgggagacagagtgaccatcacatgcaagagcagccagagcctgctggactccgatggcaagacctacctgaactggtatcagcagaagcccggcaaggcccctaagctgctgatctacctggtgtccaagctggatagcggcgtgcccagcagattttctggcagcggcagcggaaccgacttcaccctgacaatatccagcctccagcctgaggacttcgccacctactactgcttccaaggcacccactttccattcaccttcggccagggcaccaaggtggaaatcaaaagaggcggaggcggaagtggaggcggaggatctggcggcggaggctctgaagtgcagctggttgaatcaggcggaggactggttcagcctggcggatctctgagactgtcttgtgccgccagcggctacaccttcaccagctactggatgaactgggtccgacaggcccctggcaaaggactggaatgggtcggaatgatcgaccccagcgacagcgagacacactacaaccacatcttcaaggaccgcttcaccatcagcgccgacaccagcaagaataccgcctacctccagatgaactccctgagagccgaggacaccgccgtgtactactgcgccagaaacctgtatctgttcggccagggaaccctggtcacagtgtcatctacgcgtatccagaaccctgatcctgccgtgtaccagctgcgggatagcaagagcagcgacaagagcgtgtgtctgttcaccgacttcgacagccagaccaacgtgtcccagagcaaggactccgacgtgtacatcaccgataagaccgtgctggacatgcggagcatggacttcaagagcaactccgccgtggcctggtccaacaagtccgatttcgcctgcgccaacgccttcaacaacagcattatccccgaggacacattcttcccaagccccgagagcagcgactccaccgaccacgtgaagcccaaagagacagagaacaccaagcagcccagcaagagctgccacaagcccaaggccatcgtgcacaccgagaaagtgaacatgatgagcctgaccgtgctgggcctgcggatgctgttcgccaaaaccgtggccgtgaacttcctgctgaccgccaagctgttcttcctcctcaccgcccgcgccaagagaagcggatctggcgtgaagcagaccctgaatttcgacctgctgaagctggctggcgacgtggaatccaacccaggcccttctagaggccatatgaccgagtacaagcccacggtgcgcctcgccacccgcgacgacgtccccagggccgtacgcaccctcgccgccgcgttcgccgactaccccgccacgcgccacaccgtcgatccggaccgccacatcgagcgggtcaccgagctgcaagaactcttcctcacgcgcgtcgggctcgacatcggcaaggtgtgggtcgcggacgacggcgccgcggtggcggtctggaccacgccggagagcgtcgaagcgggggcggtgttcgccgagatcggcccgcgcatggccgagttgagcggttcccggctggccgcgcagcaacagatggaaggcctcctggcgccgcaccggcccaaggagcccgcgtggttcctggccaccgtcggcgtctcgcccgaccaccagggcaagggtctgggcagcgccgtcgtgctccccggagtggaggcggccgagcgcgccggggtgcccgccttcctggagacctccgcgccccgcaacctccccttctacgagcggctcggcttcaccgtcaccgccgacgtcgaggtgcccgaaggaccgcgcacctggtgcatgacccgcaagcccggtgcctga

SEQ ID NO: 36481 - DNA, 2919 bp, synthetic construct
  source 1..2919: mol_type = other DNA
atggccttaccagtgaccgccttgctcctgccgctggccttgctgctccacgccgccaggccgctcgagatccagaaccctgatcctgccgtgtaccagctgcgggatagcaagagcagcgacaagagcgtgtgtctgttcaccgacttcgacagccagaccaacgtgtcccagagcaaggactccgacgtgtacatcaccgataagaccgtgctggacatgcggagcatggacttcaagagcaactccgccgtggcctggtccaacaagtccgatttcgcctgcgccaacgccttcaacaacagcattatccccgaggacacattcttcccaagccccgagagcagcgactccaccgaccacgtgaagcccaaagagacagagaacaccaagcagcccagcaagagctgccacaagcccaaggccatcgtgcacaccgagaaagtgaacatgatgagcctgaccgtgctgggcctgcggatgctgttcgccaaaaccgtggccgtgaacttcctgctgaccgccaagctgttcttcctcctcaccgccagggccaagcgatctggatctggagcaacaaacttctcactactcaaacaagcaggtgacgtggaggagaatcccgggcctactagcatggccttaccagtgaccgccttgctcctgccgctggccttgctgctccacgccgccaggccggacatccagatgacacagagccctagcagcctgtctgccagcgtgggagacagagtgaccatcacatgcaagagcagccagagcctgctggactccgatggcaagacctacctgaactggtatcagcagaagcccggcaaggcccctaagctgctgatctacctggtgtccaagctggatagcggcgtgcccagcagattttctggcagcggcagcggaaccgacttcaccctgacaatatccagcctccagcctgaggacttcgccacctactactgcttccaaggcacccactttccattcaccttcggccagggcaccaaggtggaaatcaaaagaggcggaggcggaagtggaggcggaggatctggcggcggaggctctgaagtgcagctggttgaatcaggcggaggactggttcagcctggcggatctctgagactgtcttgtgccgccagcggctacaccttcaccagctactggatgaactgggtccgacaggcccctggcaaaggactggaatgggtcggaatgatcgaccccagcgacagcgagacacactacaaccacatcttcaaggaccgcttcaccatcagcgccgacaccagcaagaataccgcctacctccagatgaactccctgagagccgaggacaccgccgtgtactactgcgccagaaacctgtatctgttcggccagggaaccctggtcacagtgtcatctacgcgtgaggacctgaagaacgtgttcccacctgaggtggccgtgttcgagcctagcgaggccgagatcagccacacccagaaagccaccctcgtgtgcctggctaccggcttctaccccgaccatgtggaactgtcttggtgggtcaacggcaaagaggtgcacagcggcgtgtctaccgacccccagccactgaaagaacagcccgccctgaacgacagccggtactgcctgagcagcagactgagagtgtccgccaccttctggcagaacccccggaaccacttcagatgccaggtgcagttctacggcctgagcgagaacgacgagtggacccaggacagagccaagcccgtgacccagatcgtgtctgccgaagcctggggcagagccgatgatgtgattaagatccactggcaggaaaagaagtccaacaccatcctgggcagccaggaaggcaacaccatgaagaccaacgacacctacatgaagttcagctggctgaccgtgcccgagaagtccctggacaaagaacacagatgcatcgtgcggcacgaaaacaacaagaacggcgtggaccaggaaatcatcttcccacccatcaagaccgatgtgattacaatggaccccaaggacaactgctccaaggacgccaacgataccctgctgctccagctgaccaacaccagcgcctactacatgtacttgttgctgctgctgaagtccgtggtgtacttcgccatcatcacatgctgcctgctgatggctatggtcaagcggaaggacagccggggacgcgccaagagaagcggatctggcgtgaagcagaccctgaatttcgacctgctgaagctggctggcgacgtggaatccaacccaggcccttctagaggccatatgaccgagtacaagcccacggtgcgcctcgccacccgcgacgacgtccccagggccgtacgcaccctcgccgccgcgttcgccgactaccccgccacgcgccacaccgtcgatccggaccgccacatcgagcgggtcaccgagctgcaagaactcttcctcacgcgcgtcgggctcgacatcggcaaggtgtgggtcgcggacgacggcgccgcggtggcggtctggaccacgccggagagcgtcgaagcgggggcggtgttcgccgagatcggcccgcgcatggccgagttgagcggttcccggctggccgcgcagcaacagatggaaggcctcctggcgccgcaccggcccaaggagcccgcgtggttcctggccaccgtcggcgtctcgcccgaccaccagggcaagggtctgggcagcgccgtcgtgctccccggagtggaggcggccgagcgcgccggggtgcccgccttcctggagacctccgcgccccgcaacctccccttctacgagcggctcggcttcaccgtcaccgccgacgtcgaggtgcccgaaggaccgcgcacctggtgcatgacccgcaagcccggtgcctga

SEQ ID NO: 36482 - DNA, 2913 bp, synthetic construct
  source 1..2913: mol_type = other DNA
atggccttaccagtgaccgccttgctcctgccgctggccttgctgctccacgccgccaggccgctcgaggaggacctgaagaacgtgttcccacctgaggtggccgtgttcgagcctagcgaggccgagatcagccacacccagaaagccaccctcgtgtgcctggctaccggcttctaccccgaccatgtggaactgtcttggtgggtcaacggcaaagaggtgcacagcggcgtgtgtaccgacccccagccactgaaagaacagcccgccctgaacgacagccggtactgcctgagcagcagactgagagtgtccgccaccttctggcagaacccccggaaccacttcagatgccaggtgcagttctacggcctgagcgagaacgacgagtggacccaggacagagccaagcccgtgacccagatcgtgtctgccgaagcctggggcagagccgatgatgtgattaagatccactggcaggaaaagaagtccaacaccatcctgggcagccaggaaggcaacaccatgaagaccaacgacacctacatgaagttcagctggctgaccgtgcccgagaagtccctggacaaagaacacagatgcatcgtgcggcacgaaaacaacaagaacggcgtggaccaggaaatcatcttcccacccatcaagaccgatgtgattacaatggaccccaaggacaactgctccaaggacgccaacgataccctgctgctccagctgaccaacaccagcgcctactacatgtacttgttgctgctgctgaagtccgtggtgtacttcgccatcatcacatgctgcctgctgcggagaaccgccttctgctgcaacggcgagaagtctagggccaagcgatctggatctggagcaacaaacttctcactactcaaacaagcaggtgacgtggaggagaatcccgggcctactagcatggccttaccagtgaccgccttgctcctgccgctggccttgctgctccacgccgccaggccggacatccagatgacacagagccctagcagcctgtctgccagcgtgggagacagagtgaccatcacatgcaagagcagccagagcctgctggactccgatggcaagacctacctgaactggtatcagcagaagcccggcaaggcccctaagctgctgatctacctggtgtccaagctggatagcggcgtgcccagcagattttctggcagcggcagcggaaccgacttcaccctgacaatatccagcctccagcctgaggacttcgccacctactactgcttccaaggcacccactttccattcaccttcggccagggcaccaaggtggaaatcaaaagaggcggaggcggaagtggaggcggaggatctggcggcggaggctctgaagtgcagctggttgaatcaggcggaggactggttcagcctggcggatctctgagactgtcttgtgccgccagcggctacaccttcaccagctactggatgaactgggtccgacaggcccctggcaaaggactggaatgggtcggaatgatcgaccccagcgacagcgagacacactacaaccacatcttcaaggaccgcttcaccatcagcgccgacaccagcaagaataccgcctacctccagatgaactccctgagagccgaggacaccgccgtgtactactgcgccagaaacctgtatctgttcggccagggaaccctggtcacagtgtcatctacgcgtatccagaaccctgatcctgccgtgtaccagctgcgggatagcaagagcagcgacaagagcgtgtgtctgttcaccgacttcgacagccagaccaacgtgtcccagagcaaggactccgacgtgtacatcaccgataagtgcgtgctggacatgcggagcatggacttcaagagcaactccgccgtggcctggtccaacaagtccgatttcgcctgcgccaacgccttcaacaacagcattatccccgaggacacattcttcccaagccccgagagcagcgactccaccgaccacgtgaagcccaaagagacagagaacaccaagcagcccagcaagagctgccacaagcccaaggccatcgtgcacaccgagaaagtgaacatgatgagcctgaccgtgctgggcctgcggatgctgttcgccaaaaccgtggccgtgaacttcctgctgaccgccaagctgttcttcctccgcgccaagagaagcggatctggcgtgaagcagaccctgaatttcgacctgctgaagctggctggcgacgtggaatccaacccaggcccttctagaggccatatgaccgagtacaagcccacggtgcgcctcgccacccgcgacgacgtccccagggccgtacgcaccctcgccgccgcgttcgccgactaccccgccacgcgccacaccgtcgatccggaccgccacatcgagcgggtcaccgagctgcaagaactcttcctcacgcgcgtcgggctcgacatcggcaaggtgtgggtcgcggacgacggcgccgcggtggcggtctggaccacgccggagagcgtcgaagcgggggcggtgttcgccgagatcggcccgcgcatggccgagttgagcggttcccggctggccgcgcagcaacagatggaaggcctcctggcgccgcaccggcccaaggagcccgcgtggttcctggccaccgtcggcgtctcgcccgaccaccagggcaagggtctgggcagcgccgtcgtgctccccggagtggaggcggccgagcgcgccggggtgcccgccttcctggagacctccgcgccccgcaacctccccttctacgagcggctcggcttcaccgtcaccgccgacgtcgaggtgcccgaaggaccgcgcacctggtgcatgacccgcaagcccggtgcctga

SEQ ID NO: 36483 - DNA, 2913 bp, synthetic construct
  source 1..2913: mol_type = other DNA
atggccttaccagtgaccgccttgctcctgccgctggccttgctgctccacgccgccaggccgctcgagatccagaaccctgatcctgccgtgtaccagctgcgggatagcaagagcagcgacaagagcgtgtgtctgttcaccgacttcgacagccagaccaacgtgtcccagagcaaggactccgacgtgtacatcaccgataagtgcgtgctggacatgcggagcatggacttcaagagcaactccgccgtggcctggtccaacaagtccgatttcgcctgcgccaacgccttcaacaacagcattatccccgaggacacattcttcccaagccccgagagcagcgactccaccgaccacgtgaagcccaaagagacagagaacaccaagcagcccagcaagagctgccacaagcccaaggccatcgtgcacaccgagaaagtgaacatgatgagcctgaccgtgctgggcctgcggatgctgttcgccaaaaccgtggccgtgaacttcctgctgaccgccaagctgttcttcctcagggccaagcgatctggatctggagcaacaaacttctcactactcaaacaagcaggtgacgtggaggagaatcccgggcctactagcatggccttaccagtgaccgccttgctcctgccgctggccttgctgctccacgccgccaggccggacatccagatgacacagagccctagcagcctgtctgccagcgtgggagacagagtgaccatcacatgcaagagcagccagagcctgctggactccgatggcaagacctacctgaactggtatcagcagaagcccggcaaggcccctaagctgctgatctacctggtgtccaagctggatagcggcgtgcccagcagattttctggcagcggcagcggaaccgacttcaccctgacaatatccagcctccagcctgaggacttcgccacctactactgcttccaaggcacccactttccattcaccttcggccagggcaccaaggtggaaatcaaaagaggcggaggcggaagtggaggcggaggatctggcggcggaggctctgaagtgcagctggttgaatcaggcggaggactggttcagcctggcggatctctgagactgtcttgtgccgccagcggctacaccttcaccagctactggatgaactgggtccgacaggcccctggcaaaggactggaatgggtcggaatgatcgaccccagcgacagcgagacacactacaaccacatcttcaaggaccgcttcaccatcagcgccgacaccagcaagaataccgcctacctccagatgaactccctgagagccgaggacaccgccgtgtactactgcgccagaaacctgtatctgttcggccagggaaccctggtcacagtgtcatctacgcgtgaggacctgaagaacgtgttcccacctgaggtggccgtgttcgagcctagcgaggccgagatcagccacacccagaaagccaccctcgtgtgcctggctaccggcttctaccccgaccatgtggaactgtcttggtgggtcaacggcaaagaggtgcacagcggcgtgtgtaccgacccccagccactgaaagaacagcccgccctgaacgacagccggtactgcctgagcagcagactgagagtgtccgccaccttctggcagaacccccggaaccacttcagatgccaggtgcagttctacggcctgagcgagaacgacgagtggacccaggacagagccaagcccgtgacccagatcgtgtctgccgaagcctggggcagagccgatgatgtgattaagatccactggcaggaaaagaagtccaacaccatcctgggcagccaggaaggcaacaccatgaagaccaacgacacctacatgaagttcagctggctgaccgtgcccgagaagtccctggacaaagaacacagatgcatcgtgcggcacgaaaacaacaagaacggcgtggaccaggaaatcatcttcccacccatcaagaccgatgtgattacaatggaccccaaggacaactgctccaaggacgccaacgataccctgctgctccagctgaccaacaccagcgcctactacatgtacttgttgctgctgctgaagtccgtggtgtacttcgccatcatcacatgctgcctgctgcggagaaccgccttctgctgcaacggcgagaagtctcgcgccaagagaagcggatctggcgtgaagcagaccctgaatttcgacctgctgaagctggctggcgacgtggaatccaacccaggcccttctagaggccatatgaccgagtacaagcccacggtgcgcctcgccacccgcgacgacgtccccagggccgtacgcaccctcgccgccgcgttcgccgactaccccgccacgcgccacaccgtcgatccggaccgccacatcgagcgggtcaccgagctgcaagaactcttcctcacgcgcgtcgggctcgacatcggcaaggtgtgggtcgcggacgacggcgccgcggtggcggtctggaccacgccggagagcgtcgaagcgggggcggtgttcgccgagatcggcccgcgcatggccgagttgagcggttcccggctggccgcgcagcaacagatggaaggcctcctggcgccgcaccggcccaaggagcccgcgtggttcctggccaccgtcggcgtctcgcccgaccaccagggcaagggtctgggcagcgccgtcgtgctccccggagtggaggcggccgagcgcgccggggtgcccgccttcctggagacctccgcgccccgcaacctccccttctacgagcggctcggcttcaccgtcaccgccgacgtcgaggtgcccgaaggaccgcgcacctggtgcatgacccgcaagcccggtgcctga

SEQ ID NO: 36484 - DNA, 2913 bp, synthetic construct
  source 1..2913: mol_type = other DNA
atggccttaccagtgaccgccttgctcctgccgctggccttgctgctccacgccgccaggccgctcgaggaggacctgaagaacgtgttcccacctgaggtggccgtgttcgagcctagcgaggccgagatcagccacacccagaaagccaccctcgtgtgcctggctaccggcttctaccccgaccatgtggaactgtcttggtgggtcaacggcaaagaggtgcacagcggcgtgtctaccgacccccagccactgaaagaacagcccgccctgaacgacagccggtactgcctgagcagcagactgagagtgtccgccaccttctggcagaacccccggaaccacttcagatgccaggtgcagttctacggcctgagcgagaacgacgagtggacccaggacagagccaagcccgtgacccagatcgtgtctgccgaagcctggggcagagccgatgatgtgattaagatccactggcaggaaaagaagtccaacaccatcctgggcagccaggaaggcaacaccatgaagaccaacgacacctacatgaagttcagctggctgaccgtgcccgagaagtccctggacaaagaacacagatgcatcgtgcggcacgaaaacaacaagaacggcgtggaccaggaaatcatcttcccacccatcaagaccgatgtgattacaatggaccccaaggacaactgctccaaggacgccaacgataccctgctgctccagctgaccaacaccagcgcctactacatgtacttgttgctgctgctgaagtccgtggtgtacttcgccatcatcacatgctgcctgctgcggagaaccgccttctgctgcaacggcgagaagtctagggccaagcgatctggatctggagcaacaaacttctcactactcaaacaagcaggtgacgtggaggagaatcccgggcctactagcatggccttaccagtgaccgccttgctcctgccgctggccttgctgctccacgccgccaggccggacatccagatgacacagagccctagcagcctgtctgccagcgtgggagacagagtgaccatcacatgcaagagcagccagagcctgctggactccgatggcaagacctacctgaactggtatcagcagaagcccggcaaggcccctaagctgctgatctacctggtgtccaagctggatagcggcgtgcccagcagattttctggcagcggcagcggaaccgacttcaccctgacaatatccagcctccagcctgaggacttcgccacctactactgcttccaaggcacccactttccattcaccttcggccagggcaccaaggtggaaatcaaaagaggcggaggcggaagtggaggcggaggatctggcggcggaggctctgaagtgcagctggttgaatcaggcggaggactggttcagcctggcggatctctgagactgtcttgtgccgccagcggctacaccttcaccagctactggatgaactgggtccgacaggcccctggcaaaggactggaatgggtcggaatgatcgaccccagcgacagcgagacacactacaaccacatcttcaaggaccgcttcaccatcagcgccgacaccagcaagaataccgcctacctccagatgaactccctgagagccgaggacaccgccgtgtactactgcgccagaaacctgtatctgttcggccagggaaccctggtcacagtgtcatctacgcgtatccagaaccctgatcctgccgtgtaccagctgcgggatagcaagagcagcgacaagagcgtgtgtctgttcaccgacttcgacagccagaccaacgtgtcccagagcaaggactccgacgtgtacatcaccgataagaccgtgctggacatgcggagcatggacttcaagagcaactccgccgtggcctggtccaacaagtccgatttcgcctgcgccaacgccttcaacaacagcattatccccgaggacacattcttcccaagccccgagagcagcgactccaccgaccacgtgaagcccaaagagacagagaacaccaagcagcccagcaagagctgccacaagcccaaggccatcgtgcacaccgagaaagtgaacatgatgagcctgaccgtgctgggcctgcggatgctgttcgccaaaaccgtggccgtgaacttcctgctgaccgccaagctgttcttcctccgcgccaagagaagcggatctggcgtgaagcagaccctgaatttcgacctgctgaagctggctggcgacgtggaatccaacccaggcccttctagaggccatatgaccgagtacaagcccacggtgcgcctcgccacccgcgacgacgtccccagggccgtacgcaccctcgccgccgcgttcgccgactaccccgccacgcgccacaccgtcgatccggaccgccacatcgagcgggtcaccgagctgcaagaactcttcctcacgcgcgtcgggctcgacatcggcaaggtgtgggtcgcggacgacggcgccgcggtggcggtctggaccacgccggagagcgtcgaagcgggggcggtgttcgccgagatcggcccgcgcatggccgagttgagcggttcccggctggccgcgcagcaacagatggaaggcctcctggcgccgcaccggcccaaggagcccgcgtggttcctggccaccgtcggcgtctcgcccgaccaccagggcaagggtctgggcagcgccgtcgtgctccccggagtggaggcggccgagcgcgccggggtgcccgccttcctggagacctccgcgccccgcaacctccccttctacgagcggctcggcttcaccgtcaccgccgacgtcgaggtgcccgaaggaccgcgcacctggtgcatgacccgcaagcccggtgcctga

SEQ ID NO: 36485 - DNA, 2913 bp, synthetic construct
  source 1..2913: mol_type = other DNA
atggccttaccagtgaccgccttgctcctgccgctggccttgctgctccacgccgccaggccgctcgagatccagaaccctgatcctgccgtgtaccagctgcgggatagcaagagcagcgacaagagcgtgtgtctgttcaccgacttcgacagccagaccaacgtgtcccagagcaaggactccgacgtgtacatcaccgataagaccgtgctggacatgcggagcatggacttcaagagcaactccgccgtggcctggtccaacaagtccgatttcgcctgcgccaacgccttcaacaacagcattatccccgaggacacattcttcccaagccccgagagcagcgactccaccgaccacgtgaagcccaaagagacagagaacaccaagcagcccagcaagagctgccacaagcccaaggccatcgtgcacaccgagaaagtgaacatgatgagcctgaccgtgctgggcctgcggatgctgttcgccaaaaccgtggccgtgaacttcctgctgaccgccaagctgttcttcctcagggccaagcgatctggatctggagcaacaaacttctcactactcaaacaagcaggtgacgtggaggagaatcccgggcctactagcatggccttaccagtgaccgccttgctcctgccgctggccttgctgctccacgccgccaggccggacatccagatgacacagagccctagcagcctgtctgccagcgtgggagacagagtgaccatcacatgcaagagcagccagagcctgctggactccgatggcaagacctacctgaactggtatcagcagaagcccggcaaggcccctaagctgctgatctacctggtgtccaagctggatagcggcgtgcccagcagattttctggcagcggcagcggaaccgacttcaccctgacaatatccagcctccagcctgaggacttcgccacctactactgcttccaaggcacccactttccattcaccttcggccagggcaccaaggtggaaatcaaaagaggcggaggcggaagtggaggcggaggatctggcggcggaggctctgaagtgcagctggttgaatcaggcggaggactggttcagcctggcggatctctgagactgtcttgtgccgccagcggctacaccttcaccagctactggatgaactgggtccgacaggcccctggcaaaggactggaatgggtcggaatgatcgaccccagcgacagcgagacacactacaaccacatcttcaaggaccgcttcaccatcagcgccgacaccagcaagaataccgcctacctccagatgaactccctgagagccgaggacaccgccgtgtactactgcgccagaaacctgtatctgttcggccagggaaccctggtcacagtgtcatctacgcgtgaggacctgaagaacgtgttcccacctgaggtggccgtgttcgagcctagcgaggccgagatcagccacacccagaaagccaccctcgtgtgcctggctaccggcttctaccccgaccatgtggaactgtcttggtgggtcaacggcaaagaggtgcacagcggcgtgtctaccgacccccagccactgaaagaacagcccgccctgaacgacagccggtactgcctgagcagcagactgagagtgtccgccaccttctggcagaacccccggaaccacttcagatgccaggtgcagttctacggcctgagcgagaacgacgagtggacccaggacagagccaagcccgtgacccagatcgtgtctgccgaagcctggggcagagccgatgatgtgattaagatccactggcaggaaaagaagtccaacaccatcctgggcagccaggaaggcaacaccatgaagaccaacgacacctacatgaagttcagctggctgaccgtgcccgagaagtccctggacaaagaacacagatgcatcgtgcggcacgaaaacaacaagaacggcgtggaccaggaaatcatcttcccacccatcaagaccgatgtgattacaatggaccccaaggacaactgctccaaggacgccaacgataccctgctgctccagctgaccaacaccagcgcctactacatgtacttgttgctgctgctgaagtccgtggtgtacttcgccatcatcacatgctgcctgctgcggagaaccgccttctgctgcaacggcgagaagtctcgcgccaagagaagcggatctggcgtgaagcagaccctgaatttcgacctgctgaagctggctggcgacgtggaatccaacccaggcccttctagaggccatatgaccgagtacaagcccacggtgcgcctcgccacccgcgacgacgtccccagggccgtacgcaccctcgccgccgcgttcgccgactaccccgccacgcgccacaccgtcgatccggaccgccacatcgagcgggtcaccgagctgcaagaactcttcctcacgcgcgtcgggctcgacatcggcaaggtgtgggtcgcggacgacggcgccgcggtggcggtctggaccacgccggagagcgtcgaagcgggggcggtgttcgccgagatcggcccgcgcatggccgagttgagcggttcccggctggccgcgcagcaacagatggaaggcctcctggcgccgcaccggcccaaggagcccgcgtggttcctggccaccgtcggcgtctcgcccgaccaccagggcaagggtctgggcagcgccgtcgtgctccccggagtggaggcggccgagcgcgccggggtgcccgccttcctggagacctccgcgccccgcaacctccccttctacgagcggctcggcttcaccgtcaccgccgacgtcgaggtgcccgaaggaccgcgcacctggtgcatgacccgcaagcccggtgcctga

SEQ ID NO: 36486 - DNA, 2607 bp, synthetic construct
  source 1..2607: mol_type = other DNA
atggccttaccagtgaccgccttgctcctgccgctggccttgctgctccacgccgccaggccgctcgaggaggacctgaagaacgtgttcccacctgaggtggccgtgttcgagcctagcaaggccgagatcgcccacacccagaaagccaccctcgtgtgcctggctaccggcttctaccccgaccatgtggaactgtcttggtgggtcaacggcaaagaggtgcacagcggcgtgtgtaccgacccccagccactgaaagaacagcccgccctgaacgacagccggtactgcctgagcagcagactgagagtgtccgccaccttctggcagaacccccggaaccacttcagatgccaggtgcagttctacggcctgagcgagaacgacgagtggacccaggacagagccaagcccgtgacccagatcgtgtctgccgaagcctggggcagagccgattgcggcatcaccagcgccagctaccaccagggcgtgctgagcgccaccatcctgtacgagatcctgctgggcaaggccaccctgtacgccgtgctggtgtctgccctggtgctgatggctatggtcaagcggaaggacagccggggaagggccaagcgatctggatctggagcaacaaacttctcactactcaaacaagcaggtgacgtggaggagaatcccgggcctactagcatggccttaccagtgaccgccttgctcctgccgctggccttgctgctccacgccgccaggccggacatccagatgacacagagccctagcagcctgtctgccagcgtgggagacagagtgaccatcacatgcaagagcagccagagcctgctggactccgatggcaagacctacctgaactggtatcagcagaagcccggcaaggcccctaagctgctgatctacctggtgtccaagctggatagcggcgtgcccagcagattttctggcagcggcagcggaaccgacttcaccctgacaatatccagcctccagcctgaggacttcgccacctactactgcttccaaggcacccactttccattcaccttcggccagggcaccaaggtggaaatcaaaagaggcggaggcggaagtggaggcggaggatctggcggcggaggctctgaagtgcagctggttgaatcaggcggaggactggttcagcctggcggatctctgagactgtcttgtgccgccagcggctacaccttcaccagctactggatgaactgggtccgacaggcccctggcaaaggactggaatgggtcggaatgatcgaccccagcgacagcgagacacactacaaccacatcttcaaggaccgcttcaccatcagcgccgacaccagcaagaataccgcctacctccagatgaactccctgagagccgaggacaccgccgtgtactactgcgccagaaacctgtatctgttcggccagggaaccctggtcacagtgtcatctacgcgtatccagaaccctgatcctgccgtgtaccagctgcgggatagcaagagcagcgacaagagcgtgtgtctgttcaccgacttcgacagccagaccaacgtgtcccagagcaaggactccgacgtgtacatcaccgataagtgcgtgctggacatgcggagcatggacttcaagagcaactccgccgtggcctggtccaacaagtccgatttcgcctgcgccaacgccttcaacaacagcattatccccgaggacacattcttcccaagcagcgacgtgccctgcgacgtgaagctggtggaaaagagcttcgagacagacaccaacctgaacttccagaacctgagcgtgatcggcttcagaatcctgctgctgaaagtggccggctttaacctgctgatgaccctgcggctgtggtccagccgcgccaagagaagcggatctggcgtgaagcagaccctgaatttcgacctgctgaagctggctggcgacgtggaatccaacccaggcccttctagaggccatatgaccgagtacaagcccacggtgcgcctcgccacccgcgacgacgtccccagggccgtacgcaccctcgccgccgcgttcgccgactaccccgccacgcgccacaccgtcgatccggaccgccacatcgagcgggtcaccgagctgcaagaactcttcctcacgcgcgtcgggctcgacatcggcaaggtgtgggtcgcggacgacggcgccgcggtggcggtctggaccacgccggagagcgtcgaagcgggggcggtgttcgccgagatcggcccgcgcatggccgagttgagcggttcccggctggccgcgcagcaacagatggaaggcctcctggcgccgcaccggcccaaggagcccgcgtggttcctggccaccgtcggcgtctcgcccgaccaccagggcaagggtctgggcagcgccgtcgtgctccccggagtggaggcggccgagcgcgccggggtgcccgccttcctggagacctccgcgccccgcaacctccccttctacgagcggctcggcttcaccgtcaccgccgacgtcgaggtgcccgaaggaccgcgcacctggtgcatgacccgcaagcccggtgcctga

SEQ ID NO: 36487 - DNA, 2607 bp, synthetic construct
  source 1..2607: mol_type = other DNA
atggccttaccagtgaccgccttgctcctgccgctggccttgctgctccacgccgccaggccgctcgagatccagaaccctgatcctgccgtgtaccagctgcgggatagcaagagcagcgacaagagcgtgtgtctgttcaccgacttcgacagccagaccaacgtgtcccagagcaaggactccgacgtgtacatcaccgataagtgcgtgctggacatgcggagcatggacttcaagagcaactccgccgtggcctggtccaacaagtccgatttcgcctgcgccaacgccttcaacaacagcattatccccgaggacacattcttcccaagcagcgacgtgccctgcgacgtgaagctggtggaaaagagcttcgagacagacaccaacctgaacttccagaacctgagcgtgatcggcttcagaatcctgctgctgaaagtggccggctttaacctgctgatgaccctgcggctgtggtccagcagggccaagcgatctggatctggagcaacaaacttctcactactcaaacaagcaggtgacgtggaggagaatcccgggcctactagcatggccttaccagtgaccgccttgctcctgccgctggccttgctgctccacgccgccaggccggacatccagatgacacagagccctagcagcctgtctgccagcgtgggagacagagtgaccatcacatgcaagagcagccagagcctgctggactccgatggcaagacctacctgaactggtatcagcagaagcccggcaaggcccctaagctgctgatctacctggtgtccaagctggatagcggcgtgcccagcagattttctggcagcggcagcggaaccgacttcaccctgacaatatccagcctccagcctgaggacttcgccacctactactgcttccaaggcacccactttccattcaccttcggccagggcaccaaggtggaaatcaaaagaggcggaggcggaagtggaggcggaggatctggcggcggaggctctgaagtgcagctggttgaatcaggcggaggactggttcagcctggcggatctctgagactgtcttgtgccgccagcggctacaccttcaccagctactggatgaactgggtccgacaggcccctggcaaaggactggaatgggtcggaatgatcgaccccagcgacagcgagacacactacaaccacatcttcaaggaccgcttcaccatcagcgccgacaccagcaagaataccgcctacctccagatgaactccctgagagccgaggacaccgccgtgtactactgcgccagaaacctgtatctgttcggccagggaaccctggtcacagtgtcatctacgcgtgaggacctgaagaacgtgttcccacctgaggtggccgtgttcgagcctagcaaggccgagatcgcccacacccagaaagccaccctcgtgtgcctggctaccggcttctaccccgaccatgtggaactgtcttggtgggtcaacggcaaagaggtgcacagcggcgtgtgtaccgacccccagccactgaaagaacagcccgccctgaacgacagccggtactgcctgagcagcagactgagagtgtccgccaccttctggcagaacccccggaaccacttcagatgccaggtgcagttctacggcctgagcgagaacgacgagtggacccaggacagagccaagcccgtgacccagatcgtgtctgccgaagcctggggcagagccgattgcggcatcaccagcgccagctaccaccagggcgtgctgagcgccaccatcctgtacgagatcctgctgggcaaggccaccctgtacgccgtgctggtgtctgccctggtgctgatggctatggtcaagcggaaggacagccggggacgcgccaagagaagcggatctggcgtgaagcagaccctgaatttcgacctgctgaagctggctggcgacgtggaatccaacccaggcccttctagaggccatatgaccgagtacaagcccacggtgcgcctcgccacccgcgacgacgtccccagggccgtacgcaccctcgccgccgcgttcgccgactaccccgccacgcgccacaccgtcgatccggaccgccacatcgagcgggtcaccgagctgcaagaactcttcctcacgcgcgtcgggctcgacatcggcaaggtgtgggtcgcggacgacggcgccgcggtggcggtctggaccacgccggagagcgtcgaagcgggggcggtgttcgccgagatcggcccgcgcatggccgagttgagcggttcccggctggccgcgcagcaacagatggaaggcctcctggcgccgcaccggcccaaggagcccgcgtggttcctggccaccgtcggcgtctcgcccgaccaccagggcaagggtctgggcagcgccgtcgtgctccccggagtggaggcggccgagcgcgccggggtgcccgccttcctggagacctccgcgccccgcaacctccccttctacgagcggctcggcttcaccgtcaccgccgacgtcgaggtgcccgaaggaccgcgcacctggtgcatgacccgcaagcccggtgcctga

SEQ ID NO: 36488 - DNA, 2286 bp, synthetic construct
  source 1..2286: mol_type = other DNA
atggccttaccagtgaccgccttgctcctgccgctggccttgctgctccacgccgccaggccgctcgagcagagttttgggttgttggaccctaaattgtgctatctgttggacggaatcctgttcatttacggagtgatcctgaccgcattgttcctgcgggttaagttttccagatccgcagacgcacccgcttaccaacaagggcagaaccaactctacaatgaacttaatttggggcggagggaagagtacgacgttctggacaaaaggaggggacgagatcccgagatgggcggaaagcctcagcgaaggaagaatccgcaagaggggctttataacgaactccagaaagataaaatggcagaagcctatagtgagattgggatgaagggagaaaggaggaggggtaaaggtcacgatgggttgtaccaaggattgagcacagccactaaagatacctatgatgcgctccacatgcaggccctgccgccaagaagggccaagcgatctggatctggagcaacaaacttctcactactcaaacaagcaggtgacgtggaggagaatcccgggcctactagcatggccttaccagtgaccgccttgctcctgccgctggccttgctgctccacgccgccaggccggacatccagatgacacagagccctagcagcctgtctgccagcgtgggagacagagtgaccatcacatgcaagagcagccagagcctgctggactccgatggcaagacctacctgaactggtatcagcagaagcccggcaaggcccctaagctgctgatctacctggtgtccaagctggatagcggcgtgcccagcagattttctggcagcggcagcggaaccgacttcaccctgacaatatccagcctccagcctgaggacttcgccacctactactgcttccaaggcacccactttccattcaccttcggccagggcaccaaggtggaaatcaaaagaggcggaggcggaagtggaggcggaggatctggcggcggaggctctgaagtgcagctggttgaatcaggcggaggactggttcagcctggcggatctctgagactgtcttgtgccgccagcggctacaccttcaccagctactggatgaactgggtccgacaggcccctggcaaaggactggaatgggtcggaatgatcgaccccagcgacagcgagacacactacaaccacatcttcaaggaccgcttcaccatcagcgccgacaccagcaagaataccgcctacctccagatgaactccctgagagccgaggacaccgccgtgtactactgcgccagaaacctgtatctgttcggccagggaaccctggtcacagtgtcatctacgcgtgagctgggagagcctcagctgtgctatatcctggacgccatcctgtttctgtacggcatcgtgctgaccctgctgtactgccggctgaagatccaagtgcggaaggccgccatcaccagctacgagaaatccgacggcgtgtacaccggcctgagcaccagaaatcaagagacatacgagacactgaagcacgaaaagcctccacaacgcgccaagagaagcggatctggcgtgaagcagaccctgaatttcgacctgctgaagctggctggcgacgtggaatccaacccaggcccttctagaggccatatgaccgagtacaagcccacggtgcgcctcgccacccgcgacgacgtccccagggccgtacgcaccctcgccgccgcgttcgccgactaccccgccacgcgccacaccgtcgatccggaccgccacatcgagcgggtcaccgagctgcaagaactcttcctcacgcgcgtcgggctcgacatcggcaaggtgtgggtcgcggacgacggcgccgcggtggcggtctggaccacgccggagagcgtcgaagcgggggcggtgttcgccgagatcggcccgcgcatggccgagttgagcggttcccggctggccgcgcagcaacagatggaaggcctcctggcgccgcaccggcccaaggagcccgcgtggttcctggccaccgtcggcgtctcgcccgaccaccagggcaagggtctgggcagcgccgtcgtgctccccggagtggaggcggccgagcgcgccggggtgcccgccttcctggagacctccgcgccccgcaacctccccttctacgagcggctcggcttcaccgtcaccgccgacgtcgaggtgcccgaaggaccgcgcacctggtgcatgacccgcaagcccggtgcctga

SEQ ID NO: 36489 - DNA, 2919 bp, synthetic construct; identical to SEQ ID NO: 36480
  source 1..2919: mol_type = other DNA

SEQ ID NO: 36490 - DNA, 2919 bp, synthetic construct; identical to SEQ ID NO: 36481
  source 1..2919: mol_type = other DNA

SEQ ID NO: 36491 - DNA, 2916 bp, synthetic construct
  source 1..2916: mol_type = other DNA
atggccttaccagtgaccgccttgctcctgccgctggccttgctgctccacgccgccaggccgctcgaggaggaggacctgaagaacgtgttcccacctgaggtggccgtgttcgagcctagcgaggccgagatcagccacacccagaaagccaccctcgtgtgcctggctaccggcttctaccccgaccatgtggaactgtcttggtgggtcaacggcaaagaggtgcacagcggcgtgtgtaccgacccccagccactgaaagaacagcccgccctgaacgacagccggtactgcctgagcagcagactgagagtgtccgccaccttctggcagaacccccggaaccacttcagatgccaggtgcagttctacggcctgagcgagaacgacgagtggacccaggacagagccaagcccgtgacccagatcgtgtctgccgaagcctggggcagagccgatgatgtgattaagatccactggcaggaaaagaagtccaacaccatcctgggcagccaggaaggcaacaccatgaagaccaacgacacctacatgaagttcagctggctgaccgtgcccgagaagtccctggacaaagaacacagatgcatcgtgcggcacgaaaacaacaagaacggcgtggaccaggaaatcatcttcccacccatcaagaccgatgtgattacaatggaccccaaggacaactgctccaaggacgccaacgataccctgctgctccagctgaccaacaccagcgcctactacatgtacttgttgctgctgctgaagtccgtggtgtacttcgccatcatcacatgctgcctgctgcggagaaccgccttctgctgcaacggcgagaagtctagggccaagcgatctggatctggagcaacaaacttctcactactcaaacaagcaggtgacgtggaggagaatcccgggcctactagcatggccttaccagtgaccgccttgctcctgccgctggccttgctgctccacgccgccaggccggacatccagatgacacagagccctagcagcctgtctgccagcgtgggagacagagtgaccatcacatgcaagagcagccagagcctgctggactccgatggcaagacctacctgaactggtatcagcagaagcccggcaaggcccctaagctgctgatctacctggtgtccaagctggatagcggcgtgcccagcagattttctggcagcggcagcggaaccgacttcaccctgacaatatccagcctccagcctgaggacttcgccacctactactgcttccaaggcacccactttccattcaccttcggccagggcaccaaggtggaaatcaaaagaggcggaggcggaagtggaggcggaggatctggcggcggaggctctgaagtgcagctggttgaatcaggcggaggactggttcagcctggcggatctctgagactgtcttgtgccgccagcggctacaccttcaccagctactggatgaactgggtccgacaggcccctggcaaaggactggaatgggtcggaatgatcgaccccagcgacagcgagacacactacaaccacatcttcaaggaccgcttcaccatcagcgccgacaccagcaagaataccgcctacctccagatgaactccctgagagccgaggacaccgccgtgtactactgcgccagaaacctgtatctgttcggccagggaaccctggtcacagtgtcatctacgcgtatccagaaccctgatcctgccgtgtaccagctgcgggatagcaagagcagcgacaagagcgtgtgtctgttcaccgacttcgacagccagaccaacgtgtcccagagcaaggactccgacgtgtacatcaccgataagtgcgtgctggacatgcggagcatggacttcaagagcaactccgccgtggcctggtccaacaagtccgatttcgcctgcgccaacgccttcaacaacagcattatccccgaggacacattcttcccaagccccgagagcagcgactccaccgaccacgtgaagcccaaagagacagagaacaccaagcagcccagcaagagctgccacaagcccaaggccatcgtgcacaccgagaaagtgaacatgatgagcctgaccgtgctgggcctgcggatgctgttcgccaaaaccgtggccgtgaacttcctgctgaccgccaagctgttcttcctccgcgccaagagaagcggatctggcgtgaagcagaccctgaatttcgacctgctgaagctggctggcgacgtggaatccaacccaggcccttctagaggccatatgaccgagtacaagcccacggtgcgcctcgccacccgcgacgacgtccccagggccgtacgcaccctcgccgccgcgttcgccgactaccccgccacgcgccacaccgtcgatccggaccgccacatcgagcgggtcaccgagctgcaagaactcttcctcacgcgcgtcgggctcgacatcggcaaggtgtgggtcgcggacgacggcgccgcggtggcggtctggaccacgccggagagcgtcgaagcgggggcggtgttcgccgagatcggcccgcgcatggccgagttgagcggttcccggctggccgcgcagcaacagatggaaggcctcctggcgccgcaccggcccaaggagcccgcgtggttcctggccaccgtcggcgtctcgcccgaccaccagggcaagggtctgggcagcgccgtcgtgctccccggagtggaggcggccgagcgcgccggggtgcccgccttcctggagacctccgcgccccgcaacctccccttctacgagcggctcggcttcaccgtcaccgccgacgtcgaggtgcccgaaggaccgcgcacctggtgcatgacccgcaagcccggtgcctga

SEQ ID NO: 36492 - DNA, 2916 bp, synthetic construct
  source 1..2916: mol_type = other DNA
atggccttaccagtgaccgccttgctcctgccgctggccttgctgctccacgccgccaggccgctcgagatccagaaccctgatcctgccgtgtaccagctgcgggatagcaagagcagcgacaagagcgtgtgtctgttcaccgacttcgacagccagaccaacgtgtcccagagcaaggactccgacgtgtacatcaccgataagtgcgtgctggacatgcggagcatggacttcaagagcaactccgccgtggcctggtccaacaagtccgatttcgcctgcgccaacgccttcaacaacagcattatccccgaggacacattcttcccaagccccgagagcagcgactccaccgaccacgtgaagcccaaagagacagagaacaccaagcagcccagcaagagctgccacaagcccaaggccatcgtgcacaccgagaaagtgaacatgatgagcctgaccgtgctgggcctgcggatgctgttcgccaaaaccgtggccgtgaacttcctgctgaccgccaagctgttcttcctcagggccaagcgatctggatctggagcaacaaacttctcactactcaaacaagcaggtgacgtggaggagaatcccgggcctactagcatggccttaccagtgaccgccttgctcctgccgctggccttgctgctccacgccgccaggccggacatccagatgacacagagccctagcagcctgtctgccagcgtgggagacagagtgaccatcacatgcaagagcagccagagcctgctggactccgatggcaagacctacctgaactggtatcagcagaagcccggcaaggcccctaagctgctgatctacctggtgtccaagctggatagcggcgtgcccagcagattttctggcagcggcagcggaaccgacttcaccctgacaatatccagcctccagcctgaggacttcgccacctactactgcttccaaggcacccactttccattcaccttcggccagggcaccaaggtggaaatcaaaagaggcggaggcggaagtggaggcggaggatctggcggcggaggctctgaagtgcagctggttgaatcaggcggaggactggttcagcctggcggatctctgagactgtcttgtgccgccagcggctacaccttcaccagctactggatgaactgggtccgacaggcccctggcaaaggactggaatgggtcggaatgatcgaccccagcgacagcgagacacactacaaccacatcttcaaggaccgcttcaccatcagcgccgacaccagcaagaataccgcctacctccagatgaactccctgagagccgaggacaccgccgtgtactactgcgccagaaacctgtatctgttcggccagggaaccctggtcacagtgtcatctacgcgtgaggaggacctgaagaacgtgttcccacctgaggtggccgtgttcgagcctagcgaggccgagatcagccacacccagaaagccaccctcgtgtgcctggctaccggcttctaccccgaccatgtggaactgtcttggtgggtcaacggcaaagaggtgcacagcggcgtgtgtaccgacccccagccactgaaagaacagcccgccctgaacgacagccggtactgcctgagcagcagactgagagtgtccgccaccttctggcagaacccccggaaccacttcagatgccaggtgcagttctacggcctgagcgagaacgacgagtggacccaggacagagccaagcccgtgacccagatcgtgtctgccgaagcctggggcagagccgatgatgtgattaagatccactggcaggaaaagaagtccaacaccatcctgggcagccaggaaggcaacaccatgaagaccaacgacacctacatgaagttcagctggctgaccgtgcccgagaagtccctggacaaagaacacagatgcatcgtgcggcacgaaaacaacaagaacggcgtggaccaggaaatcatcttcccacccatcaagaccgatgtgattacaatggaccccaaggacaactgctccaaggacgccaacgataccctgctgctccagctgaccaacaccagcgcctactacatgtacttgttgctgctgctgaagtccgtggtgtacttcgccatcatcacatgctgcctgctgcggagaaccgccttctgctgcaacggcgagaagtctcgcgccaagagaagcggatctggcgtgaagcagaccctgaatttcgacctgctgaagctggctggcgacgtggaatccaacccaggcccttctagaggccatatgaccgagtacaagcccacggtgcgcctcgccacccgcgacgacgtccccagggccgtacgcaccctcgccgccgcgttcgccgactaccccgccacgcgccacaccgtcgatccggaccgccacatcgagcgggtcaccgagctgcaagaactcttcctcacgcgcgtcgggctcgacatcggcaaggtgtgggtcgcggacgacggcgccgcggtggcggtctggaccacgccggagagcgtcgaagcgggggcggtgttcgccgagatcggcccgcgcatggccgagttgagcggttcccggctggccgcgcagcaacagatggaaggcctcctggcgccgcaccggcccaaggagcccgcgtggttcctggccaccgtcggcgtctcgcccgaccaccagggcaagggtctgggcagcgccgtcgtgctccccggagtggaggcggccgagcgcgccggggtgcccgccttcctggagacctccgcgccccgcaacctccccttctacgagcggctcggcttcaccgtcaccgccgacgtcgaggtgcccgaaggaccgcgcacctggtgcatgacccgcaagcccggtgcctga

SEQ ID NO: 36493 - DNA, 2607 bp, synthetic construct
  source 1..2607: mol_type = other DNA
atggccttaccagtgaccgccttgctcctgccgctggccttgctgctccacgccgccaggccgctcgaggaggacctgaagaacgtgttcccacctgaggtggccgtgttcgagcctagcgaggccgagatcagccacacccagaaagccaccctcgtgtgcctggctaccggcttctaccccgaccatgtggaactgtcttggtgggtcaacggcaaagaggtgcacagcggcgtgtctaccgacccccagccactgaaagaacagcccgccctgaacgacagccggtactgcctgagcagcagactgagagtgtccgccaccttctggcagaacccccggaaccacttcagatgccaggtgcagttctacggcctgagcgagaacgacgagtggacccaggacagagccaagcccgtgacccagatcgtgtctgccgaagcctggggcagagccgattgcggctttaccagcgagagctaccagcagggcgtgctgagcgccaccaacctgagcgtgatcggcttcagaatcctgctgctgaaagtggccggctttaacctgctgatgaccctgcggctgtggtccagcagggccaagcgatctggatctggagcaacaaacttctcactactcaaacaagcaggtgacgtggaggagaatcccgggcctactagcatggccttaccagtgaccgccttgctcctgccgctggccttgctgctccacgccgccaggccggacatccagatgacacagagccctagcagcctgtctgccagcgtgggagacagagtgaccatcacatgcaagagcagccagagcctgctggactccgatggcaagacctacctgaactggtatcagcagaagcccggcaaggcccctaagctgctgatctacctggtgtccaagctggatagcggcgtgcccagcagattttctggcagcggcagcggaaccgacttcaccctgacaatatccagcctccagcctgaggacttcgccacctactactgcttccaaggcacccactttccattcaccttcggccagggcaccaaggtggaaatcaaaagaggcggaggcggaagtggaggcggaggatctggcggcggaggctctgaagtgcagctggttgaatcaggcggaggactggttcagcctggcggatctctgagactgtcttgtgccgccagcggctacaccttcaccagctactggatgaactgggtccgacaggcccctggcaaaggactggaatgggtcggaatgatcgaccccagcgacagcgagacacactacaaccacatcttcaaggaccgcttcaccatcagcgccgacaccagcaagaataccgcctacctccagatgaactccctgagagccgaggacaccgccgtgtactactgcgccagaaacctgtatctgttcggccagggaaccctggtcacagtgtcatctacgcgtatccagaaccctgatcctgccgtgtaccagctgcgggatagcaagagcagcgacaagagcgtgtgtctgttcaccgacttcgacagccagaccaacgtgtcccagagcaaggactccgacgtgtacatcaccgataagaccgtgctggacatgcggagcatggacttcaagagcaactccgccgtggcctggtccaacaagtccgatttcgcctgcgccaacgccttcaacaacagcattatccccgaggacacattcttcccaagccccgagagcagctgcgacgtgaagctggtggaaaagagcttcgagacagacaccaacctgaacttccagatcctgtacgagatcctgctgggcaaggccaccctgtacgccgtgctggtgtctgccctggtgctgatggctatggtcaagcggaaggacagccggggacgcgccaagagaagcggatctggcgtgaagcagaccctgaatttcgacctgctgaagctggctggcgacgtggaatccaacccaggcccttctagaggccatatgaccgagtacaagcccacggtgcgcctcgccacccgcgacgacgtccccagggccgtacgcaccctcgccgccgcgttcgccgactaccccgccacgcgccacaccgtcgatccggaccgccacatcgagcgggtcaccgagctgcaagaactcttcctcacgcgcgtcgggctcgacatcggcaaggtgtgggtcgcggacgacggcgccgcggtggcggtctggaccacgccggagagcgtcgaagcgggggcggtgttcgccgagatcggcccgcgcatggccgagttgagcggttcccggctggccgcgcagcaacagatggaaggcctcctggcgccgcaccggcccaaggagcccgcgtggttcctggccaccgtcggcgtctcgcccgaccaccagggcaagggtctgggcagcgccgtcgtgctccccggagtggaggcggccgagcgcgccggggtgcccgccttcctggagacctccgcgccccgcaacctccccttctacgagcggctcggcttcaccgtcaccgccgacgtcgaggtgcccgaaggaccgcgcacctggtgcatgacccgcaagcccggtgcctga

SEQ ID NO: 36494 - DNA, 2607 bp, synthetic construct
  source 1..2607: mol_type = other DNA
atggccttaccagtgaccgccttgctcctgccgctggccttgctgctccacgccgccaggccgctcgagatccagaaccctgatcctgccgtgtaccagctgcgggatagcaagagcagcgacaagagcgtgtgtctgttcaccgacttcgacagccagaccaacgtgtcccagagcaaggactccgacgtgtacatcaccgataagaccgtgctggacatgcggagcatggacttcaagagcaactccgccgtggcctggtccaacaagtccgatttcgcctgcgccaacgccttcaacaacagcattatccccgaggacacattcttcccaagccccgagagcagctgcgacgtgaagctggtggaaaagagcttcgagacagacaccaacctgaacttccagatcctgtacgagatcctgctgggcaaggccaccctgtacgccgtgctggtgtctgccctggtgctgatggctatggtcaagcggaaggacagccggggaagggccaagcgatctggatctggagcaacaaacttctcactactcaaacaagcaggtgacgtggaggagaatcccgggcctactagcatggccttaccagtgaccgccttgctcctgccgctggccttgctgctccacgccgccaggccggacatccagatgacacagagccctagcagcctgtctgccagcgtgggagacagagtgaccatcacatgcaagagcagccagagcctgctggactccgatggcaagacctacctgaactggtatcagcagaagcccggcaaggcccctaagctgctgatctacctggtgtccaagctggatagcggcgtgcccagcagattttctggcagcggcagcggaaccgacttcaccctgacaatatccagcctccagcctgaggacttcgccacctactactgcttccaaggcacccactttccattcaccttcggccagggcaccaaggtggaaatcaaaagaggcggaggcggaagtggaggcggaggatctggcggcggaggctctgaagtgcagctggttgaatcaggcggaggactggttcagcctggcggatctctgagactgtcttgtgccgccagcggctacaccttcaccagctactggatgaactgggtccgacaggcccctggcaaaggactggaatgggtcggaatgatcgaccccagcgacagcgagacacactacaaccacatcttcaaggaccgcttcaccatcagcgccgacaccagcaagaataccgcctacctccagatgaactccctgagagccgaggacaccgccgtgtactactgcgccagaaacctgtatctgttcggccagggaaccctggtcacagtgtcatctacgcgtgaggacctgaagaacgtgttcccacctgaggtggccgtgttcgagcctagcgaggccgagatcagccacacccagaaagccaccctcgtgtgcctggctaccggcttctaccccgaccatgtggaactgtcttggtgggtcaacggcaaagaggtgcacagcggcgtgtctaccgacccccagccactgaaagaacagcccgccctgaacgacagccggtactgcctgagcagcagactgagagtgtccgccaccttctggcagaacccccggaaccacttcagatgccaggtgcagttctacggcctgagcgagaacgacgagtggacccaggacagagccaagcccgtgacccagatcgtgtctgccgaagcctggggcagagccgattgcggctttaccagcgagagctaccagcagggcgtgctgagcgccaccaacctgagcgtgatcggcttcagaatcctgctgctgaaagtggccggctttaacctgctgatgaccctgcggctgtggtccagccgcgccaagagaagcggatctggcgtgaagcagaccctgaatttcgacctgctgaagctggctggcgacgtggaatccaacccaggcccttctagaggccatatgaccgagtacaagcccacggtgcgcctcgccacccgcgacgacgtccccagggccgtacgcaccctcgccgccgcgttcgccgactaccccgccacgcgccacaccgtcgatccggaccgccacatcgagcgggtcaccgagctgcaagaactcttcctcacgcgcgtcgggctcgacatcggcaaggtgtgggtcgcggacgacggcgccgcggtggcggtctggaccacgccggagagcgtcgaagcgggggcggtgttcgccgagatcggcccgcgcatggccgagttgagcggttcccggctggccgcgcagcaacagatggaaggcctcctggcgccgcaccggcccaaggagcccgcgtggttcctggccaccgtcggcgtctcgcccgaccaccagggcaagggtctgggcagcgccgtcgtgctccccggagtggaggcggccgagcgcgccggggtgcccgccttcctggagacctccgcgccccgcaacctccccttctacgagcggctcggcttcaccgtcaccgccgacgtcgaggtgcccgaaggaccgcgcacctggtgcatgacccgcaagcccggtgcctga

SEQ ID NO: 36495 - DNA, 2607 bp, synthetic construct
  source 1..2607: mol_type = other DNA
atggccttaccagtgaccgccttgctcctgccgctggccttgctgctccacgccgccaggccgctcgaggaggacctgaagaacgtgttcccacctgaggtggccgtgttcgagcctagcgaggccgagatcagccacacccagaaagccaccctcgtgtgcctggctaccggcttctaccccgaccatgtggaactgtcttggtgggtcaacggcaaagaggtgcacagcggcgtgtgtaccgacccccagccactgaaagaacagcccgccctgaacgacagccggtactgcctgagcagcagactgagagtgtccgccaccttctggcagaacccccggaaccacttcagatgccaggtgcagttctacggcctgagcgagaacgacgagtggacccaggacagagccaagcccgtgacccagatcgtgtctgccgaagcctggggcagagccgattgcgacgtgaagctggtggaaaagagcttcgagacagacaccaacctgaacttccagaacctgagcgtgatcggcttcagaatcctgctgctgaaagtggccggctttaacctgctgatgaccctgcggctgtggtccagcagggccaagcgatctggatctggagcaacaaacttctcactactcaaacaagcaggtgacgtggaggagaatcccgggcctactagcatggccttaccagtgaccgccttgctcctgccgctggccttgctgctccacgccgccaggccggacatccagatgacacagagccctagcagcctgtctgccagcgtgggagacagagtgaccatcacatgcaagagcagccagagcctgctggactccgatggcaagacctacctgaactggtatcagcagaagcccggcaaggcccctaagctgctgatctacctggtgtccaagctggatagcggcgtgcccagcagattttctggcagcggcagcggaaccgacttcaccctgacaatatccagcctccagcctgaggacttcgccacctactactgcttccaaggcacccactttccattcaccttcggccagggcaccaaggtggaaatcaaaagaggcggaggcggaagtggaggcggaggatctggcggcggaggctctgaagtgcagctggttgaatcaggcggaggactggttcagcctggcggatctctgagactgtcttgtgccgccagcggctacaccttcaccagctactggatgaactgggtccgacaggcccctggcaaaggactggaatgggtcggaatgatcgaccccagcgacagcgagacacactacaaccacatcttcaaggaccgcttcaccatcagcgccgacaccagcaagaataccgcctacctccagatgaactccctgagagccgaggacaccgccgtgtactactgcgccagaaacctgtatctgttcggccagggaaccctggtcacagtgtcatctacgcgtatccagaaccctgatcctgccgtgtaccagctgcgggatagcaagagcagcgacaagagcgtgtgtctgttcaccgacttcgacagccagaccaacgtgtcccagagcaaggactccgacgtgtacatcaccgataagtgcgtgctggacatgcggagcatggacttcaagagcaactccgccgtggcctggtccaacaagtccgatttcgcctgcgccaacgccttcaacaacagcattatccccgaggacacattcttcccaagccccgagagcagctgcggctttaccagcgagagctaccagcagggcgtgctgagcgccaccatcctgtacgagatcctgctgggcaaggccaccctgtacgccgtgctggtgtctgccctggtgctgatggctatggtcaagcggaaggacagccggggacgcgccaagagaagcggatctggcgtgaagcagaccctgaatttcgacctgctgaagctggctggcgacgtggaatccaacccaggcccttctagaggccatatgaccgagtacaagcccacggtgcgcctcgccacccgcgacgacgtccccagggccgtacgcaccctcgccgccgcgttcgccgactaccccgccacgcgccacaccgtcgatccggaccgccacatcgagcgggtcaccgagctgcaagaactcttcctcacgcgcgtcgggctcgacatcggcaaggtgtgggtcgcggacgacggcgccgcggtggcggtctggaccacgccggagagcgtcgaagcgggggcggtgttcgccgagatcggcccgcgcatggccgagttgagcggttcccggctggccgcgcagcaacagatggaaggcctcctggcgccgcaccggcccaaggagcccgcgtggttcctggccaccgtcggcgtctcgcccgaccaccagggcaagggtctgggcagcgccgtcgtgctccccggagtggaggcggccgagcgcgccggggtgcccgccttcctggagacctccgcgccccgcaacctccccttctacgagcggctcggcttcaccgtcaccgccgacgtcgaggtgcccgaaggaccgcgcacctggtgcatgacccgcaagcccggtgcctga

SEQ ID NO: 36496 - DNA, 2607 bp, synthetic construct
  source 1..2607: mol_type = other DNA
atggccttaccagtgaccgccttgctcctgccgctggccttgctgctccacgccgccaggccgctcgaggaggacctgaagaacgtgttcccacctgaggtggccgtgttcgagcctagcgaggccgagatcagccacacccagaaagccaccctcgtgtgcctggctaccggcttctaccccgaccatgtggaactgtcttggtgggtcaacggcaaagaggtgcacagcggcgtgtctaccgacccccagccactgaaagaacagcccgccctgaacgacagccggtactgcctgagcagcagactgagagtgtccgccaccttctggcagaacccccggaaccacttcagatgccaggtgcagttctacggcctgagcgagaacgacgagtggacccaggacagagccaagcccgtgacccagatcgtgtctgccgaagcctggggcagagccgattgcgacgtgaagctggtggaaaagagcttcgagacagacaccaacctgaacttccagaacctgagcgtgatcggcttcagaatcctgctgctgaaagtggccggctttaacctgctgatgaccctgcggctgtggtccagcagggccaagcgatctggatctggagcaacaaacttctcactactcaaacaagcaggtgacgtggaggagaatcccgggcctactagcatggccttaccagtgaccgccttgctcctgccgctggccttgctgctccacgccgccaggccggacatccagatgacacagagccctagcagcctgtctgccagcgtgggagacagagtgaccatcacatgcaagagcagccagagcctgctggactccgatggcaagacctacctgaactggtatcagcagaagcccggcaaggcccctaagctgctgatctacctggtgtccaagctggatagcggcgtgcccagcagattttctggcagcggcagcggaaccgacttcaccctgacaatatccagcctccagcctgaggacttcgccacctactactgcttccaaggcacccactttccattcaccttcggccagggcaccaaggtggaaatcaaaagaggcggaggcggaagtggaggcggaggatctggcggcggaggctctgaagtgcagctggttgaatcaggcggaggactggttcagcctggcggatctctgagactgtcttgtgccgccagcggctacaccttcaccagctactggatgaactgggtccgacaggcccctggcaaaggactggaatgggtcggaatgatcgaccccagcgacagcgagacacactacaaccacatcttcaaggaccgcttcaccatcagcgccgacaccagcaagaataccgcctacctccagatgaactccctgagagccgaggacaccgccgtgtactactgcgccagaaacctgtatctgttcggccagggaaccctggtcacagtgtcatctacgcgtatccagaaccctgatcctgccgtgtaccagctgcgggatagcaagagcagcgacaagagcgtgtgtctgttcaccgacttcgacagccagaccaacgtgtcccagagcaaggactccgacgtgtacatcaccgataagaccgtgctggacatgcggagcatggacttcaagagcaactccgccgtggcctggtccaacaagtccgatttcgcctgcgccaacgccttcaacaacagcattatccccgaggacacattcttcccaagccccgagagcagctgcggctttaccagcgagagctaccagcagggcgtgctgagcgccaccatcctgtacgagatcctgctgggcaaggccaccctgtacgccgtgctggtgtctgccctggtgctgatggctatggtcaagcggaaggacagccggggacgcgccaagagaagcggatctggcgtgaagcagaccctgaatttcgacctgctgaagctggctggcgacgtggaatccaacccaggcccttctagaggccatatgaccgagtacaagcccacggtgcgcctcgccacccgcgacgacgtccccagggccgtacgcaccctcgccgccgcgttcgccgactaccccgccacgcgccacaccgtcgatccggaccgccacatcgagcgggtcaccgagctgcaagaactcttcctcacgcgcgtcgggctcgacatcggcaaggtgtgggtcgcggacgacggcgccgcggtggcggtctggaccacgccggagagcgtcgaagcgggggcggtgttcgccgagatcggcccgcgcatggccgagttgagcggttcccggctggccgcgcagcaacagatggaaggcctcctggcgccgcaccggcccaaggagcccgcgtggttcctggccaccgtcggcgtctcgcccgaccaccagggcaagggtctgggcagcgccgtcgtgctccccggagtggaggcggccgagcgcgccggggtgcccgccttcctggagacctccgcgccccgcaacctccccttctacgagcggctcggcttcaccgtcaccgccgacgtcgaggtgcccgaaggaccgcgcacctggtgcatgacccgcaagcccggtgcctga

SEQ ID NO: 36497 - DNA, 2916 bp, synthetic construct
  source 1..2916: mol_type = other DNA
atggccttaccagtgaccgccttgctcctgccgctggccttgctgctccacgccgccaggccgctcgaggaggaggacctgaagaacgtgttcccacctgaggtggccgtgttcgagcctagcgaggccgagatcagccacacccagaaagccaccctcgtgtgcctggctaccggcttctaccccgaccatgtggaactgtcttggtgggtcaacggcaaagaggtgcacagcggcgtgtctaccgacccccagccactgaaagaacagcccgccctgaacgacagccggtactgcctgagcagcagactgagagtgtccgccaccttctggcagaacccccggaaccacttcagatgccaggtgcagttctacggcctgagcgagaacgacgagtggacccaggacagagccaagcccgtgacccagatcgtgtctgccgaagcctggggcagagccgatgatgtgattaagatccactggcaggaaaagaagtccaacaccatcctgggcagccaggaaggcaacaccatgaagaccaacgacacctacatgaagttcagctggctgaccgtgcccgagaagtccctggacaaagaacacagatgcatcgtgcggcacgaaaacaacaagaacggcgtggaccaggaaatcatcttcccacccatcaagaccgatgtgattacaatggaccccaaggacaactgctccaaggacgccaacgataccctgctgctccagctgaccaacaccagcgcctactacatgtacttgttgctgctgctgaagtccgtggtgtacttcgccatcatcacatgctgcctgctgcggagaaccgccttctgctgcaacggcgagaagtctagggccaagcgatctggatctggagcaacaaacttctcactactcaaacaagcaggtgacgtggaggagaatcccgggcctactagcatggccttaccagtgaccgccttgctcctgccgctggccttgctgctccacgccgccaggccggacatccagatgacacagagccctagcagcctgtctgccagcgtgggagacagagtgaccatcacatgcaagagcagccagagcctgctggactccgatggcaagacctacctgaactggtatcagcagaagcccggcaaggcccctaagctgctgatctacctggtgtccaagctggatagcggcgtgcccagcagattttctggcagcggcagcggaaccgacttcaccctgacaatatccagcctccagcctgaggacttcgccacctactactgcttccaaggcacccactttccattcaccttcggccagggcaccaaggtggaaatcaaaagaggcggaggcggaagtggaggcggaggatctggcggcggaggctctgaagtgcagctggttgaatcaggcggaggactggttcagcctggcggatctctgagactgtcttgtgccgccagcggctacaccttcaccagctactggatgaactgggtccgacaggcccctggcaaaggactggaatgggtcggaatgatcgaccccagcgacagcgagacacactacaaccacatcttcaaggaccgcttcaccatcagcgccgacaccagcaagaataccgcctacctccagatgaactccctgagagccgaggacaccgccgtgtactactgcgccagaaacctgtatctgttcggccagggaaccctggtcacagtgtcatctacgcgtatccagaaccctgatcctgccgtgtaccagctgcgggatagcaagagcagcgacaagagcgtgtgtctgttcaccgacttcgacagccagaccaacgtgtcccagagcaaggactccgacgtgtacatcaccgataagaccgtgctggacatgcggagcatggacttcaagagcaactccgccgtggcctggtccaacaagtccgatttcgcctgcgccaacgccttcaacaacagcattatccccgaggacacattcttcccaagccccgagagcagcgactccaccgaccacgtgaagcccaaagagacagagaacaccaagcagcccagcaagagctgccacaagcccaaggccatcgtgcacaccgagaaagtgaacatgatgagcctgaccgtgctgggcctgcggatgctgttcgccaaaaccgtggccgtgaacttcctgctgaccgccaagctgttcttcctccgcgccaagagaagcggatctggcgtgaagcagaccctgaatttcgacctgctgaagctggctggcgacgtggaatccaacccaggcccttctagaggccatatgaccgagtacaagcccacggtgcgcctcgccacccgcgacgacgtccccagggccgtacgcaccctcgccgccgcgttcgccgactaccccgccacgcgccacaccgtcgatccggaccgccacatcgagcgggtcaccgagctgcaagaactcttcctcacgcgcgtcgggctcgacatcggcaaggtgtgggtcgcggacgacggcgccgcggtggcggtctggaccacgccggagagcgtcgaagcgggggcggtgttcgccgagatcggcccgcgcatggccgagttgagcggttcccggctggccgcgcagcaacagatggaaggcctcctggcgccgcaccggcccaaggagcccgcgtggttcctggccaccgtcggcgtctcgcccgaccaccagggcaagggtctgggcagcgccgtcgtgctccccggagtggaggcggccgagcgcgccggggtgcccgccttcctggagacctccgcgccccgcaacctccccttctacgagcggctcggcttcaccgtcaccgccgacgtcgaggtgcccgaaggaccgcgcacctggtgcatgacccgcaagcccggtgcctga

SEQ ID NO: 36498 - DNA, 2607 bp, synthetic construct
  source 1..2607: mol_type = other DNA
atggccttaccagtgaccgccttgctcctgccgctggccttgctgctccacgccgccaggccgctcgaggaggacctgaagaacgtgttcccacctgaggtggccgtgttcgagcctagcgaggccgagatcagccacacccagaaagccaccctcgtgtgcctggctaccggcttctaccccgaccatgtggaactgtcttggtgggtcaacggcaaagaggtgcacagcggcgtgtgtaccgacccccagccactgaaagaacagcccgccctgaacgacagccggtactgcctgagcagcagactgagagtgtccgccaccttctggcagaacccccggaaccacttcagatgccaggtgcagttctacggcctgagcgagaacgacgagtggacccaggacagagccaagcccgtgacccagatcgtgtctgccgaagcctggggcagagccgattgcggctttaccagcgagagctaccagcagggcgtgctgagcgccaccaacctgagcgtgatcggcttcagaatcctgctgctgaaagtggccggctttaacctgctgatgaccctgcggctgtggtccagcagggccaagcgatctggatctggagcaacaaacttctcactactcaaacaagcaggtgacgtggaggagaatcccgggcctactagcatggccttaccagtgaccgccttgctcctgccgctggccttgctgctccacgccgccaggccggacatccagatgacacagagccctagcagcctgtctgccagcgtgggagacagagtgaccatcacatgcaagagcagccagagcctgctggactccgatggcaagacctacctgaactggtatcagcagaagcccggcaaggcccctaagctgctgatctacctggtgtccaagctggatagcggcgtgcccagcagattttctggcagcggcagcggaaccgacttcaccctgacaatatccagcctccagcctgaggacttcgccacctactactgcttccaaggcacccactttccattcaccttcggccagggcaccaaggtggaaatcaaaagaggcggaggcggaagtggaggcggaggatctggcggcggaggctctgaagtgcagctggttgaatcaggcggaggactggttcagcctggcggatctctgagactgtcttgtgccgccagcggctacaccttcaccagctactggatgaactgggtccgacaggcccctggcaaaggactggaatgggtcggaatgatcgaccccagcgacagcgagacacactacaaccacatcttcaaggaccgcttcaccatcagcgccgacaccagcaagaataccgcctacctccagatgaactccctgagagccgaggacaccgccgtgtactactgcgccagaaacctgtatctgttcggccagggaaccctggtcacagtgtcatctacgcgtatccagaaccctgatcctgccgtgtaccagctgcgggatagcaagagcagcgacaagagcgtgtgtctgttcaccgacttcgacagccagaccaacgtgtcccagagcaaggactccgacgtgtacatcaccgataagtgcgtgctggacatgcggagcatggacttcaagagcaactccgccgtggcctggtccaacaagtccgatttcgcctgcgccaacgccttcaacaacagcattatccccgaggacacattcttcccaagccccgagagcagctgcgacgtgaagctggtggaaaagagcttcgagacagacaccaacctgaacttccagatcctgtacgagatcctgctgggcaaggccaccctgtacgccgtgctggtgtctgccctggtgctgatggctatggtcaagcggaaggacagccggggacgcgccaagagaagcggatctggcgtgaagcagaccctgaatttcgacctgctgaagctggctggcgacgtggaatccaacccaggcccttctagaggccatatgaccgagtacaagcccacggtgcgcctcgccacccgcgacgacgtccccagggccgtacgcaccctcgccgccgcgttcgccgactaccccgccacgcgccacaccgtcgatccggaccgccacatcgagcgggtcaccgagctgcaagaactcttcctcacgcgcgtcgggctcgacatcggcaaggtgtgggtcgcggacgacggcgccgcggtggcggtctggaccacgccggagagcgtcgaagcgggggcggtgttcgccgagatcggcccgcgcatggccgagttgagcggttcccggctggccgcgcagcaacagatggaaggcctcctggcgccgcaccggcccaaggagcccgcgtggttcctggccaccgtcggcgtctcgcccgaccaccagggcaagggtctgggcagcgccgtcgtgctccccggagtggaggcggccgagcgcgccggggtgcccgccttcctggagacctccgcgccccgcaacctccccttctacgagcggctcggcttcaccgtcaccgccgacgtcgaggtgcccgaaggaccgcgcacctggtgcatgacccgcaagcccggtgcctga

SEQ ID NO: 36499 - DNA, 2694 bp, synthetic construct
  source 1..2694: mol_type = other DNA
atggccttaccagtgaccgccttgctcctgccgctggccttgctgctccacgccgccaggccgctcgaggaggaggacctgaagaacgtgttcccacctgaggtggccgtgttcgagcctagcgaggccgagatcagccacacccagaaagccaccctcgtgtgcctggctaccggcttctaccccgaccatgtggaactgtcttggtgggtcaacggcaaagaggtgcacagcggcgtgtgtaccgacccccagccactgaaagaacagcccgccctgaacgacagccggtactgcctgagcagcagactgagagtgtccgccaccttctggcagaacccccggaaccacttcagatgccaggtgcagttctacggcctgagcgagaacgacgagtggacccaggacagagccaagcccgtgacccagatcgtgtctgccgaagcctggggcagagccgattgcggctttaccagcgagagctaccagcagggcgtgctgagcgccaccaacctgagcgtgatcggcttcagaatcctgctgctgaaagtggccggctttaacctgctgatgaccctgcggctgtggtccagcagggccaagcgatctggatctggagcaacaaacttctcactactcaaacaagcaggtgacgtggaggagaatcccgggcctactagcatggccttaccagtgaccgccttgctcctgccgctggccttgctgctccacgccgccaggccggacatccagatgacacagagccctagcagcctgtctgccagcgtgggagacagagtgaccatcacatgcaagagcagccagagcctgctggactccgatggcaagacctacctgaactggtatcagcagaagcccggcaaggcccctaagctgctgatctacctggtgtccaagctggatagcggcgtgcccagcagattttctggcagcggcagcggaaccgacttcaccctgacaatatccagcctccagcctgaggacttcgccacctactactgcttccaaggcacccactttccattcaccttcggccagggcaccaaggtggaaatcaaaagaggcggaggcggaagtggaggcggaggatctggcggcggaggctctgaagtgcagctggttgaatcaggcggaggactggttcagcctggcggatctctgagactgtcttgtgccgccagcggctacaccttcaccagctactggatgaactgggtccgacaggcccctggcaaaggactggaatgggtcggaatgatcgaccccagcgacagcgagacacactacaaccacatcttcaaggaccgcttcaccatcagcgccgacaccagcaagaataccgcctacctccagatgaactccctgagagccgaggacaccgccgtgtactactgcgccagaaacctgtatctgttcggccagggaaccctggtcacagtgtcatctacgcgtggacagcctaaggccaatcctaccgtgacactgttccctccaagcagcgaagaactccaggccaacaaggccacacttgtgtgcctgatctccgacttctaccctggggctgtgacagtggcttggaaggccgatggatctcctgtgaaagccggcgtggaaaccaccaagccatccaagcagagcaacaacaaatacgccgccagctcctacctgagcctgacacctgagcagtggaagtcccacagatcctacagctgccaagtgacccacgaaggcagcaccgtggaaaagacagtggcccctacagagtgcagccccatcaagaccgatgtgattacaatggaccccaaggacaactgctccaaggacgccaacgataccctgctgctccagctgaccaacaccagcgcctactacatgtacttgttgctgctgctgaagtccgtggtgtacttcgccatcatcacatgctgcctgctgcggagaaccgccttctgctgcaacggcgagaagtctcgcgccaagagaagcggatctggcgtgaagcagaccctgaatttcgacctgctgaagctggctggcgacgtggaatccaacccaggcccttctagaggccatatgaccgagtacaagcccacggtgcgcctcgccacccgcgacgacgtccccagggccgtacgcaccctcgccgccgcgttcgccgactaccccgccacgcgccacaccgtcgatccggaccgccacatcgagcgggtcaccgagctgcaagaactcttcctcacgcgcgtcgggctcgacatcggcaaggtgtgggtcgcggacgacggcgccgcggtggcggtctggaccacgccggagagcgtcgaagcgggggcggtgttcgccgagatcggcccgcgcatggccgagttgagcggttcccggctggccgcgcagcaacagatggaaggcctcctggcgccgcaccggcccaaggagcccgcgtggttcctggccaccgtcggcgtctcgcccgaccaccagggcaagggtctgggcagcgccgtcgtgctccccggagtggaggcggccgagcgcgccggggtgcccgccttcctggagacctccgcgccccgcaacctccccttctacgagcggctcggcttcaccgtcaccgccgacgtcgaggtgcccgaaggaccgcgcacctggtgcatgacccgcaagcccggtgcctga

SEQ ID NO: 36500 - DNA, 2694 bp, synthetic construct
  source 1..2694: mol_type = other DNA
atggccttaccagtgaccgccttgctcctgccgctggccttgctgctccacgccgccaggccgctcgagggacagcctaaggccaatcctaccgtgacactgttccctccaagcagcgaagaactccaggccaacaaggccacacttgtgtgcctgatctccgacttctaccctggggctgtgacagtggcttggaaggccgatggatctcctgtgaaagccggcgtggaaaccaccaagccatccaagcagagcaacaacaaatacgccgccagctcctacctgagcctgacacctgagcagtggaagtcccacagatcctacagctgccaagtgacccacgaaggcagcaccgtggaaaagacagtggcccctacagagtgcagccccatcaagaccgatgtgattacaatggaccccaaggacaactgctccaaggacgccaacgataccctgctgctccagctgaccaacaccagcgcctactacatgtacttgttgctgctgctgaagtccgtggtgtacttcgccatcatcacatgctgcctgctgcggagaaccgccttctgctgcaacggcgagaagtctagggccaagcgatctggatctggagcaacaaacttctcactactcaaacaagcaggtgacgtggaggagaatcccgggcctactagcatggccttaccagtgaccgccttgctcctgccgctggccttgctgctccacgccgccaggccggacatccagatgacacagagccctagcagcctgtctgccagcgtgggagacagagtgaccatcacatgcaagagcagccagagcctgctggactccgatggcaagacctacctgaactggtatcagcagaagcccggcaaggcccctaagctgctgatctacctggtgtccaagctggatagcggcgtgcccagcagattttctggcagcggcagcggaaccgacttcaccctgacaatatccagcctccagcctgaggacttcgccacctactactgcttccaaggcacccactttccattcaccttcggccagggcaccaaggtggaaatcaaaagaggcggaggcggaagtggaggcggaggatctggcggcggaggctctgaagtgcagctggttgaatcaggcggaggactggttcagcctggcggatctctgagactgtcttgtgccgccagcggctacaccttcaccagctactggatgaactgggtccgacaggcccctggcaaaggactggaatgggtcggaatgatcgaccccagcgacagcgagacacactacaaccacatcttcaaggaccgcttcaccatcagcgccgacaccagcaagaataccgcctacctccagatgaactccctgagagccgaggacaccgccgtgtactactgcgccagaaacctgtatctgttcggccagggaaccctggtcacagtgtcatctacgcgtgaggaggacctgaagaacgtgttcccacctgaggtggccgtgttcgagcctagcgaggccgagatcagccacacccagaaagccaccctcgtgtgcctggctaccggcttctaccccgaccatgtggaactgtcttggtgggtcaacggcaaagaggtgcacagcggcgtgtgtaccgacccccagccactgaaagaacagcccgccctgaacgacagccggtactgcctgagcagcagactgagagtgtccgccaccttctggcagaacccccggaaccacttcagatgccaggtgcagttctacggcctgagcgagaacgacgagtggacccaggacagagccaagcccgtgacccagatcgtgtctgccgaagcctggggcagagccgattgcggctttaccagcgagagctaccagcagggcgtgctgagcgccaccaacctgagcgtgatcggcttcagaatcctgctgctgaaagtggccggctttaacctgctgatgaccctgcggctgtggtccagccgcgccaagagaagcggatctggcgtgaagcagaccctgaatttcgacctgctgaagctggctggcgacgtggaatccaacccaggcccttctagaggccatatgaccgagtacaagcccacggtgcgcctcgccacccgcgacgacgtccccagggccgtacgcaccctcgccgccgcgttcgccgactaccccgccacgcgccacaccgtcgatccggaccgccacatcgagcgggtcaccgagctgcaagaactcttcctcacgcgcgtcgggctcgacatcggcaaggtgtgggtcgcggacgacggcgccgcggtggcggtctggaccacgccggagagcgtcgaagcgggggcggtgttcgccgagatcggcccgcgcatggccgagttgagcggttcccggctggccgcgcagcaacagatggaaggcctcctggcgccgcaccggcccaaggagcccgcgtggttcctggccaccgtcggcgtctcgcccgaccaccagggcaagggtctgggcagcgccgtcgtgctccccggagtggaggcggccgagcgcgccggggtgcccgccttcctggagacctccgcgccccgcaacctccccttctacgagcggctcggcttcaccgtcaccgccgacgtcgaggtgcccgaaggaccgcgcacctggtgcatgacccgcaagcccggtgcctga

SEQ ID NO: 36501 - DNA, 2685 bp, synthetic construct
  source 1..2685: mol_type = other DNA
atggccttaccagtgaccgccttgctcctgccgctggccttgctgctccacgccgccaggccgctcgaggaggcctctacaaagggaccctccgtgtttcctctggctcccagcagcaagtctacaagcggaggaacagccgctctgggctgcctggtcaaggattactttcccgagcctgtgaccgtgtcctggaatagcggagcactgacaagcggcgtgcacacctttccagccgtgctgcaaagcagcggcctgtactctctgagcagcgtggtcacagtgcctagctctagcctgggcacccagacctacatctgcaatgtgaaccacaagcctagcaacaccaaggtggacaagagagtggaacccaagagctgtcccatcaagaccgatgtgattacaatggaccccaaggacaactgctccaaggacgccaacgataccctgctgctccagctgaccaacaccagcgcctactacatgtacttgttgctgctgctgaagtccgtggtgtacttcgccatcatcacatgctgcctgctgcggagaaccgccttctgctgcaacggcgagaagtctagggccaagcgatctggatctggagcaacaaacttctcactactcaaacaagcaggtgacgtggaggagaatcccgggcctactagcatggccttaccagtgaccgccttgctcctgccgctggccttgctgctccacgccgccaggccggacatccagatgacacagagccctagcagcctgtctgccagcgtgggagacagagtgaccatcacatgcaagagcagccagagcctgctggactccgatggcaagacctacctgaactggtatcagcagaagcccggcaaggcccctaagctgctgatctacctggtgtccaagctggatagcggcgtgcccagcagattttctggcagcggcagcggaaccgacttcaccctgacaatatccagcctccagcctgaggacttcgccacctactactgcttccaaggcacccactttccattcaccttcggccagggcaccaaggtggaaatcaaaagaggcggaggcggaagtggaggcggaggatctggcggcggaggctctgaagtgcagctggttgaatcaggcggaggactggttcagcctggcggatctctgagactgtcttgtgccgccagcggctacaccttcaccagctactggatgaactgggtccgacaggcccctggcaaaggactggaatgggtcggaatgatcgaccccagcgacagcgagacacactacaaccacatcttcaaggaccgcttcaccatcagcgccgacaccagcaagaataccgcctacctccagatgaactccctgagagccgaggacaccgccgtgtactactgcgccagaaacctgtatctgttcggccagggaaccctggtcacagtgtcatctacgcgtggacagcctaaggccaatcctaccgtgacactgttccctccaagcagcgaagaactccaggccaacaaggccacacttgtgtgcctgatctccgacttctaccctggggctgtgacagtggcttggaaggccgatggatctcctgtgaaagccggcgtggaaaccaccaagccatccaagcagagcaacaacaaatacgccgccagctcctacctgagcctgacacctgagcagtggaagtcccacagatcctacagctgccaagtgacccacgaaggcagcaccgtggaaaagacagtggcccctacagagtgcagcgaagtgaaaaccgactccaccgaccacgtgaagcccaaagagacagagaacaccaagcagcccagcaagagctgccacaagcccaaggccatcgtgcacaccgagaaagtgaacatgatgagcctgaccgtgctgggcctgcggatgctgttcgccaaaaccgtggccgtgaacttcctgctgaccgccaagctgttcttcctccgcgccaagagaagcggatctggcgtgaagcagaccctgaatttcgacctgctgaagctggctggcgacgtggaatccaacccaggcccttctagaggccatatgaccgagtacaagcccacggtgcgcctcgccacccgcgacgacgtccccagggccgtacgcaccctcgccgccgcgttcgccgactaccccgccacgcgccacaccgtcgatccggaccgccacatcgagcgggtcaccgagctgcaagaactcttcctcacgcgcgtcgggctcgacatcggcaaggtgtgggtcgcggacgacggcgccgcggtggcggtctggaccacgccggagagcgtcgaagcgggggcggtgttcgccgagatcggcccgcgcatggccgagttgagcggttcccggctggccgcgcagcaacagatggaaggcctcctggcgccgcaccggcccaaggagcccgcgtggttcctggccaccgtcggcgtctcgcccgaccaccagggcaagggtctgggcagcgccgtcgtgctccccggagtggaggcggccgagcgcgccggggtgcccgccttcctggagacctccgcgccccgcaacctccccttctacgagcggctcggcttcaccgtcaccgccgacgtcgaggtgcccgaaggaccgcgcacctggtgcatgacccgcaagcccggtgcctga

SEQ ID NO: 36502 - DNA, 2619 bp, synthetic construct
  source 1..2619: mol_type = other DNA
atggccttaccagtgaccgccttgctcctgccgctggccttgctgctccacgccgccaggccgctcgaggaggcctctacaaagggaccctccgtgtttcctctggctcccagcagcaagtctacaagcggaggaacagccgctctgggctgcctggtcaaggattactttcccgagcctgtgaccgtgtcctggaatagcggagcactgacaagcggcgtgcacacctttccagccgtgctgcaaagcagcggcctgtactctctgagcagcgtggtcacagtgcctagctctagcctgggcacccagacctacatctgcaatgtgaaccacaagcctagcaacaccaaggtggacaagagagtggaacccaagagctgtggcagagccgattgcggctttaccagcgagagctaccagcagggcgtgctgagcgccaccatcctgtacgagatcctgctgggcaaggccaccctgtacgccgtgctggtgtctgccctggtgctgatggctatggtcaagcggaaggacagccggggaagggccaagcgatctggatctggagcaacaaacttctcactactcaaacaagcaggtgacgtggaggagaatcccgggcctactagcatggccttaccagtgaccgccttgctcctgccgctggccttgctgctccacgccgccaggccggacatccagatgacacagagccctagcagcctgtctgccagcgtgggagacagagtgaccatcacatgcaagagcagccagagcctgctggactccgatggcaagacctacctgaactggtatcagcagaagcccggcaaggcccctaagctgctgatctacctggtgtccaagctggatagcggcgtgcccagcagattttctggcagcggcagcggaaccgacttcaccctgacaatatccagcctccagcctgaggacttcgccacctactactgcttccaaggcacccactttccattcaccttcggccagggcaccaaggtggaaatcaaaagaggcggaggcggaagtggaggcggaggatctggcggcggaggctctgaagtgcagctggttgaatcaggcggaggactggttcagcctggcggatctctgagactgtcttgtgccgccagcggctacaccttcaccagctactggatgaactgggtccgacaggcccctggcaaaggactggaatgggtcggaatgatcgaccccagcgacagcgagacacactacaaccacatcttcaaggaccgcttcaccatcagcgccgacaccagcaagaataccgcctacctccagatgaactccctgagagccgaggacaccgccgtgtactactgcgccagaaacctgtatctgttcggccagggaaccctggtcacagtgtcatctacgcgtggacagcctaaggccaatcctaccgtgacactgttccctccaagcagcgaagaactccaggccaacaaggccacacttgtgtgcctgatctccgacttctaccctggggctgtgacagtggcttggaaggccgatggatctcctgtgaaagccggcgtggaaaccaccaagccatccaagcagagcaacaacaaatacgccgccagctcctacctgagcctgacacctgagcagtggaagtcccacagatcctacagctgccaagtgacccacgaaggcagcaccgtggaaaagacagtggcccctacagagtgcagcatccccgaggacacattcttcccaagccccgagagcagctgcgacgtgaagctggtggaaaagagcttcgagacagacaccaacctgaacttccagaacctgagcgtgatcggcttcagaatcctgctgctgaaagtggccggctttaacctgctgatgaccctgcggctgtggtccagccgcgccaagagaagcggatctggcgtgaagcagaccctgaatttcgacctgctgaagctggctggcgacgtggaatccaacccaggcccttctagaggccatatgaccgagtacaagcccacggtgcgcctcgccacccgcgacgacgtccccagggccgtacgcaccctcgccgccgcgttcgccgactaccccgccacgcgccacaccgtcgatccggaccgccacatcgagcgggtcaccgagctgcaagaactcttcctcacgcgcgtcgggctcgacatcggcaaggtgtgggtcgcggacgacggcgccgcggtggcggtctggaccacgccggagagcgtcgaagcgggggcggtgttcgccgagatcggcccgcgcatggccgagttgagcggttcccggctggccgcgcagcaacagatggaaggcctcctggcgccgcaccggcccaaggagcccgcgtggttcctggccaccgtcggcgtctcgcccgaccaccagggcaagggtctgggcagcgccgtcgtgctccccggagtggaggcggccgagcgcgccggggtgcccgccttcctggagacctccgcgccccgcaacctccccttctacgagcggctcggcttcaccgtcaccgccgacgtcgaggtgcccgaaggaccgcgcacctggtgcatgacccgcaagcccggtgcctga

SEQ ID NO: 36503 - DNA, 2619 bp, synthetic construct
  source 1..2619: mol_type = other DNA
atggccttaccagtgaccgccttgctcctgccgctggccttgctgctccacgccgccaggccgctcgaggaggcctctacaaagggaccctccgtgtttcctctggctcccagcagcaagtctacaagcggaggaacagccgctctgggctgcctggtcaaggattactttcccgagcctgtgaccgtgtcctggaatagcggagcactgacaagcggcgtgcacacctttccagccgtgctgcaaagcagcggcctgtactctctgagcagcgtggtcacagtgcctagctctagcctgggcacccagacctacatctgcaatgtgaaccacaagcctagcaacaccaaggtggacaagagagtggaacccaagagctgtatccccgaggacacattcttcccaagccccgagagcagctgcgacgtgaagctggtggaaaagagcttcgagacagacaccaacctgaacttccagaacctgagcgtgatcggcttcagaatcctgctgctgaaagtggccggctttaacctgctgatgaccctgcggctgtggtccagcagggccaagcgatctggatctggagcaacaaacttctcactactcaaacaagcaggtgacgtggaggagaatcccgggcctactagcatggccttaccagtgaccgccttgctcctgccgctggccttgctgctccacgccgccaggccggacatccagatgacacagagccctagcagcctgtctgccagcgtgggagacagagtgaccatcacatgcaagagcagccagagcctgctggactccgatggcaagacctacctgaactggtatcagcagaagcccggcaaggcccctaagctgctgatctacctggtgtccaagctggatagcggcgtgcccagcagattttctggcagcggcagcggaaccgacttcaccctgacaatatccagcctccagcctgaggacttcgccacctactactgcttccaaggcacccactttccattcaccttcggccagggcaccaaggtggaaatcaaaagaggcggaggcggaagtggaggcggaggatctggcggcggaggctctgaagtgcagctggttgaatcaggcggaggactggttcagcctggcggatctctgagactgtcttgtgccgccagcggctacaccttcaccagctactggatgaactgggtccgacaggcccctggcaaaggactggaatgggtcggaatgatcgaccccagcgacagcgagacacactacaaccacatcttcaaggaccgcttcaccatcagcgccgacaccagcaagaataccgcctacctccagatgaactccctgagagccgaggacaccgccgtgtactactgcgccagaaacctgtatctgttcggccagggaaccctggtcacagtgtcatctacgcgtggacagcctaaggccaatcctaccgtgacactgttccctccaagcagcgaagaactccaggccaacaaggccacacttgtgtgcctgatctccgacttctaccctggggctgtgacagtggcttggaaggccgatggatctcctgtgaaagccggcgtggaaaccaccaagccatccaagcagagcaacaacaaatacgccgccagctcctacctgagcctgacacctgagcagtggaagtcccacagatcctacagctgccaagtgacccacgaaggcagcaccgtggaaaagacagtggcccctacagagtgcagcggcagagccgattgcggctttaccagcgagagctaccagcagggcgtgctgagcgccaccatcctgtacgagatcctgctgggcaaggccaccctgtacgccgtgctggtgtctgccctggtgctgatggctatggtcaagcggaaggacagccggggacgcgccaagagaagcggatctggcgtgaagcagaccctgaatttcgacctgctgaagctggctggcgacgtggaatccaacccaggcccttctagaggccatatgaccgagtacaagcccacggtgcgcctcgccacccgcgacgacgtccccagggccgtacgcaccctcgccgccgcgttcgccgactaccccgccacgcgccacaccgtcgatccggaccgccacatcgagcgggtcaccgagctgcaagaactcttcctcacgcgcgtcgggctcgacatcggcaaggtgtgggtcgcggacgacggcgccgcggtggcggtctggaccacgccggagagcgtcgaagcgggggcggtgttcgccgagatcggcccgcgcatggccgagttgagcggttcccggctggccgcgcagcaacagatggaaggcctcctggcgccgcaccggcccaaggagcccgcgtggttcctggccaccgtcggcgtctcgcccgaccaccagggcaagggtctgggcagcgccgtcgtgctccccggagtggaggcggccgagcgcgccggggtgcccgccttcctggagacctccgcgccccgcaacctccccttctacgagcggctcggcttcaccgtcaccgccgacgtcgaggtgcccgaaggaccgcgcacctggtgcatgacccgcaagcccggtgcctga

SEQ ID NO: 36504 - DNA, 1857 bp, synthetic construct
  source 1..1857: mol_type = other DNA
atggccttaccagtgaccgccttgctcctgccgctggccttgctgctccacgccgccaggccggacatccagatgacacagagccctagcagcctgtctgccagcgtgggagacagagtgaccatcacatgcaagagcagccagagcctgctggactccgatggcaagacctacctgaactggtatcagcagaagcccggcaaggcccctaagctgctgatctacctggtgtccaagctggatagcggcgtgcccagcagattttctggcagcggcagcggaaccgacttcaccctgacaatatccagcctccagcctgaggacttcgccacctactactgcttccaaggcacccactttccattcaccttcggccagggcaccaaggtggaaatcaaaagactcgaggacctgaagaacgtgttcccacctgaggtggccgtgttcgagcctagcgaggccgagatcagccacacccagaaagccaccctcgtgtgcctggctaccggcttctaccccgaccatgtggaactgtcttggtgggtcaacggcaaagaggtgcacagcggcgtgtgtaccgacccccagccactgaaagaacagcccgccctgaacgacagccggtactgcctgagcagcagactgagagtgtccgccaccttctggcagaacccccggaaccacttcagatgccaggtgcagttctacggcctgagcgagaacgacgagtggacccaggacagagccaagcccgtgacccagatcgtgtctgccgaagcctggggcagagccgatagcggctttaccagcgagagctaccagcagggcgtgctgagcgccaccatcctgtacgagatcctgctgggcaaggccaccctgtacgccgtgctggtgtctgccctggtgctgatggctatggtcaagcggaaggacagccggggaagggccaagcgatctggatctggagcaacaaacttctcactactcaaacaagcaggtgacgtggaggagaatcccgggcctactagtatggactggatttggcgcatccttttccttgtcggcgctgctaccggcgcgcattccttcgaagaagtgcagctggttgaatcaggcggaggactggttcagcctggcggatctctgagactgtcttgtgccgccagcggctacaccttcaccagctactggatgaactgggtccgacaggcccctggcaaaggactggaatgggtcggaatgatcgaccccagcgacagcgagacacactacaaccacatcttcaaggaccgcttcaccatcagcgccgacaccagcaagaataccgcctacctccagatgaactccctgagagccgaggacaccgccgtgtactactgcgccagaaacctgtatctgttcggccagggaaccctggtcacagtgtcatctacgcgtatccagaaccctgatcctgccgtgtaccagctgcgggatagcaagagcagcgacaagagcgtgtgtctgttcaccgacttcgacagccagaccaacgtgtcccagagcaaggactccgacgtgtacatcaccgataagtgcgtgctggacatgcggagcatggacttcaagagcaactccgccgtggcctggtccaacaagtccgatttcgcctgcgccaacgccttcaacaacagcattatccccgaggacacattcttcccaagccccgagagcagcagcgacgtgaagctggtggaaaagagcttcgagacagacaccaacctgaacttccagaacctgagcgtgatcggcttcagaatcctgctgctgaaagtggccggctttaacctgctgatgaccctgcggctgtggtccagc

SEQ ID NO: 36505 - DNA, 2697 bp, synthetic construct
  source 1..2697: mol_type = other DNA
atggccttaccagtgaccgccttgctcctgccgctggccttgctgctccacgccgccaggccggaggttcagctgcttgagtctggcggaggactggttcaacctggcggaagcctgagactgtcttgtgccgcctctggcagaaccttcagcatgggctggtatagacaggcccctggcaagggcctcgaatttgtgtctgccatcacatacagcggcggcagcccttactacgccgattctgtgaagggcagattcaccatcagccgggacaacagcaagaacaccgtgtacctccagatgaacagcctgagagccgaggacaccgccgtgtactactgtgccgccaatccaacctacggcagcgactggaatgccgagaattggggccagggcacactggtcacagtgtctagtggtaccggcggaggcggatctggcggcggaggtagcggtggcggaggatctgaattcgacatccagatgacacagagccctagcagcctgtctgccagcgtgggagacagagtgaccatcacatgcaagagcagccagagcctgctggactccgatggcaagacctacctgaactggtatcagcagaagcccggcaaggcccctaagctgctgatctacctggtgtccaagctggatagcggcgtgcccagcagattttctggcagcggcagcggaaccgacttcaccctgacaatatccagcctccagcctgaggacttcgccacctactactgcttccaaggcacccactttccattcaccttcggccagggcaccaaggtggaaatcaaaagactcgagatccagaaccctgatcctgccgtgtaccagctgcgggatagcaagagcagcgacaagagcgtgtgtctgttcaccgacttcgacagccagaccaacgtgtcccagagcaaggactccgacgtgtacatcaccgataagtgcgtgctggacatgcggagcatggacttcaagagcaactccgccgtggcctggtccaacaagtccgatttcgcctgcgccaacgccttcaacaacagcattatccccgaggacacattcttcccaagcagcgacgtgccctgcgacgtgaagctggtggaaaagagcttcgagacagacaccaacctgaacttccagaacctgagcgtgatcggcttcagaatcctgctgctgaaagtggccggctttaacctgctgatgaccctgcggctgtggtccagccgcgccaagagaagcggatctggcgtgaagcagaccctgaatttcgacctgctgaagctggctggcgacgtggaatccaacccaggccctactagtaccatggactggatttggcgcatccttttccttgtcggcgctgctaccggcacccattccgggcccgaagtgcaactggttgaatccggtggcggcctggtgcaacccggcggatctctcagacttagctgtgccgcctccggcagaaccttcacaatgggatggtacaggcaggctccagggaaagagagagagttcgtcgccgccatctctctgtctcccacactggcctactacgccgactctgtgaaaggccggttcaccatctccagagataatagcaagaacaccgtggtgctgcaaatgaactctctgagagccgaggatacagccctgtactattgtgccgctgaccggaagtccgtgatgagcatcagacccgattactggggacagggcacactggtcacagtgtctagtggatccggcggcggaggatctggcggaggcggatctgggggcggaggctctttcgaagaagtgcagctggttgaatcaggcggaggactggttcagcctggcggatctctgagactgtcttgtgccgccagcggctacaccttcaccagctactggatgaactgggtccgacaggcccctggcaaaggactggaatgggtcggaatgatcgaccccagcgacagcgagacacactacaaccacatcttcaaggaccgcttcaccatcagcgccgacaccagcaagaataccgcctacctccagatgaactccctgagagccgaggacaccgccgtgtactactgcgccagaaacctgtatctgttcggccagggaaccctggtcacagtgtcatctacgcgtgaggacctgaagaacgtgttcccacctgaggtggccgtgttcgagcctagcaaggccgagatcgcccacacccagaaagccaccctcgtgtgcctggctaccggcttctaccccgaccatgtggaactgtcttggtgggtcaacggcaaagaggtgcacagcggcgtgtgtaccgacccccagccactgaaagaacagcccgccctgaacgacagccggtactgcctgagcagcagactgagagtgtccgccaccttctggcagaacccccggaaccacttcagatgccaggtgcagttctacggcctgagcgagaacgacgagtggacccaggacagagccaagcccgtgacccagatcgtgtctgccgaagcctggggcagagccgattgcggcatcaccagcgccagctaccaccagggcgtgctgagcgccaccatcctgtacgagatcctgctgggcaaggccaccctgtacgccgtgctggtgtctgccctggtgctgatggctatggtcaagcggaaggacagccggggataa

SEQ ID NO: 36506 - DNA, 2697 bp, synthetic construct
  source 1..2697: mol_type = other DNA
atggccttaccagtgaccgccttgctcctgccgctggccttgctgctccacgccgccaggccggaagtgcagctggttgaatctggcggaggactggttcaggctggcggatctctgagactgtcttgtgccgccagcggcagaacctttagcatgggctggtttagacaggcccctggcaaagagagagagttcgtcgccgccatcacatactctggcggcagcccttactacgccgactctgtgaagggcagattcaccatcagccgggacaacgccaagaacaccgtgtacctccagatgaacagcctgaagcctgaggacaccgccgtgtactactgcgccgccaatccaacatacggcagcgactggaacgccgagaattggggccagggaacccaagtgacagtgtctagcggtaccggcggaggcggatctggcggcggaggtagcggtggcggaggatctgaattcgacatccagatgacacagagccctagcagcctgtctgccagcgtgggagacagagtgaccatcacatgcaagagcagccagagcctgctggactccgatggcaagacctacctgaactggtatcagcagaagcccggcaaggcccctaagctgctgatctacctggtgtccaagctggatagcggcgtgcccagcagattttctggcagcggcagcggaaccgacttcaccctgacaatatccagcctccagcctgaggacttcgccacctactactgcttccaaggcacccactttccattcaccttcggccagggcaccaaggtggaaatcaaaagactcgagatccagaaccctgatcctgccgtgtaccagctgcgggatagcaagagcagcgacaagagcgtgtgtctgttcaccgacttcgacagccagaccaacgtgtcccagagcaaggactccgacgtgtacatcaccgataagtgcgtgctggacatgcggagcatggacttcaagagcaactccgccgtggcctggtccaacaagtccgatttcgcctgcgccaacgccttcaacaacagcattatccccgaggacacattcttcccaagcagcgacgtgccctgcgacgtgaagctggtggaaaagagcttcgagacagacaccaacctgaacttccagaacctgagcgtgatcggcttcagaatcctgctgctgaaagtggccggctttaacctgctgatgaccctgcggctgtggtccagccgcgccaagagaagcggatctggcgtgaagcagaccctgaatttcgacctgctgaagctggctggcgacgtggaatccaacccaggccctactagtaccatggactggatttggcgcatccttttccttgtcggcgctgctaccggcgcccattccgggcccgaagtgcaactggttgaatccggtggcggcctggtgcaacccggcggatctctcagacttagctgtgccgcctccggcagaaccttcacaatgggatggtacaggcaggctccagggaaagagagagagttcgtcgccgccatctctctgtctcccacactggcctactacgccgactctgtgaaaggccggttcaccatctccagagataatagcaagaacaccgtggtgctgcaaatgaactctctgagagccgaggatacagccctgtactattgtgccgctgaccggaagtccgtgatgagcatcagacccgattactggggacagggcacactggtcacagtgtctagtggatccggcggcggaggatctggcggaggcggatctgggggcggaggctctttcgaagaagtgcagctggttgaatcaggcggaggactggttcagcctggcggatctctgagactgtcttgtgccgccagcggctacaccttcaccagctactggatgaactgggtccgacaggcccctggcaaaggactggaatgggtcggaatgatcgaccccagcgacagcgagacacactacaaccacatcttcaaggaccgcttcaccatcagcgccgacaccagcaagaataccgcctacctccagatgaactccctgagagccgaggacaccgccgtgtactactgcgccagaaacctgtatctgttcggccagggaaccctggtcacagtgtcatctacgcgtgaggacctgaagaacgtgttcccacctgaggtggccgtgttcgagcctagcaaggccgagatcgcccacacccagaaagccaccctcgtgtgcctggctaccggcttctaccccgaccatgtggaactgtcttggtgggtcaacggcaaagaggtgcacagcggcgtgtgtaccgacccccagccactgaaagaacagcccgccctgaacgacagccggtactgcctgagcagcagactgagagtgtccgccaccttctggcagaacccccggaaccacttcagatgccaggtgcagttctacggcctgagcgagaacgacgagtggacccaggacagagccaagcccgtgacccagatcgtgtctgccgaagcctggggcagagccgattgcggcatcaccagcgccagctaccaccagggcgtgctgagcgccaccatcctgtacgagatcctgctgggcaaggccaccctgtacgccgtgctggtgtctgccctggtgctgatggctatggtcaagcggaaggacagccggggataa

SEQ ID NO: 36507 - DNA, 2688 bp, synthetic construct
  source 1..2688: mol_type = other DNA
atggccttaccagtgaccgccttgctcctgccgctggccttgctgctccacgccgccaggccggaagtgcagctggttgaatctggcggaggactggttcaggctggcggatctctgagactgtcttgtgccgccagcggcagaacctttagcatgggctggtttagacaggcccctggcaaagagagagagttcgtcgccgccatcacatactctggcggcagcccttactacgccgactctgtgaagggcagattcaccatcagccgggacaacgccaagaacaccgtgtacctccagatgaacagcctgaagcctgaggacaccgccgtgtactactgcgccgccaatccaacatacggcagcgactggaacgccgagaattggggccagggaacccaagtgacagtgtctagcggtaccggcggaggcggatctggcggcggaggtagcggtggcggaggatctgaattcgacatccagatgacacagagccctagcagcctgtctgccagcgtgggagacagagtgaccatcacatgcaagagcagccagagcctgctggactccgatggcaagacctacctgaactggtatcagcagaagcccggcaaggcccctaagctgctgatctacctggtgtccaagctggatagcggcgtgcccagcagattttctggcagcggcagcggaaccgacttcaccctgacaatatccagcctccagcctgaggacttcgccacctactactgcttccaaggcacccactttccattcaccttcggccagggcaccaaggtggaaatcaaaagactcgaggacctgaagaacgtgttcccacctgaggtggccgtgttcgagcctagcgaggccgagatcagccacacccagaaagccaccctcgtgtgcctggctaccggcttctaccccgaccatgtggaactgtcttggtgggtcaacggcaaagaggtgcacagcggcgtgtgtaccgacccccagccactgaaagaacagcccgccctgaacgacagccggtactgcctgagcagcagactgagagtgtccgccaccttctggcagaacccccggaaccacttcagatgccaggtgcagttctacggcctgagcgagaacgacgagtggacccaggacagagccaagcccgtgacccagatcgtgtctgccgaagcctggggcagagccgattgcggctttaccagcgagagctaccagcagggcgtgctgagcgccaccatcctgtacgagatcctgctgggcaaggccaccctgtacgccgtgctggtgtctgccctggtgctgatggctatggtcaagcggaaggacagccggggaagggccaagcgatctggatctggagcaacaaacttctcactactcaaacaagcaggtgacgtggaggagaatcccgggcctactagtgccaccatggactggatttggcgcatccttttccttgtcggcgctgctaccggcgcccattccgggcccgaagtgcaactggttgaatccggtggcggcctggtgcaagcaggcggatctctcagacttagctgtgccgcctccggcagaaccttcacaatgggatggtttaggcaggctccagggaaagagagagagttcgtcgccgccatctctctgtctcccacactggcctactacgccgactctgtgaaaggccggttcaccatctccagagataatgccaagaacaccgtggtgctgcaaatgaactctctgaaacccgaggatacagccctgtactattgtgccgctgaccggaagtccgtgatgagcatcagacccgattactggggacagggcacacaagtcacagtgtcctctggatccggcggcggaggatctggcggaggcggatctgggggcggaggctctttcgaagaagtgcagctggttgaatcaggcggaggactggttcagcctggcggatctctgagactgtcttgtgccgccagcggctacaccttcaccagctactggatgaactgggtccgacaggcccctggcaaaggactggaatgggtcggaatgatcgaccccagcgacagcgagacacactacaaccacatcttcaaggaccgcttcaccatcagcgccgacaccagcaagaataccgcctacctccagatgaactccctgagagccgaggacaccgccgtgtactactgcgccagaaacctgtatctgttcggccagggaaccctggtcacagtgtcatctacgcgtatccagaaccctgatcctgccgtgtaccagctgcgggatagcaagagcagcgacaagagcgtgtgtctgttcaccgacttcgacagccagaccaacgtgtcccagagcaaggactccgacgtgtacatcaccgataagtgcgtgctggacatgcggagcatggacttcaagagcaactccgccgtggcctggtccaacaagtccgatttcgcctgcgccaacgccttcaacaacagcattatccccgaggacacattcttcccaagccccgagagcagctgcgacgtgaagctggtggaaaagagcttcgagacagacaccaacctgaacttccagaacctgagcgtgatcggcttcagaatcctgctgctgaaagtggccggctttaacctgctgatgaccctgcggctgtggtccagctaa

SEQ ID NO: 36508 - DNA, 2301 bp, synthetic construct
  source 1..2301: mol_type = other DNA
atggccttaccagtgaccgccttgctcctgccgctggccttgctgctccacgccgccaggccggaagtgcagctggttgaatctggcggaggactggttcagcctggcggatctctgagactgagctgtgaagccagcggcttcgccagcgacgattacatcatcggctggttcagacaggcccctggcaaagagagagagggcgtcagctgcatcagctctaagtacgccaacaccgtgtacaccgacagcgtgaagggcagattcagactgagcagaggcaccgccaagaataccgtgtacctccagatgagcgccctgaagcctgaggataccgccgtgtactactgcgctatggacagccgcagagtgacatgccctgagatcagcaccatgcaccggaacttcgattcttggggccagggcacactggtcacagtgtcatctggtaccggcggaggcggatctggcggcggaggtagcggtggcggaggatctgaattcgacatccagatgacacagagccctagcagcctgtctgccagcgtgggagacagagtgaccatcacatgcaagagcagccagagcctgctggactccgatggcaagacctacctgaactggtatcagcagaagcccggcaaggcccctaagctgctgatctacctggtgtccaagctggatagcggcgtgcccagcagattttctggcagcggcagcggaaccgacttcaccctgacaatatccagcctccagcctgaggacttcgccacctactactgcttccaaggcacccactttccattcaccttcggccagggcaccaaggtggaaatcaaaagactcgaggacctgaagaacgtgttcccacctgaggtggccgtgttcgagcctagcaaggccgagatcgcccacacccagaaagccaccctcgtgtgcctggctaccggcttctaccccgaccatgtggaactgtcttggtgggtcaacggcaaagaggtgcacagcggcgtgtgtaccgacccccagccactgaaagaacagcccgccctgaacgacagccggtactgcctgagcagcagactgagagtgtccgccaccttctggcagaacccccggaaccacttcagatgccaggtgcagttctacggcctgagcgagaacgacgagtggacccaggacagagccaagcccgtgacccagatcgtgtctgccgaagcctggggcagagccgattgcggcatcaccagcgccagctaccaccagggcgtgctgagcgccaccatcctgtacgagatcctgctgggcaaggccaccctgtacgccgtgctggtgtctgccctggtgctgatggctatggtcaagcggaaggacagccggggaagggccaagcgatctggatctggagcaacaaacttctcactactcaaacaagcaggtgacgtggaggagaatcccgggcctactagtatggactggatttggcgcatccttttccttgtcggcgctgctaccggcgcgcattccttcgaagaagtgcagctggttgaatcaggcggaggactggttcagcctggcggatctctgagactgtcttgtgccgccagcggctacaccttcaccagctactggatgaactgggtccgacaggcccctggcaaaggactggaatgggtcggaatgatcgaccccagcgacagcgagacacactacaaccacatcttcaaggaccgcttcaccatcagcgccgacaccagcaagaataccgcctacctccagatgaactccctgagagccgaggacaccgccgtgtactactgcgccagaaacctgtatctgttcggccagggaaccctggtcacagtgtcatctacgcgtatccagaaccctgatcctgccgtgtaccagctgcgggatagcaagagcagcgacaagagcgtgtgtctgttcaccgacttcgacagccagaccaacgtgtcccagagcaaggactccgacgtgtacatcaccgataagtgcgtgctggacatgcggagcatggacttcaagagcaactccgccgtggcctggtccaacaagtccgatttcgcctgcgccaacgccttcaacaacagcattatccccgaggacacattcttcccaagcagcgacgtgccctgcgacgtgaagctggtggaaaagagcttcgagacagacaccaacctgaacttccagaacctgagcgtgatcggcttcagaatcctgctgctgaaagtggccggctttaacctgctgatgaccctgcggctgtggtccagctaa

SEQ ID NO: 36509 - DNA, 2274 bp, synthetic construct
  source 1..2274: mol_type = other DNA
atggccttaccagtgaccgccttgctcctgccgctggccttgctgctccacgccgccaggccggacatccagatgacacagagccctagcagcctgtctgccagcgtgggagacagagtgaccatcacatgcaagagcagccagagcctgctggactccgatggcaagacctacctgaactggtatcagcagaagcccggcaaggcccctaagctgctgatctacctggtgtccaagctggatagcggcgtgcccagcagattttctggcagcggcagcggaaccgacttcaccctgacaatatccagcctccagcctgaggacttcgccacctactactgcttccaaggcacccactttccattcaccttcggccagggcaccaaggtggaaatcaaaagactcgaggacctgaagaacgtgttcccacctgaggtggccgtgttcgagcctagcgaggccgagatcagccacacccagaaagccaccctcgtgtgcctggctaccggcttctaccccgaccatgtggaactgtcttggtgggtcaacggcaaagaggtgcacagcggcgtgtgtaccgacccccagccactgaaagaacagcccgccctgaacgacagccggtactgcctgagcagcagactgagagtgtccgccaccttctggcagaacccccggaaccacttcagatgccaggtgcagttctacggcctgagcgagaacgacgagtggacccaggacagagccaagcccgtgacccagatcgtgtctgccgaagcctggggcagagccgattgcggctttaccagcgagagctaccagcagggcgtgctgagcgccaccatcctgtacgagatcctgctgggcaaggccaccctgtacgccgtgctggtgtctgccctggtgctgatggctatggtcaagcggaaggacagccggggaagggccaagcgatctggatctggagcaacaaacttctcactactcaaacaagcaggtgacgtggaggagaatcccgggcctactagtaccatggactggatttggcgcatccttttccttgtcggcgctgctaccggcgcccattccgggcccgaagtgcaactggttgaatccggtggcggcctggtgcaacccggcggatctctcagacttagctgtgccgcctccggcagaaccttcacaatgggatggtacaggcaggctccagggaaagagagagagttcgtcgccgccatctctctgtctcccacactggcctactacgccgactctgtgaaaggccggttcaccatctccagagataatagcaagaacaccgtggtgctgcaaatgaactctctgagagccgaggatacagccctgtactattgtgccgctgaccggaagtccgtgatgagcatcagacccgattactggggacagggcacactggtcacagtgtctagtggatccggcggcggaggatctggcggaggcggatctgggggcggaggctctttcgaagaagtgcagctggttgaatcaggcggaggactggttcagcctggcggatctctgagactgtcttgtgccgccagcggctacaccttcaccagctactggatgaactgggtccgacaggcccctggcaaaggactggaatgggtcggaatgatcgaccccagcgacagcgagacacactacaaccacatcttcaaggaccgcttcaccatcagcgccgacaccagcaagaataccgcctacctccagatgaactccctgagagccgaggacaccgccgtgtactactgcgccagaaacctgtatctgttcggccagggaaccctggtcacagtgtcatctacgcgtatccagaaccctgatcctgccgtgtaccagctgcgggatagcaagagcagcgacaagagcgtgtgtctgttcaccgacttcgacagccagaccaacgtgtcccagagcaaggactccgacgtgtacatcaccgataagtgcgtgctggacatgcggagcatggacttcaagagcaactccgccgtggcctggtccaacaagtccgatttcgcctgcgccaacgccttcaacaacagcattatccccgaggacacattcttcccaagccccgagagcagctgcgacgtgaagctggtggaaaagagcttcgagacagacaccaacctgaacttccagaacctgagcgtgatcggcttcagaatcctgctgctgaaagtggccggctttaacctgctgatgaccctgcggctgtggtccagctaa

SEQ ID NO: 36510 - DNA, 2292 bp, synthetic construct
  source 1..2292: mol_type = other DNA
atggccttaccagtgaccgccttgctcctgccgctggccttgctgctccacgccgccaggccggacatccagatgacacagagccctagcagcctgtctgccagcgtgggagacagagtgaccatcacatgcaagagcagccagagcctgctggactccgatggcaagacctacctgaactggtatcagcagaagcccggcaaggcccctaagctgctgatctacctggtgtccaagctggatagcggcgtgcccagcagattttctggcagcggcagcggaaccgacttcaccctgacaatatccagcctccagcctgaggacttcgccacctactactgcttccaaggcacccactttccattcaccttcggccagggcaccaaggtggaaatcaaaagactcgaggacctgaagaacgtgttcccacctgaggtggccgtgttcgagcctagcgaggccgagatcagccacacccagaaagccaccctcgtgtgcctggctaccggcttctaccccgaccatgtggaactgtcttggtgggtcaacggcaaagaggtgcacagcggcgtgtgtaccgacccccagccactgaaagaacagcccgccctgaacgacagccggtactgcctgagcagcagactgagagtgtccgccaccttctggcagaacccccggaaccacttcagatgccaggtgcagttctacggcctgagcgagaacgacgagtggacccaggacagagccaagcccgtgacccagatcgtgtctgccgaagcctggggcagagccgattgcggctttaccagcgagagctaccagcagggcgtgctgagcgccaccatcctgtacgagatcctgctgggcaaggccaccctgtacgccgtgctggtgtctgccctggtgctgatggctatggtcaagcggaaggacagccggggaagggccaagcgatctggatctggagcaacaaacttctcactactcaaacaagcaggtgacgtggaggagaatcccgggcctactagtaccatggactggatttggcgcatccttttccttgtcggcgctgctaccggcgcccattccgggccccaggtgcagctggttgaatctggcggaggactggttcagcctggcggatctctgagactgtcttgtgccgccagcggcaacatcaacagcagaaactgcatgggctggttcagacaggcccctggcaagggaagagaaggcgtggcagctatcggccaagtgaccggcagaacctactacgtggacagcgtgaagggcagattcaccatcagcctggacaacagcaagaacaccctgtacctccagatgaacagcctgagagccgaggacaccgccgtgtactattgtgctgctgcccctggctgtctgctgtctgcacttagaagcgccgactacagaaactggggccagggcacactggtcaccgtttcttctggatccggcggcggaggatctggcggaggcggatctgggggcggaggctctttcgaagaagtgcagctggttgaatcaggcggaggactggttcagcctggcggatctctgagactgtcttgtgccgccagcggctacaccttcaccagctactggatgaactgggtccgacaggcccctggcaaaggactggaatgggtcggaatgatcgaccccagcgacagcgagacacactacaaccacatcttcaaggaccgcttcaccatcagcgccgacaccagcaagaataccgcctacctccagatgaactccctgagagccgaggacaccgccgtgtactactgcgccagaaacctgtatctgttcggccagggaaccctggtcacagtgtcatctacgcgtatccagaaccctgatcctgccgtgtaccagctgcgggatagcaagagcagcgacaagagcgtgtgtctgttcaccgacttcgacagccagaccaacgtgtcccagagcaaggactccgacgtgtacatcaccgataagtgcgtgctggacatgcggagcatggacttcaagagcaactccgccgtggcctggtccaacaagtccgatttcgcctgcgccaacgccttcaacaacagcattatccccgaggacacattcttcccaagccccgagagcagctgcgacgtgaagctggtggaaaagagcttcgagacagacaccaacctgaacttccagaacctgagcgtgatcggcttcagaatcctgctgctgaaagtggccggctttaacctgctgatgaccctgcggctgtggtccagc

SEQ ID NO: 36511 - DNA, 2295 bp, synthetic construct
  source 1..2295: mol_type = other DNA
atggccttaccagtgaccgccttgctcctgccgctggccttgctgctccacgccgccaggccggacatccagatgacacagagccctagcagcctgtctgccagcgtgggagacagagtgaccatcacatgcaagagcagccagagcctgctggactccgatggcaagacctacctgaactggtatcagcagaagcccggcaaggcccctaagctgctgatctacctggtgtccaagctggatagcggcgtgcccagcagattttctggcagcggcagcggaaccgacttcaccctgacaatatccagcctccagcctgaggacttcgccacctactactgcttccaaggcacccactttccattcaccttcggccagggcaccaaggtggaaatcaaaagactcgaggacctgaagaacgtgttcccacctgaggtggccgtgttcgagcctagcgaggccgagatcagccacacccagaaagccaccctcgtgtgcctggctaccggcttctaccccgaccatgtggaactgtcttggtgggtcaacggcaaagaggtgcacagcggcgtgtgtaccgacccccagccactgaaagaacagcccgccctgaacgacagccggtactgcctgagcagcagactgagagtgtccgccaccttctggcagaacccccggaaccacttcagatgccaggtgcagttctacggcctgagcgagaacgacgagtggacccaggacagagccaagcccgtgacccagatcgtgtctgccgaagcctggggcagagccgattgcggctttaccagcgagagctaccagcagggcgtgctgagcgccaccatcctgtacgagatcctgctgggcaaggccaccctgtacgccgtgctggtgtctgccctggtgctgatggctatggtcaagcggaaggacagccggggaagggccaagcgatctggatctggagcaacaaacttctcactactcaaacaagcaggtgacgtggaggagaatcccgggcctactagtaccatggactggatttggcgcatccttttccttgtcggcgctgctaccggcgcccattccgggccccaggtgcagctggttgaatctggcggaggatctgttcaggctggcggctctctgagactgtcttgtggcgcttccggcaacatcagcagcagaaactgcatgggctggttcagacaggcccctggcaaagagagagaaggcgttgccgccatcggacaagtgaccggcagatcctactacgtggacagcgtgaagggcagattcaccatcagcctggacaacgccaagaacaccctgtacctccagatgaacacactgaagcccgaggacaccgccatgtactactgtgctgctgcccctggctgtctgctgtctgcacttagaagcgccgactacagaaactggggccagggaacccaagtgacagtgtctagtggatccggcggcggaggatctggcggaggcggatctgggggcggaggctctttcgaagaagtgcagctggttgaatcaggcggaggactggttcagcctggcggatctctgagactgtcttgtgccgccagcggctacaccttcaccagctactggatgaactgggtccgacaggcccctggcaaaggactggaatgggtcggaatgatcgaccccagcgacagcgagacacactacaaccacatcttcaaggaccgcttcaccatcagcgccgacaccagcaagaataccgcctacctccagatgaactccctgagagccgaggacaccgccgtgtactactgcgccagaaacctgtatctgttcggccagggaaccctggtcacagtgtcatctacgcgtatccagaaccctgatcctgccgtgtaccagctgcgggatagcaagagcagcgacaagagcgtgtgtctgttcaccgacttcgacagccagaccaacgtgtcccagagcaaggactccgacgtgtacatcaccgataagtgcgtgctggacatgcggagcatggacttcaagagcaactccgccgtggcctggtccaacaagtccgatttcgcctgcgccaacgccttcaacaacagcattatccccgaggacacattcttcccaagccccgagagcagctgcgacgtgaagctggtggaaaagagcttcgagacagacaccaacctgaacttccagaacctgagcgtgatcggcttcagaatcctgctgctgaaagtggccggctttaacctgctgatgaccctgcggctgtggtccagctaa

SEQ ID NO: 36512 - DNA, 2718 bp, synthetic construct
  source 1..2718: mol_type = other DNA
atggccttaccagtgaccgccttgctcctgccgctggccttgctgctccacgccgccaggccggaagtgcagctggttgaatctggcggaggactggttcaggctggcggatctctgagactgtcttgtgccgccagcggcagaacctttagcatgggctggtttagacaggcccctggcaaagagagagagttcgtcgccgccatcacatactctggcggcagcccttactacgccgactctgtgaagggcagattcaccatcagccgggacaacgccaagaacaccgtgtacctccagatgaacagcctgaagcctgaggacaccgccgtgtactactgcgccgccaatccaacatacggcagcgactggaacgccgagaattggggccagggaacccaagtgacagtgtctagcggtaccggcggaggcggatctggcggcggaggtagcggtggcggaggatctgaattcgacatccagatgacacagagccctagcagcctgtctgccagcgtgggagacagagtgaccatcacatgcaagagcagccagagcctgctggactccgatggcaagacctacctgaactggtatcagcagaagcccggcaaggcccctaagctgctgatctacctggtgtccaagctggatagcggcgtgcccagcagattttctggcagcggcagcggaaccgacttcaccctgacaatatccagcctccagcctgaggacttcgccacctactactgcttccaaggcacccactttccattcaccttcggccagggcaccaaggtggaaatcaaaagactcgagatccagaaccctgatcctgccgtgtaccagctgcgggatagcaagagcagcgacaagagcgtgtgtctgttcaccgacttcgacagccagaccaacgtgtcccagagcaaggactccgacgtgtacatcaccgataagtgcgtgctggacatgcggagcatggacttcaagagcaactccgccgtggcctggtccaacaagtccgatttcgcctgcgccaacgccttcaacaacagcattatccccgaggacacattcttcccaagcagcgacgtgccctgcgacgtgaagctggtggaaaagagcttcgagacagacaccaacctgaacttccagaacctgagcgtgatcggcttcagaatcctgctgctgaaagtggccggctttaacctgctgatgaccctgcggctgtggtccagccgcgccaagagaagcggatctggcgtgaagcagaccctgaatttcgacctgctgaagctggctggcgacgtggaatccaacccaggccctactagtaccatggactggatttggcgcatccttttccttgtcggcgctgctaccggcgcccattccgggccccaggtgcagctggttgaatctggcggaggatctgttcaggctggcggctctctgagactgtcttgtggcgcttccggcaacatcagcagcagaaactgcatgggctggttcagacaggcccctggcaaagagagagaaggcgttgccgccatcggacaagtgaccggcagatcctactacgtggacagcgtgaagggcagattcaccatcagcctggacaacgccaagaacaccctgtacctccagatgaacacactgaagcccgaggacaccgccatgtactactgtgctgctgcccctggctgtctgctgtctgcacttagaagcgccgactacagaaactggggccagggaacccaagtgacagtgtctagtggatccggcggcggaggatctggcggaggcggatctgggggcggaggctctttcgaagaagtgcagctggttgaatcaggcggaggactggttcagcctggcggatctctgagactgtcttgtgccgccagcggctacaccttcaccagctactggatgaactgggtccgacaggcccctggcaaaggactggaatgggtcggaatgatcgaccccagcgacagcgagacacactacaaccacatcttcaaggaccgcttcaccatcagcgccgacaccagcaagaataccgcctacctccagatgaactccctgagagccgaggacaccgccgtgtactactgcgccagaaacctgtatctgttcggccagggaaccctggtcacagtgtcatctacgcgtgaggacctgaagaacgtgttcccacctgaggtggccgtgttcgagcctagcaaggccgagatcgcccacacccagaaagccaccctcgtgtgcctggctaccggcttctaccccgaccatgtggaactgtcttggtgggtcaacggcaaagaggtgcacagcggcgtgtgtaccgacccccagccactgaaagaacagcccgccctgaacgacagccggtactgcctgagcagcagactgagagtgtccgccaccttctggcagaacccccggaaccacttcagatgccaggtgcagttctacggcctgagcgagaacgacgagtggacccaggacagagccaagcccgtgacccagatcgtgtctgccgaagcctggggcagagccgattgcggcatcaccagcgccagctaccaccagggcgtgctgagcgccaccatcctgtacgagatcctgctgggcaaggccaccctgtacgccgtgctggtgtctgccctggtgctgatggctatggtcaagcggaaggacagccggggataa

SEQ ID NO: 36513 - DNA, 2709 bp, synthetic construct
  source 1..2709: mol_type = other DNA
atggccttaccagtgaccgccttgctcctgccgctggccttgctgctccacgccgccaggccgcaggtgcagctggttgaatctggcggaggatctgttcaggctggcggctctctgagactgtcttgtggcgcttccggcaacatcagcagcagaaactgcatgggctggttcagacaggcccctggcaaagagagagaaggcgttgccgccatcggacaagtgaccggcagatcctactacgtggacagcgtgaagggcagattcaccatcagcctggacaacgccaagaacaccctgtacctccagatgaacacactgaagcccgaggacaccgccatgtactactgtgctgctgcccctggctgtctgctgtctgcacttagaagcgccgactacagaaactggggccagggaacccaagtgacagtgtctagtggtaccggcggaggcggatctggcggcggaggtagcggtggcggaggatctgaattcgacatccagatgacacagagccctagcagcctgtctgccagcgtgggagacagagtgaccatcacatgcaagagcagccagagcctgctggactccgatggcaagacctacctgaactggtatcagcagaagcccggcaaggcccctaagctgctgatctacctggtgtccaagctggatagcggcgtgcccagcagattttctggcagcggcagcggaaccgacttcaccctgacaatatccagcctccagcctgaggacttcgccacctactactgcttccaaggcacccactttccattcaccttcggccagggcaccaaggtggaaatcaaaagactcgaggacctgaagaacgtgttcccacctgaggtggccgtgttcgagcctagcgaggccgagatcagccacacccagaaagccaccctcgtgtgcctggctaccggcttctaccccgaccatgtggaactgtcttggtgggtcaacggcaaagaggtgcacagcggcgtgtgtaccgacccccagccactgaaagaacagcccgccctgaacgacagccggtactgcctgagcagcagactgagagtgtccgccaccttctggcagaacccccggaaccacttcagatgccaggtgcagttctacggcctgagcgagaacgacgagtggacccaggacagagccaagcccgtgacccagatcgtgtctgccgaagcctggggcagagccgattgcggctttaccagcgagagctaccagcagggcgtgctgagcgccaccatcctgtacgagatcctgctgggcaaggccaccctgtacgccgtgctggtgtctgccctggtgctgatggctatggtcaagcggaaggacagccggggaagggccaagcgatctggatctggagcaacaaacttctcactactcaaacaagcaggtgacgtggaggagaatcccgggcctactagtgccaccatggactggatttggcgcatccttttccttgtcggcgctgctaccggcgcccattccgggcccgaagtgcaactggttgaatccggtggcggcctggtgcaagcaggcggatctctcagacttagctgtgccgcctccggcagaaccttcacaatgggatggtttaggcaggctccagggaaagagagagagttcgtcgccgccatctctctgtctcccacactggcctactacgccgactctgtgaaaggccggttcaccatctccagagataatgccaagaacaccgtggtgctgcaaatgaactctctgaaacccgaggatacagccctgtactattgtgccgctgaccggaagtccgtgatgagcatcagacccgattactggggacagggcacacaagtcacagtgtcctctggatccggcggcggaggatctggcggaggcggatctgggggcggaggctctttcgaagaagtgcagctggttgaatcaggcggaggactggttcagcctggcggatctctgagactgtcttgtgccgccagcggctacaccttcaccagctactggatgaactgggtccgacaggcccctggcaaaggactggaatgggtcggaatgatcgaccccagcgacagcgagacacactacaaccacatcttcaaggaccgcttcaccatcagcgccgacaccagcaagaataccgcctacctccagatgaactccctgagagccgaggacaccgccgtgtactactgcgccagaaacctgtatctgttcggccagggaaccctggtcacagtgtcatctacgcgtatccagaaccctgatcctgccgtgtaccagctgcgggatagcaagagcagcgacaagagcgtgtgtctgttcaccgacttcgacagccagaccaacgtgtcccagagcaaggactccgacgtgtacatcaccgataagtgcgtgctggacatgcggagcatggacttcaagagcaactccgccgtggcctggtccaacaagtccgatttcgcctgcgccaacgccttcaacaacagcattatccccgaggacacattcttcccaagccccgagagcagctgcgacgtgaagctggtggaaaagagcttcgagacagacaccaacctgaacttccagaacctgagcgtgatcggcttcagaatcctgctgctgaaagtggccggctttaacctgctgatgaccctgcggctgtggtccagctaa

SEQ ID NO: 36514 - DNA, 2298 bp, synthetic construct
  source 1..2298: mol_type = other DNA
atggccttaccagtgaccgccttgctcctgccgctggccttgctgctccacgccgccaggccgcaggtgcagctggttgaatctggcggaggatctgttcaggctggcggctctctgagactgtcttgtggcgcttccggcaacatcagcagcagaaactgcatgggctggttcagacaggcccctggcaaagagagagaaggcgttgccgccatcggacaagtgaccggcagatcctactacgtggacagcgtgaagggcagattcaccatcagcctggacaacgccaagaacaccctgtacctccagatgaacacactgaagcccgaggacaccgccatgtactactgtgctgctgcccctggctgtctgctgtctgcacttagaagcgccgactacagaaactggggccagggaacccaagtgacagtgtctagtggtaccggcggaggcggatctggcggcggaggtagcggtggcggaggatctgaattcgacatccagatgacacagagccctagcagcctgtctgccagcgtgggagacagagtgaccatcacatgcaagagcagccagagcctgctggactccgatggcaagacctacctgaactggtatcagcagaagcccggcaaggcccctaagctgctgatctacctggtgtccaagctggatagcggcgtgcccagcagattttctggcagcggcagcggaaccgacttcaccctgacaatatccagcctccagcctgaggacttcgccacctactactgcttccaaggcacccactttccattcaccttcggccagggcaccaaggtggaaatcaaaagactcgaggacctgaagaacgtgttcccacctgaggtggccgtgttcgagcctagcgaggccgagatcagccacacccagaaagccaccctcgtgtgcctggctaccggcttctaccccgaccatgtggaactgtcttggtgggtcaacggcaaagaggtgcacagcggcgtgtgtaccgacccccagccactgaaagaacagcccgccctgaacgacagccggtactgcctgagcagcagactgagagtgtccgccaccttctggcagaacccccggaaccacttcagatgccaggtgcagttctacggcctgagcgagaacgacgagtggacccaggacagagccaagcccgtgacccagatcgtgtctgccgaagcctggggcagagccgattgcggctttaccagcgagagctaccagcagggcgtgctgagcgccaccatcctgtacgagatcctgctgggcaaggccaccctgtacgccgtgctggtgtctgccctggtgctgatggctatggtcaagcggaaggacagccggggaagggccaagcgatctggatctggagcaacaaacttctcactactcaaacaagcaggtgacgtggaggagaatcccgggcctactagtgccaccatggactggatttggcgcatccttttccttgtcggcgctgctaccggcgcccattccttcgaagaagtgcagctggttgaatcaggcggaggactggttcagcctggcggatctctgagactgtcttgtgccgccagcggctacaccttcaccagctactggatgaactgggtccgacaggcccctggcaaaggactggaatgggtcggaatgatcgaccccagcgacagcgagacacactacaaccacatcttcaaggaccgcttcaccatcagcgccgacaccagcaagaataccgcctacctccagatgaactccctgagagccgaggacaccgccgtgtactactgcgccagaaacctgtatctgttcggccagggaaccctggtcacagtgtcatctacgcgtatccagaaccctgatcctgccgtgtaccagctgcgggatagcaagagcagcgacaagagcgtgtgtctgttcaccgacttcgacagccagaccaacgtgtcccagagcaaggactccgacgtgtacatcaccgataagtgcgtgctggacatgcggagcatggacttcaagagcaactccgccgtggcctggtccaacaagtccgatttcgcctgcgccaacgccttcaacaacagcattatccccgaggacacattcttcccaagccccgagagcagctgcgacgtgaagctggtggaaaagagcttcgagacagacaccaacctgaacttccagaacctgagcgtgatcggcttcagaatcctgctgctgaaagtggccggctttaacctgctgatgaccctgcggctgtggtccagctaa

SEQ ID NO: 36515 - DNA, 2298 bp, synthetic construct
  source 1..2298: mol_type = other DNA
atggccttaccagtgaccgccttgctcctgccgctggccttgctgctccacgccgccaggccgcaagttcagctggtggaaagcggtggtggcgttgtgcaacctggtggaagtctgaggctgagctgtgccgcttctggcctgagctttagcacctacactgtggcctggttcaggcaggctcccggaaagggtcttgaaggcgtggccgccattccttacaccagccagcacatggtgtacacagacagcgtcagaggccggttcaccatcagcagagacaactccaagaatacgctctatctccagatgaactctctgcgcgccgaagatacagccgtgtattactgcgccaccgacagacggcctggcacctctatgctggctatcaacggctacaacagatggggacagggaaccaccgtgaccgtgtcatctggtaccggcggaggcggatctggcggcggaggtagcggtggcggaggatctgaattcgacatccagatgacacagagccctagcagcctgtctgccagcgtgggagacagagtgaccatcacatgcaagagcagccagagcctgctggactccgatggcaagacctacctgaactggtatcagcagaagcccggcaaggcccctaagctgctgatctacctggtgtccaagctggatagcggcgtgcccagcagattttctggcagcggcagcggaaccgacttcaccctgacaatatccagcctccagcctgaggacttcgccacctactactgcttccaaggcacccactttccattcaccttcggccagggcaccaaggtggaaatcaaaagactcgaggacctgaagaacgtgttcccacctgaggtggccgtgttcgagcctagcgaggccgagatcagccacacccagaaagccaccctcgtgtgcctggctaccggcttctaccccgaccatgtggaactgtcttggtgggtcaacggcaaagaggtgcacagcggcgtgtgtaccgacccccagccactgaaagaacagcccgccctgaacgacagccggtactgcctgagcagcagactgagagtgtccgccaccttctggcagaacccccggaaccacttcagatgccaggtgcagttctacggcctgagcgagaacgacgagtggacccaggacagagccaagcccgtgacccagatcgtgtctgccgaagcctggggcagagccgattgcggctttaccagcgagagctaccagcagggcgtgctgagcgccaccatcctgtacgagatcctgctgggcaaggccaccctgtacgccgtgctggtgtctgccctggtgctgatggctatggtcaagcggaaggacagccggggaagggccaagcgatctggatctggagcaacaaacttctcactactcaaacaagcaggtgacgtggaggagaatcccgggcctactagtgccaccatggactggatttggcgcatccttttccttgtcggcgctgctaccggcgcccattccttcgaagaagtgcagctggttgaatcaggcggaggactggttcagcctggcggatctctgagactgtcttgtgccgccagcggctacaccttcaccagctactggatgaactgggtccgacaggcccctggcaaaggactggaatgggtcggaatgatcgaccccagcgacagcgagacacactacaaccacatcttcaaggaccgcttcaccatcagcgccgacaccagcaagaataccgcctacctccagatgaactccctgagagccgaggacaccgccgtgtactactgcgccagaaacctgtatctgttcggccagggaaccctggtcacagtgtcatctacgcgtatccagaaccctgatcctgccgtgtaccagctgcgggatagcaagagcagcgacaagagcgtgtgtctgttcaccgacttcgacagccagaccaacgtgtcccagagcaaggactccgacgtgtacatcaccgataagtgcgtgctggacatgcggagcatggacttcaagagcaactccgccgtggcctggtccaacaagtccgatttcgcctgcgccaacgccttcaacaacagcattatccccgaggacacattcttcccaagccccgagagcagctgcgacgtgaagctggtggaaaagagcttcgagacagacaccaacctgaacttccagaacctgagcgtgatcggcttcagaatcctgctgctgaaagtggccggctttaacctgctgatgaccctgcggctgtggtccagctaa

SEQ ID NO: 36516 - DNA, 2295 bp, synthetic construct
  source 1..2295: mol_type = other DNA
atggccttaccagtgaccgccttgctcctgccgctggccttgctgctccacgccgccaggccggacatccagatgacacagagccctagcagcctgtctgccagcgtgggagacagagtgaccatcacatgcaagagcagccagagcctgctggactccgatggcaagacctacctgaactggtatcagcagaagcccggcaaggcccctaagctgctgatctacctggtgtccaagctggatagcggcgtgcccagcagattttctggcagcggcagcggaaccgacttcaccctgacaatatccagcctccagcctgaggacttcgccacctactactgcttccaaggcacccactttccattcaccttcggccagggcaccaaggtggaaatcaaaagactcgaggacctgaagaacgtgttcccacctgaggtggccgtgttcgagcctagcgaggccgagatcagccacacccagaaagccaccctcgtgtgcctggctaccggcttctaccccgaccatgtggaactgtcttggtgggtcaacggcaaagaggtgcacagcggcgtgtgtaccgacccccagccactgaaagaacagcccgccctgaacgacagccggtactgcctgagcagcagactgagagtgtccgccaccttctggcagaacccccggaaccacttcagatgccaggtgcagttctacggcctgagcgagaacgacgagtggacccaggacagagccaagcccgtgacccagatcgtgtctgccgaagcctggggcagagccgattgcggctttaccagcgagagctaccagcagggcgtgctgagcgccaccatcctgtacgagatcctgctgggcaaggccaccctgtacgccgtgctggtgtctgccctggtgctgatggctatggtcaagcggaaggacagccggggaagggccaagcgatctggatctggagcaacaaacttctcactactcaaacaagcaggtgacgtggaggagaatcccgggcctactagtaccatggactggatttggcgcatccttttccttgtcggcgctgctaccggcgcccattccgggccccaagttcagctggtggaaagcggtggtggcgttgtgcaacctggtggaagtctgaggctgagctgtgccgcttctggcctgagctttagcacctacactgtggcctggttcaggcaggctcccggaaagggtcttgaaggcgtggccgccattccttacaccagccagcacatggtgtacacagacagcgtcagaggccggttcaccatcagcagagacaactccaagaatacgctctatctccagatgaactctctgcgcgccgaagatacagccgtgtattactgcgccaccgacagacggcctggcacctctatgctggctatcaacggctacaacagatggggacagggaaccaccgtgaccgtgtcatctggatccggcggcggaggatctggcggaggcggatctgggggcggaggctctttcgaagaagtgcagctggttgaatcaggcggaggactggttcagcctggcggatctctgagactgtcttgtgccgccagcggctacaccttcaccagctactggatgaactgggtccgacaggcccctggcaaaggactggaatgggtcggaatgatcgaccccagcgacagcgagacacactacaaccacatcttcaaggaccgcttcaccatcagcgccgacaccagcaagaataccgcctacctccagatgaactccctgagagccgaggacaccgccgtgtactactgcgccagaaacctgtatctgttcggccagggaaccctggtcacagtgtcatctacgcgtatccagaaccctgatcctgccgtgtaccagctgcgggatagcaagagcagcgacaagagcgtgtgtctgttcaccgacttcgacagccagaccaacgtgtcccagagcaaggactccgacgtgtacatcaccgataagtgcgtgctggacatgcggagcatggacttcaagagcaactccgccgtggcctggtccaacaagtccgatttcgcctgcgccaacgccttcaacaacagcattatccccgaggacacattcttcccaagccccgagagcagctgcgacgtgaagctggtggaaaagagcttcgagacagacaccaacctgaacttccagaacctgagcgtgatcggcttcagaatcctgctgctgaaagtggccggctttaacctgctgatgaccctgcggctgtggtccagctaa

SEQ ID NO: 36517 - DNA, 2301 bp, synthetic construct
  source 1..2301: mol_type = other DNA
atggccttaccagtgaccgccttgctcctgccgctggccttgctgctccacgccgccaggccggacatccagatgacacagagccctagcagcctgtctgccagcgtgggagacagagtgaccatcacatgcaagagcagccagagcctgctggactccgatggcaagacctacctgaactggtatcagcagaagcccggcaaggcccctaagctgctgatctacctggtgtccaagctggatagcggcgtgcccagcagattttctggcagcggcagcggaaccgacttcaccctgacaatatccagcctccagcctgaggacttcgccacctactactgcttccaaggcacccactttccattcaccttcggccagggcaccaaggtggaaatcaaaagactcgaggacctgaagaacgtgttcccacctgaggtggccgtgttcgagcctagcgaggccgagatcagccacacccagaaagccaccctcgtgtgcctggctaccggcttctaccccgaccatgtggaactgtcttggtgggtcaacggcaaagaggtgcacagcggcgtgtgtaccgacccccagccactgaaagaacagcccgccctgaacgacagccggtactgcctgagcagcagactgagagtgtccgccaccttctggcagaacccccggaaccacttcagatgccaggtgcagttctacggcctgagcgagaacgacgagtggacccaggacagagccaagcccgtgacccagatcgtgtctgccgaagcctggggcagagccgattgcggctttaccagcgagagctaccagcagggcgtgctgagcgccaccatcctgtacgagatcctgctgggcaaggccaccctgtacgccgtgctggtgtctgccctggtgctgatggctatggtcaagcggaaggacagccggggaagggccaagcgatctggatctggagcaacaaacttctcactactcaaacaagcaggtgacgtggaggagaatcccgggcctactagtaccatggactggatttggcgcatccttttccttgtcggcgctgctaccggcgcccattccgggcccgaggtgcagctggttgaatctggcggaggatctgttcaggctggcggctctctgagactgtcttgtgccgccagcggctacacctacagcatcaactgcatgggctggttcagacaggcccctggcaaagagagagaaggcgttgccgccatctctaccggcggaggcagaaccgattaccgggattctgtgaagggcagattcaccatcagccaggacaacgccaagaacaccgtgtacctccagatgaacagcctgaagcctgaggacaccgccatgtactactgtgccggcaagaccacctatcctggctacggatgtggcctgggcagaagcgcctacaattattggggccagggcacccaagtgaccgtgtcatctggatccggcggcggaggatctggcggaggcggatctgggggcggaggctctttcgaagaagtgcagctggttgaatcaggcggaggactggttcagcctggcggatctctgagactgtcttgtgccgccagcggctacaccttcaccagctactggatgaactgggtccgacaggcccctggcaaaggactggaatgggtcggaatgatcgaccccagcgacagcgagacacactacaaccacatcttcaaggaccgcttcaccatcagcgccgacaccagcaagaataccgcctacctccagatgaactccctgagagccgaggacaccgccgtgtactactgcgccagaaacctgtatctgttcggccagggaaccctggtcacagtgtcatctacgcgtatccagaaccctgatcctgccgtgtaccagctgcgggatagcaagagcagcgacaagagcgtgtgtctgttcaccgacttcgacagccagaccaacgtgtcccagagcaaggactccgacgtgtacatcaccgataagtgcgtgctggacatgcggagcatggacttcaagagcaactccgccgtggcctggtccaacaagtccgatttcgcctgcgccaacgccttcaacaacagcattatccccgaggacacattcttcccaagccccgagagcagctgcgacgtgaagctggtggaaaagagcttcgagacagacaccaacctgaacttccagaacctgagcgtgatcggcttcagaatcctgctgctgaaagtggccggctttaacctgctgatgaccctgcggctgtggtccagctaa

SEQ ID NO: 36518 - DNA, 1857 bp, synthetic construct
  source 1..1857: mol_type = other DNA
atggccttaccagtgaccgccttgctcctgccgctggccttgctgctccacgccgccaggccggacatccagatgacacagagccctagcagcctgtctgccagcgtgggagacagagtgaccatcacatgcaagagcagccagagcctgctggactccgatggcaagacctacctgaactggtatcagcagaagcccggcaaggcccctaagctgctgatctacctggtgtccaagctggatagcggcgtgcccagcagattttctggcagcggcagcggaaccgacttcaccctgacaatatccagcctccagcctgaggacttcgccacctactactgcttccaaggcacccactttccattcaccttcggccagggcaccaaggtggaaatcaaaagactcgaggacctgaagcacgtgttcccacctgaggtggccgtgttcgagcctagcgacgccgagatctggcacacccagaaagccaccctcgtgtgcctggctaccggcttctaccccgaccatgtggaactgtcttggtgggtcaacggcaaagaggtgcacagcggcgtgtctaccgacccccagccactgaaagaacagcccgccctgaacgacagccggtactgcctgagcagcagactgagagtgtccgccaccttctggcagaacccccggaaccacttcagatgccaggtgcagttctacggcctgagcgagaacgacgagtggacccaggacagagccaagcccgtgacccagatcgtgtctgccgaagcctggggcagagccgattgcggctttaccagcgagagctaccagcagggcgtgctgagcgccaccatcctgtacgagatcctgctgggcaaggccaccctgtacgccgtgctggtgtctgccctggtgctgatggctatggtcaagcggaaggacagccggggaagggccaagcgatctggatctggagcaacaaacttctcactactcaaacaagcaggtgacgtggaggagaatcccgggcctactagtatggactggatttggcgcatccttttccttgtcggcgctgctaccggcgcgcattccttcgaagaagtgcagctggttgaatcaggcggaggactggttcagcctggcggatctctgagactgtcttgtgccgccagcggctacaccttcaccagctactggatgaactgggtccgacaggcccctggcaaaggactggaatgggtcggaatgatcgaccccagcgacagcgagacacactacaaccacatcttcaaggaccgcttcaccatcagcgccgacaccagcaagaataccgcctacctccagatgaactccctgagagccgaggacaccgccgtgtactactgcgccagaaacctgtatctgttcggccagggaaccctggtcacagtgtcatctacgcgtatccagaaccctgatcctgccgtgtaccagctgcgggatagcaagagcagcgacaagagcgtgtgtctgttcaccgacttcgacagccagaccaacgtgtcccagagcaaggactccgacgtgtacatcaccgataagaccgtgctggacatgcggagcatggacttcaagagcaactccgccgtggcctggtccagcaagtccgatttcgcctgcgccaacgccttcaacaacagcattatccccgaggacacattcttcccaagccccgagatggcctgcgacgtgaagctggtggaaaagagcttcgagacagacaccaacctgaacttccagaacctgctcgtgatctggctgagaatcctgctgctgaaagtggccggctttaacctgctgatgaccctgcggctgtggtccagc

SEQ ID NO: 36519 - DNA, 1857 bp, synthetic construct
  source 1..1857: mol_type = other DNA
atggccttaccagtgaccgccttgctcctgccgctggccttgctgctccacgccgccaggccggacatccagatgacacagagccctagcagcctgtctgccagcgtgggagacagagtgaccatcacatgcaagagcagccagagcctgctggactccgatggcaagacctacctgaactggtatcagcagaagcccggcaaggcccctaagctgctgatctacctggtgtccaagctggatagcggcgtgcccagcagattttctggcagcggcagcggaaccgacttcaccctgacaatatccagcctccagcctgaggacttcgccacctactactgcttccaaggcacccactttccattcaccttcggccagggcaccaaggtggaaatcaaaagactcgaggacctgaagcacgtgttcccacctgaggtggccgtgttcgagcctagcgacgccgagatctggcacacccagaaagccaccctcgtgtgcctggctaccggcttctaccccgaccatgtggaactgtcttggtgggtcaacggcaaagaggtgcacagcggcgtgtctaccgacccccagccactgaaagaacagcccgccctgaacgacagccggtactgcctgagcagcagactgagagtgtccgccaccttctggcagaacccccggaaccacttcagatgccaggtgcagttctacggcctgagcgagaacgacgagtggacccaggacagagccaagcccgtgacccagatcgtgtctgccgaagcctggggcagagccgattgcggctttaccagcgagagctaccagcagggcgtgctgagcgccaccatcctgtacgagatcctgctgggcaaggccaccctgtacgccgtgctggtgtctgccctggtgctgatggctatggtcaagcggaaggacagccggggaagggccaagcgatctggatctggagcaacaaacttctcactactcaaacaagcaggtgacgtggaggagaatcccgggcctactagtatggactggatttggcgcatccttttccttgtcggcgctgctaccggcgcgcattccttcgaagaagtgcagctggttgaatcaggcggaggactggttcagcctggcggatctctgagactgtcttgtgccgccagcggctacaccttcaccagctactggatgaactgggtccgacaggcccctggcaaaggactggaatgggtcggaatgatcgaccccagcgacagcgagacacactacaaccacatcttcaaggaccgcttcaccatcagcgccgacaccagcaagaataccgcctacctccagatgaactccctgagagccgaggacaccgccgtgtactactgcgccagaaacctgtatctgttcggccagggaaccctggtcacagtgtcatctacgcgtatccagaaccctgatcctgccgtgtaccagctgcgggatagcaagagcagcgacaagagcgtgtgtctgttcaccgacttcgacagccagaccaacgtgtcccagagcaaggactccgacgtgtacatcaccgataagaccgtgctggacatgcggagcatggacttcaagagcaactccgccgtggcctggtccaccaagtccgatttcgcctgcgccaacgccttcaacaacagcattatccccgaggacacattcttcccaagccccgaggtggtgtgcgacgtgaagctggtggaaaagagcttcgagacagacaccaacctgaacttccagaacctggtggtgatcggcgccagaatcctgctgctgaaagtggccggctttaacctgctgatgaccctgcggctgtggtccagc

SEQ ID NO: 36520 - DNA, 1857 bp, synthetic construct
  source 1..1857: mol_type = other DNA
atggccttaccagtgaccgccttgctcctgccgctggccttgctgctccacgccgccaggccggacatccagatgacacagagccctagcagcctgtctgccagcgtgggagacagagtgaccatcacatgcaagagcagccagagcctgctggactccgatggcaagacctacctgaactggtatcagcagaagcccggcaaggcccctaagctgctgatctacctggtgtccaagctggatagcggcgtgcccagcagattttctggcagcggcagcggaaccgacttcaccctgacaatatccagcctccagcctgaggacttcgccacctactactgcttccaaggcacccactttccattcaccttcggccagggcaccaaggtggaaatcaaaagactcgaggacctgaagaacgtgttcccacctgaggtggccgtgttcgagcctagcaaggccgagatcagcagaacccagaaagccaccctcgtgtgcctggctaccggcttctaccctcctcatgtggaactgtcttggtgggtcaacggcaaagaggtgcacgacggcgtgtgtaccgacccccagccactgaaagaacagcccgccctgaacgacagccggtactgcctgagcagcagactgagagtgtccgccaccttctggcagaacccccggaaccacttcagatgccaggtgcagttctacggcctgagcgagaacgacgagtggacccaggacagagccaagcccgtgacccagatcgtgtctgccgaagcctggggcagagccgattgcggctttaccagcgagagctaccagcagggcgtgctgagcgccaccatcctgtacgagatcctgctgggcaaggccaccctgtacgccgtgctggtgtctgccctggtgctgatggctatggtcaagcggaaggacagccggggaagggccaagcgatctggatctggagcaacaaacttctcactactcaaacaagcaggtgacgtggaggagaatcccgggcctactagtatggactggatttggcgcatccttttccttgtcggcgctgctaccggcgcgcattccttcgaagaagtgcagctggttgaatcaggcggaggactggttcagcctggcggatctctgagactgtcttgtgccgccagcggctacaccttcaccagctactggatgaactgggtccgacaggcccctggcaaaggactggaatgggtcggaatgatcgaccccagcgacagcgagacacactacaaccacatcttcaaggaccgcttcaccatcagcgccgacaccagcaagaataccgcctacctccagatgaactccctgagagccgaggacaccgccgtgtactactgcgccagaaacctgtatctgttcggccagggaaccctggtcacagtgtcatctacgcgtatccagaaccctgatcctgccgtgtaccagctgcgggatagcaagagcagcgacaagttcgtgtgtctgttcaccgacttcgacagccagatcaacgtgtcccagagcaaggactccgacgtgtacatcaccgataagtgcgtgctggacatgcggagcatggacttcaagagcaactccgccgtggcctggtccaacaagtccgatttcacctgcgccaacgccttcaacaacagcattatccccgaggacacattcttcccaagccccgagagcagctgcgacgtgaagctggtggaaaagagcttcgagacagacaccaacctgaacttccagaacctgagcgtgatcggcttcagaatcctgctgctgaaagtggccggctttaacctgctgatgaccctgcggctgtggtccagc

SEQ ID NO: 36521 - DNA, 2283 bp, synthetic construct
  source 1..2283: mol_type = other DNA
atggccttaccagtgaccgccttgctcctgccgctggccttgctgctccacgccgccaggccggacatccagatgacacagagccctagcagcctgtctgccagcgtgggagacagagtgaccatcacatgcaagagcagccagagcctgctggactccgatggcaagacctacctgaactggtatcagcagaagcccggcaaggcccctaagctgctgatctacctggtgtccaagctggatagcggcgtgcccagcagattttctggcagcggcagcggaaccgacttcaccctgacaatatccagcctccagcctgaggacttcgccacctactactgcttccaaggcacccactttccattcaccttcggccagggcaccaaggtggaaatcaaaagactcgaggacctgaagaacgtgttcccacctgaggtggccgtgttcgagcctagcgaggccgagatcagccacacccagaaagccaccctcgtgtgcctggctaccggcttctaccccgaccatgtggaactgtcttggtgggtcaacggcaaagaggtgcacagcggcgtgtgtaccgacccccagccactgaaagaacagcccgccctgaacgacagccggtactgcctgagcagcagactgagagtgtccgccaccttctggcagaacccccggaaccacttcagatgccaggtgcagttctacggcctgagcgagaacgacgagtggacccaggacagagccaagcccgtgacccagatcgtgtctgccgaagcctggggcagagccgattgcggctttaccagcgagagctaccagcagggcgtgctgagcgccaccatcctgtacgagatcctgctgggcaaggccaccctgtacgccgtgctggtgtctgccctggtgctgatggctatggtcaagcggaaggacagccggggaagggccaagcgatctggatctggagcaacaaacttctcactactcaaacaagcaggtgacgtggaggagaatcccgggcctactagtaccatggactggatttggcgcatccttttccttgtcggcgctgctaccggcgcccattccgggccccaggtgcagctccaagaaagcggacccggactggttaagccctctcagaccctgtctctgacctgcacagttagcggagccagcattaccacaggcgagtattattggaattggtttcggcagccaccaggcaaggggcttgagtggatgggtgctattgctgcctctggcagcaccacctactctcccagctttgagagcagaacctccatcagccgggacacctccaaaaaccagttctctctgaagctgtcctccgtgaccgctgctgacaccgccgtctattattgtggccggtctttcggcgtggcagctgtgaccacaggacagaacagaggccagggaacacttgtgaccgtgtcctctggatccggcggcggaggatctggcggaggcggatctgggggcggaggctctttcgaagaagtgcagctggttgaatcaggcggaggactggttcagcctggcggatctctgagactgtcttgtgccgccagcggctacaccttcaccagctactggatgaactgggtccgacaggcccctggcaaaggactggaatgggtcggaatgatcgaccccagcgacagcgagacacactacaaccacatcttcaaggaccgcttcaccatcagcgccgacaccagcaagaataccgcctacctccagatgaactccctgagagccgaggacaccgccgtgtactactgcgccagaaacctgtatctgttcggccagggaaccctggtcacagtgtcatctacgcgtatccagaaccctgatcctgccgtgtaccagctgcgggatagcaagagcagcgacaagagcgtgtgtctgttcaccgacttcgacagccagaccaacgtgtcccagagcaaggactccgacgtgtacatcaccgataagtgcgtgctggacatgcggagcatggacttcaagagcaactccgccgtggcctggtccaacaagtccgatttcgcctgcgccaacgccttcaacaacagcattatccccgaggacacattcttcccaagccccgagagcagctgcgacgtgaagctggtggaaaagagcttcgagacagacaccaacctgaacttccagaacctgagcgtgatcggcttcagaatcctgctgctgaaagtggccggctttaacctgctgatgaccctgcggctgtggtccagc

SEQ ID NO: 36522 - DNA, 2706 bp, synthetic construct
  source 1..2706: mol_type = other DNA
atggccttaccagtgaccgccttgctcctgccgctggccttgctgctccacgccgccaggccgcaggttcagctgcaagagtctggccctggcctggtcaagcctagccaaacactgagcctgacctgtaccgtgtctggcggctctatcaccaccggcgagttctactggaactggttcagacagcctcctggcaaaggactggaatggatgggagccattgccgccagcggcagcacaacatacagccctagcttcgagagccggaccagcatcagcagagacaccagcaagaatcagttcagcctgaagctgagcagcgtgacagccgccgatacagccgtgtattactgcggcagatcctttggagtggccgccgtgacaaccggccagaatagaggacagggcaccctggtcacagtgtctagcggtaccggcggaggcggatctggcggcggaggtagcggtggcggaggatctgaattcgacatccagatgacacagagccctagcagcctgtctgccagcgtgggagacagagtgaccatcacatgcaagagcagccagagcctgctggactccgatggcaagacctacctgaactggtatcagcagaagcccggcaaggcccctaagctgctgatctacctggtgtccaagctggatagcggcgtgcccagcagattttctggcagcggcagcggaaccgacttcaccctgacaatatccagcctccagcctgaggacttcgccacctactactgcttccaaggcacccactttccattcaccttcggccagggcaccaaggtggaaatcaaaagactcgagatccagaaccctgatcctgccgtgtaccagctgcgggatagcaagagcagcgacaagagcgtgtgtctgttcaccgacttcgacagccagaccaacgtgtcccagagcaaggactccgacgtgtacatcaccgataagtgcgtgctggacatgcggagcatggacttcaagagcaactccgccgtggcctggtccaacaagtccgatttcgcctgcgccaacgccttcaacaacagcattatccccgaggacacattcttcccaagcagcgacgtgccctgcgacgtgaagctggtggaaaagagcttcgagacagacaccaacctgaacttccagaacctgagcgtgatcggcttcagaatcctgctgctgaaagtggccggctttaacctgctgatgaccctgcggctgtggtccagccgcgccaagagaagcggatctggcgtgaagcagaccctgaatttcgacctgctgaagctggctggcgacgtggaatccaacccaggccctactagtaccatggactggatttggcgcatccttttccttgtcggcgctgctaccggcgcccattccgggcccgaagtgcaactggttgaatccggtggcggcctggtgcaacccggcggatctctcagacttagctgtgccgcctccggcagaaccttcacaatgggatggtacaggcaggctccagggaaagagagagagttcgtcgccgccatctctctgtctcccacactggcctactacgccgactctgtgaaaggccggttcaccatctccagagataatagcaagaacaccgtggtgctgcaaatgaactctctgagagccgaggatacagccctgtactattgtgccgctgaccggaagtccgtgatgagcatcagacccgattactggggacagggcacactggtcacagtgtctagtggatccggcggcggaggatctggcggaggcggatctgggggcggaggctctttcgaagaagtgcagctggttgaatcaggcggaggactggttcagcctggcggatctctgagactgtcttgtgccgccagcggctacaccttcaccagctactggatgaactgggtccgacaggcccctggcaaaggactggaatgggtcggaatgatcgaccccagcgacagcgagacacactacaaccacatcttcaaggaccgcttcaccatcagcgccgacaccagcaagaataccgcctacctccagatgaactccctgagagccgaggacaccgccgtgtactactgcgccagaaacctgtatctgttcggccagggaaccctggtcacagtgtcatctacgcgtgaggacctgaagaacgtgttcccacctgaggtggccgtgttcgagcctagcaaggccgagatcgcccacacccagaaagccaccctcgtgtgcctggctaccggcttctaccccgaccatgtggaactgtcttggtgggtcaacggcaaagaggtgcacagcggcgtgtgtaccgacccccagccactgaaagaacagcccgccctgaacgacagccggtactgcctgagcagcagactgagagtgtccgccaccttctggcagaacccccggaaccacttcagatgccaggtgcagttctacggcctgagcgagaacgacgagtggacccaggacagagccaagcccgtgacccagatcgtgtctgccgaagcctggggcagagccgattgcggcatcaccagcgccagctaccaccagggcgtgctgagcgccaccatcctgtacgagatcctgctgggcaaggccaccctgtacgccgtgctggtgtctgccctggtgctgatggctatggtcaagcggaaggacagccgggga

SEQ ID NO: 36523 - DNA, 2295 bp, synthetic construct
  source 1..2295: mol_type = other DNA
atggccttaccagtgaccgccttgctcctgccgctggccttgctgctccacgccgccaggccgcaggttcagctgcaagagtctggccctggcctggtcaagcctagccaaacactgagcctgacctgtaccgtgtctggcggctctatcaccaccggcgagttctactggaactggttcagacagcctcctggcaaaggactggaatggatgggagccattgccgccagcggcagcacaacatacagccctagcttcgagagccggaccagcatcagcagagacaccagcaagaatcagttcagcctgaagctgagcagcgtgacagccgccgatacagccgtgtattactgcggcagatcctttggagtggccgccgtgacaaccggccagaatagaggacagggcaccctggtcacagtgtctagcggtaccggcggaggcggatctggcggcggaggtagcggtggcggaggatctgaattcgacatccagatgacacagagccctagcagcctgtctgccagcgtgggagacagagtgaccatcacatgcaagagcagccagagcctgctggactccgatggcaagacctacctgaactggtatcagcagaagcccggcaaggcccctaagctgctgatctacctggtgtccaagctggatagcggcgtgcccagcagattttctggcagcggcagcggaaccgacttcaccctgacaatatccagcctccagcctgaggacttcgccacctactactgcttccaaggcacccactttccattcaccttcggccagggcaccaaggtggaaatcaaaagactcgagatccagaaccctgatcctgccgtgtaccagctgcgggatagcaagagcagcgacaagagcgtgtgtctgttcaccgacttcgacagccagaccaacgtgtcccagagcaaggactccgacgtgtacatcaccgataagtgcgtgctggacatgcggagcatggacttcaagagcaactccgccgtggcctggtccaacaagtccgatttcgcctgcgccaacgccttcaacaacagcattatccccgaggacacattcttcccaagcagcgacgtgccctgcgacgtgaagctggtggaaaagagcttcgagacagacaccaacctgaacttccagaacctgagcgtgatcggcttcagaatcctgctgctgaaagtggccggctttaacctgctgatgaccctgcggctgtggtccagccgcgccaagagaagcggatctggcgtgaagcagaccctgaatttcgacctgctgaagctggctggcgacgtggaatccaacccaggccctactagtaccatggactggatttggcgcatccttttccttgtcggcgctgctaccggcgcccattccttcgaagaagtgcagctggttgaatcaggcggaggactggttcagcctggcggatctctgagactgtcttgtgccgccagcggctacaccttcaccagctactggatgaactgggtccgacaggcccctggcaaaggactggaatgggtcggaatgatcgaccccagcgacagcgagacacactacaaccacatcttcaaggaccgcttcaccatcagcgccgacaccagcaagaataccgcctacctccagatgaactccctgagagccgaggacaccgccgtgtactactgcgccagaaacctgtatctgttcggccagggaaccctggtcacagtgtcatctacgcgtgaggacctgaagaacgtgttcccacctgaggtggccgtgttcgagcctagcaaggccgagatcgcccacacccagaaagccaccctcgtgtgcctggctaccggcttctaccccgaccatgtggaactgtcttggtgggtcaacggcaaagaggtgcacagcggcgtgtgtaccgacccccagccactgaaagaacagcccgccctgaacgacagccggtactgcctgagcagcagactgagagtgtccgccaccttctggcagaacccccggaaccacttcagatgccaggtgcagttctacggcctgagcgagaacgacgagtggacccaggacagagccaagcccgtgacccagatcgtgtctgccgaagcctggggcagagccgattgcggcatcaccagcgccagctaccaccagggcgtgctgagcgccaccatcctgtacgagatcctgctgggcaaggccaccctgtacgccgtgctggtgtctgccctggtgctgatggctatggtcaagcggaaggacagccgggga

SEQ ID NO: 36524 - DNA, 2694 bp, synthetic construct
  source 1..2694: mol_type = other DNA
atggccttaccagtgaccgccttgctcctgccgctggccttgctgctccacgccgccaggccggaagtgcagctggttgaatctggcggaggactggttcaggctggcggatctctgagactgtcttgtgccgccagcggcagaacctttagcatgggctggtttagacaggcccctggcaaagagagagagttcgtcgccgccatcacatactctggcggcagcccttactacgccgactctgtgaagggcagattcaccatcagccgggacaacgccaagaacaccgtgtacctccagatgaacagcctgaagcctgaggacaccgccgtgtactactgcgccgccaatccaacatacggcagcgactggaacgccgagaattggggccagggaacccaagtgacagtgtctagcggtaccggcggaggcggatctggcggcggaggtagcggtggcggaggatctgaattcgacatccagatgacacagagccctagcagcctgtctgccagcgtgggagacagagtgaccatcacatgcaagagcagccagagcctgctggactccgatggcaagacctacctgaactggtatcagcagaagcccggcaaggcccctaagctgctgatctacctggtgtccaagctggatagcggcgtgcccagcagattttctggcagcggcagcggaaccgacttcaccctgacaatatccagcctccagcctgaggacttcgccacctactactgcttccaaggcacccactttccattcaccttcggccagggcaccaaggtggaaatcaaaagactcgaggacctgaagaacgtgttcccacctgaggtggccgtgttcgagcctagcgaggccgagatcagccacacccagaaagccaccctcgtgtgcctggctaccggcttctaccccgaccatgtggaactgtcttggtgggtcaacggcaaagaggtgcacagcggcgtgtgtaccgacccccagccactgaaagaacagcccgccctgaacgacagccggtactgcctgagcagcagactgagagtgtccgccaccttctggcagaacccccggaaccacttcagatgccaggtgcagttctacggcctgagcgagaacgacgagtggacccaggacagagccaagcccgtgacccagatcgtgtctgccgaagcctggggcagagccgattgcggctttaccagcgagagctaccagcagggcgtgctgagcgccaccatcctgtacgagatcctgctgggcaaggccaccctgtacgccgtgctggtgtctgccctggtgctgatggctatggtcaagcggaaggacagccggggaagggccaagcgatctggatctggagcaacaaacttctcactactcaaacaagcaggtgacgtggaggagaatcccgggcctactagtaccatggactggatttggcgcatccttttccttgtcggcgctgctaccggcgcccattccgggccccaggtgcagctccaagaaagcggacccggactggttaagccctctcagaccctgtctctgacctgcacagttagcggagccagcattaccacaggcgagtattattggaattggtttcggcagccaccaggcaaggggcttgagtggatgggtgctattgctgcctctggcagcaccacctactctcccagctttgagagcagaacctccatcagccgggacacctccaaaaaccagttctctctgaagctgtcctccgtgaccgctgctgacaccgccgtctattattgtggccggtctttcggcgtggcagctgtgaccacaggacagaacagaggccagggaacacttgtgaccgtgtcctctggatccggcggcggaggatctggcggaggcggatctgggggcggaggctctttcgaagaagtgcagctggttgaatcaggcggaggactggttcagcctggcggatctctgagactgtcttgtgccgccagcggctacaccttcaccagctactggatgaactgggtccgacaggcccctggcaaaggactggaatgggtcggaatgatcgaccccagcgacagcgagacacactacaaccacatcttcaaggaccgcttcaccatcagcgccgacaccagcaagaataccgcctacctccagatgaactccctgagagccgaggacaccgccgtgtactactgcgccagaaacctgtatctgttcggccagggaaccctggtcacagtgtcatctacgcgtatccagaaccctgatcctgccgtgtaccagctgcgggatagcaagagcagcgacaagagcgtgtgtctgttcaccgacttcgacagccagaccaacgtgtcccagagcaaggactccgacgtgtacatcaccgataagtgcgtgctggacatgcggagcatggacttcaagagcaactccgccgtggcctggtccaacaagtccgatttcgcctgcgccaacgccttcaacaacagcattatccccgaggacacattcttcccaagccccgagagcagctgcgacgtgaagctggtggaaaagagcttcgagacagacaccaacctgaacttccagaacctgagcgtgatcggcttcagaatcctgctgctgaaagtggccggctttaacctgctgatgaccctgcggctgtggtccagc

SEQ ID NO: 36525 - DNA, 2715 bp, synthetic construct
  source 1..2715: mol_type = other DNA
atggccttaccagtgaccgccttgctcctgccgctggccttgctgctccacgccgccaggccggaagtgcagctggttgaatctggcggaggactggttcaggctggcggatctctgagactgtcttgtgccgccagcggcagaacctttagcatgggctggtttagacaggcccctggcaaagagagagagttcgtcgccgccatcacatactctggcggcagcccttactacgccgactctgtgaagggcagattcaccatcagccgggacaacgccaagaacaccgtgtacctccagatgaacagcctgaagcctgaggacaccgccgtgtactactgcgccgccaatccaacatacggcagcgactggaacgccgagaattggggccagggaacccaagtgacagtgtctagcggtaccggcggaggcggatctggcggcggaggtagcggtggcggaggatctgaattcgacatccagatgacacagagccctagcagcctgtctgccagcgtgggagacagagtgaccatcacatgcaagagcagccagagcctgctggactccgatggcaagacctacctgaactggtatcagcagaagcccggcaaggcccctaagctgctgatctacctggtgtccaagctggatagcggcgtgcccagcagattttctggcagcggcagcggaaccgacttcaccctgacaatatccagcctccagcctgaggacttcgccacctactactgcttccaaggcacccactttccattcaccttcggccagggcaccaaggtggaaatcaaaagactcgagatccagaaccctgatcctgccgtgtaccagctgcgggatagcaagagcagcgacaagagcgtgtgtctgttcaccgacttcgacagccagaccaacgtgtcccagagcaaggactccgacgtgtacatcaccgataagtgcgtgctggacatgcggagcatggacttcaagagcaactccgccgtggcctggtccaacaagtccgatttcgcctgcgccaacgccttcaacaacagcattatccccgaggacacattcttcccaagcagcgacgtgccctgcgacgtgaagctggtggaaaagagcttcgagacagacaccaacctgaacttccagaacctgagcgtgatcggcttcagaatcctgctgctgaaagtggccggctttaacctgctgatgaccctgcggctgtggtccagccgcgccaagagaagcggatctggcgtgaagcagaccctgaatttcgacctgctgaagctggctggcgacgtggaatccaacccaggccctactagtaccatggactggatttggcgcatccttttccttgtcggcgctgctaccggcgcccattccgggccccaggtgcagctggttgaatctggcggaggactggttcagcctggcggatctctgagactgtcttgtgccgccagcggcaacatcaacagcagaaactgcatgggctggttcagacaggcccctggcaagggaagagaaggcgtggcagctatcggccaagtgaccggcagaacctactacgtggacagcgtgaagggcagattcaccatcagcctggacaacagcaagaacaccctgtacctccagatgaacagcctgagagccgaggacaccgccgtgtactattgtgctgctgcccctggctgtctgctgtctgcacttagaagcgccgactacagaaactggggccagggcacactggtcaccgtttcttctggatccggcggcggaggatctggcggaggcggatctgggggcggaggctctttcgaagaagtgcagctggttgaatcaggcggaggactggttcagcctggcggatctctgagactgtcttgtgccgccagcggctacaccttcaccagctactggatgaactgggtccgacaggcccctggcaaaggactggaatgggtcggaatgatcgaccccagcgacagcgagacacactacaaccacatcttcaaggaccgcttcaccatcagcgccgacaccagcaagaataccgcctacctccagatgaactccctgagagccgaggacaccgccgtgtactactgcgccagaaacctgtatctgttcggccagggaaccctggtcacagtgtcatctacgcgtgaggacctgaagaacgtgttcccacctgaggtggccgtgttcgagcctagcaaggccgagatcgcccacacccagaaagccaccctcgtgtgcctggctaccggcttctaccccgaccatgtggaactgtcttggtgggtcaacggcaaagaggtgcacagcggcgtgtgtaccgacccccagccactgaaagaacagcccgccctgaacgacagccggtactgcctgagcagcagactgagagtgtccgccaccttctggcagaacccccggaaccacttcagatgccaggtgcagttctacggcctgagcgagaacgacgagtggacccaggacagagccaagcccgtgacccagatcgtgtctgccgaagcctggggcagagccgattgcggcatcaccagcgccagctaccaccagggcgtgctgagcgccaccatcctgtacgagatcctgctgggcaaggccaccctgtacgccgtgctggtgtctgccctggtgctgatggctatggtcaagcggaaggacagccgggga

SEQ ID NO: 36526 - DNA, 2703 bp, synthetic construct
  source 1..2703: mol_type = other DNA
atggccttaccagtgaccgccttgctcctgccgctggccttgctgctccacgccgccaggccggaagtgcagctggttgaatctggcggaggactggttcaggctggcggatctctgagactgtcttgtgccgccagcggcagaacctttagcatgggctggtttagacaggcccctggcaaagagagagagttcgtcgccgccatcacatactctggcggcagcccttactacgccgactctgtgaagggcagattcaccatcagccgggacaacgccaagaacaccgtgtacctccagatgaacagcctgaagcctgaggacaccgccgtgtactactgcgccgccaatccaacatacggcagcgactggaacgccgagaattggggccagggaacccaagtgacagtgtctagcggtaccggcggaggcggatctggcggcggaggtagcggtggcggaggatctgaattcgacatccagatgacacagagccctagcagcctgtctgccagcgtgggagacagagtgaccatcacatgcaagagcagccagagcctgctggactccgatggcaagacctacctgaactggtatcagcagaagcccggcaaggcccctaagctgctgatctacctggtgtccaagctggatagcggcgtgcccagcagattttctggcagcggcagcggaaccgacttcaccctgacaatatccagcctccagcctgaggacttcgccacctactactgcttccaaggcacccactttccattcaccttcggccagggcaccaaggtggaaatcaaaagactcgaggacctgaagaacgtgttcccacctgaggtggccgtgttcgagcctagcgaggccgagatcagccacacccagaaagccaccctcgtgtgcctggctaccggcttctaccccgaccatgtggaactgtcttggtgggtcaacggcaaagaggtgcacagcggcgtgtgtaccgacccccagccactgaaagaacagcccgccctgaacgacagccggtactgcctgagcagcagactgagagtgtccgccaccttctggcagaacccccggaaccacttcagatgccaggtgcagttctacggcctgagcgagaacgacgagtggacccaggacagagccaagcccgtgacccagatcgtgtctgccgaagcctggggcagagccgattgcggctttaccagcgagagctaccagcagggcgtgctgagcgccaccatcctgtacgagatcctgctgggcaaggccaccctgtacgccgtgctggtgtctgccctggtgctgatggctatggtcaagcggaaggacagccggggaagggccaagcgatctggatctggagcaacaaacttctcactactcaaacaagcaggtgacgtggaggagaatcccgggcctactagtaccatggactggatttggcgcatccttttccttgtcggcgctgctaccggcgcccattccgggccccaggtgcagctggttgaatctggcggaggactggttcagcctggcggatctctgagactgtcttgtgccgccagcggcaacatcaacagcagaaactgcatgggctggttcagacaggcccctggcaagggaagagaaggcgtggcagctatcggccaagtgaccggcagaacctactacgtggacagcgtgaagggcagattcaccatcagcctggacaacagcaagaacaccctgtacctccagatgaacagcctgagagccgaggacaccgccgtgtactattgtgctgctgcccctggctgtctgctgtctgcacttagaagcgccgactacagaaactggggccagggcacactggtcaccgtttcttctggatccggcggcggaggatctggcggaggcggatctgggggcggaggctctttcgaagaagtgcagctggttgaatcaggcggaggactggttcagcctggcggatctctgagactgtcttgtgccgccagcggctacaccttcaccagctactggatgaactgggtccgacaggcccctggcaaaggactggaatgggtcggaatgatcgaccccagcgacagcgagacacactacaaccacatcttcaaggaccgcttcaccatcagcgccgacaccagcaagaataccgcctacctccagatgaactccctgagagccgaggacaccgccgtgtactactgcgccagaaacctgtatctgttcggccagggaaccctggtcacagtgtcatctacgcgtatccagaaccctgatcctgccgtgtaccagctgcgggatagcaagagcagcgacaagagcgtgtgtctgttcaccgacttcgacagccagaccaacgtgtcccagagcaaggactccgacgtgtacatcaccgataagtgcgtgctggacatgcggagcatggacttcaagagcaactccgccgtggcctggtccaacaagtccgatttcgcctgcgccaacgccttcaacaacagcattatccccgaggacacattcttcccaagccccgagagcagctgcgacgtgaagctggtggaaaagagcttcgagacagacaccaacctgaacttccagaacctgagcgtgatcggcttcagaatcctgctgctgaaagtggccggctttaacctgctgatgaccctgcggctgtggtccagc

SEQ ID NO: 36527 - DNA, 2703 bp, synthetic construct
  source 1..2703: mol_type = other DNA
atggccttaccagtgaccgccttgctcctgccgctggccttgctgctccacgccgccaggccggaagtgcaactggttgaatccggtggcggcctggtgcaagcaggcggatctctcagacttagctgtgccgcctccggcagaaccttcacaatgggatggtttaggcaggctccagggaaagagagagagttcgtcgccgccatctctctgtctcccacactggcctactacgccgactctgtgaaaggccggttcaccatctccagagataatgccaagaacaccgtggtgctgcaaatgaactctctgaaacccgaggatacagccctgtactattgtgccgctgaccggaagtccgtgatgagcatcagacccgattactggggacagggcacacaagtcacagtgtcctctggtaccggcggaggcggatctggcggcggaggtagcggtggcggaggatctgaattcgacatccagatgacacagagccctagcagcctgtctgccagcgtgggagacagagtgaccatcacatgcaagagcagccagagcctgctggactccgatggcaagacctacctgaactggtatcagcagaagcccggcaaggcccctaagctgctgatctacctggtgtccaagctggatagcggcgtgcccagcagattttctggcagcggcagcggaaccgacttcaccctgacaatatccagcctccagcctgaggacttcgccacctactactgcttccaaggcacccactttccattcaccttcggccagggcaccaaggtggaaatcaaaagactcgaggacctgaagaacgtgttcccacctgaggtggccgtgttcgagcctagcgaggccgagatcagccacacccagaaagccaccctcgtgtgcctggctaccggcttctaccccgaccatgtggaactgtcttggtgggtcaacggcaaagaggtgcacagcggcgtgtgtaccgacccccagccactgaaagaacagcccgccctgaacgacagccggtactgcctgagcagcagactgagagtgtccgccaccttctggcagaacccccggaaccacttcagatgccaggtgcagttctacggcctgagcgagaacgacgagtggacccaggacagagccaagcccgtgacccagatcgtgtctgccgaagcctggggcagagccgattgcggctttaccagcgagagctaccagcagggcgtgctgagcgccaccatcctgtacgagatcctgctgggcaaggccaccctgtacgccgtgctggtgtctgccctggtgctgatggctatggtcaagcggaaggacagccggggaagggccaagcgatctggatctggagcaacaaacttctcactactcaaacaagcaggtgacgtggaggagaatcccgggcctactagtaccatggactggatttggcgcatccttttccttgtcggcgctgctaccggcgcccattccgggccccaggtgcagctggttgaatctggcggaggactggttcagcctggcggatctctgagactgtcttgtgccgccagcggcaacatcaacagcagaaactgcatgggctggttcagacaggcccctggcaagggaagagaaggcgtggcagctatcggccaagtgaccggcagaacctactacgtggacagcgtgaagggcagattcaccatcagcctggacaacagcaagaacaccctgtacctccagatgaacagcctgagagccgaggacaccgccgtgtactattgtgctgctgcccctggctgtctgctgtctgcacttagaagcgccgactacagaaactggggccagggcacactggtcaccgtttcttctggatccggcggcggaggatctggcggaggcggatctgggggcggaggctctttcgaagaagtgcagctggttgaatcaggcggaggactggttcagcctggcggatctctgagactgtcttgtgccgccagcggctacaccttcaccagctactggatgaactgggtccgacaggcccctggcaaaggactggaatgggtcggaatgatcgaccccagcgacagcgagacacactacaaccacatcttcaaggaccgcttcaccatcagcgccgacaccagcaagaataccgcctacctccagatgaactccctgagagccgaggacaccgccgtgtactactgcgccagaaacctgtatctgttcggccagggaaccctggtcacagtgtcatctacgcgtatccagaaccctgatcctgccgtgtaccagctgcgggatagcaagagcagcgacaagagcgtgtgtctgttcaccgacttcgacagccagaccaacgtgtcccagagcaaggactccgacgtgtacatcaccgataagtgcgtgctggacatgcggagcatggacttcaagagcaactccgccgtggcctggtccaacaagtccgatttcgcctgcgccaacgccttcaacaacagcattatccccgaggacacattcttcccaagccccgagagcagctgcgacgtgaagctggtggaaaagagcttcgagacagacaccaacctgaacttccagaacctgagcgtgatcggcttcagaatcctgctgctgaaagtggccggctttaacctgctgatgaccctgcggctgtggtccagc

SEQ ID NO: 36528 - DNA, 2715 bp, synthetic construct
  source 1..2715: mol_type = other DNA
atggccttaccagtgaccgccttgctcctgccgctggccttgctgctccacgccgccaggccgcaggttcagctgcaagagtctggccctggcctggtcaagcctagccaaacactgagcctgacctgtaccgtgtctggcggctctatcaccaccggcgagttctactggaactggttcagacagcctcctggcaaaggactggaatggatgggagccattgccgccagcggcagcacaacatacagccctagcttcgagagccggaccagcatcagcagagacaccagcaagaatcagttcagcctgaagctgagcagcgtgacagccgccgatacagccgtgtattactgcggcagatcctttggagtggccgccgtgacaaccggccagaatagaggacagggcaccctggtcacagtgtctagcggtaccggcggaggcggatctggcggcggaggtagcggtggcggaggatctgaattcgacatccagatgacacagagccctagcagcctgtctgccagcgtgggagacagagtgaccatcacatgcaagagcagccagagcctgctggactccgatggcaagacctacctgaactggtatcagcagaagcccggcaaggcccctaagctgctgatctacctggtgtccaagctggatagcggcgtgcccagcagattttctggcagcggcagcggaaccgacttcaccctgacaatatccagcctccagcctgaggacttcgccacctactactgcttccaaggcacccactttccattcaccttcggccagggcaccaaggtggaaatcaaaagactcgaggacctgaagaacgtgttcccacctgaggtggccgtgttcgagcctagcgaggccgagatcagccacacccagaaagccaccctcgtgtgcctggctaccggcttctaccccgaccatgtggaactgtcttggtgggtcaacggcaaagaggtgcacagcggcgtgtgtaccgacccccagccactgaaagaacagcccgccctgaacgacagccggtactgcctgagcagcagactgagagtgtccgccaccttctggcagaacccccggaaccacttcagatgccaggtgcagttctacggcctgagcgagaacgacgagtggacccaggacagagccaagcccgtgacccagatcgtgtctgccgaagcctggggcagagccgattgcggctttaccagcgagagctaccagcagggcgtgctgagcgccaccatcctgtacgagatcctgctgggcaaggccaccctgtacgccgtgctggtgtctgccctggtgctgatggctatggtcaagcggaaggacagccggggaagggccaagcgatctggatctggagcaacaaacttctcactactcaaacaagcaggtgacgtggaggagaatcccgggcctactagtaccatggactggatttggcgcatccttttccttgtcggcgctgctaccggcgcccattccgggccccaggtgcagctggttgaatctggcggaggactggttcagcctggcggatctctgagactgtcttgtgccgccagcggcaacatcaacagcagaaactgcatgggctggttcagacaggcccctggcaagggaagagaaggcgtggcagctatcggccaagtgaccggcagaacctactacgtggacagcgtgaagggcagattcaccatcagcctggacaacagcaagaacaccctgtacctccagatgaacagcctgagagccgaggacaccgccgtgtactattgtgctgctgcccctggctgtctgctgtctgcacttagaagcgccgactacagaaactggggccagggcacactggtcaccgtttcttctggatccggcggcggaggatctggcggaggcggatctgggggcggaggctctttcgaagaagtgcagctggttgaatcaggcggaggactggttcagcctggcggatctctgagactgtcttgtgccgccagcggctacaccttcaccagctactggatgaactgggtccgacaggcccctggcaaaggactggaatgggtcggaatgatcgaccccagcgacagcgagacacactacaaccacatcttcaaggaccgcttcaccatcagcgccgacaccagcaagaataccgcctacctccagatgaactccctgagagccgaggacaccgccgtgtactactgcgccagaaacctgtatctgttcggccagggaaccctggtcacagtgtcatctacgcgtatccagaaccctgatcctgccgtgtaccagctgcgggatagcaagagcagcgacaagagcgtgtgtctgttcaccgacttcgacagccagaccaacgtgtcccagagcaaggactccgacgtgtacatcaccgataagtgcgtgctggacatgcggagcatggacttcaagagcaactccgccgtggcctggtccaacaagtccgatttcgcctgcgccaacgccttcaacaacagcattatccccgaggacacattcttcccaagccccgagagcagctgcgacgtgaagctggtggaaaagagcttcgagacagacaccaacctgaacttccagaacctgagcgtgatcggcttcagaatcctgctgctgaaagtggccggctttaacctgctgatgaccctgcggctgtggtccagc

SEQ ID NO: 36529 - DNA, 1452 bp, synthetic construct
  source 1..1452: mol_type = other DNA
atggccttaccagtgaccgccttgctcctgccgctggccttgctgctccacgccgccaggccggacatccagatgacacagagccctagcagcctgtctgccagcgtgggagacagagtgaccatcacatgcaagagcagccagagcctgctggactccgatggcaagacctacctgaactggtatcagcagaagcccggcaaggcccctaagctgctgatctacctggtgtccaagctggatagcggcgtgcccagcagattttctggcagcggcagcggaaccgacttcaccctgacaatatccagcctccagcctgaggacttcgccacctactactgcttccaaggcacccactttccattcaccttcggccagggcaccaaggtggaaatcaaaagaggcggaggcggaagtggaggcggaggatctggcggcggaggctctgaagtgcagctggttgaatcaggcggaggactggttcagcctggcggatctctgagactgtcttgtgccgccagcggctacaccttcagcagctactggatgaactgggtccgacaggcccctggcaaaggactggaatgggtcggaatgatcgaccccagcgacagcgagacacactacaaccacatcttcaaggaccgcttcaccatcagcgccgacaccagcaagaataccgcctacctccagatgaactccctgagagccgaggacaccgccgtgtactactgcgccagaaacctgtatctgtggggccagggaaccctggtcacagtgtcatctacgcgtaaaattgaagttatgtatcctcctccttacctagacaatgagaagagcaatggaaccattatccatgtgaaagggaaacacctttgtccaagtcccctatttcccggaccttctaagcccttttgggtgctggtggtggttgggggagtcctggcttgctatagcttgctagtaacagtggcctttattattttctgggtgaggagtaagaggagcaggctcctgcacagtgactacatgaacatgactccacgccgccccggacccacccgcaagcattaccagccctatgccccaccacgcgacttcgcagcctatcgctccagagtgaagttcagcaggagcgcagacgcccccgcgtaccagcagggccagaaccagctctataacgagctcaatctaggacgaagagaggagtacgatgttttggacaagagacgtggccgggaccctgagatggggggaaagccgagaaggaagaaccctcaggaaggcctgtacaatgaactgcagaaagataagatggcggaggcctacagtgagattgggatgaaaggcgagcgccggaggggcaaggggcacgatggcctttaccagggtctcagtacagccaccaaggacacctacgacgcccttcacatgcaggccctgccccctcgc

SEQ ID NO: 36530 - DNA, 1470 bp, synthetic construct
  source 1..1470: mol_type = other DNA
atggccttaccagtgaccgccttgctcctgccgctggccttgctgctccacgccgccaggccggacatccagatgacacagagccctagcagcctgtctgccagcgtgggagacagagtgaccatcacatgcaagagcagccagagcctgctggactccgatggcaagacctacctgaactggtatcagcagaagcccggcaaggcccctaagctgctgatctacctggtgtccaagctggatagcggcgtgcccagcagattttctggcagcggcagcggaaccgacttcaccctgacaatatccagcctccagcctgaggacttcgccacctactactgcttccaaggcacccactttccattcaccttcggccagggcaccaaggtggaaatcaaaagaggcggaggcggaagtggaggcggaggatctggcggcggaggctctgaagtgcagctggttgaatcaggcggaggactggttcagcctggcggatctctgagactgtcttgtgccgccagcggctacaccttcagcagctactggatgaactgggtccgacaggcccctggcaaaggactggaatgggtcggaatgatcgaccccagcgacagcgagacacactacaaccacatcttcaaggaccgcttcaccatcagcgccgacaccagcaagaataccgcctacctccagatgaactccctgagagccgaggacaccgccgtgtactactgcgccagaaacctgtatctgtggggccagggaaccctggtcacagtgtcatctacgcgtgcgaagcccaccacgacgccagcgccgcgaccaccaacaccggcgcccaccatcgcgtcgcagcccctgtccctgcgcccagaggcgtgccggccagcggcggggggcgcagtgcacacgagggggctggacttcgcctgtgacatctacatctgggcgcccttggccgggacttgtggggtccttctcctgtcactggttatcaccctttactgcaaacggggcagaaagaaactcctgtatatattcaaacaaccatttatgagaccagtacaaactactcaagaggaagatggctgtagctgccgatttccagaagaagaagaaggaggatgtgaactgagagtgaagttcagcaggagcgcagacgcccccgcgtaccagcagggccagaaccagctctataacgagctgaatctaggacgaagagaggagtacgatgttttggacaagagacgtggccgggaccctgagatggggggaaagccgagaaggaagaaccctcaggaaggcctgtacaatgaactgcagaaagataagatggcggaggcctacagtgagattgggatgaaaggcgagcgccggaggggcaaggggcacgatggcctttaccagggtctcagtacagccaccaaggacacctacgacgcccttcacatgcaggccctgccccctcgc

SEQ ID NO: 36531 - DNA, 1470 bp, synthetic construct
  source 1..1470: mol_type = other DNA
atggccttaccagtgaccgccttgctcctgccgctggccttgctgctccacgccgccaggccggaagtgcagctggttgaatcaggcggaggactggttcagcctggcggatctctgagactgtcttgtgccgccagcggctacaccttcagcagctactggatgaactgggtccgacaggcccctggcaaaggactggaatgggtcggaatgatcgaccccagcgacagcgagacacactacaaccacatcttcaaggaccgcttcaccatcagcgccgacaccagcaagaataccgcctacctccagatgaactccctgagagccgaggacaccgccgtgtactactgcgccagaaacctgtatctgtggggccagggaaccctggtcacagtgtcatctggcggaggcggaagtggaggcggaggatctggcggcggaggctctgacatccagatgacacagagccctagcagcctgtctgccagcgtgggagacagagtgaccatcacatgcaagagcagccagagcctgctggactccgatggcaagacctacctgaactggtatcagcagaagcccggcaaggcccctaagctgctgatctacctggtgtccaagctggatagcggcgtgcccagcagattttctggcagcggcagcggaaccgacttcaccctgacaatatccagcctccagcctgaggacttcgccacctactactgcttccaaggcacccactttccattcaccttcggccagggcaccaaggtggaaatcaaaagaacgcgtgcgaagcccaccacgacgccagcgccgcgaccaccaacaccggcgcccaccatcgcgtcgcagcccctgtccctgcgcccagaggcgtgccggccagcggcggggggcgcagtgcacacgagggggctggacttcgcctgtgacatctacatctgggcgcccttggccgggacttgtggggtccttctcctgtcactggttatcaccctttactgcaaacggggcagaaagaaactcctgtatatattcaaacaaccatttatgagaccagtacaaactactcaagaggaagatggctgtagctgccgatttccagaagaagaagaaggaggatgtgaactgagagtgaagttcagcaggagcgcagacgcccccgcgtaccagcagggccagaaccagctctataacgagctgaatctaggacgaagagaggagtacgatgttttggacaagagacgtggccgggaccctgagatggggggaaagccgagaaggaagaaccctcaggaaggcctgtacaatgaactgcagaaagataagatggcggaggcctacagtgagattgggatgaaaggcgagcgccggaggggcaaggggcacgatggcctttaccagggtctcagtacagccaccaaggacacctacgacgcccttcacatgcaggccctgccccctcgc

SEQ ID NO: 36532 - DNA, 1869 bp, synthetic construct
  source 1..1869: mol_type = other DNA
atggccttaccagtgaccgccttgctcctgccgctggccttgctgctccacgccgccaggccggacatccagatgacacagagccctagcagcctgtctgccagcgtgggagacagagtgaccatcacatgcaagagcagccagagcctgctggactccgatggcaagacctacctgaactggtatcagcagaagcccggcaaggcccctaagctgctgatctacctggtgtccaagctggatagcggcgtgcccagcagattttctggcagcggcagcggaaccgacttcaccctgacaatatccagcctccagcctgaggacttcgccacctactactgcttccaaggcacccactttccattcaccttcggccagggcaccaaggtggaaatcaaaagactcgagatccagaaccctgatcctgccgtgtaccagctgcgggatagcaagagcagcgacaagagcgtgtgtctgttcaccgacttcgacagccagaccaacgtgtcccagagcaaggactccgacgtgtacatcaccgataagtgcgtgctggacatgcggagcatggacttcaagagcaactccgccgtggcctggtccaacaagtccgatttcgcctgcgccaacgccttcaacaacagcattatccccgaggacacattcttcccaagcagcgacgtgccctgcgacgtgaagctggtggaaaagagcttcgagacagacaccaacctgaacttccagaacctgagcgtgatcggcttcagaatcctgctgctgaaagtggccggctttaacctgctgatgaccctgcggctgtggtccagccgcgccaagagaagcggatctggcgtgaagcagaccctgaatttcgacctgctgaagctggctggcgacgtggaatccaacccaggccctactagtatggactggatttggcgcatccttttccttgtcggcgctgctaccggcgcgcattccttcgaagaagtgcagctggttgaatcaggcggaggactggttcagcctggcggatctctgagactgtcttgtgccgccagcggctacaccttcagcagctactggatgaactgggtccgacaggcccctggcaaaggactggaatgggtcggaatgatcgaccccagcgacagcgagacacactacaaccacatcttcaaggaccgcttcaccatcagcgccgacaccagcaagaataccgcctacctccagatgaactccctgagagccgaggacaccgccgtgtactactgcgccagaaacctgtatctgtggggccagggaaccctggtcacagtgtcatctacgcgtgaggacctgaagaacgtgttcccacctgaggtggccgtgttcgagcctagcaaggccgagatcgcccacacccagaaagccaccctcgtgtgcctggctaccggcttctaccccgaccatgtggaactgtcttggtgggtcaacggcaaagaggtgcacagcggcgtgtgtaccgacccccagccactgaaagaacagcccgccctgaacgacagccggtactgcctgagcagcagactgagagtgtccgccaccttctggcagaacccccggaaccacttcagatgccaggtgcagttctacggcctgagcgagaacgacgagtggacccaggacagagccaagcccgtgacccagatcgtgtctgccgaagcctggggcagagccgattgcggcatcaccagcgccagctaccaccagggcgtgctgagcgccaccatcctgtacgagatcctgctgggcaaggccaccctgtacgccgtgctggtgtctgccctggtgctgatggctatggtcaagcggaaggacagccgggga

SEQ ID NO: 36533 - DNA, 1857 bp, synthetic construct
  source 1..1857: mol_type = other DNA
atggccttaccagtgaccgccttgctcctgccgctggccttgctgctccacgccgccaggccggacatccagatgacacagagccctagcagcctgtctgccagcgtgggagacagagtgaccatcacatgcaagagcagccagagcctgctggactccgatggcaagacctacctgaactggtatcagcagaagcccggcaaggcccctaagctgctgatctacctggtgtccaagctggatagcggcgtgcccagcagattttctggcagcggcagcggaaccgacttcaccctgacaatatccagcctccagcctgaggacttcgccacctactactgcttccaaggcacccactttccattcaccttcggccagggcaccaaggtggaaatcaaaagactcgaggacctgaagaacgtgttcccacctgaggtggccgtgttcgagcctagcaaggccgagatcgcccacacccagaaagccaccctcgtgtgcctggctaccggcttctaccccgaccatgtggaactgtcttggtgggtcaacggcaaagaggtgcacagcggcgtgtgtaccgacccccagccactgaaagaacagcccgccctgaacgacagccggtactgcctgagcagcagactgagagtgtccgccaccttctggcagaacccccggaaccacttcagatgccaggtgcagttctacggcctgagcgagaacgacgagtggacccaggacagagccaagcccgtgacccagatcgtgtctgccgaagcctggggcagagccgattgcggcatcaccagcgccagctaccaccagggcgtgctgagcgccaccatcctgtacgagatcctgctgggcaaggccaccctgtacgccgtgctggtgtctgccctggtgctgatggctatggtcaagcggaaggacagccggggaagggccaagcgatctggatctggagcaacaaacttctcactactcaaacaagcaggtgacgtggaggagaatcccgggcctactagtatggactggatttggcgcatccttttccttgtcggcgctgctaccggcgcgcattccttcgaagaagtgcagctggttgaatcaggcggaggactggttcagcctggcggatctctgagactgtcttgtgccgccagcggctacaccttcagcagctactggatgaactgggtccgacaggcccctggcaaaggactggaatgggtcggaatgatcgaccccagcgacagcgagacacactacaaccacatcttcaaggaccgcttcaccatcagcgccgacaccagcaagaataccgcctacctccagatgaactccctgagagccgaggacaccgccgtgtactactgcgccagaaacctgtatctgtggggccagggaaccctggtcacagtgtcatctacgcgtatccagaaccctgatcctgccgtgtaccagctgcgggatagcaagagcagcgacaagagcgtgtgtctgttcaccgacttcgacagccagaccaacgtgtcccagagcaaggactccgacgtgtacatcaccgataagtgcgtgctggacatgcggagcatggacttcaagagcaactccgccgtggcctggtccaacaagtccgatttcgcctgcgccaacgccttcaacaacagcattatccccgaggacacattcttcccaagcagcgacgtgccctgcgacgtgaagctggtggaaaagagcttcgagacagacaccaacctgaacttccagaacctgagcgtgatcggcttcagaatcctgctgctgaaagtggccggctttaacctgctgatgaccctgcggctgtggtccagc

SEQ ID NO: 36534 - DNA, 1857 bp, synthetic construct
  source 1..1857: mol_type = other DNA
atggccttaccagtgaccgccttgctcctgccgctggccttgctgctccacgccgccaggccggacatccagatgacacagagccctagcagcctgtctgccagcgtgggagacagagtgaccatcacatgcaagagcagccagagcctgctggactccgatggcaagacctacctgaactggtatcagcagaagcccggcaaggcccctaagctgctgatctacctggtgtccaagctggatagcggcgtgcccagcagattttctggcagcggcagcggaaccgacttcaccctgacaatatccagcctccagcctgaggacttcgccacctactactgcttccaaggcacccactttccattcaccttcggccagggcaccaaggtggaaatcaaaagactcgaggacctgaagaacgtgttcccacctgaggtggccgtgttcgagcctagcgaggccgagatcagccacacccagaaagccaccctcgtgtgcctggctaccggcttctaccccgaccatgtggaactgtcttggtgggtcaacggcaaagaggtgcacagcggcgtgtgtaccgacccccagccactgaaagaacagcccgccctgaacgacagccggtactgcctgagcagcagactgagagtgtccgccaccttctggcagaacccccggaaccacttcagatgccaggtgcagttctacggcctgagcgagaacgacgagtggacccaggacagagccaagcccgtgacccagatcgtgtctgccgaagcctggggcagagccgattgcggctttaccagcgagagctaccagcagggcgtgctgagcgccaccatcctgtacgagatcctgctgggcaaggccaccctgtacgccgtgctggtgtctgccctggtgctgatggctatggtcaagcggaaggacagccggggaagggccaagcgatctggatctggagcaacaaacttctcactactcaaacaagcaggtgacgtggaggagaatcccgggcctactagtatggactggatttggcgcatccttttccttgtcggcgctgctaccggcgcgcattccttcgaagaagtgcagctggttgaatcaggcggaggactggttcagcctggcggatctctgagactgtcttgtgccgccagcggctacaccttcagcagctactggatgaactgggtccgacaggcccctggcaaaggactggaatgggtcggaatgatcgaccccagcgacagcgagacacactacaaccacatcttcaaggaccgcttcaccatcagcgccgacaccagcaagaataccgcctacctccagatgaactccctgagagccgaggacaccgccgtgtactactgcgccagaaacctgtatctgtggggccagggaaccctggtcacagtgtcatctacgcgtatccagaaccctgatcctgccgtgtaccagctgcgggatagcaagagcagcgacaagagcgtgtgtctgttcaccgacttcgacagccagaccaacgtgtcccagagcaaggactccgacgtgtacatcaccgataagtgcgtgctggacatgcggagcatggacttcaagagcaactccgccgtggcctggtccaacaagtccgatttcgcctgcgccaacgccttcaacaacagcattatccccgaggacacattcttcccaagccccgagagcagctgcgacgtgaagctggtggaaaagagcttcgagacagacaccaacctgaacttccagaacctgagcgtgatcggcttcagaatcctgctgctgaaagtggccggctttaacctgctgatgaccctgcggctgtggtccagc

SEQ ID NO: 36535 - DNA, 1869 bp, synthetic construct
  source 1..1869: mol_type = other DNA
atggccttaccagtgaccgccttgctcctgccgctggccttgctgctccacgccgccaggccggacatccagatgacacagagccctagcagcctgtctgccagcgtgggagacagagtgaccatcacatgcaagagcagccagagcctgctggactccgatggcaagacctacctgaactggtatcagcagaagcccggcaaggcccctaagctgctgatctacctggtgtccaagctggatagcggcgtgcccagcagattttctggcagcggcagcggaaccgacttcaccctgacaatatccagcctccagcctgaggacttcgccacctactactgcttccaaggcacccactttccattcaccttcggccagggcaccaaggtggaaatcaaaagactcgagatccagaaccctgatcctgccgtgtaccagctgcgggatagcaagagcagcgacaagagcgtgtgtctgttcaccgacttcgacagccagaccaacgtgtcccagagcaaggactccgacgtgtacatcaccgataagtgcgtgctggacatgcggagcatggacttcaagagcaactccgccgtggcctggtccaacaagtccgatttcgcctgcgccaacgccttcaacaacagcattatccccgaggacacattcttcccaagccccgagagcagctgcgacgtgaagctggtggaaaagagcttcgagacagacaccaacctgaacttccagaacctgagcgtgatcggcttcagaatcctgctgctgaaagtggccggctttaacctgctgatgaccctgcggctgtggtccagccgcgccaagagaagcggatctggcgtgaagcagaccctgaatttcgacctgctgaagctggctggcgacgtggaatccaacccaggccctactagtatggactggatttggcgcatccttttccttgtcggcgctgctaccggcgcgcattccttcgaagaagtgcagctggttgaatcaggcggaggactggttcagcctggcggatctctgagactgtcttgtgccgccagcggctacaccttcagcagctactggatgaactgggtccgacaggcccctggcaaaggactggaatgggtcggaatgatcgaccccagcgacagcgagacacactacaaccacatcttcaaggaccgcttcaccatcagcgccgacaccagcaagaataccgcctacctccagatgaactccctgagagccgaggacaccgccgtgtactactgcgccagaaacctgtatctgtggggccagggaaccctggtcacagtgtcatctacgcgtgaggacctgaagaacgtgttcccacctgaggtggccgtgttcgagcctagcgaggccgagatcagccacacccagaaagccaccctcgtgtgcctggctaccggcttctaccccgaccatgtggaactgtcttggtgggtcaacggcaaagaggtgcacagcggcgtgtgtaccgacccccagccactgaaagaacagcccgccctgaacgacagccggtactgcctgagcagcagactgagagtgtccgccaccttctggcagaacccccggaaccacttcagatgccaggtgcagttctacggcctgagcgagaacgacgagtggacccaggacagagccaagcccgtgacccagatcgtgtctgccgaagcctggggcagagccgattgcggctttaccagcgagagctaccagcagggcgtgctgagcgccaccatcctgtacgagatcctgctgggcaaggccaccctgtacgccgtgctggtgtctgccctggtgctgatggctatggtcaagcggaaggacagccgggga

SEQ ID NO: 36536 - DNA, 1905 bp, synthetic construct
  source 1..1905: mol_type = other DNA
atggccttaccagtgaccgccttgctcctgccgctggccttgctgctccacgccgccaggccgctcgaggaggacctgaagaacgtgttcccacctgaggtggccgtgttcgagcctagcaaggccgagatcgcccacacccagaaagccaccctcgtgtgcctggctaccggcttctaccccgaccatgtggaactgtcttggtgggtcaacggcaaagaggtgcacagcggcgtgtgtaccgacccccagccactgaaagaacagcccgccctgaacgacagccggtactgcctgagcagcagactgagagtgtccgccaccttctggcagaacccccggaaccacttcagatgccaggtgcagttctacggcctgagcgagaacgacgagtggacccaggacagagccaagcccgtgacccagatcgtgtctgccgaagcctggggcagagccgattgcggcatcaccagcgccagctaccaccagggcgtgctgagcgccaccatcctgtacgagatcctgctgggcaaggccaccctgtacgccgtgctggtgtctgccctggtgctgatggctatggtcaagcggaaggacagccggggaagggccaagcgatctggatctggagcaacaaacttctcactactcaaacaagcaggtgacgtggaggagaatcccgggcctactagcatggccttaccagtgaccgccttgctcctgccgctggccttgctgctccacgccgccaggccggacatccagatgacacagagccctagcagcctgtctgccagcgtgggagacagagtgaccatcacatgcaagagcagccagagcctgctggactccgatggcaagacctacctgaactggtatcagcagaagcccggcaaggcccctaagctgctgatctacctggtgtccaagctggatagcggcgtgcccagcagattttctggcagcggcagcggaaccgacttcaccctgacaatatccagcctccagcctgaggacttcgccacctactactgcttccaaggcacccactttccattcaccttcggccagggcaccaaggtggaaatcaaaagaggcggaggcggaagtggaggcggaggatctggcggcggaggctctgaagtgcagctggttgaatcaggcggaggactggttcagcctggcggatctctgagactgtcttgtgccgccagcggctacaccttcagcagctactggatgaactgggtccgacaggcccctggcaaaggactggaatgggtcggaatgatcgaccccagcgacagcgagacacactacaaccacatcttcaaggaccgcttcaccatcagcgccgacaccagcaagaataccgcctacctccagatgaactccctgagagccgaggacaccgccgtgtactactgcgccagaaacctgtatctgtggggccagggaaccctggtcacagtgtcatctacgcgtatccagaaccctgatcctgccgtgtaccagctgcgggatagcaagagcagcgacaagagcgtgtgtctgttcaccgacttcgacagccagaccaacgtgtcccagagcaaggactccgacgtgtacatcaccgataagtgcgtgctggacatgcggagcatggacttcaagagcaactccgccgtggcctggtccaacaagtccgatttcgcctgcgccaacgccttcaacaacagcattatccccgaggacacattcttcccaagcagcgacgtgccctgcgacgtgaagctggtggaaaagagcttcgagacagacaccaacctgaacttccagaacctgagcgtgatcggcttcagaatcctgctgctgaaagtggccggctttaacctgctgatgaccctgcggctgtggtccagc

SEQ ID NO: 36537 - DNA, 1926 bp, synthetic construct
  source 1..1926: mol_type = other DNA
atggccttaccagtgaccgccttgctcctgccgctggccttgctgctccacgccgccaggccgctcgagggctccggcgatcgccctgatcctgccgtgtaccagctgcgggatagcaagagcagcgacaagagcgtgtgtctgttcaccgacttcgacagccagaccaacgtgtcccagagcaaggactccgacgtgtacatcaccgataagtgcgtgctggacatgcggagcatggacttcaagagcaactccgccgtggcctggtccaacaagtccgatttcgcctgcgccaacgccttcaacaacagcattatccccgaggacacattcttcccaagccccgagagcagctgcgacgtgaagctggtggaaaagagcttcgagacagacaccaacctgaacttccagaacctgagcgtgatcggcttcagaatcctgctgctgaaagtggccggctttaacctgctgatgaccctgcggctgtggtccagctctagtcgcgccaagagaagcggatctggcgtgaagcagaccctgaatttcgacctgctgaagctggctggcgacgtggaatccaacccaggccccactagcatggccttaccagtgaccgccttgctcctgccgctggccttgctgctccacgccgccaggccggacatccagatgacacagagccctagcagcctgtctgccagcgtgggagacagagtgaccatcacatgcaagagcagccagagcctgctggactccgatggcaagacctacctgaactggtatcagcagaagcccggcaaggcccctaagctgctgatctacctggtgtccaagctggatagcggcgtgcccagcagattttctggcagcggcagcggaaccgacttcaccctgacaatatccagcctccagcctgaggacttcgccacctactactgcttccaaggcacccactttccattcaccttcggccagggcaccaaggtggaaatcaaaagaggcggaggcggaagtggaggcggaggatctggcggcggaggctctgaagtgcagctggttgaatcaggcggaggactggttcagcctggcggatctctgagactgtcttgtgccgccagcggctacaccttcagcagctactggatgaactgggtccgacaggcccctggcaaaggactggaatgggtcggaatgatcgaccccagcgacagcgagacacactacaaccacatcttcaaggaccgcttcaccatcagcgccgacaccagcaagaataccgcctacctccagatgaactccctgagagccgaggacaccgccgtgtactactgcgccagaaacctgtatctgtggggccagggaaccctggtcacagtgtcatctacgcgtgaggacctgaagaacgtgttcccacctgaggtggccgtgttcgagcctagcgaggccgagatcagccacacccagaaagccaccctcgtgtgcctggctaccggcttctaccccgaccatgtggaactgtcttggtgggtcaacggcaaagaggtgcacagcggcgtgtgtaccgacccccagccactgaaagaacagcccgccctgaacgacagccggtactgcctgagcagcagactgagagtgtccgccaccttctggcagaacccccggaaccacttcagatgccaggtgcagttctacggcctgagcgagaacgacgagtggacccaggacagagccaagcccgtgacccagatcgtgtctgccgaagcctggggcagagccgattgcggctttaccagcgagagctaccagcagggcgtgctgagcgccaccatcctgtacgagatcctgctgggcaaggccaccctgtacgccgtgctggtgtctgccctggtgctgatggctatggtcaagcggaaggacagccgggga

SEQ ID NO: 36538 - DNA, 1857 bp, synthetic construct
  source 1..1857: mol_type = other DNA
atggccttaccagtgaccgccttgctcctgccgctggccttgctgctccacgccgccaggccggacatccagatgacacagagccctagcagcctgtctgccagcgtgggagacagagtgaccatcacatgcaagagcagccagagcctgctggactccgatggcaagacctacctgaactggtatcagcagaagcccggcaaggcccctaagctgctgatctacctggtgtccaagctggatagcggcgtgcccagcagattttctggcagcggcagcggaaccgacttcaccctgacaatatccagcctccagcctgaggacttcgccacctactactgcttccaaggcacccactttccattcaccttcggccagggcaccaaggtggaaatcaaaagactcgaggacctgaagaacgtgttcccacctgaggtggccgtgttcgagcctagcgaggccgagatcagccacacccagaaagccaccctcgtgtgcctggctaccggcttctaccccgaccatgtggaactgtcttggtgggtcaacggcaaagaggtgcacagcggcgtgtctaccgacccccagccactgaaagaacagcccgccctgaacgacagccggtactgcctgagcagcagactgagagtgtccgccaccttctggcagaacccccggaaccacttcagatgccaggtgcagttctacggcctgagcgagaacgacgagtggacccaggacagagccaagcccgtgacccagatcgtgtctgccgaagcctggggcagagccgattgcggctttaccagcgagagctaccagcagggcgtgctgagcgccaccatcctgtacgagatcctgctgggcaaggccaccctgtacgccgtgctggtgtctgccctggtgctgatggctatggtcaagcggaaggacagccggggaagggccaagcgatctggatctggagcaacaaacttctcactactcaaacaagcaggtgacgtggaggagaatcccgggcctactagtatggactggatttggcgcatccttttccttgtcggcgctgctaccggcgcgcattccttcgaagaagtgcagctggttgaatcaggcggaggactggttcagcctggcggatctctgagactgtcttgtgccgccagcggctacaccttcagcagctactggatgaactgggtccgacaggcccctggcaaaggactggaatgggtcggaatgatcgaccccagcgacagcgagacacactacaaccacatcttcaaggaccgcttcaccatcagcgccgacaccagcaagaataccgcctacctccagatgaactccctgagagccgaggacaccgccgtgtactactgcgccagaaacctgtatctgtggggccagggaaccctggtcacagtgtcatctacgcgtatccagaaccctgatcctgccgtgtaccagctgcgggatagcaagagcagcgacaagagcgtgtgtctgttcaccgacttcgacagccagaccaacgtgtcccagagcaaggactccgacgtgtacatcaccgataagaccgtgctggacatgcggagcatggacttcaagagcaactccgccgtggcctggtccaacaagtccgatttcgcctgcgccaacgccttcaacaacagcattatccccgaggacacattcttcccaagccccgagagcagctgcgacgtgaagctggtggaaaagagcttcgagacagacaccaacctgaacttccagaacctgagcgtgatcggcttcagaatcctgctgctgaaagtggccggctttaacctgctgatgaccctgcggctgtggtccagc

SEQ ID NO: 36539 - DNA, 1881 bp, synthetic construct
  source 1..1881: mol_type = other DNA
atggccttaccagtgaccgccttgctcctgccgctggccttgctgctccacgccgccaggccggacatccagatgacacagagccctagcagcctgtctgccagcgtgggagacagagtgaccatcacatgcaagagcagccagagcctgctggactccgatggcaagacctacctgaactggtatcagcagaagcccggcaaggcccctaagctgctgatctacctggtgtccaagctggatagcggcgtgcccagcagattttctggcagcggcagcggaaccgacttcaccctgacaatatccagcctccagcctgaggacttcgccacctactactgcttccaaggcacccactttccattcaccttcggccagggcaccaaggtggaaatcaaaagactcgaggacaagcagctggacgccgacgtgtcccccaagcctaccatcttcctgccctctatcgccgagacaaagctccagaaggccggcacctacctgtgcctgctggaaaagttcttcccagatgtgattaagatccactggcaggaaaagaagtccaacaccatcctgggcagccaggaaggcaacaccatgaagaccaacgacacctacatgaagttcagctggctgaccgtgcccgagaagtccctggacaaagaacacagatgcatcgtgcggcacgaaaacaacaagaacggcgtggaccaggaaatcatcttcccacccatcaagaccgatgtgattacaatggaccccaaggacaactgctccaaggacgccaacgataccctgctgctccagctgaccaacaccagcgcctactacatgtacttgttgctgctgctgaagtccgtggtgtacttcgccatcatcacatgctgcctgctgcggagaaccgccttctgctgcaacggcgagaagtctagggccaagcgatctggatctggagcaacaaacttctcactactcaaacaagcaggtgacgtggaggagaatcccgggcctactagtatggactggatttggcgcatccttttccttgtcggcgctgctaccggcgcgcattccttcgaagaagtgcagctggttgaatcaggcggaggactggttcagcctggcggatctctgagactgtcttgtgccgccagcggctacaccttcagcagctactggatgaactgggtccgacaggcccctggcaaaggactggaatgggtcggaatgatcgaccccagcgacagcgagacacactacaaccacatcttcaaggaccgcttcaccatcagcgccgacaccagcaagaataccgcctacctccagatgaactccctgagagccgaggacaccgccgtgtactactgcgccagaaacctgtatctgtggggccagggaaccctggtcacagtgtcatctacgcgtagccagcctcacaccaagcccagcgtgttcgtgatgaagaacggcaccaacgtggcctgcctcgtgaaagagttctaccccaaggacatcaggatcaacctggtgtccagcaagaagatcaccgagttcgaccccgccatcgtgatctcccccagcggcaagtacaacgccgtgaagctggggaagtacgaggacagcaacagcgtgacctgctccgtgcagcacgacaacaagaccgtgcacagcaccgactttgaagtgaaaaccgactccaccgaccacgtgaagcccaaagagacagagaacaccaagcagcccagcaagagctgccacaagcccaaggccatcgtgcacaccgagaaagtgaacatgatgagcctgaccgtgctgggcctgcggatgctgttcgccaaaaccgtggccgtgaacttcctgctgaccgccaagctgttcttcctc

SEQ ID NO: 36540 - DNA, 1881 bp, synthetic construct
  source 1..1881: mol_type = other DNA
atggccttaccagtgaccgccttgctcctgccgctggccttgctgctccacgccgccaggccggacatccagatgacacagagccctagcagcctgtctgccagcgtgggagacagagtgaccatcacatgcaagagcagccagagcctgctggactccgatggcaagacctacctgaactggtatcagcagaagcccggcaaggcccctaagctgctgatctacctggtgtccaagctggatagcggcgtgcccagcagattttctggcagcggcagcggaaccgacttcaccctgacaatatccagcctccagcctgaggacttcgccacctactactgcttccaaggcacccactttccattcaccttcggccagggcaccaaggtggaaatcaaaagactcgagagccagcctcacaccaagcccagcgtgttcgtgatgaagaacggcaccaacgtggcctgcctcgtgaaagagttctaccccaaggacatcaggatcaacctggtgtccagcaagaagatcaccgagttcgaccccgccatcgtgatctcccccagcggcaagtacaacgccgtgaagctggggaagtacgaggacagcaacagcgtgacctgctccgtgcagcacgacaacaagaccgtgcacagcaccgactttgaagtgaaaaccgactccaccgaccacgtgaagcccaaagagacagagaacaccaagcagcccagcaagagctgccacaagcccaaggccatcgtgcacaccgagaaagtgaacatgatgagcctgaccgtgctgggcctgcggatgctgttcgccaaaaccgtggccgtgaacttcctgctgaccgccaagctgttcttcctcagggccaagcgatctggatctggagcaacaaacttctcactactcaaacaagcaggtgacgtggaggagaatcccgggcctactagtatggactggatttggcgcatccttttccttgtcggcgctgctaccggcgcgcattccttcgaagaagtgcagctggttgaatcaggcggaggactggttcagcctggcggatctctgagactgtcttgtgccgccagcggctacaccttcagcagctactggatgaactgggtccgacaggcccctggcaaaggactggaatgggtcggaatgatcgaccccagcgacagcgagacacactacaaccacatcttcaaggaccgcttcaccatcagcgccgacaccagcaagaataccgcctacctccagatgaactccctgagagccgaggacaccgccgtgtactactgcgccagaaacctgtatctgtggggccagggaaccctggtcacagtgtcatctacgcgtgacaagcagctggacgccgacgtgtcccccaagcctaccatcttcctgccctctatcgccgagacaaagctccagaaggccggcacctacctgtgcctgctggaaaagttcttcccagatgtgattaagatccactggcaggaaaagaagtccaacaccatcctgggcagccaggaaggcaacaccatgaagaccaacgacacctacatgaagttcagctggctgaccgtgcccgagaagtccctggacaaagaacacagatgcatcgtgcggcacgaaaacaacaagaacggcgtggaccaggaaatcatcttcccacccatcaagaccgatgtgattacaatggaccccaaggacaactgctccaaggacgccaacgataccctgctgctccagctgaccaacaccagcgcctactacatgtacttgttgctgctgctgaagtccgtggtgtacttcgccatcatcacatgctgcctgctgcggagaaccgccttctgctgcaacggcgagaagtct

SEQ ID NO: 36541 - DNA, 1926 bp, synthetic construct
  source 1..1926: mol_type = other DNA
atggccttaccagtgaccgccttgctcctgccgctggccttgctgctccacgccgccaggccgctcgaggacaagcagctggacgccgacgtgtcccccaagcctaccatcttcctgccctctatcgccgagacaaagctccagaaggccggcacctacctgtgcctgctggaaaagttcttcccagatgtgattaagatccactggcaggaaaagaagtccaacaccatcctgggcagccaggaaggcaacaccatgaagaccaacgacacctacatgaagttcagctggctgaccgtgcccgagaagtccctggacaaagaacacagatgcatcgtgcggcacgaaaacaacaagaacggcgtggaccaggaaatcatcttcccacccatcaagaccgatgtgattacaatggaccccaaggacaactgctccaaggacgccaacgataccctgctgctccagctgaccaacaccagcgcctactacatgtacttgttgctgctgctgaagtccgtggtgtacttcgccatcatcacatgctgcctgctgcggagaaccgccttctgctgcaacggcgagaagtctagggccaagcgatctggatctggagcaacaaacttctcactactcaaacaagcaggtgacgtggaggagaatcccgggcctactagcatggccttaccagtgaccgccttgctcctgccgctggccttgctgctccacgccgccaggccggacatccagatgacacagagccctagcagcctgtctgccagcgtgggagacagagtgaccatcacatgcaagagcagccagagcctgctggactccgatggcaagacctacctgaactggtatcagcagaagcccggcaaggcccctaagctgctgatctacctggtgtccaagctggatagcggcgtgcccagcagattttctggcagcggcagcggaaccgacttcaccctgacaatatccagcctccagcctgaggacttcgccacctactactgcttccaaggcacccactttccattcaccttcggccagggcaccaaggtggaaatcaaaagaggcggaggcggaagtggaggcggaggatctggcggcggaggctctgaagtgcagctggttgaatcaggcggaggactggttcagcctggcggatctctgagactgtcttgtgccgccagcggctacaccttcagcagctactggatgaactgggtccgacaggcccctggcaaaggactggaatgggtcggaatgatcgaccccagcgacagcgagacacactacaaccacatcttcaaggaccgcttcaccatcagcgccgacaccagcaagaataccgcctacctccagatgaactccctgagagccgaggacaccgccgtgtactactgcgccagaaacctgtatctgtggggccagggaaccctggtcacagtgtcatctacgcgtagccagcctcacaccaagcccagcgtgttcgtgatgaagaacggcaccaacgtggcctgcctcgtgaaagagttctaccccaaggacatcaggatcaacctggtgtccagcaagaagatcaccgagttcgaccccgccatcgtgatctcccccagcggcaagtacaacgccgtgaagctggggaagtacgaggacagcaacagcgtgacctgctccgtgcagcacgacaacaagaccgtgcacagcaccgactttgaagtgaaaaccgactccaccgaccacgtgaagcccaaagagacagagaacaccaagcagcccagcaagagctgccacaagcccaaggccatcgtgcacaccgagaaagtgaacatgatgagcctgaccgtgctgggcctgcggatgctgttcgccaaaaccgtggccgtgaacttcctgctgaccgccaagctgttcttcctc

SEQ ID NO: 36542 - DNA, 2388 bp, synthetic construct
  source 1..2388: mol_type = other DNA
atggccttaccagtgaccgccttgctcctgccgctggccttgctgctccacgccgccaggccggacatccagatgacacagagccctagcagcctgtctgccagcgtgggagacagagtgaccatcacatgcaagagcagccagagcctgctggactccgatggcaagacctacctgaactggtatcagcagaagcccggcaaggcccctaagctgctgatctacctggtgtccaagctggatagcggcgtgcccagcagattttctggcagcggcagcggaaccgacttcaccctgacaatatccagcctccagcctgaggacttcgccacctactactgcttccaaggcacccactttccattcaccttcggccagggcaccaaggtggaaatcaaaagaggacagcctaaggccaatcctaccgtgacactgttccctccaagcagcgaagaactccaggccaacaaggccacacttgtgtgcctgatctccgacttctaccctggggctgtgacagtggcttggaaggccgatggatctcctgtgaaagccggcgtggaaaccaccaagccatccaagcagagcaacaacaaatacgccgccagctcctacctgagcctgacacctgagcagtggaagtcccacagatcctacagctgccaagtgacccacgaaggcagcaccgtggaaaagacagtggcccctacagagtgcagcggatcccagagcttcggcctgctggaccccaagctgtgctacctgctggatggcatcctgttcatctacggcgtgatcctgaccgccctgttcctgagagtgaagttcagcagaagcgccgacgcccctgcctaccagcagggacagaaccaactgtacaacgagctgaacctgggcagacgggaagagtacgacgtgctggacaagcggagaggcagggaccctgagatgggcggaaagccccagcggagaaagaacccccaggaaggactgtataacgaactccagaaagacaagatggccgaagcctacagcgagatcggcatgaagggcgagcggagaagaggcaagggccacgatggcctgtaccagggcctgagcaccgccaccaaggacacctatgacgccctgcacatgcaggccctgcctccaagaagggccaagcgatctggatctggagcaacaaacttctcactactcaaacaagcaggtgacgtggaggagaatcccgggcctactagtatggactggatttggcgcatccttttccttgtcggcgctgctaccggcgcgcattccttcgaagaagtgcagctggttgaatcaggcggaggactggttcagcctggcggatctctgagactgtcttgtgccgccagcggctacaccttcagcagctactggatgaactgggtccgacaggcccctggcaaaggactggaatgggtcggaatgatcgaccccagcgacagcgagacacactacaaccacatcttcaaggaccgcttcaccatcagcgccgacaccagcaagaataccgcctacctccagatgaactccctgagagccgaggacaccgccgtgtactactgcgccagaaacctgtatctgtggggccagggaaccctggtcacagtgtcatctgcctctacaaagggaccctccgtgtttcctctggctcccagcagcaagtctacaagcggaggaacagccgctctgggctgcctggtcaaggattactttcccgagcctgtgaccgtgtcctggaatagcggagcactgacaagcggcgtgcacacctttccagccgtgctgcaaagcagcggcctgtactctctgagcagcgtggtcacagtgcctagctctagcctgggcacccagacctacatctgcaatgtgaaccacaagcctagcaacaccaaggtggacaagagagtggaacccaagagctgtggtacccagagttttgggttgttggaccctaaattgtgctatctgttggacggaatcctgttcatttacggagtgatcctgaccgcattgttcctgcgggttaagttttccagatccgcagacgcacccgcttaccaacaagggcagaaccaactctacaatgaacttaatttggggcggagggaagagtacgacgttctggacaaaaggaggggacgagatcccgagatgggcggaaagcctcagcgaaggaagaatccgcaagaggggctttataacgaactccagaaagataaaatggcagaagcctatagtgagattgggatgaagggagaaaggaggaggggtaaaggtcacgatgggttgtaccaaggattgagcacagccactaaagatacctatgatgcgctccacatgcaggccctgccgccaaga

SEQ ID NO: 36543 - DNA, 2445 bp, synthetic construct
  source 1..2445: mol_type = other DNA
atggccttaccagtgaccgccttgctcctgccgctggccttgctgctccacgccgccaggccggacatccagatgacacagagccctagcagcctgtctgccagcgtgggagacagagtgaccatcacatgcaagagcagccagagcctgctggactccgatggcaagacctacctgaactggtatcagcagaagcccggcaaggcccctaagctgctgatctacctggtgtccaagctggatagcggcgtgcccagcagattttctggcagcggcagcggaaccgacttcaccctgacaatatccagcctccagcctgaggacttcgccacctactactgcttccaaggcacccactttccattcaccttcggccagggcaccaaggtggaaatcaaaagactcgaggacctgaagaacgtgttcccacctgaggtggccgtgttcgagcctagcgaggccgagatcagccacacccagaaagccaccctcgtgtgcctggctaccggcttctaccccgaccatgtggaactgtcttggtgggtcaacggcaaagaggtgcacagcggcgtgtctaccgacccccagccactgaaagaacagcccgccctgaacgacagccggtactgcctgagcagcagactgagagtgtccgccaccttctggcagaacccccggaaccacttcagatgccaggtgcagttctacggcctgagcgagaacgacgagtggacccaggacagagccaagcccgtgacccagatcgtgtctgccgaagcctggggcagagccgattgcggatcccagagcttcggcctgctggaccccaagctgtgctacctgctggatggcatcctgttcatctacggcgtgatcctgaccgccctgttcctgagagtgaagttcagcagaagcgccgacgcccctgcctaccagcagggacagaaccaactgtacaacgagctgaacctgggcagacgggaagagtacgacgtgctggacaagcggagaggcagggaccctgagatgggcggaaagccccagcggagaaagaacccccaggaaggactgtataacgaactccagaaagacaagatggccgaagcctacagcgagatcggcatgaagggcgagcggagaagaggcaagggccacgatggcctgtaccagggcctgagcaccgccaccaaggacacctatgacgccctgcacatgcaggccctgcctccaagaagggccaagcgatctggatctggagcaacaaacttctcactactcaaacaagcaggtgacgtggaggagaatcccgggcctactagtatggactggatttggcgcatccttttccttgtcggcgctgctaccggcgcgcattccttcgaagaagtgcagctggttgaatcaggcggaggactggttcagcctggcggatctctgagactgtcttgtgccgccagcggctacaccttcagcagctactggatgaactgggtccgacaggcccctggcaaaggactggaatgggtcggaatgatcgaccccagcgacagcgagacacactacaaccacatcttcaaggaccgcttcaccatcagcgccgacaccagcaagaataccgcctacctccagatgaactccctgagagccgaggacaccgccgtgtactactgcgccagaaacctgtatctgtggggccagggaaccctggtcacagtgtcatctacgcgtatccagaaccctgatcctgccgtgtaccagctgcgggatagcaagagcagcgacaagagcgtgtgtctgttcaccgacttcgacagccagaccaacgtgtcccagagcaaggactccgacgtgtacatcaccgataagaccgtgctggacatgcggagcatggacttcaagagcaactccgccgtggcctggtccaacaagtccgatttcgcctgcgccaacgccttcaacaacagcattatccccgaggacacattcttcccaagccccgagagcagctgcggtacccagagttttgggttgttggaccctaaattgtgctatctgttggacggaatcctgttcatttacggagtgatcctgaccgcattgttcctgcgggttaagttttccagatccgcagacgcacccgcttaccaacaagggcagaaccaactctacaatgaacttaatttggggcggagggaagagtacgacgttctggacaaaaggaggggacgagatcccgagatgggcggaaagcctcagcgaaggaagaatccgcaagaggggctttataacgaactccagaaagataaaatggcagaagcctatagtgagattgggatgaagggagaaaggaggaggggtaaaggtcacgatgggttgtaccaaggattgagcacagccactaaagatacctatgatgcgctccacatgcaggccctgccgccaaga

SEQ ID NO: 36544 - DNA, 2571 bp, synthetic construct
  source 1..2571: mol_type = other DNA
atggccttaccagtgaccgccttgctcctgccgctggccttgctgctccacgccgccaggccggacatccagatgacacagagccctagcagcctgtctgccagcgtgggagacagagtgaccatcacatgcaagagcagccagagcctgctggactccgatggcaagacctacctgaactggtatcagcagaagcccggcaaggcccctaagctgctgatctacctggtgtccaagctggatagcggcgtgcccagcagattttctggcagcggcagcggaaccgacttcaccctgacaatatccagcctccagcctgaggacttcgccacctactactgcttccaaggcacccactttccattcaccttcggccagggcaccaaggtggaaatcaaaagactcgaggaggacctgaagaacgtgttcccacctgaggtggccgtgttcgagcctagcgaggccgagatcagccacacccagaaagccaccctcgtgtgcctggctaccggcttctaccccgaccatgtggaactgtcttggtgggtcaacggcaaagaggtgcacagcggcgtgtctaccgacccccagccactgaaagaacagcccgccctgaacgacagccggtactgcctgagcagcagactgagagtgtccgccaccttctggcagaacccccggaaccacttcagatgccaggtgcagttctacggcctgagcgagaacgacgagtggacccaggacagagccaagcccgtgacccagatcgtgtctgccgaagcctggggcagagccgattgcggatcccagagcttcggcctgctggaccccaagctgtgctacctgctggatggcatcctgttcatctacggcgtgatcctgaccgccctgttcctgagagtgaagttcagcagaagcgccgacgcccctgcctaccagcagggacagaaccaactgtacaacgagctgaacctgggcagacgggaagagtacgacgtgctggacaagcggagaggcagggaccctgagatgggcggaaagccccagcggagaaagaacccccaggaaggactgtataacgaactccagaaagacaagatggccgaagcctacagcgagatcggcatgaagggcgagcggagaagaggcaagggccacgatggcctgtaccagggcctgagcaccgccaccaaggacacctatgacgccctgcacatgcaggccctgcctccaagaagggccaagcgatctggatctggagcaacaaacttctcactactcaaacaagcaggtgacgtggaggagaatcccgggcctactagtatggactggatttggcgcatccttttccttgtcggcgctgctaccggcgcgcattccttcgaagaagtgcagctggttgaatcaggcggaggactggttcagcctggcggatctctgagactgtcttgtgccgccagcggctacaccttcagcagctactggatgaactgggtccgacaggcccctggcaaaggactggaatgggtcggaatgatcgaccccagcgacagcgagacacactacaaccacatcttcaaggaccgcttcaccatcagcgccgacaccagcaagaataccgcctacctccagatgaactccctgagagccgaggacaccgccgtgtactactgcgccagaaacctgtatctgtggggccagggaaccctggtcacagtgtcatctacgcgtatccagaaccctgatcctgccgtgtaccagctgcgggatagcaagagcagcgacaagagcgtgtgtctgttcaccgacttcgacagccagaccaacgtgtcccagagcaaggactccgacgtgtacatcaccgataagaccgtgctggacatgcggagcatggacttcaagagcaactccgccgtggcctggtccaacaagtccgatttcgcctgcgccaacgccttcaacaacagcattatccccgaggacacattcttcccaagccccgagagcagctgcggtacccagagttttgggttgttggaccctaaattgtgctatctgttggacggaatcctgttcatttacggagtgatcctgaccgcattgttcctgaggagcaagcggtcacggctgctccacagcgattacatgaatatgacaccacgaagaccgggtcctactcgcaaacactaccaaccctacgcacctccccgcgactttgcagcgtaccgatctcgggttaagttttccagatccgcagacgcacccgcttaccaacaagggcagaaccaactctacaatgaacttaatttggggcggagggaagagtacgacgttctggacaaaaggaggggacgagatcccgagatgggcggaaagcctcagcgaaggaagaatccgcaagaggggctttataacgaactccagaaagataaaatggcagaagcctatagtgagattgggatgaagggagaaaggaggaggggtaaaggtcacgatgggttgtaccaaggattgagcacagccactaaagatacctatgatgcgctccacatgcaggccctgccgccaaga

SEQ ID NO: 36545 - DNA, 2700 bp, synthetic construct
  source 1..2700: mol_type = other DNA
atggccttaccagtgaccgccttgctcctgccgctggccttgctgctccacgccgccaggccggacatccagatgacacagagccctagcagcctgtctgccagcgtgggagacagagtgaccatcacatgcaagagcagccagagcctgctggactccgatggcaagacctacctgaactggtatcagcagaagcccggcaaggcccctaagctgctgatctacctggtgtccaagctggatagcggcgtgcccagcagattttctggcagcggcagcggaaccgacttcaccctgacaatatccagcctccagcctgaggacttcgccacctactactgcttccaaggcacccactttccattcaccttcggccagggcaccaaggtggaaatcaaaagactcgaggaggacctgaagaacgtgttcccacctgaggtggccgtgttcgagcctagcgaggccgagatcagccacacccagaaagccaccctcgtgtgcctggctaccggcttctaccccgaccatgtggaactgtcttggtgggtcaacggcaaagaggtgcacagcggcgtgtctaccgacccccagccactgaaagaacagcccgccctgaacgacagccggtactgcctgagcagcagactgagagtgtccgccaccttctggcagaacccccggaaccacttcagatgccaggtgcagttctacggcctgagcgagaacgacgagtggacccaggacagagccaagcccgtgacccagatcgtgtctgccgaagcctggggcagagccgattgcggatcccagagcttcggcctgctggaccccaagctgtgctacctgctggatggcatcctgttcatctacggcgtgatcctgaccgccctgttcctgaaacggggcagaaagaaactcctgtatatattcaaacaaccatttatgagaccagtacaaactactcaagaggaagatggctgtagctgccgatttccagaagaagaagaaggaggatgtgaactgagagtgaagttcagcagaagcgccgacgcccctgcctaccagcagggacagaaccaactgtacaacgagctgaacctgggcagacgggaagagtacgacgtgctggacaagcggagaggcagggaccctgagatgggcggaaagccccagcggagaaagaacccccaggaaggactgtataacgaactccagaaagacaagatggccgaagcctacagcgagatcggcatgaagggcgagcggagaagaggcaagggccacgatggcctgtaccagggcctgagcaccgccaccaaggacacctatgacgccctgcacatgcaggccctgcctccaagaagggccaagcgatctggatctggagcaacaaacttctcactactcaaacaagcaggtgacgtggaggagaatcccgggcctactagtatggactggatttggcgcatccttttccttgtcggcgctgctaccggcgcgcattccttcgaagaagtgcagctggttgaatcaggcggaggactggttcagcctggcggatctctgagactgtcttgtgccgccagcggctacaccttcagcagctactggatgaactgggtccgacaggcccctggcaaaggactggaatgggtcggaatgatcgaccccagcgacagcgagacacactacaaccacatcttcaaggaccgcttcaccatcagcgccgacaccagcaagaataccgcctacctccagatgaactccctgagagccgaggacaccgccgtgtactactgcgccagaaacctgtatctgtggggccagggaaccctggtcacagtgtcatctacgcgtatccagaaccctgatcctgccgtgtaccagctgcgggatagcaagagcagcgacaagagcgtgtgtctgttcaccgacttcgacagccagaccaacgtgtcccagagcaaggactccgacgtgtacatcaccgataagaccgtgctggacatgcggagcatggacttcaagagcaactccgccgtggcctggtccaacaagtccgatttcgcctgcgccaacgccttcaacaacagcattatccccgaggacacattcttcccaagccccgagagcagctgcggtacccagagttttgggttgttggaccctaaattgtgctatctgttggacggaatcctgttcatttacggagtgatcctgaccgcattgttcctgaagagaggccggaagaagctgctgtacatcttcaagcagcctttcatgcggcccgtgcagaccacccaggaagaggacggctgctcctgccggttccccgaggaagaagaaggcggctgcgagctgcgggttaagttttccagatccgcagacgcacccgcttaccaacaagggcagaaccaactctacaatgaacttaatttggggcggagggaagagtacgacgttctggacaaaaggaggggacgagatcccgagatgggcggaaagcctcagcgaaggaagaatccgcaagaggggctttataacgaactccagaaagataaaatggcagaagcctatagtgagattgggatgaagggagaaaggaggaggggtaaaggtcacgatgggttgtaccaaggattgagcacagccactaaagatacctatgatgcgctccacatgcaggccctgccgccaaga

SEQ ID NO: 36546 - DNA, 1761 bp, synthetic construct
  source 1..1761: mol_type = other DNA
atggccttaccagtgaccgccttgctcctgccgctggccttgctgctccacgccgccaggccggacatccagatgacacagagccctagcagcctgtctgccagcgtgggagacagagtgaccatcacatgcaagagcagccagagcctgctggactccgatggcaagacctacctgaactggtatcagcagaagcccggcaaggcccctaagctgctgatctacctggtgtccaagctggatagcggcgtgcccagcagattttctggcagcggcagcggaaccgacttcaccctgacaatatccagcctccagcctgaggacttcgccacctactactgcttccaaggcacccactttccattcaccttcggccagggcaccaaggtggaaatcaaaagactcgagcagagcttcggcctgctggaccccaagctgtgctacctgctggatggcatcctgttcatctacggcgtgatcctgaccgccctgttcctgagagtgaagttcagcagaagcgccgacgcccctgcctaccagcagggacagaaccaactgtacaacgagctgaacctgggcagacgggaagagtacgacgtgctggacaagcggagaggcagggaccctgagatgggcggaaagccccagcggagaaagaacccccaggaaggactgtataacgaactccagaaagacaagatggccgaagcctacagcgagatcggcatgaagggcgagcggagaagaggcaagggccacgatggcctgtaccagggcctgagcaccgccaccaaggacacctatgacgccctgcacatgcaggccctgcctccaagaagggccaagcgatctggatctggagcaacaaacttctcactactcaaacaagcaggtgacgtggaggagaatcccgggcctactagtatggactggatttggcgcatccttttccttgtcggcgctgctaccggcgcgcattccttcgaagaagtgcagctggttgaatcaggcggaggactggttcagcctggcggatctctgagactgtcttgtgccgccagcggctacaccttcagcagctactggatgaactgggtccgacaggcccctggcaaaggactggaatgggtcggaatgatcgaccccagcgacagcgagacacactacaaccacatcttcaaggaccgcttcaccatcagcgccgacaccagcaagaataccgcctacctccagatgaactccctgagagccgaggacaccgccgtgtactactgcgccagaaacctgtatctgtggggccagggaaccctggtcacagtgtcatctacgcgtcagagttttgggttgttggaccctaaattgtgctatctgttggacggaatcctgttcatttacggagtgatcctgaccgcattgttcctgcgggttaagttttccagatccgcagacgcacccgcttaccaacaagggcagaaccaactctacaatgaacttaatttggggcggagggaagagtacgacgttctggacaaaaggaggggacgagatcccgagatgggcggaaagcctcagcgaaggaagaatccgcaagaggggctttataacgaactccagaaagataaaatggcagaagcctatagtgagattgggatgaagggagaaaggaggaggggtaaaggtcacgatgggttgtaccaaggattgagcacagccactaaagatacctatgatgcgctccacatgcaggccctgccgccaaga

SEQ ID NO: 36547 - DNA, 1935 bp, synthetic construct
  source 1..1935: mol_type = other DNA
atggccttaccagtgaccgccttgctcctgccgctggccttgctgctccacgccgccaggccggacatccagatgacacagagccctagcagcctgtctgccagcgtgggagacagagtgaccatcacatgcaagagcagccagagcctgctggactccgatggcaagacctacctgaactggtatcagcagaagcccggcaaggcccctaagctgctgatctacctggtgtccaagctggatagcggcgtgcccagcagattttctggcagcggcagcggaaccgacttcaccctgacaatatccagcctccagcctgaggacttcgccacctactactgcttccaaggcacccactttccattcaccttcggccagggcaccaaggtggaaatcaaaagactcgagggacagcctaaggccaatcctaccgtgacactgttccctccaagcagcgaagaactccaggccaacaaggccacacttgtgtgcctgatctccgacttctaccctggggctgtgacagtggcttggaaggccgatggatctcctgtgaaagccggcgtggaaaccaccaagccatccaagcagagcaacaacaaatacgccgccagctcctacctgagcctgacacctgagcagtggaagtcccacagatcctacagctgccaagtgacccacgaaggcagcaccgtggaaaagacagtggcccctacagagtgcagccccatcaagaccgatgtgattacaatggaccccaaggacaactgctccaaggacgccaacgataccctgctgctccagctgaccaacaccagcgcctactacatgtacttgttgctgctgctgaagtccgtggtgtacttcgccatcatcacatgctgcctgctgcggagaaccgccttctgctgcaacggcgagaagtctagggccaagcgatctggatctggagcaacaaacttctcactactcaaacaagcaggtgacgtggaggagaatcccgggcctactagtatggactggatttggcgcatccttttccttgtcggcgctgctaccggcgcgcattccttcgaagaagtgcagctggttgaatcaggcggaggactggttcagcctggcggatctctgagactgtcttgtgccgccagcggctacaccttcagcagctactggatgaactgggtccgacaggcccctggcaaaggactggaatgggtcggaatgatcgaccccagcgacagcgagacacactacaaccacatcttcaaggaccgcttcaccatcagcgccgacaccagcaagaataccgcctacctccagatgaactccctgagagccgaggacaccgccgtgtactactgcgccagaaacctgtatctgtggggccagggaaccctggtcacagtgtcatctacgcgtgcctctacaaagggaccctccgtgtttcctctggctcccagcagcaagtctacaagcggaggaacagccgctctgggctgcctggtcaaggattactttcccgagcctgtgaccgtgtcctggaatagcggagcactgacaagcggcgtgcacacctttccagccgtgctgcaaagcagcggcctgtactctctgagcagcgtggtcacagtgcctagctctagcctgggcacccagacctacatctgcaatgtgaaccacaagcctagcaacaccaaggtggacaagagagtggaacccaagagctgtgaagtgaaaaccgactccaccgaccacgtgaagcccaaagagacagagaacaccaagcagcccagcaagagctgccacaagcccaaggccatcgtgcacaccgagaaagtgaacatgatgagcctgaccgtgctgggcctgcggatgctgttcgccaaaaccgtggccgtgaacttcctgctgaccgccaagctgttcttcctc

SEQ ID NO: 36548 - DNA, 1869 bp, synthetic construct
  source 1..1869: mol_type = other DNA
atggccttaccagtgaccgccttgctcctgccgctggccttgctgctccacgccgccaggccggacatccagatgacacagagccctagcagcctgtctgccagcgtgggagacagagtgaccatcacatgcaagagcagccagagcctgctggactccgatggcaagacctacctgaactggtatcagcagaagcccggcaaggcccctaagctgctgatctacctggtgtccaagctggatagcggcgtgcccagcagattttctggcagcggcagcggaaccgacttcaccctgacaatatccagcctccagcctgaggacttcgccacctactactgcttccaaggcacccactttccattcaccttcggccagggcaccaaggtggaaatcaaaagactcgagggacagcctaaggccaatcctaccgtgacactgttccctccaagcagcgaagaactccaggccaacaaggccacacttgtgtgcctgatctccgacttctaccctggggctgtgacagtggcttggaaggccgatggatctcctgtgaaagccggcgtggaaaccaccaagccatccaagcagagcaacaacaaatacgccgccagctcctacctgagcctgacacctgagcagtggaagtcccacagatcctacagctgccaagtgacccacgaaggcagcaccgtggaaaagacagtggcccctacagagtgcagcggcagagccgattgcggcatcaccagcgccagctaccaccagggcgtgctgagcgccaccatcctgtacgagatcctgctgggcaaggccaccctgtacgccgtgctggtgtctgccctggtgctgatggctatggtcaagcggaaggacagccggggaagggccaagcgatctggatctggagcaacaaacttctcactactcaaacaagcaggtgacgtggaggagaatcccgggcctactagtatggactggatttggcgcatccttttccttgtcggcgctgctaccggcgcgcattccttcgaagaagtgcagctggttgaatcaggcggaggactggttcagcctggcggatctctgagactgtcttgtgccgccagcggctacaccttcagcagctactggatgaactgggtccgacaggcccctggcaaaggactggaatgggtcggaatgatcgaccccagcgacagcgagacacactacaaccacatcttcaaggaccgcttcaccatcagcgccgacaccagcaagaataccgcctacctccagatgaactccctgagagccgaggacaccgccgtgtactactgcgccagaaacctgtatctgtggggccagggaaccctggtcacagtgtcatctacgcgtgcctctacaaagggaccctccgtgtttcctctggctcccagcagcaagtctacaagcggaggaacagccgctctgggctgcctggtcaaggattactttcccgagcctgtgaccgtgtcctggaatagcggagcactgacaagcggcgtgcacacctttccagccgtgctgcaaagcagcggcctgtactctctgagcagcgtggtcacagtgcctagctctagcctgggcacccagacctacatctgcaatgtgaaccacaagcctagcaacaccaaggtggacaagagagtggaacccaagagctgtatccccgaggacacattcttcccaagcagcgacgtgccctgcgacgtgaagctggtggaaaagagcttcgagacagacaccaacctgaacttccagaacctgagcgtgatcggcttcagaatcctgctgctgaaagtggccggctttaacctgctgatgaccctgcggctgtggtccagc

SEQ ID NO: 36549 - DNA, 1869 bp, synthetic construct
  source 1..1869: mol_type = other DNA
atggccttaccagtgaccgccttgctcctgccgctggccttgctgctccacgccgccaggccggacatccagatgacacagagccctagcagcctgtctgccagcgtgggagacagagtgaccatcacatgcaagagcagccagagcctgctggactccgatggcaagacctacctgaactggtatcagcagaagcccggcaaggcccctaagctgctgatctacctggtgtccaagctggatagcggcgtgcccagcagattttctggcagcggcagcggaaccgacttcaccctgacaatatccagcctccagcctgaggacttcgccacctactactgcttccaaggcacccactttccattcaccttcggccagggcaccaaggtggaaatcaaaagactcgagggacagcctaaggccaatcctaccgtgacactgttccctccaagcagcgaagaactccaggccaacaaggccacacttgtgtgcctgatctccgacttctaccctggggctgtgacagtggcttggaaggccgatggatctcctgtgaaagccggcgtggaaaccaccaagccatccaagcagagcaacaacaaatacgccgccagctcctacctgagcctgacacctgagcagtggaagtcccacagatcctacagctgccaagtgacccacgaaggcagcaccgtggaaaagacagtggcccctacagagtgcagcggcagagccgattgcggctttaccagcgagagctaccagcagggcgtgctgagcgccaccatcctgtacgagatcctgctgggcaaggccaccctgtacgccgtgctggtgtctgccctggtgctgatggctatggtcaagcggaaggacagccggggaagggccaagcgatctggatctggagcaacaaacttctcactactcaaacaagcaggtgacgtggaggagaatcccgggcctactagtatggactggatttggcgcatccttttccttgtcggcgctgctaccggcgcgcattccttcgaagaagtgcagctggttgaatcaggcggaggactggttcagcctggcggatctctgagactgtcttgtgccgccagcggctacaccttcagcagctactggatgaactgggtccgacaggcccctggcaaaggactggaatgggtcggaatgatcgaccccagcgacagcgagacacactacaaccacatcttcaaggaccgcttcaccatcagcgccgacaccagcaagaataccgcctacctccagatgaactccctgagagccgaggacaccgccgtgtactactgcgccagaaacctgtatctgtggggccagggaaccctggtcacagtgtcatctacgcgtgcctctacaaagggaccctccgtgtttcctctggctcccagcagcaagtctacaagcggaggaacagccgctctgggctgcctggtcaaggattactttcccgagcctgtgaccgtgtcctggaatagcggagcactgacaagcggcgtgcacacctttccagccgtgctgcaaagcagcggcctgtactctctgagcagcgtggtcacagtgcctagctctagcctgggcacccagacctacatctgcaatgtgaaccacaagcctagcaacaccaaggtggacaagagagtggaacccaagagctgtatccccgaggacacattcttcccaagccccgagagcagctgcgacgtgaagctggtggaaaagagcttcgagacagacaccaacctgaacttccagaacctgagcgtgatcggcttcagaatcctgctgctgaaagtggccggctttaacctgctgatgaccctgcggctgtggtccagc

SEQ ID NO: 36550 - DNA, 1347 bp, synthetic construct
  source 1..1347: mol_type = other DNA
atggccttaccagtgaccgccttgctcctgccgctggccttgctgctccacgccgccaggccggacatccagatgacacagagccctagcagcctgtctgccagcgtgggagacagagtgaccatcacatgcaagagcagccagagcctgctggactccgatggcaagacctacctgaactggtatcagcagaagcccggcaaggcccctaagctgctgatctacctggtgtccaagctggatagcggcgtgcccagcagattttctggcagcggcagcggaaccgacttcaccctgacaatatccagcctccagcctgaggacttcgccacctactactgcttccaaggcacccactttccattcaccttcggccagggcaccaaggtggaaatcaaaagaggcggaggcggaagtggaggcggaggatctggcggcggaggctctgaagtgcagctggttgaatcaggcggaggactggttcagcctggcggatctctgagactgtcttgtgccgccagcggctacaccttcagcagctactggatgaactgggtccgacaggcccctggcaaaggactggaatgggtcggaatgatcgaccccagcgacagcgagacacactacaaccacatcttcaaggaccgcttcaccatcagcgccgacaccagcaagaataccgcctacctccagatgaactccctgagagccgaggacaccgccgtgtactactgcgccagaaacctgtatctgtggggccagggaaccctggtcacagtgtcatctacgcgtgacggtaacgaggagatgggaggaatcactcaaaccccttacaaagtctcaatttcaggaacaactgttatccttacatgtccccagtatcctggcagcgagatcctttggcagcataacgacaagaatatagggggagatgaagacgataagaatatcggatctgacgaggatcacttgagcctgaaagagttctccgagcttgaacaaagcggatattatgtgtgctatccgcgcgggtcaaagccggaagacgctaacttttacctttatctccgagccagagtgtgcgaaaattgcatggaaatggacgttatgtccgttgctacaatagttatcgtagatatatgcatcacgggtggactgcttctgctggtttattattggtccaagaatagaaaggccaaagctaaacccgtgaccagaggcgctggcgcaggcggaaggcaaaggggacaaaacaaagaacggccaccaccagtgccaaatccagattatgagcctattcggaaaggacagagggacctgtactctggcctgaatcagagaagaatc

SEQ ID NO: 36551 - DNA, 1242 bp, synthetic construct
  source 1..1242: mol_type = other DNA
atggccttaccagtgaccgccttgctcctgccgctggccttgctgctccacgccgccaggccggacatccagatgacacagagccctagcagcctgtctgccagcgtgggagacagagtgaccatcacatgcaagagcagccagagcctgctggactccgatggcaagacctacctgaactggtatcagcagaagcccggcaaggcccctaagctgctgatctacctggtgtccaagctggatagcggcgtgcccagcagattttctggcagcggcagcggaaccgacttcaccctgacaatatccagcctccagcctgaggacttcgccacctactactgcttccaaggcacccactttccattcaccttcggccagggcaccaaggtggaaatcaaaagaggcggaggcggaagtggaggcggaggatctggcggcggaggctctgaagtgcagctggttgaatcaggcggaggactggttcagcctggcggatctctgagactgtcttgtgccgccagcggctacaccttcagcagctactggatgaactgggtccgacaggcccctggcaaaggactggaatgggtcggaatgatcgaccccagcgacagcgagacacactacaaccacatcttcaaggaccgcttcaccatcagcgccgacaccagcaagaataccgcctacctccagatgaactccctgagagccgaggacaccgccgtgtactactgcgccagaaacctgtatctgtggggccagggaaccctggtcacagtgtcatctacgcgtttcaagatccccatcgaggaactggaagatcgggtgttcgtgaactgcaacacctctatcacctgggtggaaggcaccgtgggaacactgctgagcgacatcaccagactggacctcggcaagcggattctggaccctcggggcatctacagatgcaacggcaccgacatctacaaggacaaagaaagcaccgtgcaggtccactacagaatgtgccagtcctgcgtggaactggaccctgctacagtggccggcatcatcgtgaccgatgtgatcgctactctgctgctggctctgggagtgttctgcttcgccggacacgaaacaggcagactgtctggcgctgccgatacacaggccctgctgagaaacgaccaagtgtatcagcccctgcgcgacagagatgatgcccagtattctcacctcggcggcaactgggctagaaacaag

SEQ ID NO: 36552 - DNA, 1272 bp, synthetic construct
  source 1..1272: mol_type = other DNA
atggccttaccagtgaccgccttgctcctgccgctggccttgctgctccacgccgccaggccggacatccagatgacacagagccctagcagcctgtctgccagcgtgggagacagagtgaccatcacatgcaagagcagccagagcctgctggactccgatggcaagacctacctgaactggtatcagcagaagcccggcaaggcccctaagctgctgatctacctggtgtccaagctggatagcggcgtgcccagcagattttctggcagcggcagcggaaccgacttcaccctgacaatatccagcctccagcctgaggacttcgccacctactactgcttccaaggcacccactttccattcaccttcggccagggcaccaaggtggaaatcaaaagaggcggaggcggaagtggaggcggaggatctggcggcggaggctctgaagtgcagctggttgaatcaggcggaggactggttcagcctggcggatctctgagactgtcttgtgccgccagcggctacaccttcagcagctactggatgaactgggtccgacaggcccctggcaaaggactggaatgggtcggaatgatcgaccccagcgacagcgagacacactacaaccacatcttcaaggaccgcttcaccatcagcgccgacaccagcaagaataccgcctacctccagatgaactccctgagagccgaggacaccgccgtgtactactgcgccagaaacctgtatctgtggggccagggaaccctggtcacagtgtcatctacgcgtcagagcatcaagggcaaccacctggtcaaggtgtacgactaccaagaggacggcagcgtgctgctgacatgtgatgccgaggccaagaacatcacctggtttaaggacggcaagatgatcggcttcctgaccgaggacaagaagaagtggaacctgggcagcaacgctaaggaccccagaggcatgtatcagtgcaagggcagccagaacaagagcaagcccctccaggtgtactaccggatgtgccagaactgcatcgagctgaacgccgctaccatcagcggctttctgttcgccgagatcgtgtccatcttcgtgctggccgtgggcgtgtactttatcgctggacaggatggcgtgcggcagagcagagcttccgataagcaaaccctgctgcctaacgaccagctgtaccagcctctgaaggacagagaggacgaccagtacagccacctccagggcaatcagctgagaagaaac

SEQ ID NO: 36553 - DNA, 1221 bp, synthetic construct
  source 1..1221: mol_type = other DNA
atggccttaccagtgaccgccttgctcctgccgctggccttgctgctccacgccgccaggccggacatccagatgacacagagccctagcagcctgtctgccagcgtgggagacagagtgaccatcacatgcaagagcagccagagcctgctggactccgatggcaagacctacctgaactggtatcagcagaagcccggcaaggcccctaagctgctgatctacctggtgtccaagctggatagcggcgtgcccagcagattttctggcagcggcagcggaaccgacttcaccctgacaatatccagcctccagcctgaggacttcgccacctactactgcttccaaggcacccactttccattcaccttcggccagggcaccaaggtggaaatcaaaagaggcggaggcggaagtggaggcggaggatctggcggcggaggctctgaagtgcagctggttgaatcaggcggaggactggttcagcctggcggatctctgagactgtcttgtgccgccagcggctacaccttcagcagctactggatgaactgggtccgacaggcccctggcaaaggactggaatgggtcggaatgatcgaccccagcgacagcgagacacactacaaccacatcttcaaggaccgcttcaccatcagcgccgacaccagcaagaataccgcctacctccagatgaactccctgagagccgaggacaccgccgtgtactactgcgccagaaacctgtatctgtggggccagggaaccctggtcacagtgtcatctacgcgtcagagttttgggttgttggaccctaaattgtgctatctgttggacggaatcctgttcatttacggagtgatcctgaccgcattgttcctgcgggttaagttttccagatccgcagacgcacccgcttaccaacaagggcagaaccaactctacaatgaacttaatttggggcggagggaagagtacgacgttctggacaaaaggaggggacgagatcccgagatgggcggaaagcctcagcgaaggaagaatccgcaagaggggctttataacgaactccagaaagataaaatggcagaagcctatagtgagattgggatgaagggagaaaggaggaggggtaaaggtcacgatgggttgtaccaaggattgagcacagccactaaagatacctatgatgcgctccacatgcaggccctgccgccaaga

SEQ ID NO: 36554 - DNA, 1506 bp, synthetic construct
  source 1..1506: mol_type = other DNA
atggccttaccagtgaccgccttgctcctgccgctggccttgctgctccacgccgccaggccggacatccagatgacacagagccctagcagcctgtctgccagcgtgggagacagagtgaccatcacatgcaagagcagccagagcctgctggactccgatggcaagacctacctgaactggtatcagcagaagcccggcaaggcccctaagctgctgatctacctggtgtccaagctggatagcggcgtgcccagcagattttctggcagcggcagcggaaccgacttcaccctgacaatatccagcctccagcctgaggacttcgccacctactactgcttccaaggcacccactttccattcaccttcggccagggcaccaaggtggaaatcaaaagaggcggaggcggaagtggaggcggaggatctggcggcggaggctctgaagtgcagctggttgaatcaggcggaggactggttcagcctggcggatctctgagactgtcttgtgccgccagcggctacaccttcagcagctactggatgaactgggtccgacaggcccctggcaaaggactggaatgggtcggaatgatcgaccccagcgacagcgagacacactacaaccacatcttcaaggaccgcttcaccatcagcgccgacaccagcaagaataccgcctacctccagatgaactccctgagagccgaggacaccgccgtgtactactgcgccagaaacctgtatctgtggggccagggaaccctggtcacagtgtcatctacgcgtggaatgaggactgaggatcttcccaaagctgtcgtctttctcgaaccccaatggtatcgggtgctcgaaaaagactctgtgacactgaaatgccaaggggcctactctcccgaggacaactccacacagtggtttcataatgagtccctcatcagctctcaggccagctcttatttcattgatgccgctacagtggacgactccggcgagtatcggtgtcagaccaatctgtctacactgtctgaccccgtgcagcttgaggtccacattggatggttgctcttgcaagccccacgctgggttttcaaagaggaagatccaatccatctgcggtgccacagctggaaaaacaccgctctccacaaagtcacatacctgcaaaatggcaaaggacgcaaatacttccatcacaattccgatttttacattccgaaggctaccctgaaagacagcggcagctatttctgccggggactcgtcggctccaagaatgtgtcctccgaaaccgtgaatatcacgattacccaaggactggctgtgcctacaatctctagcttctttccgcctggataccaagtctccttctgtcttgtgatggtcctcctgtttgctgtggacacaggactgtacttttccgtgaaaacgaacatccgcagctccacacgcgattggaaagatcacaagtttaaatggcgcaaagatccccaggacaag

SEQ ID NO: 36555 - DNA, 1431 bp, synthetic construct
  source 1..1431: mol_type = other DNA
atggccttaccagtgaccgccttgctcctgccgctggccttgctgctccacgccgccaggccggacatccagatgacacagagccctagcagcctgtctgccagcgtgggagacagagtgaccatcacatgcaagagcagccagagcctgctggactccgatggcaagacctacctgaactggtatcagcagaagcccggcaaggcccctaagctgctgatctacctggtgtccaagctggatagcggcgtgcccagcagattttctggcagcggcagcggaaccgacttcaccctgacaatatccagcctccagcctgaggacttcgccacctactactgcttccaaggcacccactttccattcaccttcggccagggcaccaaggtggaaatcaaaagaggcggaggcggaagtggaggcggaggatctggcggcggaggctctgaagtgcagctggttgaatcaggcggaggactggttcagcctggcggatctctgagactgtcttgtgccgccagcggctacaccttcagcagctactggatgaactgggtccgacaggcccctggcaaaggactggaatgggtcggaatgatcgaccccagcgacagcgagacacactacaaccacatcttcaaggaccgcttcaccatcagcgccgacaccagcaagaataccgcctacctccagatgaactccctgagagccgaggacaccgccgtgtactactgcgccagaaacctgtatctgtggggccagggaaccctggtcacagtgtcatctacgcgtggaatgaggactgaggatcttcccaaagctgtcgtctttctcgaaccccaatggtatcgggtgctcgaaaaagactctgtgacactgaaatgccaaggggcctactctcccgaggacaactccacacagtggtttcataatgagtccctcatcagctctcaggccagctcttatttcattgatgccgctacagtggacgactccggcgagtatcggtgtcagaccaatctgtctacactgtctgaccccgtgcagcttgaggtccacattggatggttgctcttgcaagccccacgctgggttttcaaagaggaagatccaatccatctgcggtgccacagctggaaaaacaccgctctccacaaagtcacatacctgcaaaatggcaaaggacgcaaatacttccatcacaattccgatttttacattccgaaggctaccctgaaagacagcggcagctatttctgccggggactcgtcggctccaagaatgtgtcctccgaaaccgtgaatatcacgattacccaaggactggctgtgcctacaatctctagcttctttccgcctggataccaagtctccttctgtcttgtgatggtcctcctgtttgctgtggacacaggactgtacttttccgtg

SEQ ID NO: 36556 - DNA, 1434 bp, synthetic construct
  source 1..1434: mol_type = other DNA
atggccttaccagtgaccgccttgctcctgccgctggccttgctgctccacgccgccaggccggacatccagatgacacagagccctagcagcctgtctgccagcgtgggagacagagtgaccatcacatgcaagagcagccagagcctgctggactccgatggcaagacctacctgaactggtatcagcagaagcccggcaaggcccctaagctgctgatctacctggtgtccaagctggatagcggcgtgcccagcagattttctggcagcggcagcggaaccgacttcaccctgacaatatccagcctccagcctgaggacttcgccacctactactgcttccaaggcacccactttccattcaccttcggccagggcaccaaggtggaaatcaaaagaggcggaggcggaagtggaggcggaggatctggcggcggaggctctgaagtgcagctggttgaatcaggcggaggactggttcagcctggcggatctctgagactgtcttgtgccgccagcggctacaccttcagcagctactggatgaactgggtccgacaggcccctggcaaaggactggaatgggtcggaatgatcgaccccagcgacagcgagacacactacaaccacatcttcaaggaccgcttcaccatcagcgccgacaccagcaagaataccgcctacctccagatgaactccctgagagccgaggacaccgccgtgtactactgcgccagaaacctgtatctgtggggccagggaaccctggtcacagtgtcatctacgcgtggaatgaggactgaggatcttcccaaagctgtcgtctttctcgaaccccaatggtatcgggtgctcgaaaaagactctgtgacactgaaatgccaaggggcctactctcccgaggacaactccacacagtggtttcataatgagtccctcatcagctctcaggccagctcttatttcattgatgccgctacagtggacgactccggcgagtatcggtgtcagaccaatctgtctacactgtctgaccccgtgcagcttgaggtccacattggatggttgctcttgcaagccccacgctgggttttcaaagaggaagatccaatccatctgcggtgccacagctggaaaaacaccgctctccacaaagtcacatacctgcaaaatggcaaaggacgcaaatacttccatcacaattccgatttttacattccgaaggctaccctgaaagacagcggcagctatttctgccggggactcgtcggctccaagaatgtgtcctccgaaaccgtgaatatcacgattacccaaggactggctgtgcctacaatctctagcttctttccgcctggataccaagtctccttctgtcttgtgatggtcctcctgtttgctgtggacacaggactgtacttttccgtgaaa

SEQ ID NO: 36557 - DNA, 2166 bp, synthetic construct
  source 1..2166: mol_type = other DNA
atggccttaccagtgaccgccttgctcctgccgctggccttgctgctccacgccgccaggccggacatccagatgacacagagccctagcagcctgtctgccagcgtgggagacagagtgaccatcacatgcaagagcagccagagcctgctggactccgatggcaagacctacctgaactggtatcagcagaagcccggcaaggcccctaagctgctgatctacctggtgtccaagctggatagcggcgtgcccagcagattttctggcagcggcagcggaaccgacttcaccctgacaatatccagcctccagcctgaggacttcgccacctactactgcttccaaggcacccactttccattcaccttcggccagggcaccaaggtggaaatcaaaagactcgagggacagcctaaggccaatcctaccgtgacactgttccctccaagcagcgaagaactccaggccaacaaggccacacttgtgtgcctgatctccgacttctaccctggggctgtgacagtggcttggaaggccgatggatctcctgtgaaagccggcgtggaaaccaccaagccatccaagcagagcaacaacaaatacgccgccagctcctacctgagcctgacacctgagcagtggaagtcccacagatcctacagctgccaagtgacccacgaaggcagcaccgtggaaaagacagtggcccctacagagtgcagcggatcccagagcttcggcctgctggaccccaagctgtgctacctgctggatggcatcctgttcatctacggcgtgatcctgaccgccctgttcctgagagtgaagttcagcagaagcgccgacgcccctgcctaccagcagggacagaaccaactgtacaacgagctgaacctgggcagacgggaagagtacgacgtgctggacaagcggagaggcagggaccctgagatgggcggaaagccccagcggagaaagaacccccaggaaggactgtataacgaactccagaaagacaagatggccgaagcctacagcgagatcggcatgaagggcgagcggagaagaggcaagggccacgatggcctgtaccagggcctgagcaccgccaccaaggacacctatgacgccctgcacatgcaggccctgcctccaagaagggccaagcgatctggatctggagcaacaaacttctcactactcaaacaagcaggtgacgtggaggagaatcccgggcctactagtatggactggatttggcgcatccttttccttgtcggcgctgctaccggcgcgcattccttcgaagaagtgcagctggttgaatcaggcggaggactggttcagcctggcggatctctgagactgtcttgtgccgccagcggctacaccttcagcagctactggatgaactgggtccgacaggcccctggcaaaggactggaatgggtcggaatgatcgaccccagcgacagcgagacacactacaaccacatcttcaaggaccgcttcaccatcagcgccgacaccagcaagaataccgcctacctccagatgaactccctgagagccgaggacaccgccgtgtactactgcgccagaaacctgtatctgtggggccagggaaccctggtcacagtgtcatctacgcgtgcctctacaaagggaccctccgtgtttcctctggctcccagcagcaagtctacaagcggaggaacagccgctctgggctgcctggtcaaggattactttcccgagcctgtgaccgtgtcctggaatagcggagcactgacaagcggcgtgcacacctttccagccgtgctgcaaagcagcggcctgtactctctgagcagcgtggtcacagtgcctagctctagcctgggcacccagacctacatctgcaatgtgaaccacaagcctagcaacaccaaggtggacaagagagtggaacccaagagctgtggtaccatcactcaaggtttggcagtgtcaaccatctcatcattctttccacctggctaccaagtgtccttctgcctggtcatggtgctgctgttcgccgtggataccggcctgtacttcagcgtcaagaccaacatccggtccagcaccagagactggaaggaccacaagttcaagtggcggaaggaccctcaggacaag

SEQ ID NO: 36558 - DNA, 2211 bp, synthetic construct
  source 1..2211: mol_type = other DNA
atggccttaccagtgaccgccttgctcctgccgctggccttgctgctccacgccgccaggccggacatccagatgacacagagccctagcagcctgtctgccagcgtgggagacagagtgaccatcacatgcaagagcagccagagcctgctggactccgatggcaagacctacctgaactggtatcagcagaagcccggcaaggcccctaagctgctgatctacctggtgtccaagctggatagcggcgtgcccagcagattttctggcagcggcagcggaaccgacttcaccctgacaatatccagcctccagcctgaggacttcgccacctactactgcttccaaggcacccactttccattcaccttcggccagggcaccaaggtggaaatcaaaagactcgaggacctgaagaacgtgttcccacctgaggtggccgtgttcgagcctagcgaggccgagatcagccacacccagaaagccaccctcgtgtgcctggctaccggcttctaccccgaccatgtggaactgtcttggtgggtcaacggcaaagaggtgcacagcggcgtgtctaccgacccccagccactgaaagaacagcccgccctgaacgacagccggtactgcctgagcagcagactgagagtgtccgccaccttctggcagaacccccggaaccacttcagatgccaggtgcagttctacggcctgagcgagaacgacgagtggacccaggacagagccaagcccgtgacccagatcgtgtctgccgaagcctggggcagagccgattgcggatcccagagcttcggcctgctggaccccaagctgtgctacctgctggatggcatcctgttcatctacggcgtgatcctgaccgccctgttcctgagagtgaagttcagcagaagcgccgacgcccctgcctaccagcagggacagaaccaactgtacaacgagctgaacctgggcagacgggaagagtacgacgtgctggacaagcggagaggcagggaccctgagatgggcggaaagccccagcggagaaagaacccccaggaaggactgtataacgaactccagaaagacaagatggccgaagcctacagcgagatcggcatgaagggcgagcggagaagaggcaagggccacgatggcctgtaccagggcctgagcaccgccaccaaggacacctatgacgccctgcacatgcaggccctgcctccaagaagggccaagcgatctggatctggagcaacaaacttctcactactcaaacaagcaggtgacgtggaggagaatcccgggcctactagtatggactggatttggcgcatccttttccttgtcggcgctgctaccggcgcgcattccttcgaagaagtgcagctggttgaatcaggcggaggactggttcagcctggcggatctctgagactgtcttgtgccgccagcggctacaccttcagcagctactggatgaactgggtccgacaggcccctggcaaaggactggaatgggtcggaatgatcgaccccagcgacagcgagacacactacaaccacatcttcaaggaccgcttcaccatcagcgccgacaccagcaagaataccgcctacctccagatgaactccctgagagccgaggacaccgccgtgtactactgcgccagaaacctgtatctgtggggccagggaaccctggtcacagtgtcatctacgcgtatccagaaccctgatcctgccgtgtaccagctgcgggatagcaagagcagcgacaagagcgtgtgtctgttcaccgacttcgacagccagaccaacgtgtcccagagcaaggactccgacgtgtacatcaccgataagaccgtgctggacatgcggagcatggacttcaagagcaactccgccgtggcctggtccaacaagtccgatttcgcctgcgccaacgccttcaacaacagcattatccccgaggacacattcttcccaagccccgagagcagctgcggtaccatcactcaaggtttggcagtgtcaaccatctcatcattctttccacctggctaccaagtgtccttctgcctggtcatggtgctgctgttcgccgtggataccggcctgtacttcagcgtcaagaccaacatccggtccagcaccagagactggaaggaccacaagttcaagtggcggaaggaccctcaggacaag

SEQ ID NO: 36559 - DNA, 2136 bp, synthetic construct
  source 1..2136: mol_type = other DNA
atggccttaccagtgaccgccttgctcctgccgctggccttgctgctccacgccgccaggccggacatccagatgacacagagccctagcagcctgtctgccagcgtgggagacagagtgaccatcacatgcaagagcagccagagcctgctggactccgatggcaagacctacctgaactggtatcagcagaagcccggcaaggcccctaagctgctgatctacctggtgtccaagctggatagcggcgtgcccagcagattttctggcagcggcagcggaaccgacttcaccctgacaatatccagcctccagcctgaggacttcgccacctactactgcttccaaggcacccactttccattcaccttcggccagggcaccaaggtggaaatcaaaagactcgaggacctgaagaacgtgttcccacctgaggtggccgtgttcgagcctagcgaggccgagatcagccacacccagaaagccaccctcgtgtgcctggctaccggcttctaccccgaccatgtggaactgtcttggtgggtcaacggcaaagaggtgcacagcggcgtgtctaccgacccccagccactgaaagaacagcccgccctgaacgacagccggtactgcctgagcagcagactgagagtgtccgccaccttctggcagaacccccggaaccacttcagatgccaggtgcagttctacggcctgagcgagaacgacgagtggacccaggacagagccaagcccgtgacccagatcgtgtctgccgaagcctggggcagagccgattgcggatcccagagcttcggcctgctggaccccaagctgtgctacctgctggatggcatcctgttcatctacggcgtgatcctgaccgccctgttcctgagagtgaagttcagcagaagcgccgacgcccctgcctaccagcagggacagaaccaactgtacaacgagctgaacctgggcagacgggaagagtacgacgtgctggacaagcggagaggcagggaccctgagatgggcggaaagccccagcggagaaagaacccccaggaaggactgtataacgaactccagaaagacaagatggccgaagcctacagcgagatcggcatgaagggcgagcggagaagaggcaagggccacgatggcctgtaccagggcctgagcaccgccaccaaggacacctatgacgccctgcacatgcaggccctgcctccaagaagggccaagcgatctggatctggagcaacaaacttctcactactcaaacaagcaggtgacgtggaggagaatcccgggcctactagtatggactggatttggcgcatccttttccttgtcggcgctgctaccggcgcgcattccttcgaagaagtgcagctggttgaatcaggcggaggactggttcagcctggcggatctctgagactgtcttgtgccgccagcggctacaccttcagcagctactggatgaactgggtccgacaggcccctggcaaaggactggaatgggtcggaatgatcgaccccagcgacagcgagacacactacaaccacatcttcaaggaccgcttcaccatcagcgccgacaccagcaagaataccgcctacctccagatgaactccctgagagccgaggacaccgccgtgtactactgcgccagaaacctgtatctgtggggccagggaaccctggtcacagtgtcatctacgcgtatccagaaccctgatcctgccgtgtaccagctgcgggatagcaagagcagcgacaagagcgtgtgtctgttcaccgacttcgacagccagaccaacgtgtcccagagcaaggactccgacgtgtacatcaccgataagaccgtgctggacatgcggagcatggacttcaagagcaactccgccgtggcctggtccaacaagtccgatttcgcctgcgccaacgccttcaacaacagcattatccccgaggacacattcttcccaagccccgagagcagctgcggtaccatcactcaaggtttggcagtgtcaaccatctcatcattctttccacctggctaccaagtgtccttctgcctggtcatggtgctgctgttcgccgtggataccggcctgtacttcagcgtc

SEQ ID NO: 36560 - DNA, 2139 bp, synthetic construct
  source 1..2139: mol_type = other DNA
atggccttaccagtgaccgccttgctcctgccgctggccttgctgctccacgccgccaggccggacatccagatgacacagagccctagcagcctgtctgccagcgtgggagacagagtgaccatcacatgcaagagcagccagagcctgctggactccgatggcaagacctacctgaactggtatcagcagaagcccggcaaggcccctaagctgctgatctacctggtgtccaagctggatagcggcgtgcccagcagattttctggcagcggcagcggaaccgacttcaccctgacaatatccagcctccagcctgaggacttcgccacctactactgcttccaaggcacccactttccattcaccttcggccagggcaccaaggtggaaatcaaaagactcgaggacctgaagaacgtgttcccacctgaggtggccgtgttcgagcctagcgaggccgagatcagccacacccagaaagccaccctcgtgtgcctggctaccggcttctaccccgaccatgtggaactgtcttggtgggtcaacggcaaagaggtgcacagcggcgtgtctaccgacccccagccactgaaagaacagcccgccctgaacgacagccggtactgcctgagcagcagactgagagtgtccgccaccttctggcagaacccccggaaccacttcagatgccaggtgcagttctacggcctgagcgagaacgacgagtggacccaggacagagccaagcccgtgacccagatcgtgtctgccgaagcctggggcagagccgattgcggatcccagagcttcggcctgctggaccccaagctgtgctacctgctggatggcatcctgttcatctacggcgtgatcctgaccgccctgttcctgagagtgaagttcagcagaagcgccgacgcccctgcctaccagcagggacagaaccaactgtacaacgagctgaacctgggcagacgggaagagtacgacgtgctggacaagcggagaggcagggaccctgagatgggcggaaagccccagcggagaaagaacccccaggaaggactgtataacgaactccagaaagacaagatggccgaagcctacagcgagatcggcatgaagggcgagcggagaagaggcaagggccacgatggcctgtaccagggcctgagcaccgccaccaaggacacctatgacgccctgcacatgcaggccctgcctccaagaagggccaagcgatctggatctggagcaacaaacttctcactactcaaacaagcaggtgacgtggaggagaatcccgggcctactagtatggactggatttggcgcatccttttccttgtcggcgctgctaccggcgcgcattccttcgaagaagtgcagctggttgaatcaggcggaggactggttcagcctggcggatctctgagactgtcttgtgccgccagcggctacaccttcagcagctactggatgaactgggtccgacaggcccctggcaaaggactggaatgggtcggaatgatcgaccccagcgacagcgagacacactacaaccacatcttcaaggaccgcttcaccatcagcgccgacaccagcaagaataccgcctacctccagatgaactccctgagagccgaggacaccgccgtgtactactgcgccagaaacctgtatctgtggggccagggaaccctggtcacagtgtcatctacgcgtatccagaaccctgatcctgccgtgtaccagctgcgggatagcaagagcagcgacaagagcgtgtgtctgttcaccgacttcgacagccagaccaacgtgtcccagagcaaggactccgacgtgtacatcaccgataagaccgtgctggacatgcggagcatggacttcaagagcaactccgccgtggcctggtccaacaagtccgatttcgcctgcgccaacgccttcaacaacagcattatccccgaggacacattcttcccaagccccgagagcagctgcggtaccatcactcaaggtttggcagtgtcaaccatctcatcattctttccacctggctaccaagtgtccttctgcctggtcatggtgctgctgttcgccgtggataccggcctgtacttcagcgtcaag

SEQ ID NO: 36561 - DNA, 2142 bp, synthetic construct
  source 1..2142: mol_type = other DNA
atggccttaccagtgaccgccttgctcctgccgctggccttgctgctccacgccgccaggccggacatccagatgacacagagccctagcagcctgtctgccagcgtgggagacagagtgaccatcacatgcaagagcagccagagcctgctggactccgatggcaagacctacctgaactggtatcagcagaagcccggcaaggcccctaagctgctgatctacctggtgtccaagctggatagcggcgtgcccagcagattttctggcagcggcagcggaaccgacttcaccctgacaatatccagcctccagcctgaggacttcgccacctactactgcttccaaggcacccactttccattcaccttcggccagggcaccaaggtggaaatcaaaagactcgaggacctgaagaacgtgttcccacctgaggtggccgtgttcgagcctagcgaggccgagatcagccacacccagaaagccaccctcgtgtgcctggctaccggcttctaccccgaccatgtggaactgtcttggtgggtcaacggcaaagaggtgcacagcggcgtgtctaccgacccccagccactgaaagaacagcccgccctgaacgacagccggtactgcctgagcagcagactgagagtgtccgccaccttctggcagaacccccggaaccacttcagatgccaggtgcagttctacggcctgagcgagaacgacgagtggacccaggacagagccaagcccgtgacccagatcgtgtctgccgaagcctggggcagagccgattgcggatcccagagcttcggcctgctggaccccaagctgtgctacctgctggatggcatcctgttcatctacggcgtgatcctgaccgccctgttcctgagagtgaagttcagcagaagcgccgacgcccctgcctaccagcagggacagaaccaactgtacaacgagctgaacctgggcagacgggaagagtacgacgtgctggacaagcggagaggcagggaccctgagatgggcggaaagccccagcggagaaagaacccccaggaaggactgtataacgaactccagaaagacaagatggccgaagcctacagcgagatcggcatgaagggcgagcggagaagaggcaagggccacgatggcctgtaccagggcctgagcaccgccaccaaggacacctatgacgccctgcacatgcaggccctgcctccaagaagggccaagcgatctggatctggagcaacaaacttctcactactcaaacaagcaggtgacgtggaggagaatcccgggcctactagtatggactggatttggcgcatccttttccttgtcggcgctgctaccggcgcgcattccttcgaagaagtgcagctggttgaatcaggcggaggactggttcagcctggcggatctctgagactgtcttgtgccgccagcggctacaccttcagcagctactggatgaactgggtccgacaggcccctggcaaaggactggaatgggtcggaatgatcgaccccagcgacagcgagacacactacaaccacatcttcaaggaccgcttcaccatcagcgccgacaccagcaagaataccgcctacctccagatgaactccctgagagccgaggacaccgccgtgtactactgcgccagaaacctgtatctgtggggccagggaaccctggtcacagtgtcatctacgcgtatccagaaccctgatcctgccgtgtaccagctgcgggatagcaagagcagcgacaagagcgtgtgtctgttcaccgacttcgacagccagaccaacgtgtcccagagcaaggactccgacgtgtacatcaccgataagaccgtgctggacatgcggagcatggacttcaagagcaactccgccgtggcctggtccaacaagtccgatttcgcctgcgccaacgccttcaacaacagcattatccccgaggacacattcttcccaagccccgagagcagctgcggtaccatcactcaaggtttggcagtgtcaaccatctcatcattctttccacctggctaccaagtgtccttctgcctggtcatggtgctgctgttcgccgtggataccggcctgtacttcagcgtcaagacc

SEQ ID NO: 36562 - DNA, 1953 bp, synthetic construct
  source 1..1953: mol_type = other DNA
atggccttaccagtgaccgccttgctcctgccgctggccttgctgctccacgccgccaggccggacatccagatgacacagagccctagcagcctgtctgccagcgtgggagacagagtgaccatcacatgcaagagcagccagagcctgctggactccgatggcaagacctacctgaactggtatcagcagaagcccggcaaggcccctaagctgctgatctacctggtgtccaagctggatagcggcgtgcccagcagattttctggcagcggcagcggaaccgacttcaccctgacaatatccagcctccagcctgaggacttcgccacctactactgcttccaaggcacccactttccattcaccttcggccagggcaccaaggtggaaatcaaaagactcgagggacagcctaaggccaatcctaccgtgacactgttccctccaagcagcgaagaactccaggccaacaaggccacacttgtgtgcctgatctccgacttctaccctggggctgtgacagtggcttggaaggccgatggatctcctgtgaaagccggcgtggaaaccaccaagccatccaagcagagcaacaacaaatacgccgccagctcctacctgagcctgacacctgagcagtggaagtcccacagatcctacagctgccaagtgacccacgaaggcagcaccgtggaaaagacagtggcccctacagagtgcagcggatccctgggagagcctcagctgtgctatatcctggacgccatcctgtttctgtacggcatcgtgctgaccctgctgtactgccggctgaagatccaagtgcggaaggccgccatcaccagctacgagaaatccgacggcgtgtacaccggcctgagcaccagaaatcaagagacatacgagacactgaagcacgaaaagcctccacaaagggccaagcgatctggatctggagcaacaaacttctcactactcaaacaagcaggtgacgtggaggagaatcccgggcctactagtatggactggatttggcgcatccttttccttgtcggcgctgctaccggcgcgcattccttcgaagaagtgcagctggttgaatcaggcggaggactggttcagcctggcggatctctgagactgtcttgtgccgccagcggctacaccttcagcagctactggatgaactgggtccgacaggcccctggcaaaggactggaatgggtcggaatgatcgaccccagcgacagcgagacacactacaaccacatcttcaaggaccgcttcaccatcagcgccgacaccagcaagaataccgcctacctccagatgaactccctgagagccgaggacaccgccgtgtactactgcgccagaaacctgtatctgtggggccagggaaccctggtcacagtgtcatctacgcgtgcctctacaaagggaccctccgtgtttcctctggctcccagcagcaagtctacaagcggaggaacagccgctctgggctgcctggtcaaggattactttcccgagcctgtgaccgtgtcctggaatagcggagcactgacaagcggcgtgcacacctttccagccgtgctgcaaagcagcggcctgtactctctgagcagcgtggtcacagtgcctagctctagcctgggcacccagacctacatctgcaatgtgaaccacaagcctagcaacaccaaggtggacaagagagtggaacccaagagctgtggtaccctcggagaaccacagctctgttacattctggatgctatcctgttcctctatgggatcgtcctgacactcctgtattgcagactcaaaattcaagttcgcaaagccgccattacctcttacgagaagagtgatggggtgtacacaggactgtctacccggaatcaagaaacctacgaaaccctcaaacatgagaagccacctcagtaa

SEQ ID NO: 36563 - DNA, 1860 bp, synthetic construct
  source 1..1860: mol_type = other DNA
atggccttaccagtgaccgccttgctcctgccgctggccttgctgctccacgccgccaggccggacatccagatgacacagagccctagcagcctgtctgccagcgtgggagacagagtgaccatcacatgcaagagcagccagagcctgctggactccgatggcaagacctacctgaactggtatcagcagaagcccggcaaggcccctaagctgctgatctacctggtgtccaagctggatagcggcgtgcccagcagattttctggcagcggcagcggaaccgacttcaccctgacaatatccagcctccagcctgaggacttcgccacctactactgcttccaaggcacccactttccattcaccttcggccagggcaccaaggtggaaatcaaaagactcgaggacctgaagaacgtgttcccacctgaggtggccgtgttcgagcctagcgaggccgagatcagccacacccagaaagccaccctcgtgtgcctggctaccggcttctaccccgaccatgtggaactgtcttggtgggtcaacggcaaagaggtgcacagcggcgtgtgtaccgacccccagccactgaaagaacagcccgccctgaacgacagccggtactgcctgagcagcagactgagagtgtccgccaccttctggcagaacccccggaaccacttcagatgccaggtgcagttctacggcctgagcgagaacgacgagtggacccaggacagagccaagcccgtgacccagatcgtgtctgccgaagcctggggcagagccgattgcggctttaccagcgagagctaccagcagggcgtgctgagcgcctactacatgtacttgttgctgctgctgaagtccgtggtgtacttcgccatcatcacatgctgcctgctgcggagaaccgccttctgctgcaacggcgagaagtctagggccaagcgatctggatctggagcaacaaacttctcactactcaaacaagcaggtgacgtggaggagaatcccgggcctactagtatggactggatttggcgcatccttttccttgtcggcgctgctaccggcgcgcattccttcgaagaagtgcagctggttgaatcaggcggaggactggttcagcctggcggatctctgagactgtcttgtgccgccagcggctacaccttcagcagctactggatgaactgggtccgacaggcccctggcaaaggactggaatgggtcggaatgatcgaccccagcgacagcgagacacactacaaccacatcttcaaggaccgcttcaccatcagcgccgacaccagcaagaataccgcctacctccagatgaactccctgagagccgaggacaccgccgtgtactactgcgccagaaacctgtatctgtggggccagggaaccctggtcacagtgtcatctacgcgtatccagaaccctgatcctgccgtgtaccagctgcgggatagcaagagcagcgacaagagcgtgtgtctgttcaccgacttcgacagccagaccaacgtgtcccagagcaaggactccgacgtgtacatcaccgataagtgcgtgctggacatgcggagcatggacttcaagagcaactccgccgtggcctggtccaacaagtccgatttcgcctgcgccaacgccttcaacaacagcattatccccgaggacacattcttcccaagccccgagagcagctgcgacgtgaagctggtggaaaagagcttcgagacagacaccaacctgaacttccagaacctgagcgtgatcggcttcagaatcctgctgctgaaagtggccggctttaacctgctgatgaccctgcggctgtggtccagc

SEQ ID NO: 36564 - DNA, 1881 bp, synthetic construct
  source 1..1881: mol_type = other DNA
atggccttaccagtgaccgccttgctcctgccgctggccttgctgctccacgccgccaggccggacatccagatgacacagagccctagcagcctgtctgccagcgtgggagacagagtgaccatcacatgcaagagcagccagagcctgctggactccgatggcaagacctacctgaactggtatcagcagaagcccggcaaggcccctaagctgctgatctacctggtgtccaagctggatagcggcgtgcccagcagattttctggcagcggcagcggaaccgacttcaccctgacaatatccagcctccagcctgaggacttcgccacctactactgcttccaaggcacccactttccattcaccttcggccagggcaccaaggtggaaatcaaaagactcgaggacaagcagctggacgccgacgtgtcccccaagcctaccatcttcctgccctctatcgccgagacaaagctccagaaggccggcacctacctgtgcctgctggaaaagttcttcccagatgtgattaagatccactggcaggaaaagaagtccaacaccatcctgggcagccaggaaggcaacaccatgaagaccaacgacacctacatgaagttcagctggctgaccgtgcccgagaagtccctggacaaagaacacagatgcatcgtgcggcacgaaaacaacaagaacggcgtggaccaggaaatcatcttcccacccatcaagaccgatgtgattacaatggaccccaaggacaactgctccaaggacgccaacgataccctgctgctccagctgaccaacaccagcgcctactacatgtacgagatcctgctgggcaaggccaccctgtacgccgtgctggtgtctgccctggtgctgatggctatggtcaagcggaaggacagccggggaagggccaagcgatctggatctggagcaacaaacttctcactactcaaacaagcaggtgacgtggaggagaatcccgggcctactagtatggactggatttggcgcatccttttccttgtcggcgctgctaccggcgcgcattccttcgaagaagtgcagctggttgaatcaggcggaggactggttcagcctggcggatctctgagactgtcttgtgccgccagcggctacaccttcagcagctactggatgaactgggtccgacaggcccctggcaaaggactggaatgggtcggaatgatcgaccccagcgacagcgagacacactacaaccacatcttcaaggaccgcttcaccatcagcgccgacaccagcaagaataccgcctacctccagatgaactccctgagagccgaggacaccgccgtgtactactgcgccagaaacctgtatctgtggggccagggaaccctggtcacagtgtcatctacgcgtagccagcctcacaccaagcccagcgtgttcgtgatgaagaacggcaccaacgtggcctgcctcgtgaaagagttctaccccaaggacatcaggatcaacctggtgtccagcaagaagatcaccgagttcgaccccgccatcgtgatctcccccagcggcaagtacaacgccgtgaagctggggaagtatgaggacagcaacagcgtgacctgctccgtgcagcacgacaacaagaccgtgcacagcaccgactttgaagtgaaaaccgactccaccgaccacgtgaagcccaaagagacagagaacaccaagcagcccagcaagagctgccacaagcccaaggccatcgtgcacaccgagaaagtgaacatgatgagcctgaccgtgatcggcttcagaatcctgctgctgaaagtggccggctttaacctgctgatgaccctgcggctgtggtccagctaa

SEQ ID NO: 36565 - DNA, 1881 bp, synthetic construct
  source 1..1881: mol_type = other DNA
atggccttaccagtgaccgccttgctcctgccgctggccttgctgctccacgccgccaggccggacatccagatgacacagagccctagcagcctgtctgccagcgtgggagacagagtgaccatcacatgcaagagcagccagagcctgctggactccgatggcaagacctacctgaactggtatcagcagaagcccggcaaggcccctaagctgctgatctacctggtgtccaagctggatagcggcgtgcccagcagattttctggcagcggcagcggaaccgacttcaccctgacaatatccagcctccagcctgaggacttcgccacctactactgcttccaaggcacccactttccattcaccttcggccagggcaccaaggtggaaatcaaaagactcgaggacaagcagctggacgccgacgtgtcccccaagcctaccatcttcctgccctctatcgccgagacaaagctccagaaggccggcacctacctgtgcctgctggaaaagttcttcccagatgtgattaagatccactggcaggaaaagaagtccaacaccatcctgggcagccaggaaggcaacaccatgaagaccaacgacacctacatgaagttcagctggctgaccgtgcccgagaagtccctggacaaagaacacagatgcatcgtgcggcacgaaaacaacaagaacggcgtggaccaggaaatcatcttcccacccatcaagaccgatgtgattacaatggaccccaaggacaactgctccaaggacgccaacgataccctgctgctccagctgaccaacaccagcgccaccatcctgtacgagatcctgctgggcaaggccaccctgtacgccgtgctggtgtctgccctggtgctgatggctatggtcaagcggaaggacagccggggaagggccaagcgatctggatctggagcaacaaacttctcactactcaaacaagcaggtgacgtggaggagaatcccgggcctactagtatggactggatttggcgcatccttttccttgtcggcgctgctaccggcgcgcattccttcgaagaagtgcagctggttgaatcaggcggaggactggttcagcctggcggatctctgagactgtcttgtgccgccagcggctacaccttcagcagctactggatgaactgggtccgacaggcccctggcaaaggactggaatgggtcggaatgatcgaccccagcgacagcgagacacactacaaccacatcttcaaggaccgcttcaccatcagcgccgacaccagcaagaataccgcctacctccagatgaactccctgagagccgaggacaccgccgtgtactactgcgccagaaacctgtatctgtggggccagggaaccctggtcacagtgtcatctacgcgtagccagcctcacaccaagcccagcgtgttcgtgatgaagaacggcaccaacgtggcctgcctcgtgaaagagttctaccccaaggacatcaggatcaacctggtgtccagcaagaagatcaccgagttcgaccccgccatcgtgatctcccccagcggcaagtacaacgccgtgaagctggggaagtatgaggacagcaacagcgtgacctgctccgtgcagcacgacaacaagaccgtgcacagcaccgactttgaagtgaaaaccgactccaccgaccacgtgaagcccaaagagacagagaacaccaagcagcccagcaagagctgccacaagcccaaggccatcgtgcacaccgagaaagtgaacatgatgagcctgaccgtgatcggcttcagaatcctgctgctgaaagtggccggctttaacctgctgatgaccctgcggctgtggtccagctaa

SEQ ID NO: 36566 - DNA, 1881 bp, synthetic construct
  source 1..1881: mol_type = other DNA
atggccttaccagtgaccgccttgctcctgccgctggccttgctgctccacgccgccaggccggacatccagatgacacagagccctagcagcctgtctgccagcgtgggagacagagtgaccatcacatgcaagagcagccagagcctgctggactccgatggcaagacctacctgaactggtatcagcagaagcccggcaaggcccctaagctgctgatctacctggtgtccaagctggatagcggcgtgcccagcagattttctggcagcggcagcggaaccgacttcaccctgacaatatccagcctccagcctgaggacttcgccacctactactgcttccaaggcacccactttccattcaccttcggccagggcaccaaggtggaaatcaaaagactcgaggacaagcagctggacgccgacgtgtcccccaagcctaccatcttcctgccctctatcgccgagacaaagctccagaaggccggcacctacctgtgcctgctggaaaagttcttcccagatgtgattaagatccactggcaggaaaagaagtccaacaccatcctgggcagccaggaaggcaacaccatgaagaccaacgacacctacatgaagttcagctggctgaccgtgcccgagaagtccctggacaaagaacacagatgcatcgtgcggcacgaaaacaacaagaacggcgtggaccaggaaatcatcttcccacccatcaagaccgatgtgattacaatggaccccaaggacaactgctccaaggacgccaacgataccctgctgctccagctgaccaacaccagcgcctactacatgtacgagatcctgctgggcaaggccaccctgtacgccgtgctggtgtctgccctggtgctgatggctatggtcaagcggaaggacagccggggaagggccaagcgatctggatctggagcaacaaacttctcactactcaaacaagcaggtgacgtggaggagaatcccgggcctactagtatggactggatttggcgcatccttttccttgtcggcgctgctaccggcgcgcattccttcgaagaagtgcagctggttgaatcaggcggaggactggttcagcctggcggatctctgagactgtcttgtgccgccagcggctacaccttcagcagctactggatgaactgggtccgacaggcccctggcaaaggactggaatgggtcggaatgatcgaccccagcgacagcgagacacactacaaccacatcttcaaggaccgcttcaccatcagcgccgacaccagcaagaataccgcctacctccagatgaactccctgagagccgaggacaccgccgtgtactactgcgccagaaacctgtatctgtggggccagggaaccctggtcacagtgtcatctacgcgtagccagcctcacaccaagcccagcgtgttcgtgatgaagaacggcaccaacgtggcctgcctcgtgaaagagttctaccccaaggacatcaggatcaacctggtgtccagcaagaagatcaccgagttcgaccccgccatcgtgatctcccccagcggcaagtacaacgccgtgaagctggggaagtacgaggacagcaacagcgtgacctgctccgtgcagcacgacaacaagaccgtgcacagcaccgactttgaagtgaaaaccgactccaccgaccacgtgaagcccaaagagacagagaacaccaagcagcccagcaagagctgccacaagcccaaggccatcgtgcacaccgagaaagtgaacatgatgagcctgaccgtgctgggcttcagaatcctgctgctgaaagtggccggctttaacctgctgatgaccctgcggctgtggtccagctaa

SEQ ID NO: 36567 - DNA, 1881 bp, synthetic construct
  source 1..1881: mol_type = other DNA
atggccttaccagtgaccgccttgctcctgccgctggccttgctgctccacgccgccaggccggacatccagatgacacagagccctagcagcctgtctgccagcgtgggagacagagtgaccatcacatgcaagagcagccagagcctgctggactccgatggcaagacctacctgaactggtatcagcagaagcccggcaaggcccctaagctgctgatctacctggtgtccaagctggatagcggcgtgcccagcagattttctggcagcggcagcggaaccgacttcaccctgacaatatccagcctccagcctgaggacttcgccacctactactgcttccaaggcacccactttccattcaccttcggccagggcaccaaggtggaaatcaaaagactcgaggacaagcagctggacgccgacgtgtcccccaagcctaccatcttcctgccctctatcgccgagacaaagctccagaaggccggcacctacctgtgcctgctggaaaagttcttcccagatgtgattaagatccactggcaggaaaagaagtccaacaccatcctgggcagccaggaaggcaacaccatgaagaccaacgacacctacatgaagttcagctggctgaccgtgcccgagaagtccctggacaaagaacacagatgcatcgtgcggcacgaaaacaacaagaacggcgtggaccaggaaatcatcttcccacccatcaagaccgatgtgattacaatggaccccaaggacaactgctccaaggacgccaacgataccctgctgctccagctgaccaacaccagcgccaccatcctgtacgagatcctgctgggcaaggccaccctgtacgccgtgctggtgtctgccctggtgctgatggctatggtcaagcggaaggacagccggggaagggccaagcgatctggatctggagcaacaaacttctcactactcaaacaagcaggtgacgtggaggagaatcccgggcctactagtatggactggatttggcgcatccttttccttgtcggcgctgctaccggcgcgcattccttcgaagaagtgcagctggttgaatcaggcggaggactggttcagcctggcggatctctgagactgtcttgtgccgccagcggctacaccttcagcagctactggatgaactgggtccgacaggcccctggcaaaggactggaatgggtcggaatgatcgaccccagcgacagcgagacacactacaaccacatcttcaaggaccgcttcaccatcagcgccgacaccagcaagaataccgcctacctccagatgaactccctgagagccgaggacaccgccgtgtactactgcgccagaaacctgtatctgtggggccagggaaccctggtcacagtgtcatctacgcgtagccagcctcacaccaagcccagcgtgttcgtgatgaagaacggcaccaacgtggcctgcctcgtgaaagagttctaccccaaggacatcaggatcaacctggtgtccagcaagaagatcaccgagttcgaccccgccatcgtgatctcccccagcggcaagtacaacgccgtgaagctggggaagtacgaggacagcaacagcgtgacctgctccgtgcagcacgacaacaagaccgtgcacagcaccgactttgaagtgaaaaccgactccaccgaccacgtgaagcccaaagagacagagaacaccaagcagcccagcaagagctgccacaagcccaaggccatcgtgcacaccgagaaagtgaacatgatgagcctgaccgtgctgggcttcagaatcctgctgctgaaagtggccggctttaacctgctgatgaccctgcggctgtggtccagctaa

SEQ ID NO: 36568 - DNA, 1863 bp, synthetic construct
  source 1..1863: mol_type = other DNA
atggccttaccagtgaccgccttgctcctgccgctggccttgctgctccacgccgccaggccggacatccagatgacacagagccctagcagcctgtctgccagcgtgggagacagagtgaccatcacatgcaagagcagccagagcctgctggactccgatggcaagacctacctgaactggtatcagcagaagcccggcaaggcccctaagctgctgatctacctggtgtccaagctggatagcggcgtgcccagcagattttctggcagcggcagcggaaccgacttcaccctgacaatatccagcctccagcctgaggacttcgccacctactactgcttccaaggcacccactttccattcaccttcggccagggcaccaaggtggaaatcaaaagactcgaggacctgaagaacgtgttcccacctgaggtggccgtgttcgagcctagcgaggccgagatcagccacacccagaaagccaccctcgtgtgcctggctaccggcttctaccccgaccatgtggaactgtcttggtgggtcaacggcaaagaggtgcacagcggcgtgtgtaccgacccccagccactgaaagaacagcccgccctgaacgacagccggtactgcctgagcagcagactgagagtgtccgccaccttctggcagaacccccggaaccacttcagatgccaggtgcagttctacggcctgagcgagaacgacgagtggacccaggacagagccaagcccgtgacccagatcgtgtctgccgaagcctggggcagagccgattgcggctttaccagcgagagctaccagcagggcgtgctgagcgccaccatcctgtacttgttgctgctgctgaagtccgtggtgtacttcgccatcatcacatgctgcctgctgcggagaaccgccttctgctgcaacggcgagaagtctagggccaagcgatctggatctggagcaacaaacttctcactactcaaacaagcaggtgacgtggaggagaatcccgggcctactagtatggactggatttggcgcatccttttccttgtcggcgctgctaccggcgcgcattccttcgaagaagtgcagctggttgaatcaggcggaggactggttcagcctggcggatctctgagactgtcttgtgccgccagcggctacaccttcagcagctactggatgaactgggtccgacaggcccctggcaaaggactggaatgggtcggaatgatcgaccccagcgacagcgagacacactacaaccacatcttcaaggaccgcttcaccatcagcgccgacaccagcaagaataccgcctacctccagatgaactccctgagagccgaggacaccgccgtgtactactgcgccagaaacctgtatctgtggggccagggaaccctggtcacagtgtcatctacgcgtatccagaaccctgatcctgccgtgtaccagctgcgggatagcaagagcagcgacaagagcgtgtgtctgttcaccgacttcgacagccagaccaacgtgtcccagagcaaggactccgacgtgtacatcaccgataagtgcgtgctggacatgcggagcatggacttcaagagcaactccgccgtggcctggtccaacaagtccgatttcgcctgcgccaacgccttcaacaacagcattatccccgaggacacattcttcccaagccccgagagcagctgcgacgtgaagctggtggaaaagagcttcgagacagacaccaacctgaacttccagaacctgagcgtgatcggcctgcggatgctgttcgccaaaaccgtggccgtgaacttcctgctgaccgccaagctgttcttcctctaa

SEQ ID NO: 36569 - DNA, 1950 bp, synthetic construct
  source 1..1950: mol_type = other DNA
atggccttaccagtgaccgccttgctcctgccgctggccttgctgctccacgccgccaggccggacatccagatgacacagagccctagcagcctgtctgccagcgtgggagacagagtgaccatcacatgcaagagcagccagagcctgctggactccgatggcaagacctacctgaactggtatcagcagaagcccggcaaggcccctaagctgctgatctacctggtgtccaagctggatagcggcgtgcccagcagattttctggcagcggcagcggaaccgacttcaccctgacaatatccagcctccagcctgaggacttcgccacctactactgcttccaaggcacccactttccattcaccttcggccagggcaccaaggtggaaatcaaaagactcgaggacctgaagaacgtgttcccacctgaggtggccgtgttcgagcctagcgaggccgagatcagccacacccagaaagccaccctcgtgtgcctggctaccggcttctaccccgaccatgtggaactgtcttggtgggtcaacggcaaagaggtgcacagcggcgtgtctaccgacccccagccactgaaagaacagcccgccctgaacgacagccggtactgcctgagcagcagactgagagtgtccgccaccttctggcagaacccccggaaccacttcagatgccaggtgcagttctacggcctgagcgagaacgacgagtggacccaggacagagccaagcccgtgacccagatcgtgtctgccgaagcctggggcagagccgattgcggatcctccaaggacgccaacgataccctgctgctccagctgaccaacaccagcgcctactacatgtacttgttgctgctgctgaagtccgtggtgtacttcgccatcatcacatgctgcctgctgcggagaaccgccttctgctgcaacggcgagaagtctagggccaagcgatctggatctggagcaacaaacttctcactactcaaacaagcaggtgacgtggaggagaatcccgggcctactagtatggactggatttggcgcatccttttccttgtcggcgctgctaccggcgcgcattccttcgaagaagtgcagctggttgaatcaggcggaggactggttcagcctggcggatctctgagactgtcttgtgccgccagcggctacaccttcagcagctactggatgaactgggtccgacaggcccctggcaaaggactggaatgggtcggaatgatcgaccccagcgacagcgagacacactacaaccacatcttcaaggaccgcttcaccatcagcgccgacaccagcaagaataccgcctacctccagatgaactccctgagagccgaggacaccgccgtgtactactgcgccagaaacctgtatctgtggggccagggaaccctggtcacagtgtcatctacgcgtatccagaaccctgatcctgccgtgtaccagctgcgggatagcaagagcagcgacaagagcgtgtgtctgttcaccgacttcgacagccagaccaacgtgtcccagagcaaggactccgacgtgtacatcaccgataagaccgtgctggacatgcggagcatggacttcaagagcaactccgccgtggcctggtccaacaagtccgatttcgcctgcgccaacgccttcaacaacagcattatccccgaggacacattcttcccaagccccgagagcagctgcggtaccgaagtgaaaaccgactccaccgaccacgtgaagcccaaagagacagagaacaccaagcagcccagcaagagctgccacaagcccaaggccatcgtgcacaccgagaaagtgaacatgatgagcctgaccgtgctgggcctgcggatgctgttcgccaaaaccgtggccgtgaacttcctgctgaccgccaagctgttcttcctctaa

SEQ ID NO: 36570 - DNA, 1860 bp, synthetic construct
  source 1..1860: mol_type = other DNA
atggccttaccagtgaccgccttgctcctgccgctggccttgctgctccacgccgccaggccggacatccagatgacacagagccctagcagcctgtctgccagcgtgggagacagagtgaccatcacatgcaagagcagccagagcctgctggactccgatggcaagacctacctgaactggtatcagcagaagcccggcaaggcccctaagctgctgatctacctggtgtccaagctggatagcggcgtgcccagcagattttctggcagcggcagcggaaccgacttcaccctgacaatatccagcctccagcctgaggacttcgccacctactactgcttccaaggcacccactttccattcaccttcggccagggcaccaaggtggaaatcaaaagactcgaggacctgaagaacgtgttcccacctgaggtggccgtgttcgagcctagcgaggccgagatcagccacacccagaaagccaccctcgtgtgcctggctaccggcttctaccccgaccatgtggaactgtcttggtgggtcaacggcaaagaggtgcacagcggcgtgtgtaccgacccccagccactgaaagaacagcccgccctgaacgacagccggtactgcctgagcagcagactgagagtgtccgccaccttctggcagaacccccggaaccacttcagatgccaggtgcagttctacggcctgagcgagaacgacgagtggacccaggacagagccaagcccgtgacccagatcgtgtctgccgaagcctggggcagagccgattgcgacgtgaagctggtggaaaagagcttcgagacagacaccaacctgaacttccagaacctgagcgtgatcggcttcagaatcctgctgctgaaagtggccggctttaacctgctgatgaccctgcggctgtggtccagcagggccaagcgatctggatctggagcaacaaacttctcactactcaaacaagcaggtgacgtggaggagaatcccgggcctactagtatggactggatttggcgcatccttttccttgtcggcgctgctaccggcgcgcattccttcgaagaagtgcagctggttgaatcaggcggaggactggttcagcctggcggatctctgagactgtcttgtgccgccagcggctacaccttcagcagctactggatgaactgggtccgacaggcccctggcaaaggactggaatgggtcggaatgatcgaccccagcgacagcgagacacactacaaccacatcttcaaggaccgcttcaccatcagcgccgacaccagcaagaataccgcctacctccagatgaactccctgagagccgaggacaccgccgtgtactactgcgccagaaacctgtatctgtggggccagggaaccctggtcacagtgtcatctacgcgtatccagaaccctgatcctgccgtgtaccagctgcgggatagcaagagcagcgacaagagcgtgtgtctgttcaccgacttcgacagccagaccaacgtgtcccagagcaaggactccgacgtgtacatcaccgataagtgcgtgctggacatgcggagcatggacttcaagagcaactccgccgtggcctggtccaacaagtccgatttcgcctgcgccaacgccttcaacaacagcattatccccgaggacacattcttcccaagccccgagagcagctgcggctttaccagcgagagctaccagcagggcgtgctgagcgccaccatcctgtacgagatcctgctgggcaaggccaccctgtacgccgtgctggtgtctgccctggtgctgatggctatggtcaagcggaaggacagccggggataa

SEQ ID NO: 36571 - DNA, 1860 bp, synthetic construct
  source 1..1860: mol_type = other DNA
atggccttaccagtgaccgccttgctcctgccgctggccttgctgctccacgccgccaggccggacatccagatgacacagagccctagcagcctgtctgccagcgtgggagacagagtgaccatcacatgcaagagcagccagagcctgctggactccgatggcaagacctacctgaactggtatcagcagaagcccggcaaggcccctaagctgctgatctacctggtgtccaagctggatagcggcgtgcccagcagattttctggcagcggcagcggaaccgacttcaccctgacaatatccagcctccagcctgaggacttcgccacctactactgcttccaaggcacccactttccattcaccttcggccagggcaccaaggtggaaatcaaaagactcgaggacctgaagaacgtgttcccacctgaggtggccgtgttcgagcctagcgaggccgagatcagccacacccagaaagccaccctcgtgtgcctggctaccggcttctaccccgaccatgtggaactgtcttggtgggtcaacggcaaagaggtgcacagcggcgtgtgtaccgacccccagccactgaaagaacagcccgccctgaacgacagccggtactgcctgagcagcagactgagagtgtccgccaccttctggcagaacccccggaaccacttcagatgccaggtgcagttctacggcctgagcgagaacgacgagtggacccaggacagagccaagcccgtgacccagatcgtgtctgccgaagcctggggcagagccgattgcggctttaccagcgagagctaccagcagggcgtgctgagcgccaccaacctgagcgtgatcggcttcagaatcctgctgctgaaagtggccggctttaacctgctgatgaccctgcggctgtggtccagcagggccaagcgatctggatctggagcaacaaacttctcactactcaaacaagcaggtgacgtggaggagaatcccgggcctactagtatggactggatttggcgcatccttttccttgtcggcgctgctaccggcgcgcattccttcgaagaagtgcagctggttgaatcaggcggaggactggttcagcctggcggatctctgagactgtcttgtgccgccagcggctacaccttcagcagctactggatgaactgggtccgacaggcccctggcaaaggactggaatgggtcggaatgatcgaccccagcgacagcgagacacactacaaccacatcttcaaggaccgcttcaccatcagcgccgacaccagcaagaataccgcctacctccagatgaactccctgagagccgaggacaccgccgtgtactactgcgccagaaacctgtatctgtggggccagggaaccctggtcacagtgtcatctacgcgtatccagaaccctgatcctgccgtgtaccagctgcgggatagcaagagcagcgacaagagcgtgtgtctgttcaccgacttcgacagccagaccaacgtgtcccagagcaaggactccgacgtgtacatcaccgataagtgcgtgctggacatgcggagcatggacttcaagagcaactccgccgtggcctggtccaacaagtccgatttcgcctgcgccaacgccttcaacaacagcattatccccgaggacacattcttcccaagccccgagagcagctgcgacgtgaagctggtggaaaagagcttcgagacagacaccaacctgaacttccagatcctgtacgagatcctgctgggcaaggccaccctgtacgccgtgctggtgtctgccctggtgctgatggctatggtcaagcggaaggacagccggggataa

SEQ ID NO: 36572 - DNA, 1860 bp, synthetic construct; identical to SEQ ID NO: 36570
  source 1..1860: mol_type = other DNA

SEQ ID NO: 36573 - DNA, 1860 bp, synthetic construct; identical to SEQ ID NO: 36571
  source 1..1860: mol_type = other DNA

SEQ ID NO: 36574 - DNA, 1857 bp, synthetic construct
  source 1..1857: mol_type = other DNA
atggccttaccagtgaccgccttgctcctgccgctggccttgctgctccacgccgccaggccggacatccagatgacacagagccctagcagcctgtctgccagcgtgggagacagagtgaccatcacatgcaagagcagccagagcctgctggactccgatggcaagacctacctgaactggtatcagcagaagcccggcaaggcccctaagctgctgatctacctggtgtccaagctggatagcggcgtgcccagcagattttctggcagcggcagcggaaccgacttcaccctgacaatatccagcctccagcctgaggacttcgccacctactactgcttccaaggcacccactttccattcaccttcggccagggcaccaaggtggaaatcaaaagactcgaggacctgaagaacgtgttcccacctgaggtggccgtgttcgagcctagcgaggccgagatcagccacacccagaaagccaccctcgtgtgcctggctaccggcttctaccccgaccatgtggaactgtcttggtgggtcaacggcaaagaggtgcacagcggcgtgtgtaccgacccccagccactgaaagaacagcccgccctgaacgacagccggtactgcctgagcagcagactgagagtgtccgccaccttctggcagaacccccggaaccacttcagatgccaggtgcagttctacggcctgagcgagaacgacgagtggacccaggacagagccaagcccgtgacccagatcgtgtctgccgaagcctggggcagagccgattgcgacgtgaagctggtggaaaagagcttcgagacagacaccaacctgaacttccagaacctgagcgtgatcggcttcagaatcctgctgctgaaagtggccggctttaacctgctgatgaccctgcggctgtggtccagcagggccaagcgatctggatctggagcaacaaacttctcactactcaaacaagcaggtgacgtggaggagaatcccgggcctactagtatggactggatttggcgcatccttttccttgtcggcgctgctaccggcgcgcattccttcgaagaagtgcagctggttgaatcaggcggaggactggttcagcctggcggatctctgagactgtcttgtgccgccagcggctacaccttcagcagctactggatgaactgggtccgacaggcccctggcaaaggactggaatgggtcggaatgatcgaccccagcgacagcgagacacactacaaccacatcttcaaggaccgcttcaccatcagcgccgacaccagcaagaataccgcctacctccagatgaactccctgagagccgaggacaccgccgtgtactactgcgccagaaacctgtatctgtggggccagggaaccctggtcacagtgtcatctacgcgtatccagaaccctgatcctgccgtgtaccagctgcgggatagcaagagcagcgacaagagcgtgtgtctgttcaccgacttcgacagccagaccaacgtgtcccagagcaaggactccgacgtgtacatcaccgataagtgcgtgctggacatgcggagcatggacttcaagagcaactccgccgtggcctggtccaacaagtccgatttcgcctgcgccaacgccttcaacaacagcattatccccgaggacacattcttcccaagccccgagagcagctgcggctttaccagcgagagctaccagcagggcgtgctgagcgccaccatcctgtacgagatcctgctgggcaaggccaccctgtacgccgtgctggtgtctgccctggtgctgatggctatggtcaagcggaaggacagccgggga

SEQ ID NO: 36575 - DNA, 1869 bp, synthetic construct
  source 1..1869: mol_type = other DNA
atggccttaccagtgaccgccttgctcctgccgctggccttgctgctccacgccgccaggccggacatccagatgacacagagccctagcagcctgtctgccagcgtgggagacagagtgaccatcacatgcaagagcagccagagcctgctggactccgatggcaagacctacctgaactggtatcagcagaagcccggcaaggcccctaagctgctgatctacctggtgtccaagctggatagcggcgtgcccagcagattttctggcagcggcagcggaaccgacttcaccctgacaatatccagcctccagcctgaggacttcgccacctactactgcttccaaggcacccactttccattcaccttcggccagggcaccaaggtggaaatcaaaagactcgaggccgacgtgtcccccaagcctaccatcttcctgccctctatcgccgagacaaagctccagaaggccggcacctacctgtgcctgctggaaaagttcttcccagatgtgattaagatccactggcaggaaaagaagtccaacaccatcctgggcagccaggaaggcaacaccatgaagaccaacgacacctacatgaagttcagctggctgaccgtgcccgagaagtccctggacaaagaacacagatgcatcgtgcggcacgaaaacaacaagaacggcgtggaccaggaaatcatcttcccacccatcaagaccgatgtgattacaatggaccccaaggacaactgctccaaggacgccaacgataccctgctgctccagctgaccaacaccagcgcctactacatgtacttgttgctgctgctgaagtccgtggtgtacttcgccatcatcacatgctgcctgctgcggagaaccgccttctgctgcaacggcgagaagtctagggccaagcgatctggatctggagcaacaaacttctcactactcaaacaagcaggtgacgtggaggagaatcccgggcctactagtatggactggatttggcgcatccttttccttgtcggcgctgctaccggcgcgcattccttcgaagaagtgcagctggttgaatcaggcggaggactggttcagcctggcggatctctgagactgtcttgtgccgccagcggctacaccttcagcagctactggatgaactgggtccgacaggcccctggcaaaggactggaatgggtcggaatgatcgaccccagcgacagcgagacacactacaaccacatcttcaaggaccgcttcaccatcagcgccgacaccagcaagaataccgcctacctccagatgaactccctgagagccgaggacaccgccgtgtactactgcgccagaaacctgtatctgtggggccagggaaccctggtcacagtgtcatctacgcgtagccagcctcacaccaagcccagcgtgttcgtgatgaagaacggcaccaacgtggcctgcctcgtgaaagagttctaccccaaggacatcaggatcaacctggtgtccagcaagaagatcaccgagttcgaccccgccatcgtgatctcccccagcggcaagtacaacgccgtgaagctggggaagtatgaggacagcaacagcgtgacctgctccgtgcagcacgacaacaagaccgtgcacagcaccgactttgaagtgaaaaccgactccaccgaccacgtgaagcccaaagagacagagaacaccaagcagcccagcaagagctgccacaagcccaaggccatcgtgcacaccgagaaagtgaacatgatgagcctgaccgtgatcggcttcagaatcctgctgctgaaagtggccggctttaacctgctgatgaccctgcggctgtggtccagctaa

SEQ ID NO: 36576 - DNA, 1869 bp, synthetic construct
  source 1..1869: mol_type = other DNA
atggccttaccagtgaccgccttgctcctgccgctggccttgctgctccacgccgccaggccggacatccagatgacacagagccctagcagcctgtctgccagcgtgggagacagagtgaccatcacatgcaagagcagccagagcctgctggactccgatggcaagacctacctgaactggtatcagcagaagcccggcaaggcccctaagctgctgatctacctggtgtccaagctggatagcggcgtgcccagcagattttctggcagcggcagcggaaccgacttcaccctgacaatatccagcctccagcctgaggacttcgccacctactactgcttccaaggcacccactttccattcaccttcggccagggcaccaaggtggaaatcaaaagactcgaggccgacgtgtcccccaagcctaccatcttcctgccctctatcgccgagacaaagctccagaaggccggcacctacctgtgcctgctggaaaagttcttcccagatgtgattaagatccactggcaggaaaagaagtccaacaccatcctgggcagccaggaaggcaacaccatgaagaccaacgacacctacatgaagttcagctggctgaccgtgcccgagaagtccctggacaaagaacacagatgcatcgtgcggcacgaaaacaacaagaacggcgtggaccaggaaatcatcttcccacccatcaagaccgatgtgattacaatggaccccaaggacaactgctccaaggacgccaacgataccctgctgctccagctgaccaacaccagcgcctactacatgtacttgttgctgctgctgaagtccgtggtgtacttcgccatcatcacatgctgcctgctgcggagaaccgccttctgctgcaacggcgagaagtctagggccaagcgatctggatctggagcaacaaacttctcactactcaaacaagcaggtgacgtggaggagaatcccgggcctactagtatggactggatttggcgcatccttttccttgtcggcgctgctaccggcgcgcattccttcgaagaagtgcagctggttgaatcaggcggaggactggttcagcctggcggatctctgagactgtcttgtgccgccagcggctacaccttcagcagctactggatgaactgggtccgacaggcccctggcaaaggactggaatgggtcggaatgatcgaccccagcgacagcgagacacactacaaccacatcttcaaggaccgcttcaccatcagcgccgacaccagcaagaataccgcctacctccagatgaactccctgagagccgaggacaccgccgtgtactactgcgccagaaacctgtatctgtggggccagggaaccctggtcacagtgtcatctacgcgtagccagcctcacaccaagcccagcgtgttcgtgatgaagaacggcaccaacgtggcctgcctcgtgaaagagttctaccccaaggacatcaggatcaacctggtgtccagcaagaagatcaccgagttcgaccccgccatcgtgatctcccccagcggcaagtacaacgccgtgaagctggggaagtacgaggacagcaacagcgtgacctgctccgtgcagcacgacaacaagaccgtgcacagcaccgactttgaagtgaaaaccgactccaccgaccacgtgaagcccaaagagacagagaacaccaagcagcccagcaagagctgccacaagcccaaggccatcgtgcacaccgagaaagtgaacatgatgagcctgaccgtgctgggcttcagaatcctgctgctgaaagtggccggctttaacctgctgatgaccctgcggctgtggtccagctaa

SEQ ID NO: 36577 - DNA, 1857 bp, synthetic construct; identical to SEQ ID NO: 36574
  source 1..1857: mol_type = other DNA

SEQ ID NO: 36578 - DNA, 1869 bp, synthetic construct
  source 1..1869: mol_type = other DNA
atggccttaccagtgaccgccttgctcctgccgctggccttgctgctccacgccgccaggccggacatccagatgacacagagccctagcagcctgtctgccagcgtgggagacagagtgaccatcacatgcaagagcagccagagcctgctggactccgatggcaagacctacctgaactggtatcagcagaagcccggcaaggcccctaagctgctgatctacctggtgtccaagctggatagcggcgtgcccagcagattttctggcagcggcagcggaaccgacttcaccctgacaatatccagcctccagcctgaggacttcgccacctactactgcttccaaggcacccactttccattcaccttcggccagggcaccaaggtggaaatcaaaagactcgagatccagaaccctgatcctgccgtgtaccagctgcgggatagcaagagcagcgacaagagcgtgtgtctgttcaccgacttcgacagccagaccaacgtgtcccagagcaaggactccgacgtgtacatcaccgataagtgcgtgctggacatgcggagcatggacttcaagagcaactccgccgtggcctggtccaacaagtccgatttcgcctgcgccaacgccttcaacaacagcattatccccgaggacacattcttcccaagccccgagagcagctgcggctttaccagcgagagctaccagcagggcgtgctgagcgccaccatcctgtacgagatcctgctgggcaaggccaccctgtacgccgtgctggtgtctgccctggtgctgatggctatggtcaagcggaaggacagccggggacgcgccaagagaagcggatctggcgtgaagcagaccctgaatttcgacctgctgaagctggctggcgacgtggaatccaacccaggccctactagtatggactggatttggcgcatccttttccttgtcggcgctgctaccggcgcgcattccttcgaagaagtgcagctggttgaatcaggcggaggactggttcagcctggcggatctctgagactgtcttgtgccgccagcggctacaccttcagcagctactggatgaactgggtccgacaggcccctggcaaaggactggaatgggtcggaatgatcgaccccagcgacagcgagacacactacaaccacatcttcaaggaccgcttcaccatcagcgccgacaccagcaagaataccgcctacctccagatgaactccctgagagccgaggacaccgccgtgtactactgcgccagaaacctgtatctgtggggccagggaaccctggtcacagtgtcatctacgcgtgaggacctgaagaacgtgttcccacctgaggtggccgtgttcgagcctagcgaggccgagatcagccacacccagaaagccaccctcgtgtgcctggctaccggcttctaccccgaccatgtggaactgtcttggtgggtcaacggcaaagaggtgcacagcggcgtgtgtaccgacccccagccactgaaagaacagcccgccctgaacgacagccggtactgcctgagcagcagactgagagtgtccgccaccttctggcagaacccccggaaccacttcagatgccaggtgcagttctacggcctgagcgagaacgacgagtggacccaggacagagccaagcccgtgacccagatcgtgtctgccgaagcctggggcagagccgattgcgacgtgaagctggtggaaaagagcttcgagacagacaccaacctgaacttccagaacctgagcgtgatcggcttcagaatcctgctgctgaaagtggccggctttaacctgctgatgaccctgcggctgtggtccagc

SEQ ID NO: 36579 - DNA, 2262 bp, synthetic construct
  source 1..2262: mol_type = other DNA
atggccttaccagtgaccgccttgctcctgccgctggccttgctgctccacgccgccaggccggaagtgcagctggttgaatctggcggaggactggttcagcctggcggatctctgagactgtcttgtgccgccagcggcttcagcttcagcgacttttggatgagctgggtccgacaggcccctggcaaaggacttgaatgggtcgccacaatcagccaggccggcagcgagaaggactacgtggactctgtgaagggcagattcaccatcagccgggacaacgccaagaagtccctgtacctccagatgaacagcctgagagccgaggacaccgccgtgtactattgtgcctctggcgtgtacagcttcgactacagaggccagggcaccctggtcacagtctcttctggtaccggcggaggcggatctggcggcggaggtagcggtggcggaggatctgaattcgacatccagatgacacagagccctagcagcctgtctgccagcgtgggagacagagtgaccatcacatgcaagagcagccagagcctgctggactccgatggcaagacctacctgaactggtatcagcagaagcccggcaaggcccctaagctgctgatctacctggtgtccaagctggatagcggcgtgcccagcagattttctggcagcggcagcggaaccgacttcaccctgacaatatccagcctccagcctgaggacttcgccacctactactgcttccaaggcacccactttccattcaccttcggccagggcaccaaggtggaaatcaaaagactcgaggacctgaagaacgtgttcccacctgaggtggccgtgttcgagcctagcgaggccgagatcagccacacccagaaagccaccctcgtgtgcctggctaccggcttctaccccgaccatgtggaactgtcttggtgggtcaacggcaaagaggtgcacagcggcgtgtgtaccgacccccagccactgaaagaacagcccgccctgaacgacagccggtactgcctgagcagcagactgagagtgtccgccaccttctggcagaacccccggaaccacttcagatgccaggtgcagttctacggcctgagcgagaacgacgagtggacccaggacagagccaagcccgtgacccagatcgtgtctgccgaagcctggggcagagccgattgcgacgtgaagctggtggaaaagagcttcgagacagacaccaacctgaacttccagaacctgagcgtgatcggcttcagaatcctgctgctgaaagtggccggctttaacctgctgatgaccctgcggctgtggtccagcagggccaagcgatctggatctggagcaacaaacttctcactactcaaacaagcaggtgacgtggaggagaatcccgggcctactagtatggactggatttggcgcatccttttccttgtcggcgctgctaccggcgcgcattccttcgaagaagtgcagctggttgaatcaggcggaggactggttcagcctggcggatctctgagactgtcttgtgccgccagcggctacaccttcagcagctactggatgaactgggtccgacaggcccctggcaaaggactggaatgggtcggaatgatcgaccccagcgacagcgagacacactacaaccacatcttcaaggaccgcttcaccatcagcgccgacaccagcaagaataccgcctacctccagatgaactccctgagagccgaggacaccgccgtgtactactgcgccagaaacctgtatctgtggggccagggaaccctggtcacagtgtcatctacgcgtatccagaaccctgatcctgccgtgtaccagctgcgggatagcaagagcagcgacaagagcgtgtgtctgttcaccgacttcgacagccagaccaacgtgtcccagagcaaggactccgacgtgtacatcaccgataagtgcgtgctggacatgcggagcatggacttcaagagcaactccgccgtggcctggtccaacaagtccgatttcgcctgcgccaacgccttcaacaacagcattatccccgaggacacattcttcccaagccccgagagcagctgcggctttaccagcgagagctaccagcagggcgtgctgagcgccaccatcctgtacgagatcctgctgggcaaggccaccctgtacgccgtgctggtgtctgccctggtgctgatggctatggtcaagcggaaggacagccgggga

SEQ ID NO: 36580 - DNA, 2274 bp, synthetic construct
  source 1..2274: mol_type = other DNA
atggccttaccagtgaccgccttgctcctgccgctggccttgctgctccacgccgccaggccggaagtgcagctggttgaatctggcggaggactggttcagcctggcggatctctgagactgtcttgtgccgccagcggcttcagcttcagcgacttttggatgagctgggtccgacaggcccctggcaaaggacttgaatgggtcgccacaatcagccaggccggcagcgagaaggactacgtggactctgtgaagggcagattcaccatcagccgggacaacgccaagaagtccctgtacctccagatgaacagcctgagagccgaggacaccgccgtgtactattgtgcctctggcgtgtacagcttcgactacagaggccagggcaccctggtcacagtctcttctggtaccggcggaggcggatctggcggcggaggtagcggtggcggaggatctgaattcgacatccagatgacacagagccctagcagcctgtctgccagcgtgggagacagagtgaccatcacatgcaagagcagccagagcctgctggactccgatggcaagacctacctgaactggtatcagcagaagcccggcaaggcccctaagctgctgatctacctggtgtccaagctggatagcggcgtgcccagcagattttctggcagcggcagcggaaccgacttcaccctgacaatatccagcctccagcctgaggacttcgccacctactactgcttccaaggcacccactttccattcaccttcggccagggcaccaaggtggaaatcaaaagactcgagatccagaaccctgatcctgccgtgtaccagctgcgggatagcaagagcagcgacaagagcgtgtgtctgttcaccgacttcgacagccagaccaacgtgtcccagagcaaggactccgacgtgtacatcaccgataagtgcgtgctggacatgcggagcatggacttcaagagcaactccgccgtggcctggtccaacaagtccgatttcgcctgcgccaacgccttcaacaacagcattatccccgaggacacattcttcccaagccccgagagcagctgcggctttaccagcgagagctaccagcagggcgtgctgagcgccaccatcctgtacgagatcctgctgggcaaggccaccctgtacgccgtgctggtgtctgccctggtgctgatggctatggtcaagcggaaggacagccggggacgcgccaagagaagcggatctggcgtgaagcagaccctgaatttcgacctgctgaagctggctggcgacgtggaatccaacccaggccctactagtatggactggatttggcgcatccttttccttgtcggcgctgctaccggcgcgcattccttcgaagaagtgcagctggttgaatcaggcggaggactggttcagcctggcggatctctgagactgtcttgtgccgccagcggctacaccttcagcagctactggatgaactgggtccgacaggcccctggcaaaggactggaatgggtcggaatgatcgaccccagcgacagcgagacacactacaaccacatcttcaaggaccgcttcaccatcagcgccgacaccagcaagaataccgcctacctccagatgaactccctgagagccgaggacaccgccgtgtactactgcgccagaaacctgtatctgtggggccagggaaccctggtcacagtgtcatctacgcgtgaggacctgaagaacgtgttcccacctgaggtggccgtgttcgagcctagcgaggccgagatcagccacacccagaaagccaccctcgtgtgcctggctaccggcttctaccccgaccatgtggaactgtcttggtgggtcaacggcaaagaggtgcacagcggcgtgtgtaccgacccccagccactgaaagaacagcccgccctgaacgacagccggtactgcctgagcagcagactgagagtgtccgccaccttctggcagaacccccggaaccacttcagatgccaggtgcagttctacggcctgagcgagaacgacgagtggacccaggacagagccaagcccgtgacccagatcgtgtctgccgaagcctggggcagagccgattgcgacgtgaagctggtggaaaagagcttcgagacagacaccaacctgaacttccagaacctgagcgtgatcggcttcagaatcctgctgctgaaagtggccggctttaacctgctgatgaccctgcggctgtggtccagc

SEQ ID NO: 36581 - DNA, 2673 bp, synthetic construct
  source 1..2673: mol_type = other DNA
atggccttaccagtgaccgccttgctcctgccgctggccttgctgctccacgccgccaggccggaagtgcagctggttgaatctggcggaggactggttcagcctggcggatctctgagactgtcttgtgccgccagcggcttcagcttcagcgacttttggatgagctgggtccgacaggcccctggcaaaggacttgaatgggtcgccacaatcagccaggccggcagcgagaaggactacgtggactctgtgaagggcagattcaccatcagccgggacaacgccaagaagtccctgtacctccagatgaacagcctgagagccgaggacaccgccgtgtactattgtgcctctggcgtgtacagcttcgactacagaggccagggcaccctggtcacagtctcttctggtaccggcggaggcggatctggcggcggaggtagcggtggcggaggatctgaattcgacatccagatgacacagagccctagcagcctgtctgccagcgtgggagacagagtgaccatcacatgcaagagcagccagagcctgctggactccgatggcaagacctacctgaactggtatcagcagaagcccggcaaggcccctaagctgctgatctacctggtgtccaagctggatagcggcgtgcccagcagattttctggcagcggcagcggaaccgacttcaccctgacaatatccagcctccagcctgaggacttcgccacctactactgcttccaaggcacccactttccattcaccttcggccagggcaccaaggtggaaatcaaaagactcgaggacctgaagaacgtgttcccacctgaggtggccgtgttcgagcctagcgaggccgagatcagccacacccagaaagccaccctcgtgtgcctggctaccggcttctaccccgaccatgtggaactgtcttggtgggtcaacggcaaagaggtgcacagcggcgtgtgtaccgacccccagccactgaaagaacagcccgccctgaacgacagccggtactgcctgagcagcagactgagagtgtccgccaccttctggcagaacccccggaaccacttcagatgccaggtgcagttctacggcctgagcgagaacgacgagtggacccaggacagagccaagcccgtgacccagatcgtgtctgccgaagcctggggcagagccgattgcgacgtgaagctggtggaaaagagcttcgagacagacaccaacctgaacttccagaacctgagcgtgatcggcttcagaatcctgctgctgaaagtggccggctttaacctgctgatgaccctgcggctgtggtccagcagggccaagcgatctggatctggagcaacaaacttctcactactcaaacaagcaggtgacgtggaggagaatcccgggcctactagtatggactggatttggcgcatccttttccttgtcggcgctgctaccggcgcgcattccgggccccagctccagctgcaagagtctggacctggcctggtcaagcctagcgagacactgagcctgacctgtaccgtgtccggcgatagcatcagcagcggcgattactactggggctggatcagacagcctcctggcaaaggactggaatggatcggccacatctactacagcggcgtgacctactacaaccccagcctgaagtccagagtgaccatcagcgtggacaccagccggaaccagttctccctgaagctgtctagcgtgacagccgccgataccgccgtgtactactgcaccagagaggacagcagcaactggcggagtagaggccagggaacactggtcacagttagctctggatccggcggaggcggaagtggaggcggaggatctggcggcggaggctctttcgaagaagtgcagctggttgaatcaggcggaggactggttcagcctggcggatctctgagactgtcttgtgccgccagcggctacaccttcagcagctactggatgaactgggtccgacaggcccctggcaaaggactggaatgggtcggaatgatcgaccccagcgacagcgagacacactacaaccacatcttcaaggaccgcttcaccatcagcgccgacaccagcaagaataccgcctacctccagatgaactccctgagagccgaggacaccgccgtgtactactgcgccagaaacctgtatctgtggggccagggaaccctggtcacagtgtcatctacgcgtatccagaaccctgatcctgccgtgtaccagctgcgggatagcaagagcagcgacaagagcgtgtgtctgttcaccgacttcgacagccagaccaacgtgtcccagagcaaggactccgacgtgtacatcaccgataagtgcgtgctggacatgcggagcatggacttcaagagcaactccgccgtggcctggtccaacaagtccgatttcgcctgcgccaacgccttcaacaacagcattatccccgaggacacattcttcccaagccccgagagcagctgcggctttaccagcgagagctaccagcagggcgtgctgagcgccaccatcctgtacgagatcctgctgggcaaggccaccctgtacgccgtgctggtgtctgccctggtgctgatggctatggtcaagcggaaggacagccgggga

SEQ ID NO: 36582 - DNA, 2685 bp, synthetic construct
  source 1..2685: mol_type = other DNA
atggccttaccagtgaccgccttgctcctgccgctggccttgctgctccacgccgccaggccggaagtgcagctggttgaatctggcggaggactggttcagcctggcggatctctgagactgtcttgtgccgccagcggcttcagcttcagcgacttttggatgagctgggtccgacaggcccctggcaaaggacttgaatgggtcgccacaatcagccaggccggcagcgagaaggactacgtggactctgtgaagggcagattcaccatcagccgggacaacgccaagaagtccctgtacctccagatgaacagcctgagagccgaggacaccgccgtgtactattgtgcctctggcgtgtacagcttcgactacagaggccagggcaccctggtcacagtctcttctggtaccggcggaggcggatctggcggcggaggtagcggtggcggaggatctgaattcgacatccagatgacacagagccctagcagcctgtctgccagcgtgggagacagagtgaccatcacatgcaagagcagccagagcctgctggactccgatggcaagacctacctgaactggtatcagcagaagcccggcaaggcccctaagctgctgatctacctggtgtccaagctggatagcggcgtgcccagcagattttctggcagcggcagcggaaccgacttcaccctgacaatatccagcctccagcctgaggacttcgccacctactactgcttccaaggcacccactttccattcaccttcggccagggcaccaaggtggaaatcaaaagactcgagatccagaaccctgatcctgccgtgtaccagctgcgggatagcaagagcagcgacaagagcgtgtgtctgttcaccgacttcgacagccagaccaacgtgtcccagagcaaggactccgacgtgtacatcaccgataagtgcgtgctggacatgcggagcatggacttcaagagcaactccgccgtggcctggtccaacaagtccgatttcgcctgcgccaacgccttcaacaacagcattatccccgaggacacattcttcccaagccccgagagcagctgcggctttaccagcgagagctaccagcagggcgtgctgagcgccaccatcctgtacgagatcctgctgggcaaggccaccctgtacgccgtgctggtgtctgccctggtgctgatggctatggtcaagcggaaggacagccggggacgcgccaagagaagcggatctggcgtgaagcagaccctgaatttcgacctgctgaagctggctggcgacgtggaatccaacccaggccctactagtatggactggatttggcgcatccttttccttgtcggcgctgctaccggcgcgcattccgggccccagctccagctgcaagagtctggacctggcctggtcaagcctagcgagacactgagcctgacctgtaccgtgtccggcgatagcatcagcagcggcgattactactggggctggatcagacagcctcctggcaaaggactggaatggatcggccacatctactacagcggcgtgacctactacaaccccagcctgaagtccagagtgaccatcagcgtggacaccagccggaaccagttctccctgaagctgtctagcgtgacagccgccgataccgccgtgtactactgcaccagagaggacagcagcaactggcggagtagaggccagggaacactggtcacagttagctctggatccggcggaggcggaagtggaggcggaggatctggcggcggaggctctttcgaagaagtgcagctggttgaatcaggcggaggactggttcagcctggcggatctctgagactgtcttgtgccgccagcggctacaccttcagcagctactggatgaactgggtccgacaggcccctggcaaaggactggaatgggtcggaatgatcgaccccagcgacagcgagacacactacaaccacatcttcaaggaccgcttcaccatcagcgccgacaccagcaagaataccgcctacctccagatgaactccctgagagccgaggacaccgccgtgtactactgcgccagaaacctgtatctgtggggccagggaaccctggtcacagtgtcatctacgcgtgaggacctgaagaacgtgttcccacctgaggtggccgtgttcgagcctagcgaggccgagatcagccacacccagaaagccaccctcgtgtgcctggctaccggcttctaccccgaccatgtggaactgtcttggtgggtcaacggcaaagaggtgcacagcggcgtgtgtaccgacccccagccactgaaagaacagcccgccctgaacgacagccggtactgcctgagcagcagactgagagtgtccgccaccttctggcagaacccccggaaccacttcagatgccaggtgcagttctacggcctgagcgagaacgacgagtggacccaggacagagccaagcccgtgacccagatcgtgtctgccgaagcctggggcagagccgattgcgacgtgaagctggtggaaaagagcttcgagacagacaccaacctgaacttccagaacctgagcgtgatcggcttcagaatcctgctgctgaaagtggccggctttaacctgctgatgaccctgcggctgtggtccagc

SEQ ID NO: 36583 - DNA, 2067 bp, synthetic construct
  source 1..2067: mol_type = other DNA
atggccttaccagtgaccgccttgctcctgccgctggccttgctgctccacgccgccaggccggacatccagatgacacagagccctagcagcctgtctgccagcgtgggagacagagtgaccatcacatgcaagagcagccagagcctgctggactccgatggcaagacctacctgaactggtatcagcagaagcccggcaaggcccctaagctgctgatctacctggtgtccaagctggatagcggcgtgcccagcagattttctggcagcggcagcggaaccgacttcaccctgacaatatccagcctccagcctgaggacttcgccacctactactgcttccaaggcacccactttccattcaccttcggccagggcaccaaggtggaaatcaaaagactcgaggacctgaagaacgtgttcccacctgaggtggccgtgttcgagcctagcgaggccgagatcagccacacccagaaagccaccctcgtgtgcctggctaccggcttctaccccgaccatgtggaactgtcttggtgggtcaacggcaaagaggtgcacagcggcgtgtgtaccgacccccagccactgaaagaacagcccgccctgaacgacagccggtactgcctgagcagcagactgagagtgtccgccaccttctggcagaacccccggaaccacttcagatgccaggtgcagttctacggcctgagcgagaacgacgagtggacccaggacagagccaagcccgtgacccagatcgtgtctgccgaagcctggggcagagccgattgcgacgtgaagctggtggaaaagagcttcgagacagacaccaacctgaacttccagaacctgagcgtgatcggcttcagaatcctgctgctgaaagtggccggctttaacctgctgatgaccctgcggctgtggtccagcagggccaagcgatctggatctggagcaacaaacttctcactactcaaacaagcaggtgacgtggaggagaatcccgggcctactagtatggactggatttggcgcatccttttccttgtcggcgctgctaccggcgcccattccgggcccatggaccccgacctggaaatcagagccgccttcctgcggcagagaaacacagccctgagaacagaggtggccgagctggaacaagaggtgcagcggctggaaaacgaggtgtcccagtacgagacaagatacggccctctcggaggcggaaaaggatccggcggcggaggatctggcggaggcggatctgggggcggaggctctttcgaagaagtgcagctggttgaatcaggcggaggactggttcagcctggcggatctctgagactgtcttgtgccgccagcggctacaccttcagcagctactggatgaactgggtccgacaggcccctggcaaaggactggaatgggtcggaatgatcgaccccagcgacagcgagacacactacaaccacatcttcaaggaccgcttcaccatcagcgccgacaccagcaagaataccgcctacctccagatgaactccctgagagccgaggacaccgccgtgtactactgcgccagaaacctgtatctgtggggccagggaaccctggtcacagtgtcatctacgcgtatccagaaccctgatcctgccgtgtaccagctgcgggatagcaagagcagcgacaagagcgtgtgtctgttcaccgacttcgacagccagaccaacgtgtcccagagcaaggactccgacgtgtacatcaccgataagtgcgtgctggacatgcggagcatggacttcaagagcaactccgccgtggcctggtccaacaagtccgatttcgcctgcgccaacgccttcaacaacagcattatccccgaggacacattcttcccaagccccgagagcagctgcggctttaccagcgagagctaccagcagggcgtgctgagcgccaccatcctgtacgagatcctgctgggcaaggccaccctgtacgccgtgctggtgtctgccctggtgctgatggctatggtcaagcggaaggacagccgggga

SEQ ID NO: 36584 - DNA, 2079 bp, synthetic construct
  source 1..2079: mol_type = other DNA
atggccttaccagtgaccgccttgctcctgccgctggccttgctgctccacgccgccaggccggacatccagatgacacagagccctagcagcctgtctgccagcgtgggagacagagtgaccatcacatgcaagagcagccagagcctgctggactccgatggcaagacctacctgaactggtatcagcagaagcccggcaaggcccctaagctgctgatctacctggtgtccaagctggatagcggcgtgcccagcagattttctggcagcggcagcggaaccgacttcaccctgacaatatccagcctccagcctgaggacttcgccacctactactgcttccaaggcacccactttccattcaccttcggccagggcaccaaggtggaaatcaaaagactcgagatccagaaccctgatcctgccgtgtaccagctgcgggatagcaagagcagcgacaagagcgtgtgtctgttcaccgacttcgacagccagaccaacgtgtcccagagcaaggactccgacgtgtacatcaccgataagtgcgtgctggacatgcggagcatggacttcaagagcaactccgccgtggcctggtccaacaagtccgatttcgcctgcgccaacgccttcaacaacagcattatccccgaggacacattcttcccaagccccgagagcagctgcggctttaccagcgagagctaccagcagggcgtgctgagcgccaccatcctgtacgagatcctgctgggcaaggccaccctgtacgccgtgctggtgtctgccctggtgctgatggctatggtcaagcggaaggacagccggggacgcgccaagagaagcggatctggcgtgaagcagaccctgaatttcgacctgctgaagctggctggcgacgtggaatccaacccaggccctactagtatggactggatttggcgcatccttttccttgtcggcgctgctaccggcgcccattccgggcccatggaccccgacctggaaatcagagccgccttcctgcggcagagaaacacagccctgagaacagaggtggccgagctggaacaagaggtgcagcggctggaaaacgaggtgtcccagtacgagacaagatacggccctctcggaggcggaaaaggatccggcggcggaggatctggcggaggcggatctgggggcggaggctctttcgaagaagtgcagctggttgaatcaggcggaggactggttcagcctggcggatctctgagactgtcttgtgccgccagcggctacaccttcagcagctactggatgaactgggtccgacaggcccctggcaaaggactggaatgggtcggaatgatcgaccccagcgacagcgagacacactacaaccacatcttcaaggaccgcttcaccatcagcgccgacaccagcaagaataccgcctacctccagatgaactccctgagagccgaggacaccgccgtgtactactgcgccagaaacctgtatctgtggggccagggaaccctggtcacagtgtcatctacgcgtgaggacctgaagaacgtgttcccacctgaggtggccgtgttcgagcctagcgaggccgagatcagccacacccagaaagccaccctcgtgtgcctggctaccggcttctaccccgaccatgtggaactgtcttggtgggtcaacggcaaagaggtgcacagcggcgtgtgtaccgacccccagccactgaaagaacagcccgccctgaacgacagccggtactgcctgagcagcagactgagagtgtccgccaccttctggcagaacccccggaaccacttcagatgccaggtgcagttctacggcctgagcgagaacgacgagtggacccaggacagagccaagcccgtgacccagatcgtgtctgccgaagcctggggcagagccgattgcgacgtgaagctggtggaaaagagcttcgagacagacaccaacctgaacttccagaacctgagcgtgatcggcttcagaatcctgctgctgaaagtggccggctttaacctgctgatgaccctgcggctgtggtccagc

SEQ ID NO: 36585 - DNA, 1998 bp, synthetic construct
  source 1..1998: mol_type = other DNA
atggccttaccagtgaccgccttgctcctgccgctggccttgctgctccacgccgccaggccggacatccagatgacacagagccctagcagcctgtctgccagcgtgggagacagagtgaccatcacatgcaagagcagccagagcctgctggactccgatggcaagacctacctgaactggtatcagcagaagcccggcaaggcccctaagctgctgatctacctggtgtccaagctggatagcggcgtgcccagcagattttctggcagcggcagcggaaccgacttcaccctgacaatatccagcctccagcctgaggacttcgccacctactactgcttccaaggcacccactttccattcaccttcggccagggcaccaaggtggaaatcaaaagactcgaggacctgaagaacgtgttcccacctgaggtggccgtgttcgagcctagcgaggccgagatcagccacacccagaaagccaccctcgtgtgcctggctaccggcttctaccccgaccatgtggaactgtcttggtgggtcaacggcaaagaggtgcacagcggcgtgtgtaccgacccccagccactgaaagaacagcccgccctgaacgacagccggtactgcctgagcagcagactgagagtgtccgccaccttctggcagaacccccggaaccacttcagatgccaggtgcagttctacggcctgagcgagaacgacgagtggacccaggacagagccaagcccgtgacccagatcgtgtctgccgaagcctggggcagagccgattgcgacgtgaagctggtggaaaagagcttcgagacagacaccaacctgaacttccagaacctgagcgtgatcggcttcagaatcctgctgctgaaagtggccggctttaacctgctgatgaccctgcggctgtggtccagcagggccaagcgatctggatctggagcaacaaacttctcactactcaaacaagcaggtgacgtggaggagaatcccgggcctactagtatggactggatttggcgcatccttttccttgtcggcgctgctaccggcgcccattccgggcccgaagttgctgccctcgagaaggaggtagcagctttggaaaaagaagtcgcagcccttgagaaagaagttgcggctctggagaagggatccggcggcggaggatctggcggaggcggatctgggggcggaggctctttcgaagaagtgcagctggttgaatcaggcggaggactggttcagcctggcggatctctgagactgtcttgtgccgccagcggctacaccttcagcagctactggatgaactgggtccgacaggcccctggcaaaggactggaatgggtcggaatgatcgaccccagcgacagcgagacacactacaaccacatcttcaaggaccgcttcaccatcagcgccgacaccagcaagaataccgcctacctccagatgaactccctgagagccgaggacaccgccgtgtactactgcgccagaaacctgtatctgtggggccagggaaccctggtcacagtgtcatctacgcgtatccagaaccctgatcctgccgtgtaccagctgcgggatagcaagagcagcgacaagagcgtgtgtctgttcaccgacttcgacagccagaccaacgtgtcccagagcaaggactccgacgtgtacatcaccgataagtgcgtgctggacatgcggagcatggacttcaagagcaactccgccgtggcctggtccaacaagtccgatttcgcctgcgccaacgccttcaacaacagcattatccccgaggacacattcttcccaagccccgagagcagctgcggctttaccagcgagagctaccagcagggcgtgctgagcgccaccatcctgtacgagatcctgctgggcaaggccaccctgtacgccgtgctggtgtctgccctggtgctgatggctatggtcaagcggaaggacagccgggga

SEQ ID NO: 36586 - DNA, 2010 bp, synthetic construct
  source 1..2010: mol_type = other DNA
atggccttaccagtgaccgccttgctcctgccgctggccttgctgctccacgccgccaggccggacatccagatgacacagagccctagcagcctgtctgccagcgtgggagacagagtgaccatcacatgcaagagcagccagagcctgctggactccgatggcaagacctacctgaactggtatcagcagaagcccggcaaggcccctaagctgctgatctacctggtgtccaagctggatagcggcgtgcccagcagattttctggcagcggcagcggaaccgacttcaccctgacaatatccagcctccagcctgaggacttcgccacctactactgcttccaaggcacccactttccattcaccttcggccagggcaccaaggtggaaatcaaaagactcgagatccagaaccctgatcctgccgtgtaccagctgcgggatagcaagagcagcgacaagagcgtgtgtctgttcaccgacttcgacagccagaccaacgtgtcccagagcaaggactccgacgtgtacatcaccgataagtgcgtgctggacatgcggagcatggacttcaagagcaactccgccgtggcctggtccaacaagtccgatttcgcctgcgccaacgccttcaacaacagcattatccccgaggacacattcttcccaagccccgagagcagctgcggctttaccagcgagagctaccagcagggcgtgctgagcgccaccatcctgtacgagatcctgctgggcaaggccaccctgtacgccgtgctggtgtctgccctggtgctgatggctatggtcaagcggaaggacagccggggacgcgccaagagaagcggatctggcgtgaagcagaccctgaatttcgacctgctgaagctggctggcgacgtggaatccaacccaggccctactagtatggactggatttggcgcatccttttccttgtcggcgctgctaccggcgcccattccgggcccgaagttgctgccctcgagaaggaggtagcagctttggaaaaagaagtcgcagcccttgagaaagaagttgcggctctggagaagggatccggcggcggaggatctggcggaggcggatctgggggcggaggctctttcgaagaagtgcagctggttgaatcaggcggaggactggttcagcctggcggatctctgagactgtcttgtgccgccagcggctacaccttcagcagctactggatgaactgggtccgacaggcccctggcaaaggactggaatgggtcggaatgatcgaccccagcgacagcgagacacactacaaccacatcttcaaggaccgcttcaccatcagcgccgacaccagcaagaataccgcctacctccagatgaactccctgagagccgaggacaccgccgtgtactactgcgccagaaacctgtatctgtggggccagggaaccctggtcacagtgtcatctacgcgtgaggacctgaagaacgtgttcccacctgaggtggccgtgttcgagcctagcgaggccgagatcagccacacccagaaagccaccctcgtgtgcctggctaccggcttctaccccgaccatgtggaactgtcttggtgggtcaacggcaaagaggtgcacagcggcgtgtgtaccgacccccagccactgaaagaacagcccgccctgaacgacagccggtactgcctgagcagcagactgagagtgtccgccaccttctggcagaacccccggaaccacttcagatgccaggtgcagttctacggcctgagcgagaacgacgagtggacccaggacagagccaagcccgtgacccagatcgtgtctgccgaagcctggggcagagccgattgcgacgtgaagctggtggaaaagagcttcgagacagacaccaacctgaacttccagaacctgagcgtgatcggcttcagaatcctgctgctgaaagtggccggctttaacctgctgatgaccctgcggctgtggtccagc

SEQ ID NO: 36587 - DNA, 2268 bp, synthetic construct
  source 1..2268: mol_type = other DNA
atggccttaccagtgaccgccttgctcctgccgctggccttgctgctccacgccgccaggccggacatccagatgacacagagccctagcagcctgtctgccagcgtgggagacagagtgaccatcacatgcaagagcagccagagcctgctggactccgatggcaagacctacctgaactggtatcagcagaagcccggcaaggcccctaagctgctgatctacctggtgtccaagctggatagcggcgtgcccagcagattttctggcagcggcagcggaaccgacttcaccctgacaatatccagcctccagcctgaggacttcgccacctactactgcttccaaggcacccactttccattcaccttcggccagggcaccaaggtggaaatcaaaagactcgaggacctgaagaacgtgttcccacctgaggtggccgtgttcgagcctagcgaggccgagatcagccacacccagaaagccaccctcgtgtgcctggctaccggcttctaccccgaccatgtggaactgtcttggtgggtcaacggcaaagaggtgcacagcggcgtgtgtaccgacccccagccactgaaagaacagcccgccctgaacgacagccggtactgcctgagcagcagactgagagtgtccgccaccttctggcagaacccccggaaccacttcagatgccaggtgcagttctacggcctgagcgagaacgacgagtggacccaggacagagccaagcccgtgacccagatcgtgtctgccgaagcctggggcagagccgattgcgacgtgaagctggtggaaaagagcttcgagacagacaccaacctgaacttccagaacctgagcgtgatcggcttcagaatcctgctgctgaaagtggccggctttaacctgctgatgaccctgcggctgtggtccagcagggccaagcgatctggatctggagcaacaaacttctcactactcaaacaagcaggtgacgtggaggagaatcccgggcctactagtatggactggatttggcgcatccttttccttgtcggcgctgctaccggcgcccattccgggccccaggttcagctgcaagagtctggcggaggacttgctcaagctggcggaagcctgagactgtcttgtgccgcctctggcagaaccttcagcatgggctggtttagacaggcccctggcaaagagagagagttcgtcgccgccatcacatacagcggcggcagcccttactacgcctcttctgtcagaggccggttcaccatcagccgggacaacgccaagaacaccgtgtacctccagatgaacagcctgaagccagaggacaccgccgtgtactactgtgccgccaatccaacctacggcagcgactggaatgccgagaattggggccagggcacccaagtgacagtgtctagtggatccggcggcggaggatctggcggaggcggatctgggggcggaggctctttcgaagaagtgcagctggttgaatcaggcggaggactggttcagcctggcggatctctgagactgtcttgtgccgccagcggctacaccttcagcagctactggatgaactgggtccgacaggcccctggcaaaggactggaatgggtcggaatgatcgaccccagcgacagcgagacacactacaaccacatcttcaaggaccgcttcaccatcagcgccgacaccagcaagaataccgcctacctccagatgaactccctgagagccgaggacaccgccgtgtactactgcgccagaaacctgtatctgtggggccagggaaccctggtcacagtgtcatctacgcgtatccagaaccctgatcctgccgtgtaccagctgcgggatagcaagagcagcgacaagagcgtgtgtctgttcaccgacttcgacagccagaccaacgtgtcccagagcaaggactccgacgtgtacatcaccgataagtgcgtgctggacatgcggagcatggacttcaagagcaactccgccgtggcctggtccaacaagtccgatttcgcctgcgccaacgccttcaacaacagcattatccccgaggacacattcttcccaagccccgagagcagctgcggctttaccagcgagagctaccagcagggcgtgctgagcgccaccatcctgtacgagatcctgctgggcaaggccaccctgtacgccgtgctggtgtctgccctggtgctgatggctatggtcaagcggaaggacagccgggga

SEQ ID NO: 36588 - DNA, 2280 bp, synthetic construct
  source 1..2280: mol_type = other DNA
atggccttaccagtgaccgccttgctcctgccgctggccttgctgctccacgccgccaggccggacatccagatgacacagagccctagcagcctgtctgccagcgtgggagacagagtgaccatcacatgcaagagcagccagagcctgctggactccgatggcaagacctacctgaactggtatcagcagaagcccggcaaggcccctaagctgctgatctacctggtgtccaagctggatagcggcgtgcccagcagattttctggcagcggcagcggaaccgacttcaccctgacaatatccagcctccagcctgaggacttcgccacctactactgcttccaaggcacccactttccattcaccttcggccagggcaccaaggtggaaatcaaaagactcgagatccagaaccctgatcctgccgtgtaccagctgcgggatagcaagagcagcgacaagagcgtgtgtctgttcaccgacttcgacagccagaccaacgtgtcccagagcaaggactccgacgtgtacatcaccgataagtgcgtgctggacatgcggagcatggacttcaagagcaactccgccgtggcctggtccaacaagtccgatttcgcctgcgccaacgccttcaacaacagcattatccccgaggacacattcttcccaagccccgagagcagctgcggctttaccagcgagagctaccagcagggcgtgctgagcgccaccatcctgtacgagatcctgctgggcaaggccaccctgtacgccgtgctggtgtctgccctggtgctgatggctatggtcaagcggaaggacagccggggacgcgccaagagaagcggatctggcgtgaagcagaccctgaatttcgacctgctgaagctggctggcgacgtggaatccaacccaggccctactagtatggactggatttggcgcatccttttccttgtcggcgctgctaccggcgcccattccgggccccaggttcagctgcaagagtctggcggaggacttgctcaagctggcggaagcctgagactgtcttgtgccgcctctggcagaaccttcagcatgggctggtttagacaggcccctggcaaagagagagagttcgtcgccgccatcacatacagcggcggcagcccttactacgcctcttctgtcagaggccggttcaccatcagccgggacaacgccaagaacaccgtgtacctccagatgaacagcctgaagccagaggacaccgccgtgtactactgtgccgccaatccaacctacggcagcgactggaatgccgagaattggggccagggcacccaagtgacagtgtctagtggatccggcggcggaggatctggcggaggcggatctgggggcggaggctctttcgaagaagtgcagctggttgaatcaggcggaggactggttcagcctggcggatctctgagactgtcttgtgccgccagcggctacaccttcagcagctactggatgaactgggtccgacaggcccctggcaaaggactggaatgggtcggaatgatcgaccccagcgacagcgagacacactacaaccacatcttcaaggaccgcttcaccatcagcgccgacaccagcaagaataccgcctacctccagatgaactccctgagagccgaggacaccgccgtgtactactgcgccagaaacctgtatctgtggggccagggaaccctggtcacagtgtcatctacgcgtgaggacctgaagaacgtgttcccacctgaggtggccgtgttcgagcctagcgaggccgagatcagccacacccagaaagccaccctcgtgtgcctggctaccggcttctaccccgaccatgtggaactgtcttggtgggtcaacggcaaagaggtgcacagcggcgtgtgtaccgacccccagccactgaaagaacagcccgccctgaacgacagccggtactgcctgagcagcagactgagagtgtccgccaccttctggcagaacccccggaaccacttcagatgccaggtgcagttctacggcctgagcgagaacgacgagtggacccaggacagagccaagcccgtgacccagatcgtgtctgccgaagcctggggcagagccgattgcgacgtgaagctggtggaaaagagcttcgagacagacaccaacctgaacttccagaacctgagcgtgatcggcttcagaatcctgctgctgaaagtggccggctttaacctgctgatgaccctgcggctgtggtccagc

SEQ ID NO: 36589 - DNA, 2286 bp, synthetic construct
  source 1..2286: mol_type = other DNA
atggccttaccagtgaccgccttgctcctgccgctggccttgctgctccacgccgccaggccggaagtgcaactggtggaatctggaggctctctggtgcagccagggggaagcctgagactgtcttgtgccgcttccggcttcaccttcgacgactacgccatgagctgggtgcgccaggtgccaggcaaaggcctggaatgggtgtccagcatcaactggagcggcacccacaccgattacgccgactccgtgaaaggcagattcacaatcagcagaaacaacgccaacaataccctgtacctgcagatgaactccctgaagtctgaggatacagcagtgtattattgcgccaagaactggcgggacgccggcaccacttggtttgagaaaagcggctctgccggacagggaacccaagtgacagtgtcctccggtaccggcggaggcggatctggcggcggaggtagcggtggcggaggatctgaattcgacatccagatgacacagagccctagcagcctgtctgccagcgtgggagacagagtgaccatcacatgcaagagcagccagagcctgctggactccgatggcaagacctacctgaactggtatcagcagaagcccggcaaggcccctaagctgctgatctacctggtgtccaagctggatagcggcgtgcccagcagattttctggcagcggcagcggaaccgacttcaccctgacaatatccagcctccagcctgaggacttcgccacctactactgcttccaaggcacccactttccattcaccttcggccagggcaccaaggtggaaatcaaaagactcgaggacctgaagaacgtgttcccacctgaggtggccgtgttcgagcctagcgaggccgagatcagccacacccagaaagccaccctcgtgtgcctggctaccggcttctaccccgaccatgtggaactgtcttggtgggtcaacggcaaagaggtgcacagcggcgtgtgtaccgacccccagccactgaaagaacagcccgccctgaacgacagccggtactgcctgagcagcagactgagagtgtccgccaccttctggcagaacccccggaaccacttcagatgccaggtgcagttctacggcctgagcgagaacgacgagtggacccaggacagagccaagcccgtgacccagatcgtgtctgccgaagcctggggcagagccgattgcgacgtgaagctggtggaaaagagcttcgagacagacaccaacctgaacttccagaacctgagcgtgatcggcttcagaatcctgctgctgaaagtggccggctttaacctgctgatgaccctgcggctgtggtccagcagggccaagcgatctggatctggagcaacaaacttctcactactcaaacaagcaggtgacgtggaggagaatcccgggcctactagtatggactggatttggcgcatccttttccttgtcggcgctgctaccggcgcgcattccttcgaagaagtgcagctggttgaatcaggcggaggactggttcagcctggcggatctctgagactgtcttgtgccgccagcggctacaccttcagcagctactggatgaactgggtccgacaggcccctggcaaaggactggaatgggtcggaatgatcgaccccagcgacagcgagacacactacaaccacatcttcaaggaccgcttcaccatcagcgccgacaccagcaagaataccgcctacctccagatgaactccctgagagccgaggacaccgccgtgtactactgcgccagaaacctgtatctgtggggccagggaaccctggtcacagtgtcatctacgcgtatccagaaccctgatcctgccgtgtaccagctgcgggatagcaagagcagcgacaagagcgtgtgtctgttcaccgacttcgacagccagaccaacgtgtcccagagcaaggactccgacgtgtacatcaccgataagtgcgtgctggacatgcggagcatggacttcaagagcaactccgccgtggcctggtccaacaagtccgatttcgcctgcgccaacgccttcaacaacagcattatccccgaggacacattcttcccaagccccgagagcagctgcggctttaccagcgagagctaccagcagggcgtgctgagcgccaccatcctgtacgagatcctgctgggcaaggccaccctgtacgccgtgctggtgtctgccctggtgctgatggctatggtcaagcggaaggacagccgggga

SEQ ID NO: 36590 - DNA, 2298 bp, synthetic construct
  source 1..2298: mol_type = other DNA
atggccttaccagtgaccgccttgctcctgccgctggccttgctgctccacgccgccaggccggaagtgcaactggtggaatctggaggctctctggtgcagccagggggaagcctgagactgtcttgtgccgcttccggcttcaccttcgacgactacgccatgagctgggtgcgccaggtgccaggcaaaggcctggaatgggtgtccagcatcaactggagcggcacccacaccgattacgccgactccgtgaaaggcagattcacaatcagcagaaacaacgccaacaataccctgtacctgcagatgaactccctgaagtctgaggatacagcagtgtattattgcgccaagaactggcgggacgccggcaccacttggtttgagaaaagcggctctgccggacagggaacccaagtgacagtgtcctccggtaccggcggaggcggatctggcggcggaggtagcggtggcggaggatctgaattcgacatccagatgacacagagccctagcagcctgtctgccagcgtgggagacagagtgaccatcacatgcaagagcagccagagcctgctggactccgatggcaagacctacctgaactggtatcagcagaagcccggcaaggcccctaagctgctgatctacctggtgtccaagctggatagcggcgtgcccagcagattttctggcagcggcagcggaaccgacttcaccctgacaatatccagcctccagcctgaggacttcgccacctactactgcttccaaggcacccactttccattcaccttcggccagggcaccaaggtggaaatcaaaagactcgagatccagaaccctgatcctgccgtgtaccagctgcgggatagcaagagcagcgacaagagcgtgtgtctgttcaccgacttcgacagccagaccaacgtgtcccagagcaaggactccgacgtgtacatcaccgataagtgcgtgctggacatgcggagcatggacttcaagagcaactccgccgtggcctggtccaacaagtccgatttcgcctgcgccaacgccttcaacaacagcattatccccgaggacacattcttcccaagccccgagagcagctgcggctttaccagcgagagctaccagcagggcgtgctgagcgccaccatcctgtacgagatcctgctgggcaaggccaccctgtacgccgtgctggtgtctgccctggtgctgatggctatggtcaagcggaaggacagccggggacgcgccaagagaagcggatctggcgtgaagcagaccctgaatttcgacctgctgaagctggctggcgacgtggaatccaacccaggccctactagtatggactggatttggcgcatccttttccttgtcggcgctgctaccggcgcgcattccttcgaagaagtgcagctggttgaatcaggcggaggactggttcagcctggcggatctctgagactgtcttgtgccgccagcggctacaccttcagcagctactggatgaactgggtccgacaggcccctggcaaaggactggaatgggtcggaatgatcgaccccagcgacagcgagacacactacaaccacatcttcaaggaccgcttcaccatcagcgccgacaccagcaagaataccgcctacctccagatgaactccctgagagccgaggacaccgccgtgtactactgcgccagaaacctgtatctgtggggccagggaaccctggtcacagtgtcatctacgcgtgaggacctgaagaacgtgttcccacctgaggtggccgtgttcgagcctagcgaggccgagatcagccacacccagaaagccaccctcgtgtgcctggctaccggcttctaccccgaccatgtggaactgtcttggtgggtcaacggcaaagaggtgcacagcggcgtgtgtaccgacccccagccactgaaagaacagcccgccctgaacgacagccggtactgcctgagcagcagactgagagtgtccgccaccttctggcagaacccccggaaccacttcagatgccaggtgcagttctacggcctgagcgagaacgacgagtggacccaggacagagccaagcccgtgacccagatcgtgtctgccgaagcctggggcagagccgattgcgacgtgaagctggtggaaaagagcttcgagacagacaccaacctgaacttccagaacctgagcgtgatcggcttcagaatcctgctgctgaaagtggccggctttaacctgctgatgaccctgcggctgtggtccagc

SEQ ID NO: 36591 - DNA, 2280 bp, synthetic construct
  source 1..2280: mol_type = other DNA
atggccttaccagtgaccgccttgctcctgccgctggccttgctgctccacgccgccaggccggaagttcagctgcttgagtctggcggaggactggttcaacctggcggaagcctgagactgtcttgtgccgccagcggcttcatcttcagcagctacgccatgagctgggtccgacaggctcctggaaagggccaagaatgggtttccggcgttagcggcacaggcgtgaacacctactacgccgatagcgtgaagggcagattcaccatcagccgggacaacagcaagaacaccctgtacctccagatgaacagcctgagagccgaggacaccgccgtgtactattgtgcctctggcaaaggctgggacagcggctcttggtacgaggactatagaggccagggcaccctggtcacagtttcttcaggtaccggcggaggcggatctggcggcggaggtagcggtggcggaggatctgaattcgacatccagatgacacagagccctagcagcctgtctgccagcgtgggagacagagtgaccatcacatgcaagagcagccagagcctgctggactccgatggcaagacctacctgaactggtatcagcagaagcccggcaaggcccctaagctgctgatctacctggtgtccaagctggatagcggcgtgcccagcagattttctggcagcggcagcggaaccgacttcaccctgacaatatccagcctccagcctgaggacttcgccacctactactgcttccaaggcacccactttccattcaccttcggccagggcaccaaggtggaaatcaaaagactcgaggacctgaagaacgtgttcccacctgaggtggccgtgttcgagcctagcgaggccgagatcagccacacccagaaagccaccctcgtgtgcctggctaccggcttctaccccgaccatgtggaactgtcttggtgggtcaacggcaaagaggtgcacagcggcgtgtgtaccgacccccagccactgaaagaacagcccgccctgaacgacagccggtactgcctgagcagcagactgagagtgtccgccaccttctggcagaacccccggaaccacttcagatgccaggtgcagttctacggcctgagcgagaacgacgagtggacccaggacagagccaagcccgtgacccagatcgtgtctgccgaagcctggggcagagccgattgcgacgtgaagctggtggaaaagagcttcgagacagacaccaacctgaacttccagaacctgagcgtgatcggcttcagaatcctgctgctgaaagtggccggctttaacctgctgatgaccctgcggctgtggtccagcagggccaagcgatctggatctggagcaacaaacttctcactactcaaacaagcaggtgacgtggaggagaatcccgggcctactagtatggactggatttggcgcatccttttccttgtcggcgctgctaccggcgcgcattccttcgaagaagtgcagctggttgaatcaggcggaggactggttcagcctggcggatctctgagactgtcttgtgccgccagcggctacaccttcagcagctactggatgaactgggtccgacaggcccctggcaaaggactggaatgggtcggaatgatcgaccccagcgacagcgagacacactacaaccacatcttcaaggaccgcttcaccatcagcgccgacaccagcaagaataccgcctacctccagatgaactccctgagagccgaggacaccgccgtgtactactgcgccagaaacctgtatctgtggggccagggaaccctggtcacagtgtcatctacgcgtatccagaaccctgatcctgccgtgtaccagctgcgggatagcaagagcagcgacaagagcgtgtgtctgttcaccgacttcgacagccagaccaacgtgtcccagagcaaggactccgacgtgtacatcaccgataagtgcgtgctggacatgcggagcatggacttcaagagcaactccgccgtggcctggtccaacaagtccgatttcgcctgcgccaacgccttcaacaacagcattatccccgaggacacattcttcccaagccccgagagcagctgcggctttaccagcgagagctaccagcagggcgtgctgagcgccaccatcctgtacgagatcctgctgggcaaggccaccctgtacgccgtgctggtgtctgccctggtgctgatggctatggtcaagcggaaggacagccgggga

SEQ ID NO: 36592 - DNA, 2292 bp, synthetic construct
  source 1..2292: mol_type = other DNA
atggccttaccagtgaccgccttgctcctgccgctggccttgctgctccacgccgccaggccggaagttcagctgcttgagtctggcggaggactggttcaacctggcggaagcctgagactgtcttgtgccgccagcggcttcatcttcagcagctacgccatgagctgggtccgacaggctcctggaaagggccaagaatgggtttccggcgttagcggcacaggcgtgaacacctactacgccgatagcgtgaagggcagattcaccatcagccgggacaacagcaagaacaccctgtacctccagatgaacagcctgagagccgaggacaccgccgtgtactattgtgcctctggcaaaggctgggacagcggctcttggtacgaggactatagaggccagggcaccctggtcacagtttcttcaggtaccggcggaggcggatctggcggcggaggtagcggtggcggaggatctgaattcgacatccagatgacacagagccctagcagcctgtctgccagcgtgggagacagagtgaccatcacatgcaagagcagccagagcctgctggactccgatggcaagacctacctgaactggtatcagcagaagcccggcaaggcccctaagctgctgatctacctggtgtccaagctggatagcggcgtgcccagcagattttctggcagcggcagcggaaccgacttcaccctgacaatatccagcctccagcctgaggacttcgccacctactactgcttccaaggcacccactttccattcaccttcggccagggcaccaaggtggaaatcaaaagactcgagatccagaaccctgatcctgccgtgtaccagctgcgggatagcaagagcagcgacaagagcgtgtgtctgttcaccgacttcgacagccagaccaacgtgtcccagagcaaggactccgacgtgtacatcaccgataagtgcgtgctggacatgcggagcatggacttcaagagcaactccgccgtggcctggtccaacaagtccgatttcgcctgcgccaacgccttcaacaacagcattatccccgaggacacattcttcccaagccccgagagcagctgcggctttaccagcgagagctaccagcagggcgtgctgagcgccaccatcctgtacgagatcctgctgggcaaggccaccctgtacgccgtgctggtgtctgccctggtgctgatggctatggtcaagcggaaggacagccggggacgcgccaagagaagcggatctggcgtgaagcagaccctgaatttcgacctgctgaagctggctggcgacgtggaatccaacccaggccctactagtatggactggatttggcgcatccttttccttgtcggcgctgctaccggcgcgcattccttcgaagaagtgcagctggttgaatcaggcggaggactggttcagcctggcggatctctgagactgtcttgtgccgccagcggctacaccttcagcagctactggatgaactgggtccgacaggcccctggcaaaggactggaatgggtcggaatgatcgaccccagcgacagcgagacacactacaaccacatcttcaaggaccgcttcaccatcagcgccgacaccagcaagaataccgcctacctccagatgaactccctgagagccgaggacaccgccgtgtactactgcgccagaaacctgtatctgtggggccagggaaccctggtcacagtgtcatctacgcgtgaggacctgaagaacgtgttcccacctgaggtggccgtgttcgagcctagcgaggccgagatcagccacacccagaaagccaccctcgtgtgcctggctaccggcttctaccccgaccatgtggaactgtcttggtgggtcaacggcaaagaggtgcacagcggcgtgtgtaccgacccccagccactgaaagaacagcccgccctgaacgacagccggtactgcctgagcagcagactgagagtgtccgccaccttctggcagaacccccggaaccacttcagatgccaggtgcagttctacggcctgagcgagaacgacgagtggacccaggacagagccaagcccgtgacccagatcgtgtctgccgaagcctggggcagagccgattgcgacgtgaagctggtggaaaagagcttcgagacagacaccaacctgaacttccagaacctgagcgtgatcggcttcagaatcctgctgctgaaagtggccggctttaacctgctgatgaccctgcggctgtggtccagc

SEQ ID NO: 36593 - DNA, 2184 bp, synthetic construct
  source 1..2184: mol_type = other DNA
atggccttaccagtgaccgccttgctcctgccgctggccttgctgctccacgccgccaggccgatgctgcccgctcctaagaatctggtggtgtccagaatcaccgaggacagcgccagactgtcttggacagctcctgatgccgccttcgacagcttccccatccggtacatcgagacactgatctggggcgaagccatctggctggatgtgcctggaagcgagagaagctacgacctgaccggactgaagcctggcacagagtatgccgtggtcatcaccggcgtgaaaggcggcagattctctagccctctggtggcctctttcaccaccggtaccggcggaggcggatctggcggcggaggtagcggtggcggaggatctgaattcgacatccagatgacacagagccctagcagcctgtctgccagcgtgggagacagagtgaccatcacatgcaagagcagccagagcctgctggactccgatggcaagacctacctgaactggtatcagcagaagcccggcaaggcccctaagctgctgatctacctggtgtccaagctggatagcggcgtgcccagcagattttctggcagcggcagcggaaccgacttcaccctgacaatatccagcctccagcctgaggacttcgccacctactactgcttccaaggcacccactttccattcaccttcggccagggcaccaaggtggaaatcaaaagactcgaggacctgaagaacgtgttcccacctgaggtggccgtgttcgagcctagcgaggccgagatcagccacacccagaaagccaccctcgtgtgcctggctaccggcttctaccccgaccatgtggaactgtcttggtgggtcaacggcaaagaggtgcacagcggcgtgtgtaccgacccccagccactgaaagaacagcccgccctgaacgacagccggtactgcctgagcagcagactgagagtgtccgccaccttctggcagaacccccggaaccacttcagatgccaggtgcagttctacggcctgagcgagaacgacgagtggacccaggacagagccaagcccgtgacccagatcgtgtctgccgaagcctggggcagagccgattgcgacgtgaagctggtggaaaagagcttcgagacagacaccaacctgaacttccagaacctgagcgtgatcggcttcagaatcctgctgctgaaagtggccggctttaacctgctgatgaccctgcggctgtggtccagcagggccaagcgatctggatctggagcaacaaacttctcactactcaaacaagcaggtgacgtggaggagaatcccgggcctactagtatggactggatttggcgcatccttttccttgtcggcgctgctaccggcgcgcattccttcgaagaagtgcagctggttgaatcaggcggaggactggttcagcctggcggatctctgagactgtcttgtgccgccagcggctacaccttcagcagctactggatgaactgggtccgacaggcccctggcaaaggactggaatgggtcggaatgatcgaccccagcgacagcgagacacactacaaccacatcttcaaggaccgcttcaccatcagcgccgacaccagcaagaataccgcctacctccagatgaactccctgagagccgaggacaccgccgtgtactactgcgccagaaacctgtatctgtggggccagggaaccctggtcacagtgtcatctacgcgtatccagaaccctgatcctgccgtgtaccagctgcgggatagcaagagcagcgacaagagcgtgtgtctgttcaccgacttcgacagccagaccaacgtgtcccagagcaaggactccgacgtgtacatcaccgataagtgcgtgctggacatgcggagcatggacttcaagagcaactccgccgtggcctggtccaacaagtccgatttcgcctgcgccaacgccttcaacaacagcattatccccgaggacacattcttcccaagccccgagagcagctgcggctttaccagcgagagctaccagcagggcgtgctgagcgccaccatcctgtacgagatcctgctgggcaaggccaccctgtacgccgtgctggtgtctgccctggtgctgatggctatggtcaagcggaaggacagccgggga

SEQ ID NO: 36594 - DNA, 2196 bp, synthetic construct
  source 1..2196: mol_type = other DNA
atggccttaccagtgaccgccttgctcctgccgctggccttgctgctccacgccgccaggccgatgctgcccgctcctaagaatctggtggtgtccagaatcaccgaggacagcgccagactgtcttggacagctcctgatgccgccttcgacagcttccccatccggtacatcgagacactgatctggggcgaagccatctggctggatgtgcctggaagcgagagaagctacgacctgaccggactgaagcctggcacagagtatgccgtggtcatcaccggcgtgaaaggcggcagattctctagccctctggtggcctctttcaccaccggtaccggcggaggcggatctggcggcggaggtagcggtggcggaggatctgaattcgacatccagatgacacagagccctagcagcctgtctgccagcgtgggagacagagtgaccatcacatgcaagagcagccagagcctgctggactccgatggcaagacctacctgaactggtatcagcagaagcccggcaaggcccctaagctgctgatctacctggtgtccaagctggatagcggcgtgcccagcagattttctggcagcggcagcggaaccgacttcaccctgacaatatccagcctccagcctgaggacttcgccacctactactgcttccaaggcacccactttccattcaccttcggccagggcaccaaggtggaaatcaaaagactcgagatccagaaccctgatcctgccgtgtaccagctgcgggatagcaagagcagcgacaagagcgtgtgtctgttcaccgacttcgacagccagaccaacgtgtcccagagcaaggactccgacgtgtacatcaccgataagtgcgtgctggacatgcggagcatggacttcaagagcaactccgccgtggcctggtccaacaagtccgatttcgcctgcgccaacgccttcaacaacagcattatccccgaggacacattcttcccaagccccgagagcagctgcggctttaccagcgagagctaccagcagggcgtgctgagcgccaccatcctgtacgagatcctgctgggcaaggccaccctgtacgccgtgctggtgtctgccctggtgctgatggctatggtcaagcggaaggacagccggggacgcgccaagagaagcggatctggcgtgaagcagaccctgaatttcgacctgctgaagctggctggcgacgtggaatccaacccaggccctactagtatggactggatttggcgcatccttttccttgtcggcgctgctaccggcgcgcattccttcgaagaagtgcagctggttgaatcaggcggaggactggttcagcctggcggatctctgagactgtcttgtgccgccagcggctacaccttcagcagctactggatgaactgggtccgacaggcccctggcaaaggactggaatgggtcggaatgatcgaccccagcgacagcgagacacactacaaccacatcttcaaggaccgcttcaccatcagcgccgacaccagcaagaataccgcctacctccagatgaactccctgagagccgaggacaccgccgtgtactactgcgccagaaacctgtatctgtggggccagggaaccctggtcacagtgtcatctacgcgtgaggacctgaagaacgtgttcccacctgaggtggccgtgttcgagcctagcgaggccgagatcagccacacccagaaagccaccctcgtgtgcctggctaccggcttctaccccgaccatgtggaactgtcttggtgggtcaacggcaaagaggtgcacagcggcgtgtgtaccgacccccagccactgaaagaacagcccgccctgaacgacagccggtactgcctgagcagcagactgagagtgtccgccaccttctggcagaacccccggaaccacttcagatgccaggtgcagttctacggcctgagcgagaacgacgagtggacccaggacagagccaagcccgtgacccagatcgtgtctgccgaagcctggggcagagccgattgcgacgtgaagctggtggaaaagagcttcgagacagacaccaacctgaacttccagaacctgagcgtgatcggcttcagaatcctgctgctgaaagtggccggctttaacctgctgatgaccctgcggctgtggtccagc

SEQ ID NO: 36595 - DNA, 2271 bp, synthetic construct
  source 1..2271: mol_type = other DNA
atggccttaccagtgaccgccttgctcctgccgctggccttgctgctccacgccgccaggccggaggtgcagctggttgaatctggcggaggactggttcagcctggcggatctctgagactgtcttgtgccgccagcggcttcaacatcaaggatacctgtatcggctgggttcgcagagcccctggcaaagaggaagaactggtcgccaaaatctgcaagtacagcggccacaccagatacgccgacagcgtgaagggcagattcaccatcagcgccgacaccagcaagaacaccgcctacctccagatgaacagcctgagagccgaggacaccgccgtgtactattgtgccgctgtgtccgtcagagatgggcactacaattactggggccagggcaccaccgtgaccgtttcttcaggtaccggcggaggcggatctggcggcggaggtagcggtggcggaggatctgaattcgacatccagatgacacagagccctagcagcctgtctgccagcgtgggagacagagtgaccatcacatgcaagagcagccagagcctgctggactccgatggcaagacctacctgaactggtatcagcagaagcccggcaaggcccctaagctgctgatctacctggtgtccaagctggatagcggcgtgcccagcagattttctggcagcggcagcggaaccgacttcaccctgacaatatccagcctccagcctgaggacttcgccacctactactgcttccaaggcacccactttccattcaccttcggccagggcaccaaggtggaaatcaaaagactcgaggacctgaagaacgtgttcccacctgaggtggccgtgttcgagcctagcgaggccgagatcagccacacccagaaagccaccctcgtgtgcctggctaccggcttctaccccgaccatgtggaactgtcttggtgggtcaacggcaaagaggtgcacagcggcgtgtgtaccgacccccagccactgaaagaacagcccgccctgaacgacagccggtactgcctgagcagcagactgagagtgtccgccaccttctggcagaacccccggaaccacttcagatgccaggtgcagttctacggcctgagcgagaacgacgagtggacccaggacagagccaagcccgtgacccagatcgtgtctgccgaagcctggggcagagccgattgcgacgtgaagctggtggaaaagagcttcgagacagacaccaacctgaacttccagaacctgagcgtgatcggcttcagaatcctgctgctgaaagtggccggctttaacctgctgatgaccctgcggctgtggtccagcagggccaagcgatctggatctggagcaacaaacttctcactactcaaacaagcaggtgacgtggaggagaatcccgggcctactagtatggactggatttggcgcatccttttccttgtcggcgctgctaccggcgcgcattccttcgaagaagtgcagctggttgaatcaggcggaggactggttcagcctggcggatctctgagactgtcttgtgccgccagcggctacaccttcagcagctactggatgaactgggtccgacaggcccctggcaaaggactggaatgggtcggaatgatcgaccccagcgacagcgagacacactacaaccacatcttcaaggaccgcttcaccatcagcgccgacaccagcaagaataccgcctacctccagatgaactccctgagagccgaggacaccgccgtgtactactgcgccagaaacctgtatctgtggggccagggaaccctggtcacagtgtcatctacgcgtatccagaaccctgatcctgccgtgtaccagctgcgggatagcaagagcagcgacaagagcgtgtgtctgttcaccgacttcgacagccagaccaacgtgtcccagagcaaggactccgacgtgtacatcaccgataagtgcgtgctggacatgcggagcatggacttcaagagcaactccgccgtggcctggtccaacaagtccgatttcgcctgcgccaacgccttcaacaacagcattatccccgaggacacattcttcccaagccccgagagcagctgcggctttaccagcgagagctaccagcagggcgtgctgagcgccaccatcctgtacgagatcctgctgggcaaggccaccctgtacgccgtgctggtgtctgccctggtgctgatggctatggtcaagcggaaggacagccgggga

SEQ ID NO: 36596 - DNA, 2283 bp, synthetic construct
  source 1..2283: mol_type = other DNA
atggccttaccagtgaccgccttgctcctgccgctggccttgctgctccacgccgccaggccggaggtgcagctggttgaatctggcggaggactggttcagcctggcggatctctgagactgtcttgtgccgccagcggcttcaacatcaaggatacctgtatcggctgggttcgcagagcccctggcaaagaggaagaactggtcgccaaaatctgcaagtacagcggccacaccagatacgccgacagcgtgaagggcagattcaccatcagcgccgacaccagcaagaacaccgcctacctccagatgaacagcctgagagccgaggacaccgccgtgtactattgtgccgctgtgtccgtcagagatgggcactacaattactggggccagggcaccaccgtgaccgtttcttcaggtaccggcggaggcggatctggcggcggaggtagcggtggcggaggatctgaattcgacatccagatgacacagagccctagcagcctgtctgccagcgtgggagacagagtgaccatcacatgcaagagcagccagagcctgctggactccgatggcaagacctacctgaactggtatcagcagaagcccggcaaggcccctaagctgctgatctacctggtgtccaagctggatagcggcgtgcccagcagattttctggcagcggcagcggaaccgacttcaccctgacaatatccagcctccagcctgaggacttcgccacctactactgcttccaaggcacccactttccattcaccttcggccagggcaccaaggtggaaatcaaaagactcgagatccagaaccctgatcctgccgtgtaccagctgcgggatagcaagagcagcgacaagagcgtgtgtctgttcaccgacttcgacagccagaccaacgtgtcccagagcaaggactccgacgtgtacatcaccgataagtgcgtgctggacatgcggagcatggacttcaagagcaactccgccgtggcctggtccaacaagtccgatttcgcctgcgccaacgccttcaacaacagcattatccccgaggacacattcttcccaagccccgagagcagctgcggctttaccagcgagagctaccagcagggcgtgctgagcgccaccatcctgtacgagatcctgctgggcaaggccaccctgtacgccgtgctggtgtctgccctggtgctgatggctatggtcaagcggaaggacagccggggacgcgccaagagaagcggatctggcgtgaagcagaccctgaatttcgacctgctgaagctggctggcgacgtggaatccaacccaggccctactagtatggactggatttggcgcatccttttccttgtcggcgctgctaccggcgcgcattccttcgaagaagtgcagctggttgaatcaggcggaggactggttcagcctggcggatctctgagactgtcttgtgccgccagcggctacaccttcagcagctactggatgaactgggtccgacaggcccctggcaaaggactggaatgggtcggaatgatcgaccccagcgacagcgagacacactacaaccacatcttcaaggaccgcttcaccatcagcgccgacaccagcaagaataccgcctacctccagatgaactccctgagagccgaggacaccgccgtgtactactgcgccagaaacctgtatctgtggggccagggaaccctggtcacagtgtcatctacgcgtgaggacctgaagaacgtgttcccacctgaggtggccgtgttcgagcctagcgaggccgagatcagccacacccagaaagccaccctcgtgtgcctggctaccggcttctaccccgaccatgtggaactgtcttggtgggtcaacggcaaagaggtgcacagcggcgtgtgtaccgacccccagccactgaaagaacagcccgccctgaacgacagccggtactgcctgagcagcagactgagagtgtccgccaccttctggcagaacccccggaaccacttcagatgccaggtgcagttctacggcctgagcgagaacgacgagtggacccaggacagagccaagcccgtgacccagatcgtgtctgccgaagcctggggcagagccgattgcgacgtgaagctggtggaaaagagcttcgagacagacaccaacctgaacttccagaacctgagcgtgatcggcttcagaatcctgctgctgaaagtggccggctttaacctgctgatgaccctgcggctgtggtccagc

SEQ ID NO: 36597 - DNA, 3387 bp, synthetic construct
  source 1..3387: mol_type = other DNA
atggccttaccagtgaccgccttgctcctgccgctggccttgctgctccacgccgccaggccggaagtgcagctggttgaatctggcggaggactggttcaggctggcggatctctgagactgtcttgtgccgccagcggcagaacctttagcatgggctggtttagacaggcccctggcaaagagagagagttcgtcgccgccatcacatactctggcggcagcccttactacgccgactctgtgaagggcagattcaccatcagccgggacaacgccaagaacaccgtgtacctccagatgaacagcctgaagcctgaggacaccgccgtgtactactgcgccgccaatccaacatacggcagcgactggaacgccgagaattggggccagggaacccaagtgacagtgtctagcggtaccggcggaggcggatctggcggcggaggtagcggtggcggaggatctgaattcgacatccagatgacacagagccctagcagcctgtctgccagcgtgggagacagagtgaccatcacatgcaagagcagccagagcctgctggactccgatggcaagacctacctgaactggtatcagcagaagcccggcaaggcccctaagctgctgatctacctggtgtccaagctggatagcggcgtgcccagcagattttctggcagcggcagcggaaccgacttcaccctgacaatatccagcctccagcctgaggacttcgccacctactactgcttccaaggcacccactttccattcaccttcggccagggcaccaaggtggaaatcaaaagactcgaggacctgaagaacgtgttcccacctgaggtggccgtgttcgagcctagcgaggccgagatcagccacacccagaaagccaccctcgtgtgcctggctaccggcttctaccccgaccatgtggaactgtcttggtgggtcaacggcaaagaggtgcacagcggcgtgtgtaccgacccccagccactgaaagaacagcccgccctgaacgacagccggtactgcctgagcagcagactgagagtgtccgccaccttctggcagaacccccggaaccacttcagatgccaggtgcagttctacggcctgagcgagaacgacgagtggacccaggacagagccaagcccgtgacccagatcgtgtctgccgaagcctggggcagagccgattgcgacgtgaagctggtggaaaagagcttcgagacagacaccaacctgaacttccagaacctgagcgtgatcggcttcagaatcctgctgctgaaagtggccggctttaacctgctgatgaccctgcggctgtggtccagcagggccaagcgatctggatctggagcaacaaacttctcactactcaaacaagcaggtgacgtggaggagaatcccgggcctactagtgccaccatggactggatttggcgcatccttttccttgtcggcgctgctaccggcgcccattccgggcccgaagtgcaactggttgaatccggtggcggcctggtgcaagcaggcggatctctcagacttagctgtgccgcctccggcagaaccttcacaatgggatggtttaggcaggctccagggaaagagagagagttcgtcgccgccatctctctgtctcccacactggcctactacgccgactctgtgaaaggccggttcaccatctccagagataatgccaagaacaccgtggtgctgcaaatgaactctctgaaacccgaggatacagccctgtactattgtgccgctgaccggaagtccgtgatgagcatcagacccgattactggggacagggcacacaagtcacagtgtcctctggatccggcggcggaggatctggcggaggcggatctgggggcggaggctctttcgaagaagtgcagctggttgaatcaggcggaggactggttcagcctggcggatctctgagactgtcttgtgccgccagcggctacaccttcagcagctactggatgaactgggtccgacaggcccctggcaaaggactggaatgggtcggaatgatcgaccccagcgacagcgagacacactacaaccacatcttcaaggaccgcttcaccatcagcgccgacaccagcaagaataccgcctacctccagatgaactccctgagagccgaggacaccgccgtgtactactgcgccagaaacctgtatctgtggggccagggaaccctggtcacagtgtcatctacgcgtatccagaaccctgatcctgccgtgtaccagctgcgggatagcaagagcagcgacaagagcgtgtgtctgttcaccgacttcgacagccagaccaacgtgtcccagagcaaggactccgacgtgtacatcaccgataagtgcgtgctggacatgcggagcatggacttcaagagcaactccgccgtggcctggtccaacaagtccgatttcgcctgcgccaacgccttcaacaacagcattatccccgaggacacattcttcccaagccccgagagcagctgcggctttaccagcgagagctaccagcagggcgtgctgagcgccaccatcctgtacgagatcctgctgggcaaggccaccctgtacgccgtgctggtgtctgccctggtgctgatggctatggtcaagcggaaggacagccggggacgcgccaagagaagcggatctggcgtgaagcagaccctgaatttcgacctgctgaagctggctggcgacgtggaatccaacccaggcccttctagaggccatatgaccgagtacaagcccacggtgcgcctcgccacccgcgacgacgtccccagggccgtacgcaccctcgccgccgcgttcgccgactaccccgccacgcgccacaccgtcgatccggaccgccacatcgagcgggtcaccgagctgcaagaactcttcctcacgcgcgtcgggctcgacatcggcaaggtgtgggtcgcggacgacggcgccgcggtggcggtctggaccacgccggagagcgtcgaagcgggggcggtgttcgccgagatcggcccgcgcatggccgagttgagcggttcccggctggccgcgcagcaacagatggaaggcctcctggcgccgcaccggcccaaggagcccgcgtggttcctggccaccgtcggcgtctcgcccgaccaccagggcaagggtctgggcagcgccgtcgtgctccccggagtggaggcggccgagcgcgccggggtgcccgccttcctggagacctccgcgccccgcaacctccccttctacgagcggctcggcttcaccgtcaccgccgacgtcgaggtgcccgaaggaccgcgcacctggtgcatgacccgcaagcccggtgcctga

SEQ ID NO: 36598 - DNA, 2301 bp, synthetic construct
  source 1..2301: mol_type = other DNA
atggccttaccagtgaccgccttgctcctgccgctggccttgctgctccacgccgccaggccggaagtgcagctggttgaatctggcggaggactggttcagcctggcggatctctgagactgtcttgtgccgcctctggcttcgccagcgactactatatcatcggctggttcagacaggcccctggcaaagagagagagggcgtcagctgtatcagcagcagatacgccaacaccaactacgccgacagcgtgaagggcagattcaccatcagccgggacaacgccaagaacaccgtgtacctccagatgaacagcctgaagcctgaggacaccgccgtgtactactgtgccgccgacaccagaagatacacctgtcctgacattgccaccatgcaccggaacttcgattcttggggccagggcacactggtcaccgtttcttctggtaccggcggaggcggatctggcggcggaggtagcggtggcggaggatctgaattcgacatccagatgacacagagccctagcagcctgtctgccagcgtgggagacagagtgaccatcacatgcaagagcagccagagcctgctggactccgatggcaagacctacctgaactggtatcagcagaagcccggcaaggcccctaagctgctgatctacctggtgtccaagctggatagcggcgtgcccagcagattttctggcagcggcagcggaaccgacttcaccctgacaatatccagcctccagcctgaggacttcgccacctactactgcttccaaggcacccactttccattcaccttcggccagggcaccaaggtggaaatcaaaagactcgaggacctgaagaacgtgttcccacctgaggtggccgtgttcgagcctagcgaggccgagatcagccacacccagaaagccaccctcgtgtgcctggctaccggcttctaccccgaccatgtggaactgtcttggtgggtcaacggcaaagaggtgcacagcggcgtgtgtaccgacccccagccactgaaagaacagcccgccctgaacgacagccggtactgcctgagcagcagactgagagtgtccgccaccttctggcagaacccccggaaccacttcagatgccaggtgcagttctacggcctgagcgagaacgacgagtggacccaggacagagccaagcccgtgacccagatcgtgtctgccgaagcctggggcagagccgattgcgacgtgaagctggtggaaaagagcttcgagacagacaccaacctgaacttccagaacctgagcgtgatcggcttcagaatcctgctgctgaaagtggccggctttaacctgctgatgaccctgcggctgtggtccagcagggccaagcgatctggatctggagcaacaaacttctcactactcaaacaagcaggtgacgtggaggagaatcccgggcctactagtatggactggatttggcgcatccttttccttgtcggcgctgctaccggcgcgcattccttcgaagaagtgcagctggttgaatcaggcggaggactggttcagcctggcggatctctgagactgtcttgtgccgccagcggctacaccttcagcagctactggatgaactgggtccgacaggcccctggcaaaggactggaatgggtcggaatgatcgaccccagcgacagcgagacacactacaaccacatcttcaaggaccgcttcaccatcagcgccgacaccagcaagaataccgcctacctccagatgaactccctgagagccgaggacaccgccgtgtactactgcgccagaaacctgtatctgtggggccagggaaccctggtcacagtgtcatctacgcgtatccagaaccctgatcctgccgtgtaccagctgcgggatagcaagagcagcgacaagagcgtgtgtctgttcaccgacttcgacagccagaccaacgtgtcccagagcaaggactccgacgtgtacatcaccgataagtgcgtgctggacatgcggagcatggacttcaagagcaactccgccgtggcctggtccaacaagtccgatttcgcctgcgccaacgccttcaacaacagcattatccccgaggacacattcttcccaagccccgagagcagctgcggctttaccagcgagagctaccagcagggcgtgctgagcgccaccatcctgtacgagatcctgctgggcaaggccaccctgtacgccgtgctggtgtctgccctggtgctgatggctatggtcaagcggaaggacagccggggataa

SEQ ID NO: 36599 - DNA, 2301 bp, synthetic construct
  source 1..2301: mol_type = other DNA
atggccttaccagtgaccgccttgctcctgccgctggccttgctgctccacgccgccaggccggaagtgcagctggttgaatctggcggaggactggttcagcctggcggatctctgagactgagctgtgaagccagcggcttcgccagcgacgattacatcatcggctggttcagacaggcccctggcaaagagagagagggcgtcagctgcatcagctctaagtacgccaacaccgtgtacaccgacagcgtgaagggcagattcagactgagcagaggcaccgccaagaataccgtgtacctccagatgagcgccctgaagcctgaggataccgccgtgtactactgcgctatggacagccgcagagtgacatgccctgagatcagcaccatgcaccggaacttcgattcttggggccagggcacactggtcacagtgtcatctggtaccggcggaggcggatctggcggcggaggtagcggtggcggaggatctgaattcgacatccagatgacacagagccctagcagcctgtctgccagcgtgggagacagagtgaccatcacatgcaagagcagccagagcctgctggactccgatggcaagacctacctgaactggtatcagcagaagcccggcaaggcccctaagctgctgatctacctggtgtccaagctggatagcggcgtgcccagcagattttctggcagcggcagcggaaccgacttcaccctgacaatatccagcctccagcctgaggacttcgccacctactactgcttccaaggcacccactttccattcaccttcggccagggcaccaaggtggaaatcaaaagactcgaggacctgaagaacgtgttcccacctgaggtggccgtgttcgagcctagcgaggccgagatcagccacacccagaaagccaccctcgtgtgcctggctaccggcttctaccccgaccatgtggaactgtcttggtgggtcaacggcaaagaggtgcacagcggcgtgtgtaccgacccccagccactgaaagaacagcccgccctgaacgacagccggtactgcctgagcagcagactgagagtgtccgccaccttctggcagaacccccggaaccacttcagatgccaggtgcagttctacggcctgagcgagaacgacgagtggacccaggacagagccaagcccgtgacccagatcgtgtctgccgaagcctggggcagagccgattgcgacgtgaagctggtggaaaagagcttcgagacagacaccaacctgaacttccagaacctgagcgtgatcggcttcagaatcctgctgctgaaagtggccggctttaacctgctgatgaccctgcggctgtggtccagcagggccaagcgatctggatctggagcaacaaacttctcactactcaaacaagcaggtgacgtggaggagaatcccgggcctactagtatggactggatttggcgcatccttttccttgtcggcgctgctaccggcgcgcattccttcgaagaagtgcagctggttgaatcaggcggaggactggttcagcctggcggatctctgagactgtcttgtgccgccagcggctacaccttcagcagctactggatgaactgggtccgacaggcccctggcaaaggactggaatgggtcggaatgatcgaccccagcgacagcgagacacactacaaccacatcttcaaggaccgcttcaccatcagcgccgacaccagcaagaataccgcctacctccagatgaactccctgagagccgaggacaccgccgtgtactactgcgccagaaacctgtatctgtggggccagggaaccctggtcacagtgtcatctacgcgtatccagaaccctgatcctgccgtgtaccagctgcgggatagcaagagcagcgacaagagcgtgtgtctgttcaccgacttcgacagccagaccaacgtgtcccagagcaaggactccgacgtgtacatcaccgataagtgcgtgctggacatgcggagcatggacttcaagagcaactccgccgtggcctggtccaacaagtccgatttcgcctgcgccaacgccttcaacaacagcattatccccgaggacacattcttcccaagccccgagagcagctgcggctttaccagcgagagctaccagcagggcgtgctgagcgccaccatcctgtacgagatcctgctgggcaaggccaccctgtacgccgtgctggtgtctgccctggtgctgatggctatggtcaagcggaaggacagccggggataa

SEQ ID NO: 36600 - DNA, 2298 bp, synthetic construct
  source 1..2298: mol_type = other DNA
atggccttaccagtgaccgccttgctcctgccgctggccttgctgctccacgccgccaggccggaagtgcagctggttgaatctggcggaggactggttcagcctggcggatctctgagactgtcttgtgccgcctctggcttcgccagcgactactatatcatcggctggttcagacaggcccctggcaaagagagagagggcgtcagctgtatcagcagcagatacgccaacaccaactacgccgacagcgtgaagggcagattcaccatcagccgggacaacgccaagaacaccgtgtacctccagatgaacagcctgaagcctgaggacaccgccgtgtactactgtgccgccgacaccagaagatacacctgtcctgacattgccaccatgcaccggaacttcgattcttggggccagggcacactggtcaccgtttcttctggtaccggcggaggcggatctggcggcggaggtagcggtggcggaggatctgaattcgacatccagatgacacagagccctagcagcctgtctgccagcgtgggagacagagtgaccatcacatgcaagagcagccagagcctgctggactccgatggcaagacctacctgaactggtatcagcagaagcccggcaaggcccctaagctgctgatctacctggtgtccaagctggatagcggcgtgcccagcagattttctggcagcggcagcggaaccgacttcaccctgacaatatccagcctccagcctgaggacttcgccacctactactgcttccaaggcacccactttccattcaccttcggccagggcaccaaggtggaaatcaaaagactcgagatccagaaccctgatcctgccgtgtaccagctgcgggatagcaagagcagcgacaagagcgtgtgtctgttcaccgacttcgacagccagaccaacgtgtcccagagcaaggactccgacgtgtacatcaccgataagtgcgtgctggacatgcggagcatggacttcaagagcaactccgccgtggcctggtccaacaagtccgatttcgcctgcgccaacgccttcaacaacagcattatccccgaggacacattcttcccaagccccgagagcagctgcggctttaccagcgagagctaccagcagggcgtgctgagcgccaccatcctgtacgagatcctgctgggcaaggccaccctgtacgccgtgctggtgtctgccctggtgctgatggctatggtcaagcggaaggacagccggggaagggccaagcgatctggatctggagcaacaaacttctcactactcaaacaagcaggtgacgtggaggagaatcccgggcctactagtatggactggatttggcgcatccttttccttgtcggcgctgctaccggcgcgcattccttcgaagaagtgcagctggttgaatcaggcggaggactggttcagcctggcggatctctgagactgtcttgtgccgccagcggctacaccttcagcagctactggatgaactgggtccgacaggcccctggcaaaggactggaatgggtcggaatgatcgaccccagcgacagcgagacacactacaaccacatcttcaaggaccgcttcaccatcagcgccgacaccagcaagaataccgcctacctccagatgaactccctgagagccgaggacaccgccgtgtactactgcgccagaaacctgtatctgtggggccagggaaccctggtcacagtgtcatctacgcgtgacctgaagaacgtgttcccacctgaggtggccgtgttcgagcctagcgaggccgagatcagccacacccagaaagccaccctcgtgtgcctggctaccggcttctaccccgaccatgtggaactgtcttggtgggtcaacggcaaagaggtgcacagcggcgtgtgtaccgacccccagccactgaaagaacagcccgccctgaacgacagccggtactgcctgagcagcagactgagagtgtccgccaccttctggcagaacccccggaaccacttcagatgccaggtgcagttctacggcctgagcgagaacgacgagtggacccaggacagagccaagcccgtgacccagatcgtgtctgccgaagcctggggcagagccgattgcgacgtgaagctggtggaaaagagcttcgagacagacaccaacctgaacttccagaacctgagcgtgatcggcttcagaatcctgctgctgaaagtggccggctttaacctgctgatgaccctgcggctgtggtccagc

SEQ ID NO: 36601 - DNA, 2298 bp, synthetic construct
  source 1..2298: mol_type = other DNA
atggccttaccagtgaccgccttgctcctgccgctggccttgctgctccacgccgccaggccggaagtgcagctggttgaatctggcggaggactggttcagcctggcggatctctgagactgagctgtgaagccagcggcttcgccagcgacgattacatcatcggctggttcagacaggcccctggcaaagagagagagggcgtcagctgcatcagctctaagtacgccaacaccgtgtacaccgacagcgtgaagggcagattcagactgagcagaggcaccgccaagaataccgtgtacctccagatgagcgccctgaagcctgaggataccgccgtgtactactgcgctatggacagccgcagagtgacatgccctgagatcagcaccatgcaccggaacttcgattcttggggccagggcacactggtcacagtgtcatctggtaccggcggaggcggatctggcggcggaggtagcggtggcggaggatctgaattcgacatccagatgacacagagccctagcagcctgtctgccagcgtgggagacagagtgaccatcacatgcaagagcagccagagcctgctggactccgatggcaagacctacctgaactggtatcagcagaagcccggcaaggcccctaagctgctgatctacctggtgtccaagctggatagcggcgtgcccagcagattttctggcagcggcagcggaaccgacttcaccctgacaatatccagcctccagcctgaggacttcgccacctactactgcttccaaggcacccactttccattcaccttcggccagggcaccaaggtggaaatcaaaagactcgagatccagaaccctgatcctgccgtgtaccagctgcgggatagcaagagcagcgacaagagcgtgtgtctgttcaccgacttcgacagccagaccaacgtgtcccagagcaaggactccgacgtgtacatcaccgataagtgcgtgctggacatgcggagcatggacttcaagagcaactccgccgtggcctggtccaacaagtccgatttcgcctgcgccaacgccttcaacaacagcattatccccgaggacacattcttcccaagccccgagagcagctgcggctttaccagcgagagctaccagcagggcgtgctgagcgccaccatcctgtacgagatcctgctgggcaaggccaccctgtacgccgtgctggtgtctgccctggtgctgatggctatggtcaagcggaaggacagccggggaagggccaagcgatctggatctggagcaacaaacttctcactactcaaacaagcaggtgacgtggaggagaatcccgggcctactagtatggactggatttggcgcatccttttccttgtcggcgctgctaccggcgcgcattccttcgaagaagtgcagctggttgaatcaggcggaggactggttcagcctggcggatctctgagactgtcttgtgccgccagcggctacaccttcagcagctactggatgaactgggtccgacaggcccctggcaaaggactggaatgggtcggaatgatcgaccccagcgacagcgagacacactacaaccacatcttcaaggaccgcttcaccatcagcgccgacaccagcaagaataccgcctacctccagatgaactccctgagagccgaggacaccgccgtgtactactgcgccagaaacctgtatctgtggggccagggaaccctggtcacagtgtcatctacgcgtgacctgaagaacgtgttcccacctgaggtggccgtgttcgagcctagcgaggccgagatcagccacacccagaaagccaccctcgtgtgcctggctaccggcttctaccccgaccatgtggaactgtcttggtgggtcaacggcaaagaggtgcacagcggcgtgtgtaccgacccccagccactgaaagaacagcccgccctgaacgacagccggtactgcctgagcagcagactgagagtgtccgccaccttctggcagaacccccggaaccacttcagatgccaggtgcagttctacggcctgagcgagaacgacgagtggacccaggacagagccaagcccgtgacccagatcgtgtctgccgaagcctggggcagagccgattgcgacgtgaagctggtggaaaagagcttcgagacagacaccaacctgaacttccagaacctgagcgtgatcggcttcagaatcctgctgctgaaagtggccggctttaacctgctgatgaccctgcggctgtggtccagc

SEQ ID NO: 36602 - DNA, 2271 bp, synthetic construct
  source 1..2271: mol_type = other DNA
atggccttaccagtgaccgccttgctcctgccgctggccttgctgctccacgccgccaggccgcaagtcaaactggaagaaagcggtggcggcctggtgcaacctggcgaatctctgagactgagctgtagcgccagcggctccatcttcaaggtgttcagagtgttcgccatgagctggtacaggcaaggccctggcaagcagagagagctggtcgcctctatcagcagcggcgagacaaccacatacgccgaatctgtgaaaggccggttcaccatcagccgggataatgccaagaataccgcctatctccagatggactccctgaagcctgaagatacagctgtgtactactgcaacgccgaccataccttcaccggcgatttttggggccagggaacccaagtgaccgtgtctagtggtaccggcggaggcggatctggcggcggaggtagcggtggcggaggatctgaattcgacatccagatgacacagagccctagcagcctgtctgccagcgtgggagacagagtgaccatcacatgcaagagcagccagagcctgctggactccgatggcaagacctacctgaactggtatcagcagaagcccggcaaggcccctaagctgctgatctacctggtgtccaagctggatagcggcgtgcccagcagattttctggcagcggcagcggaaccgacttcaccctgacaatatccagcctccagcctgaggacttcgccacctactactgcttccaaggcacccactttccattcaccttcggccagggcaccaaggtggaaatcaaaagactcgagatccagaaccctgatcctgccgtgtaccagctgcgggatagcaagagcagcgacaagagcgtgtgtctgttcaccgacttcgacagccagaccaacgtgtcccagagcaaggactccgacgtgtacatcaccgataagtgcgtgctggacatgcggagcatggacttcaagagcaactccgccgtggcctggtccaacaagtccgatttcgcctgcgccaacgccttcaacaacagcattatccccgaggacacattcttcccaagccccgagagcagctgcggctttaccagcgagagctaccagcagggcgtgctgagcgccaccatcctgtacgagatcctgctgggcaaggccaccctgtacgccgtgctggtgtctgccctggtgctgatggctatggtcaagcggaaggacagccggggaagggccaagcgatctggatctggagcaacaaacttctcactactcaaacaagcaggtgacgtggaggagaatcccgggcctactagtatggactggatttggcgcatccttttccttgtcggcgctgctaccggcgcgcattccttcgaagaagtgcagctggttgaatcaggcggaggactggttcagcctggcggatctctgagactgtcttgtgccgccagcggctacaccttcagcagctactggatgaactgggtccgacaggcccctggcaaaggactggaatgggtcggaatgatcgaccccagcgacagcgagacacactacaaccacatcttcaaggaccgcttcaccatcagcgccgacaccagcaagaataccgcctacctccagatgaactccctgagagccgaggacaccgccgtgtactactgcgccagaaacctgtatctgtggggccagggaaccctggtcacagtgtcatctacgcgtgacctgaagaacgtgttcccacctgaggtggccgtgttcgagcctagcgaggccgagatcagccacacccagaaagccaccctcgtgtgcctggctaccggcttctaccccgaccatgtggaactgtcttggtgggtcaacggcaaagaggtgcacagcggcgtgtgtaccgacccccagccactgaaagaacagcccgccctgaacgacagccggtactgcctgagcagcagactgagagtgtccgccaccttctggcagaacccccggaaccacttcagatgccaggtgcagttctacggcctgagcgagaacgacgagtggacccaggacagagccaagcccgtgacccagatcgtgtctgccgaagcctggggcagagccgattgcgacgtgaagctggtggaaaagagcttcgagacagacaccaacctgaacttccagaacctgagcgtgatcggcttcagaatcctgctgctgaaagtggccggctttaacctgctgatgaccctgcggctgtggtccagc

SEQ ID NO: 36603 - DNA, 2277 bp, synthetic construct
  source 1..2277: mol_type = other DNA
atggccttaccagtgaccgccttgctcctgccgctggccttgctgctccacgccgccaggccggacatccagatgacacagagccctagcagcctgtctgccagcgtgggagacagagtgaccatcacatgcaagagcagccagagcctgctggactccgatggcaagacctacctgaactggtatcagcagaagcccggcaaggcccctaagctgctgatctacctggtgtccaagctggatagcggcgtgcccagcagattttctggcagcggcagcggaaccgacttcaccctgacaatatccagcctccagcctgaggacttcgccacctactactgcttccaaggcacccactttccattcaccttcggccagggcaccaaggtggaaatcaaaagactcgaggacctgaagaacgtgttcccacctgaggtggccgtgttcgagcctagcgaggccgagatcagccacacccagaaagccaccctcgtgtgcctggctaccggcttctaccccgaccatgtggaactgtcttggtgggtcaacggcaaagaggtgcacagcggcgtgtgtaccgacccccagccactgaaagaacagcccgccctgaacgacagccggtactgcctgagcagcagactgagagtgtccgccaccttctggcagaacccccggaaccacttcagatgccaggtgcagttctacggcctgagcgagaacgacgagtggacccaggacagagccaagcccgtgacccagatcgtgtctgccgaagcctggggcagagccgattgcgacgtgaagctggtggaaaagagcttcgagacagacaccaacctgaacttccagaacctgagcgtgatcggcttcagaatcctgctgctgaaagtggccggctttaacctgctgatgaccctgcggctgtggtccagcagggccaagcgatctggatctggagcaacaaacttctcactactcaaacaagcaggtgacgtggaggagaatcccgggcctactagtgccaccatggactggatttggcgcatccttttccttgtcggcgctgctaccggcgcccattccgggcccgaagtgcagctggttgaatctggcggaggactggttcaggctggcggatctctgagactgtcttgtgccgccagcggcagaacctttagcatgggctggtttagacaggcccctggcaaagagagagagttcgtcgccgccatcacatactctggcggcagcccttactacgccgactctgtgaagggcagattcaccatcagccgggacaacgccaagaacaccgtgtacctccagatgaacagcctgaagcctgaggacaccgccgtgtactactgcgccgccaatccaacatacggcagcgactggaacgccgagaattggggccagggaacccaagtgacagtgtctagcggatccggcggcggaggatctggcggaggcggatctgggggcggaggctctttcgaagaagtgcagctggttgaatcaggcggaggactggttcagcctggcggatctctgagactgtcttgtgccgccagcggctacaccttcagcagctactggatgaactgggtccgacaggcccctggcaaaggactggaatgggtcggaatgatcgaccccagcgacagcgagacacactacaaccacatcttcaaggaccgcttcaccatcagcgccgacaccagcaagaataccgcctacctccagatgaactccctgagagccgaggacaccgccgtgtactactgcgccagaaacctgtatctgtggggccagggaaccctggtcacagtgtcatctacgcgtatccagaaccctgatcctgccgtgtaccagctgcgggatagcaagagcagcgacaagagcgtgtgtctgttcaccgacttcgacagccagaccaacgtgtcccagagcaaggactccgacgtgtacatcaccgataagtgcgtgctggacatgcggagcatggacttcaagagcaactccgccgtggcctggtccaacaagtccgatttcgcctgcgccaacgccttcaacaacagcattatccccgaggacacattcttcccaagccccgagagcagctgcggctttaccagcgagagctaccagcagggcgtgctgagcgccaccatcctgtacgagatcctgctgggcaaggccaccctgtacgccgtgctggtgtctgccctggtgctgatggctatggtcaagcggaaggacagccggggataa

SEQ ID NO: 36604 - DNA, 2280 bp, synthetic construct
  source 1..2280: mol_type = other DNA
atggccttaccagtgaccgccttgctcctgccgctggccttgctgctccacgccgccaggccggacatccagatgacacagagccctagcagcctgtctgccagcgtgggagacagagtgaccatcacatgcaagagcagccagagcctgctggactccgatggcaagacctacctgaactggtatcagcagaagcccggcaaggcccctaagctgctgatctacctggtgtccaagctggatagcggcgtgcccagcagattttctggcagcggcagcggaaccgacttcaccctgacaatatccagcctccagcctgaggacttcgccacctactactgcttccaaggcacccactttccattcaccttcggccagggcaccaaggtggaaatcaaaagactcgaggacctgaagaacgtgttcccacctgaggtggccgtgttcgagcctagcgaggccgagatcagccacacccagaaagccaccctcgtgtgcctggctaccggcttctaccccgaccatgtggaactgtcttggtgggtcaacggcaaagaggtgcacagcggcgtgtgtaccgacccccagccactgaaagaacagcccgccctgaacgacagccggtactgcctgagcagcagactgagagtgtccgccaccttctggcagaacccccggaaccacttcagatgccaggtgcagttctacggcctgagcgagaacgacgagtggacccaggacagagccaagcccgtgacccagatcgtgtctgccgaagcctggggcagagccgattgcgacgtgaagctggtggaaaagagcttcgagacagacaccaacctgaacttccagaacctgagcgtgatcggcttcagaatcctgctgctgaaagtggccggctttaacctgctgatgaccctgcggctgtggtccagcagggccaagcgatctggatctggagcaacaaacttctcactactcaaacaagcaggtgacgtggaggagaatcccgggcctactagtgccaccatggactggatttggcgcatccttttccttgtcggcgctgctaccggcgcccattccgggcccgaagtgcaactggtggaatctgggggcggactggtgcagccaggcggaagtctgaggctgtcttgtgccgcctccggcagcatcttcggcttcaacgacatggcctggtatcggcaggctcccggaaaacagcgcgagctggtggctctgattagcagagtgggcgtgaccagcagcgccgactctgtgaagggcagattcacaatctccagagtgaacgccaaggatacagtgtacctccagatgaactctctgaaacctgaggatacagcagtgtactattgctacatggaccagcggctggacggcagcacactggcctactggggacagggaactcaagtgacagtgtctagcggatccggcggcggaggatctggcggaggcggatctgggggcggaggctctttcgaagaagtgcagctggttgaatcaggcggaggactggttcagcctggcggatctctgagactgtcttgtgccgccagcggctacaccttcagcagctactggatgaactgggtccgacaggcccctggcaaaggactggaatgggtcggaatgatcgaccccagcgacagcgagacacactacaaccacatcttcaaggaccgcttcaccatcagcgccgacaccagcaagaataccgcctacctccagatgaactccctgagagccgaggacaccgccgtgtactactgcgccagaaacctgtatctgtggggccagggaaccctggtcacagtgtcatctacgcgtatccagaaccctgatcctgccgtgtaccagctgcgggatagcaagagcagcgacaagagcgtgtgtctgttcaccgacttcgacagccagaccaacgtgtcccagagcaaggactccgacgtgtacatcaccgataagtgcgtgctggacatgcggagcatggacttcaagagcaactccgccgtggcctggtccaacaagtccgatttcgcctgcgccaacgccttcaacaacagcattatccccgaggacacattcttcccaagccccgagagcagctgcggctttaccagcgagagctaccagcagggcgtgctgagcgccaccatcctgtacgagatcctgctgggcaaggccaccctgtacgccgtgctggtgtctgccctggtgctgatggctatggtcaagcggaaggacagccggggataa

SEQ ID NO: 36605 - DNA, 2268 bp, synthetic construct
  source 1..2268: mol_type = other DNA
atggccttaccagtgaccgccttgctcctgccgctggccttgctgctccacgccgccaggccggacatccagatgacacagagccctagcagcctgtctgccagcgtgggagacagagtgaccatcacatgcaagagcagccagagcctgctggactccgatggcaagacctacctgaactggtatcagcagaagcccggcaaggcccctaagctgctgatctacctggtgtccaagctggatagcggcgtgcccagcagattttctggcagcggcagcggaaccgacttcaccctgacaatatccagcctccagcctgaggacttcgccacctactactgcttccaaggcacccactttccattcaccttcggccagggcaccaaggtggaaatcaaaagactcgaggacctgaagaacgtgttcccacctgaggtggccgtgttcgagcctagcgaggccgagatcagccacacccagaaagccaccctcgtgtgcctggctaccggcttctaccccgaccatgtggaactgtcttggtgggtcaacggcaaagaggtgcacagcggcgtgtgtaccgacccccagccactgaaagaacagcccgccctgaacgacagccggtactgcctgagcagcagactgagagtgtccgccaccttctggcagaacccccggaaccacttcagatgccaggtgcagttctacggcctgagcgagaacgacgagtggacccaggacagagccaagcccgtgacccagatcgtgtctgccgaagcctggggcagagccgattgcgacgtgaagctggtggaaaagagcttcgagacagacaccaacctgaacttccagaacctgagcgtgatcggcttcagaatcctgctgctgaaagtggccggctttaacctgctgatgaccctgcggctgtggtccagcagggccaagcgatctggatctggagcaacaaacttctcactactcaaacaagcaggtgacgtggaggagaatcccgggcctactagtgccaccatggactggatttggcgcatccttttccttgtcggcgctgctaccggcgcccattccgggcccgaggtgcagctggttgaatctggcggaggactggttcaggctggcggatctctgagactgtcttgtgccgccagcggctctgtgttcagcggcaatgtgatgggctggtacagacaggcccctggcaaagaaagagagtgggttgccgccattgccagcggcggcagcatctactacagagactctgtgaagggcagattcaccatcagccgggacaacgccaagaacaccgtgtacctccagatgaacagcctgaagcctgaggacaccgccgtgtactactgcaactctcaccctcctacactgccctattggggcctgggaacccaagtgacagtgtcctctggatccggcggcggaggatctggcggaggcggatctgggggcggaggctctttcgaagaagtgcagctggttgaatcaggcggaggactggttcagcctggcggatctctgagactgtcttgtgccgccagcggctacaccttcagcagctactggatgaactgggtccgacaggcccctggcaaaggactggaatgggtcggaatgatcgaccccagcgacagcgagacacactacaaccacatcttcaaggaccgcttcaccatcagcgccgacaccagcaagaataccgcctacctccagatgaactccctgagagccgaggacaccgccgtgtactactgcgccagaaacctgtatctgtggggccagggaaccctggtcacagtgtcatctacgcgtatccagaaccctgatcctgccgtgtaccagctgcgggatagcaagagcagcgacaagagcgtgtgtctgttcaccgacttcgacagccagaccaacgtgtcccagagcaaggactccgacgtgtacatcaccgataagtgcgtgctggacatgcggagcatggacttcaagagcaactccgccgtggcctggtccaacaagtccgatttcgcctgcgccaacgccttcaacaacagcattatccccgaggacacattcttcccaagccccgagagcagctgcggctttaccagcgagagctaccagcagggcgtgctgagcgccaccatcctgtacgagatcctgctgggcaaggccaccctgtacgccgtgctggtgtctgccctggtgctgatggctatggtcaagcggaaggacagccggggataa

SEQ ID NO: 36606 - DNA, 2262 bp, synthetic construct
  source 1..2262: mol_type = other DNA
atggccttaccagtgaccgccttgctcctgccgctggccttgctgctccacgccgccaggccggacatccagatgacacagagccctagcagcctgtctgccagcgtgggagacagagtgaccatcacatgcaagagcagccagagcctgctggactccgatggcaagacctacctgaactggtatcagcagaagcccggcaaggcccctaagctgctgatctacctggtgtccaagctggatagcggcgtgcccagcagattttctggcagcggcagcggaaccgacttcaccctgacaatatccagcctccagcctgaggacttcgccacctactactgcttccaaggcacccactttccattcaccttcggccagggcaccaaggtggaaatcaaaagactcgaggacctgaagaacgtgttcccacctgaggtggccgtgttcgagcctagcgaggccgagatcagccacacccagaaagccaccctcgtgtgcctggctaccggcttctaccccgaccatgtggaactgtcttggtgggtcaacggcaaagaggtgcacagcggcgtgtgtaccgacccccagccactgaaagaacagcccgccctgaacgacagccggtactgcctgagcagcagactgagagtgtccgccaccttctggcagaacccccggaaccacttcagatgccaggtgcagttctacggcctgagcgagaacgacgagtggacccaggacagagccaagcccgtgacccagatcgtgtctgccgaagcctggggcagagccgattgcgacgtgaagctggtggaaaagagcttcgagacagacaccaacctgaacttccagaacctgagcgtgatcggcttcagaatcctgctgctgaaagtggccggctttaacctgctgatgaccctgcggctgtggtccagcagggccaagcgatctggatctggagcaacaaacttctcactactcaaacaagcaggtgacgtggaggagaatcccgggcctactagtgccaccatggactggatttggcgcatccttttccttgtcggcgctgctaccggcgcccattccgggcccgaagttcagctgctggaatctggcggaggactcgttcaacctggcggctctctgagactgagctgtgccgcttctggcttcagcttctctagctacgccctgagctgggttcgacaagctcccggaaagggccttgaatgggtgtccagcatcggcgagaatgacggcaccacagactatgccgatgccgtgaaaggccggtttaccatcagcagagacaattccaagaacacgctctatctgcaaatgaactccctgcgcgtggaagatacagccgtgtattattgcgtgaaggacggcatccactggggacagggaaccctggttacagtgtctagcggatccggcggcggaggatctggcggaggcggatctgggggcggaggctctttcgaagaagtgcagctggttgaatcaggcggaggactggttcagcctggcggatctctgagactgtcttgtgccgccagcggctacaccttcagcagctactggatgaactgggtccgacaggcccctggcaaaggactggaatgggtcggaatgatcgaccccagcgacagcgagacacactacaaccacatcttcaaggaccgcttcaccatcagcgccgacaccagcaagaataccgcctacctccagatgaactccctgagagccgaggacaccgccgtgtactactgcgccagaaacctgtatctgtggggccagggaaccctggtcacagtgtcatctacgcgtatccagaaccctgatcctgccgtgtaccagctgcgggatagcaagagcagcgacaagagcgtgtgtctgttcaccgacttcgacagccagaccaacgtgtcccagagcaaggactccgacgtgtacatcaccgataagtgcgtgctggacatgcggagcatggacttcaagagcaactccgccgtggcctggtccaacaagtccgatttcgcctgcgccaacgccttcaacaacagcattatccccgaggacacattcttcccaagccccgagagcagctgcggctttaccagcgagagctaccagcagggcgtgctgagcgccaccatcctgtacgagatcctgctgggcaaggccaccctgtacgccgtgctggtgtctgccctggtgctgatggctatggtcaagcggaaggacagccggggataa

SEQ ID NO: 36607 - DNA, 3369 bp, synthetic construct
  source 1..3369: mol_type = other DNA
atgggacccagactgctgttttgggctctgctgtgtctgctcggcacaggacctgttgaagctggcgtgacacagagccccacacacctgattaagaccagaggccagcaggccacactgagatgcagccctatcagcggccacaccagcgtgtactggtatcagcaggctctcggactgggcctccagttcctgctttggtacgacgagggcgaagagagaaaccggggcaacttccctcctcggttttccggcagacagttccccaactacagcagcgagctgaacgtgaacgccctggaactggaagatagcgccctgtacctgtgtgcctcttctcttggtggacctcgcggactggctggactgagaggggatgagcagtttttcggccctggcaccagactgaccgtgctggaaggtaccggcggaggcggatctggcggcggagaattcgacatccagatgacacagagccctagcagcctgtctgccagcgtgggagacagagtgaccatcacatgcaagagcagccagagcctgctggactccgatggcaagacctacctgaactggtatcagcagaagcccggcaaggcccctaagctgctgatctacctggtgtccaagctggatagcggcgtgcccagcagattttctggcagcggcagcggaaccgacttcaccctgacaatatccagcctccagcctgaggacttcgccacctactactgcttccaaggcacccactttccattcaccttcggccagggcaccaaggtggaaatcaaaagactcgaggacctgaagaacgtgttcccacctgaggtggccgtgttcgagcctagcgaggccgagatcagccacacccagaaagccaccctcgtgtgcctggctaccggcttctaccccgaccatgtggaactgtcttggtgggtcaacggcaaagaggtgcacagcggcgtgtgtaccgacccccagccactgaaagaacagcccgccctgaacgacagccggtactgcctgagcagcagactgagagtgtccgccaccttctggcagaacccccggaaccacttcagatgccaggtgcagttctacggcctgagcgagaacgacgagtggacccaggacagagccaagcccgtgacccagatcgtgtctgccgaagcctggggcagagccgattgcgacgtgaagctggtggaaaagagcttcgagacagacaccaacctgaacttccagaacctgagcgtgatcggcttcagaatcctgctgctgaaagtggccggctttaacctgctgatgaccctgcggctgtggtccagcagggccaagcgatctggatctggagcaacaaacttctcactactcaaacaagcaggtgacgtggaggagaatcccgggcctactagtgccaccatggactggatttggcgcatccttttccttgtcggcgctgctaccggcgcccattccgggcccgaagtgcagctggttgaatctggcggaggactggttcaggctggcggatctctgagactgtcttgtgccgccagcggcagaacctttagcatgggctggtttagacaggcccctggcaaagagagagagttcgtcgccgccatcacatactctggcggcagcccttactacgccgactctgtgaagggcagattcaccatcagccgggacaacgccaagaacaccgtgtacctccagatgaacagcctgaagcctgaggacaccgccgtgtactactgcgccgccaatccaacatacggcagcgactggaacgccgagaattggggccagggaacccaagtgacagtgtctagcggatccggcggcggaggatctggcggaggcggatctgggggcggaggctctttcgaagaagtgcagctggttgaatcaggcggaggactggttcagcctggcggatctctgagactgtcttgtgccgccagcggctacaccttcagcagctactggatgaactgggtccgacaggcccctggcaaaggactggaatgggtcggaatgatcgaccccagcgacagcgagacacactacaaccacatcttcaaggaccgcttcaccatcagcgccgacaccagcaagaataccgcctacctccagatgaactccctgagagccgaggacaccgccgtgtactactgcgccagaaacctgtatctgtggggccagggaaccctggtcacagtgtcatctacgcgtatccagaaccctgatcctgccgtgtaccagctgcgggatagcaagagcagcgacaagagcgtgtgtctgttcaccgacttcgacagccagaccaacgtgtcccagagcaaggactccgacgtgtacatcaccgataagtgcgtgctggacatgcggagcatggacttcaagagcaactccgccgtggcctggtccaacaagtccgatttcgcctgcgccaacgccttcaacaacagcattatccccgaggacacattcttcccaagccccgagagcagctgcggctttaccagcgagagctaccagcagggcgtgctgagcgccaccatcctgtacgagatcctgctgggcaaggccaccctgtacgccgtgctggtgtctgccctggtgctgatggctatggtcaagcggaaggacagccggggacgcgccaagagaagcggatctggcgtgaagcagaccctgaatttcgacctgctgaagctggctggcgacgtggaatccaacccaggcccttctagaggccatatgaccgagtacaagcccacggtgcgcctcgccacccgcgacgacgtccccagggccgtacgcaccctcgccgccgcgttcgccgactaccccgccacgcgccacaccgtcgatccggaccgccacatcgagcgggtcaccgagctgcaagaactcttcctcacgcgcgtcgggctcgacatcggcaaggtgtgggtcgcggacgacggcgccgcggtggcggtctggaccacgccggagagcgtcgaagcgggggcggtgttcgccgagatcggcccgcgcatggccgagttgagcggttcccggctggccgcgcagcaacagatggaaggcctcctggcgccgcaccggcccaaggagcccgcgtggttcctggccaccgtcggcgtctcgcccgaccaccagggcaagggtctgggcagcgccgtcgtgctccccggagtggaggcggccgagcgcgccggggtgcccgccttcctggagacctccgcgccccgcaacctccccttctacgagcggctcggcttcaccgtcaccgccgacgtcgaggtgcccgaaggaccgcgcacctggtgcatgacccgcaagcccggtgcctga

SEQ ID NO: 36608 - DNA, 3366 bp, synthetic construct
  source 1..3366: mol_type = other DNA
atgggacccagactgctgttttgggctctgctgtgtctgctcggcacaggacctgttgaagctggcgtgacacagagccccacacacctgattaagaccagaggccagcaggccacactgagatgcagccctatcagcggccacaccagcgtgtactggtatcagcaggctctcggactgggcctccagttcctgctttggtacgacgagggcgaagagagaaaccggggcaacttccctcctcggttttccggcagacagttccccaactacagcagcgagctgaacgtgaacgccctggaactggaagatagcgccctgtacctgtgtgccagctctctcggcggagatgaactgggagccgatggcaacgagcagttctttggccctggcaccagactgaccgtgctggaaggtaccggcggaggcggatctggcggcggaagcgaattcgacatccagatgacacagagccctagcagcctgtctgccagcgtgggagacagagtgaccatcacatgcaagagcagccagagcctgctggactccgatggcaagacctacctgaactggtatcagcagaagcccggcaaggcccctaagctgctgatctacctggtgtccaagctggatagcggcgtgcccagcagattttctggcagcggcagcggaaccgacttcaccctgacaatatccagcctccagcctgaggacttcgccacctactactgcttccaaggcacccactttccattcaccttcggccagggcaccaaggtggaaatcaaaagactcgaggacctgaagaacgtgttcccacctgaggtggccgtgttcgagcctagcgaggccgagatcagccacacccagaaagccaccctcgtgtgcctggctaccggcttctaccccgaccatgtggaactgtcttggtgggtcaacggcaaagaggtgcacagcggcgtgtgtaccgacccccagccactgaaagaacagcccgccctgaacgacagccggtactgcctgagcagcagactgagagtgtccgccaccttctggcagaacccccggaaccacttcagatgccaggtgcagttctacggcctgagcgagaacgacgagtggacccaggacagagccaagcccgtgacccagatcgtgtctgccgaagcctggggcagagccgattgcgacgtgaagctggtggaaaagagcttcgagacagacaccaacctgaacttccagaacctgagcgtgatcggcttcagaatcctgctgctgaaagtggccggctttaacctgctgatgaccctgcggctgtggtccagcagggccaagcgatctggatctggagcaacaaacttctcactactcaaacaagcaggtgacgtggaggagaatcccgggcctactagtgccaccatggactggatttggcgcatccttttccttgtcggcgctgctaccggcgcccattccgggcccgaagtgcagctggttgaatctggcggaggactggttcaggctggcggatctctgagactgtcttgtgccgccagcggcagaacctttagcatgggctggtttagacaggcccctggcaaagagagagagttcgtcgccgccatcacatactctggcggcagcccttactacgccgactctgtgaagggcagattcaccatcagccgggacaacgccaagaacaccgtgtacctccagatgaacagcctgaagcctgaggacaccgccgtgtactactgcgccgccaatccaacatacggcagcgactggaacgccgagaattggggccagggaacccaagtgacagtgtctagcggatccggcggcggaggatctggcggaggcggatctgggggcggaggctctttcgaagaagtgcagctggttgaatcaggcggaggactggttcagcctggcggatctctgagactgtcttgtgccgccagcggctacaccttcagcagctactggatgaactgggtccgacaggcccctggcaaaggactggaatgggtcggaatgatcgaccccagcgacagcgagacacactacaaccacatcttcaaggaccgcttcaccatcagcgccgacaccagcaagaataccgcctacctccagatgaactccctgagagccgaggacaccgccgtgtactactgcgccagaaacctgtatctgtggggccagggaaccctggtcacagtgtcatctacgcgtatccagaaccctgatcctgccgtgtaccagctgcgggatagcaagagcagcgacaagagcgtgtgtctgttcaccgacttcgacagccagaccaacgtgtcccagagcaaggactccgacgtgtacatcaccgataagtgcgtgctggacatgcggagcatggacttcaagagcaactccgccgtggcctggtccaacaagtccgatttcgcctgcgccaacgccttcaacaacagcattatccccgaggacacattcttcccaagccccgagagcagctgcggctttaccagcgagagctaccagcagggcgtgctgagcgccaccatcctgtacgagatcctgctgggcaaggccaccctgtacgccgtgctggtgtctgccctggtgctgatggctatggtcaagcggaaggacagccggggacgcgccaagagaagcggatctggcgtgaagcagaccctgaatttcgacctgctgaagctggctggcgacgtggaatccaacccaggcccttctagaggccatatgaccgagtacaagcccacggtgcgcctcgccacccgcgacgacgtccccagggccgtacgcaccctcgccgccgcgttcgccgactaccccgccacgcgccacaccgtcgatccggaccgccacatcgagcgggtcaccgagctgcaagaactcttcctcacgcgcgtcgggctcgacatcggcaaggtgtgggtcgcggacgacggcgccgcggtggcggtctggaccacgccggagagcgtcgaagcgggggcggtgttcgccgagatcggcccgcgcatggccgagttgagcggttcccggctggccgcgcagcaacagatggaaggcctcctggcgccgcaccggcccaaggagcccgcgtggttcctggccaccgtcggcgtctcgcccgaccaccagggcaagggtctgggcagcgccgtcgtgctccccggagtggaggcggccgagcgcgccggggtgcccgccttcctggagacctccgcgccccgcaacctccccttctacgagcggctcggcttcaccgtcaccgccgacgtcgaggtgcccgaaggaccgcgcacctggtgcatgacccgcaagcccggtgcctga

SEQ ID NO: 36609 - DNA, 2841 bp, synthetic construct
  source 1..2841: mol_type = other DNA
atggccttaccagtgaccgccttgctcctgccgctggccttgctgctccacgccgccaggccggacatccagatgacacagagccctagcagcctgtctgccagcgtgggagacagagtgaccatcacatgcaagagcagccagagcctgctggactccgatggcaagacctacctgaactggtatcagcagaagcccggcaaggcccctaagctgctgatctacctggtgtccaagctggatagcggcgtgcccagcagattttctggcagcggcagcggaaccgacttcaccctgacaatatccagcctccagcctgaggacttcgccacctactactgcttccaaggcacccactttccattcaccttcggccagggcaccaaggtggaaatcaaaagactcgaggacctgaagaacgtgttcccacctgaggtggccgtgttcgagcctagcgaggccgagatcagccacacccagaaagccaccctcgtgtgcctggctaccggcttctaccccgaccatgtggaactgtcttggtgggtcaacggcaaagaggtgcacagcggcgtgtgtaccgacccccagccactgaaagaacagcccgccctgaacgacagccggtactgcctgagcagcagactgagagtgtccgccaccttctggcagaacccccggaaccacttcagatgccaggtgcagttctacggcctgagcgagaacgacgagtggacccaggacagagccaagcccgtgacccagatcgtgtctgccgaagcctggggcagagccgattgcgacgtgaagctggtggaaaagagcttcgagacagacaccaacctgaacttccagaacctgagcgtgatcggcttcagaatcctgctgctgaaagtggccggctttaacctgctgatgaccctgcggctgtggtccagcagggccaagcgatctggatctggagcaacaaacttctcactactcaaacaagcaggtgacgtggaggagaatcccgggcctactagtgccaccatggactggatttggcgcatccttttccttgtcggcgctgctaccggcgcccattccgggcccatgggaagctggcttgagttctaccacagactcaacgccattgacagcaggctgtgggcacttggcggaagcgaagctgaactcgccgcttttgaaaaagaaattgccgctttcgagtccgagcttcaggcttacaaaggcaaagggaatcctgaggtcgagagcctgagagatcacgctgcccacattagagagtggttgcaggcataccggcacaatggatccggcggcggaggatctggcggaggcggatctgggggcggaggctctttcgaagaagtgcagctggttgaatcaggcggaggactggttcagcctggcggatctctgagactgtcttgtgccgccagcggctacaccttcagcagctactggatgaactgggtccgacaggcccctggcaaaggactggaatgggtcggaatgatcgaccccagcgacagcgagacacactacaaccacatcttcaaggaccgcttcaccatcagcgccgacaccagcaagaataccgcctacctccagatgaactccctgagagccgaggacaccgccgtgtactactgcgccagaaacctgtatctgtggggccagggaaccctggtcacagtgtcatctacgcgtatccagaaccctgatcctgccgtgtaccagctgcgggatagcaagagcagcgacaagagcgtgtgtctgttcaccgacttcgacagccagaccaacgtgtcccagagcaaggactccgacgtgtacatcaccgataagtgcgtgctggacatgcggagcatggacttcaagagcaactccgccgtggcctggtccaacaagtccgatttcgcctgcgccaacgccttcaacaacagcattatccccgaggacacattcttcccaagccccgagagcagctgcggctttaccagcgagagctaccagcagggcgtgctgagcgccaccatcctgtacgagatcctgctgggcaaggccaccctgtacgccgtgctggtgtctgccctggtgctgatggctatggtcaagcggaaggacagccggggacgcgccaagagaagcggatctggcgtgaagcagaccctgaatttcgacctgctgaagctggctggcgacgtggaatccaacccaggcccttctagaggccatatgaccgagtacaagcccacggtgcgcctcgccacccgcgacgacgtccccagggccgtacgcaccctcgccgccgcgttcgccgactaccccgccacgcgccacaccgtcgatccggaccgccacatcgagcgggtcaccgagctgcaagaactcttcctcacgcgcgtcgggctcgacatcggcaaggtgtgggtcgcggacgacggcgccgcggtggcggtctggaccacgccggagagcgtcgaagcgggggcggtgttcgccgagatcggcccgcgcatggccgagttgagcggttcccggctggccgcgcagcaacagatggaaggcctcctggcgccgcaccggcccaaggagcccgcgtggttcctggccaccgtcggcgtctcgcccgaccaccagggcaagggtctgggcagcgccgtcgtgctccccggagtggaggcggccgagcgcgccggggtgcccgccttcctggagacctccgcgccccgcaacctccccttctacgagcggctcggcttcaccgtcaccgccgacgtcgaggtgcccgaaggaccgcgcacctggtgcatgacccgcaagcccggtgcctga

SEQ ID NO: 36610 - DNA, 2841 bp, synthetic construct
  source 1..2841: mol_type = other DNA
atggccttaccagtgaccgccttgctcctgccgctggccttgctgctccacgccgccaggccggcatgcatgggcagttggttcgagttctacgaccggctgaatgccatcgacgccagactgtgggctctcggaggatctgaagctgagctggccgccttcgagaaagagatcgccgcctttgagagcgagctgcaagcctacaaaggcaagggcaaccccgaggtggaaaacctgagagtgcacgccgctgccatcagagaatggctccaggcttacagacacaacggtaccggcggaggcggatctggcggcggaggtagcggtggcggaggatctgaattcgacatccagatgacacagagccctagcagcctgtctgccagcgtgggagacagagtgaccatcacatgcaagagcagccagagcctgctggactccgatggcaagacctacctgaactggtatcagcagaagcccggcaaggcccctaagctgctgatctacctggtgtccaagctggatagcggcgtgcccagcagattttctggcagcggcagcggaaccgacttcaccctgacaatatccagcctccagcctgaggacttcgccacctactactgcttccaaggcacccactttccattcaccttcggccagggcaccaaggtggaaatcaaaagactcgaggacctgaagaacgtgttcccacctgaggtggccgtgttcgagcctagcgaggccgagatcagccacacccagaaagccaccctcgtgtgcctggctaccggcttctaccccgaccatgtggaactgtcttggtgggtcaacggcaaagaggtgcacagcggcgtgtgtaccgacccccagccactgaaagaacagcccgccctgaacgacagccggtactgcctgagcagcagactgagagtgtccgccaccttctggcagaacccccggaaccacttcagatgccaggtgcagttctacggcctgagcgagaacgacgagtggacccaggacagagccaagcccgtgacccagatcgtgtctgccgaagcctggggcagagccgattgcgacgtgaagctggtggaaaagagcttcgagacagacaccaacctgaacttccagaacctgagcgtgatcggcttcagaatcctgctgctgaaagtggccggctttaacctgctgatgaccctgcggctgtggtccagcagggccaagcgatctggatctggagcaacaaacttctcactactcaaacaagcaggtgacgtggaggagaatcccgggcctactagtatggactggatttggcgcatccttttccttgtcggcgctgctaccggcgcgcattccttcgaagaagtgcagctggttgaatcaggcggaggactggttcagcctggcggatctctgagactgtcttgtgccgccagcggctacaccttcagcagctactggatgaactgggtccgacaggcccctggcaaaggactggaatgggtcggaatgatcgaccccagcgacagcgagacacactacaaccacatcttcaaggaccgcttcaccatcagcgccgacaccagcaagaataccgcctacctccagatgaactccctgagagccgaggacaccgccgtgtactactgcgccagaaacctgtatctgtggggccagggaaccctggtcacagtgtcatctacgcgtatccagaaccctgatcctgccgtgtaccagctgcgggatagcaagagcagcgacaagagcgtgtgtctgttcaccgacttcgacagccagaccaacgtgtcccagagcaaggactccgacgtgtacatcaccgataagtgcgtgctggacatgcggagcatggacttcaagagcaactccgccgtggcctggtccaacaagtccgatttcgcctgcgccaacgccttcaacaacagcattatccccgaggacacattcttcccaagccccgagagcagctgcggctttaccagcgagagctaccagcagggcgtgctgagcgccaccatcctgtacgagatcctgctgggcaaggccaccctgtacgccgtgctggtgtctgccctggtgctgatggctatggtcaagcggaaggacagccggggacgcgccaagagaagcggatctggcgtgaagcagaccctgaatttcgacctgctgaagctggctggcgacgtggaatccaacccaggcccttctagaggccatatgaccgagtacaagcccacggtgcgcctcgccacccgcgacgacgtccccagggccgtacgcaccctcgccgccgcgttcgccgactaccccgccacgcgccacaccgtcgatccggaccgccacatcgagcgggtcaccgagctgcaagaactcttcctcacgcgcgtcgggctcgacatcggcaaggtgtgggtcgcggacgacggcgccgcggtggcggtctggaccacgccggagagcgtcgaagcgggggcggtgttcgccgagatcggcccgcgcatggccgagttgagcggttcccggctggccgcgcagcaacagatggaaggcctcctggcgccgcaccggcccaaggagcccgcgtggttcctggccaccgtcggcgtctcgcccgaccaccagggcaagggtctgggcagcgccgtcgtgctccccggagtggaggcggccgagcgcgccggggtgcccgccttcctggagacctccgcgccccgcaacctccccttctacgagcggctcggcttcaccgtcaccgccgacgtcgaggtgcccgaaggaccgcgcacctggtgcatgacccgcaagcccggtgcctga

SEQ ID NO: 36611 - DNA, 3192 bp, synthetic construct
  source 1..3192: mol_type = other DNA
atggccttaccagtgaccgccttgctcctgccgctggccttgctgctccacgccgccaggccggcatgcatggaccccgacctggaaatcagagccgccttcctgcggcagagaaacacagccctgagaacagaggtggccgagctggaacaagaggtgcagcggctggaaaacgaggtgtcccagtacgagacaagatacggccctctcggaggcggaaaaggtaccggcggaggcggatctggcggcggaggtagcggtggcggaggatctgaattcgacatccagatgacacagagccctagcagcctgtctgccagcgtgggagacagagtgaccatcacatgcaagagcagccagagcctgctggactccgatggcaagacctacctgaactggtatcagcagaagcccggcaaggcccctaagctgctgatctacctggtgtccaagctggatagcggcgtgcccagcagattttctggcagcggcagcggaaccgacttcaccctgacaatatccagcctccagcctgaggacttcgccacctactactgcttccaaggcacccactttccattcaccttcggccagggcaccaaggtggaaatcaaaagactcgaggacctgaagaacgtgttcccacctgaggtggccgtgttcgagcctagcgaggccgagatcagccacacccagaaagccaccctcgtgtgcctggctaccggcttctaccccgaccatgtggaactgtcttggtgggtcaacggcaaagaggtgcacagcggcgtgtgtaccgacccccagccactgaaagaacagcccgccctgaacgacagccggtactgcctgagcagcagactgagagtgtccgccaccttctggcagaacccccggaaccacttcagatgccaggtgcagttctacggcctgagcgagaacgacgagtggacccaggacagagccaagcccgtgacccagatcgtgtctgccgaagcctggggcagagccgattgcgacgtgaagctggtggaaaagagcttcgagacagacaccaacctgaacttccagaacctgagcgtgatcggcttcagaatcctgctgctgaaagtggccggctttaacctgctgatgaccctgcggctgtggtccagcagggccaagcgatctggatctggagcaacaaacttctcactactcaaacaagcaggtgacgtggaggagaatcccgggcctactagtgccaccatggactggatttggcgcatccttttccttgtcggcgctgctaccggcgcccattccgggcccgaagtgcagctggttgaatctggcggaggactggttcaggctggcggatctctgagactgtcttgtgccgccagcggcagaacctttagcatgggctggtttagacaggcccctggcaaagagagagagttcgtcgccgccatcacatactctggcggcagcccttactacgccgactctgtgaagggcagattcaccatcagccgggacaacgccaagaacaccgtgtacctccagatgaacagcctgaagcctgaggacaccgccgtgtactactgcgccgccaatccaacatacggcagcgactggaacgccgagaattggggccagggaacccaagtgacagtgtctagcggatccggcggcggaggatctggcggaggcggatctgggggcggaggctctttcgaagaagtgcagctggttgaatcaggcggaggactggttcagcctggcggatctctgagactgtcttgtgccgccagcggctacaccttcagcagctactggatgaactgggtccgacaggcccctggcaaaggactggaatgggtcggaatgatcgaccccagcgacagcgagacacactacaaccacatcttcaaggaccgcttcaccatcagcgccgacaccagcaagaataccgcctacctccagatgaactccctgagagccgaggacaccgccgtgtactactgcgccagaaacctgtatctgtggggccagggaaccctggtcacagtgtcatctacgcgtatccagaaccctgatcctgccgtgtaccagctgcgggatagcaagagcagcgacaagagcgtgtgtctgttcaccgacttcgacagccagaccaacgtgtcccagagcaaggactccgacgtgtacatcaccgataagtgcgtgctggacatgcggagcatggacttcaagagcaactccgccgtggcctggtccaacaagtccgatttcgcctgcgccaacgccttcaacaacagcattatccccgaggacacattcttcccaagccccgagagcagctgcggctttaccagcgagagctaccagcagggcgtgctgagcgccaccatcctgtacgagatcctgctgggcaaggccaccctgtacgccgtgctggtgtctgccctggtgctgatggctatggtcaagcggaaggacagccggggacgcgccaagagaagcggatctggcgtgaagcagaccctgaatttcgacctgctgaagctggctggcgacgtggaatccaacccaggcccttctagaggccatatgaccgagtacaagcccacggtgcgcctcgccacccgcgacgacgtccccagggccgtacgcaccctcgccgccgcgttcgccgactaccccgccacgcgccacaccgtcgatccggaccgccacatcgagcgggtcaccgagctgcaagaactcttcctcacgcgcgtcgggctcgacatcggcaaggtgtgggtcgcggacgacggcgccgcggtggcggtctggaccacgccggagagcgtcgaagcgggggcggtgttcgccgagatcggcccgcgcatggccgagttgagcggttcccggctggccgcgcagcaacagatggaaggcctcctggcgccgcaccggcccaaggagcccgcgtggttcctggccaccgtcggcgtctcgcccgaccaccagggcaagggtctgggcagcgccgtcgtgctccccggagtggaggcggccgagcgcgccggggtgcccgccttcctggagacctccgcgccccgcaacctccccttctacgagcggctcggcttcaccgtcaccgccgacgtcgaggtgcccgaaggaccgcgcacctggtgcatgacccgcaagcccggtgcctga

SEQ ID NO: 36612 - DNA, 2841 bp, synthetic construct
  source 1..2841: mol_type = other DNA
atggccttaccagtgaccgccttgctcctgccgctggccttgctgctccacgccgccaggccggacatccagatgacacagagccctagcagcctgtctgccagcgtgggagacagagtgaccatcacatgcaagagcagccagagcctgctggactccgatggcaagacctacctgaactggtatcagcagaagcccggcaaggcccctaagctgctgatctacctggtgtccaagctggatagcggcgtgcccagcagattttctggcagcggcagcggaaccgacttcaccctgacaatatccagcctccagcctgaggacttcgccacctactactgcttccaaggcacccactttccattcaccttcggccagggcaccaaggtggaaatcaaaagactcgaggacctgaagaacgtgttcccacctgaggtggccgtgttcgagcctagcgaggccgagatcagccacacccagaaagccaccctcgtgtgcctggctaccggcttctaccccgaccatgtggaactgtcttggtgggtcaacggcaaagaggtgcacagcggcgtgtgtaccgacccccagccactgaaagaacagcccgccctgaacgacagccggtactgcctgagcagcagactgagagtgtccgccaccttctggcagaacccccggaaccacttcagatgccaggtgcagttctacggcctgagcgagaacgacgagtggacccaggacagagccaagcccgtgacccagatcgtgtctgccgaagcctggggcagagccgattgcgacgtgaagctggtggaaaagagcttcgagacagacaccaacctgaacttccagaacctgagcgtgatcggcttcagaatcctgctgctgaaagtggccggctttaacctgctgatgaccctgcggctgtggtccagcagggccaagcgatctggatctggagcaacaaacttctcactactcaaacaagcaggtgacgtggaggagaatcccgggcctactagtgccaccatggactggatttggcgcatccttttccttgtcggcgctgctaccggcgcccattccgggcccatgggatcttggagcgagttttacgatcggctgcacgccattcaccaccggctgtatgctctcggaggaagcgaagctgagctggccgcttttgaaaaagaaattgccgctttcgagtccgagcttcaggcttacaaaggcaaagggaatcctgaggtcgaggccctgagagataccgccgccttcatcagaacccggttgcaggcataccggcacaacggatccggcggcggaggatctggcggaggcggatctgggggcggaggctctttcgaagaagtgcagctggttgaatcaggcggaggactggttcagcctggcggatctctgagactgtcttgtgccgccagcggctacaccttcagcagctactggatgaactgggtccgacaggcccctggcaaaggactggaatgggtcggaatgatcgaccccagcgacagcgagacacactacaaccacatcttcaaggaccgcttcaccatcagcgccgacaccagcaagaataccgcctacctccagatgaactccctgagagccgaggacaccgccgtgtactactgcgccagaaacctgtatctgtggggccagggaaccctggtcacagtgtcatctacgcgtatccagaaccctgatcctgccgtgtaccagctgcgggatagcaagagcagcgacaagagcgtgtgtctgttcaccgacttcgacagccagaccaacgtgtcccagagcaaggactccgacgtgtacatcaccgataagtgcgtgctggacatgcggagcatggacttcaagagcaactccgccgtggcctggtccaacaagtccgatttcgcctgcgccaacgccttcaacaacagcattatccccgaggacacattcttcccaagccccgagagcagctgcggctttaccagcgagagctaccagcagggcgtgctgagcgccaccatcctgtacgagatcctgctgggcaaggccaccctgtacgccgtgctggtgtctgccctggtgctgatggctatggtcaagcggaaggacagccggggacgcgccaagagaagcggatctggcgtgaagcagaccctgaatttcgacctgctgaagctggctggcgacgtggaatccaacccaggcccttctagaggccatatgaccgagtacaagcccacggtgcgcctcgccacccgcgacgacgtccccagggccgtacgcaccctcgccgccgcgttcgccgactaccccgccacgcgccacaccgtcgatccggaccgccacatcgagcgggtcaccgagctgcaagaactcttcctcacgcgcgtcgggctcgacatcggcaaggtgtgggtcgcggacgacggcgccgcggtggcggtctggaccacgccggagagcgtcgaagcgggggcggtgttcgccgagatcggcccgcgcatggccgagttgagcggttcccggctggccgcgcagcaacagatggaaggcctcctggcgccgcaccggcccaaggagcccgcgtggttcctggccaccgtcggcgtctcgcccgaccaccagggcaagggtctgggcagcgccgtcgtgctccccggagtggaggcggccgagcgcgccggggtgcccgccttcctggagacctccgcgccccgcaacctccccttctacgagcggctcggcttcaccgtcaccgccgacgtcgaggtgcccgaaggaccgcgcacctggtgcatgacccgcaagcccggtgcctga

SEQ ID NO: 36613 - DNA, 3471 bp, synthetic construct
  source 1..3471: mol_type = other DNA
atggccttaccagtgaccgccttgctcctgccgctggccttgctgctccacgccgccaggccggacatccagatgacacagagccctagcagcctgtctgccagcgtgggagacagagtgaccatcacatgcaagagcagccagagcctgctggactccgatggcaagacctacctgaactggtatcagcagaagcccggcaaggcccctaagctgctgatctacctggtgtccaagctggatagcggcgtgcccagcagattttctggcagcggcagcggaaccgacttcaccctgacaatatccagcctccagcctgaggacttcgccacctactactgcttccaaggcacccactttccattcaccttcggccagggcaccaaggtggaaatcaaaagactcgaggacctgaagaacgtgttcccacctgaggtggccgtgttcgagcctagcgaggccgagatcagccacacccagaaagccaccctcgtgtgcctggctaccggcttctaccccgaccatgtggaactgtcttggtgggtcaacggcaaagaggtgcacagcggcgtgtgtaccgacccccagccactgaaagaacagcccgccctgaacgacagccggtactgcctgagcagcagactgagagtgtccgccaccttctggcagaacccccggaaccacttcagatgccaggtgcagttctacggcctgagcgagaacgacgagtggacccaggacagagccaagcccgtgacccagatcgtgtctgccgaagcctggggcagagccgattgcgacgtgaagctggtggaaaagagcttcgagacagacaccaacctgaacttccagaacctgagcgtgatcggcttcagaatcctgctgctgaaagtggccggctttaacctgctgatgaccctgcggctgtggtccagcagggccaagcgatctggatctggagcaacaaacttctcactactcaaacaagcaggtgacgtggaggagaatcccgggcctactagtaccatggactggatttggcgcatccttttccttgtcggcgctgctaccggcgcccattccctgttcaatcaagaggtgcagatccctctgaccgagagctactgtggcccctgtcctaagaactggatctgctacaagaacaactgctaccagttcttcgacgagagcaagaattggtacgagagccaggccagctgcatgagccagaatgccagcctgctgaaggtgtacagcaaagaggaccaggacctgctgaaactggtcaagagcgcccactggatgggccttgtgcacatccccaccaatggctcttggcagtgggaggacggcagcattctgagccctaacctgctgaccatcatcgagatgcagaagggcgactgcgccctgtacgccagcagctttaagggctacatcgagaattgcagcaccccgaacacctacatctgtatgcagagaaccgtttctggcggaggcggctctggaggaggcggaagtggcggcggaggcgacctctttaatcaagaagtccagattccactcaccgaatcctactgcggaccttgtccaaaaaattggatttgttataagaacaactgttatcaattctttgatgagtctaaaaattggtatgagtcccaggcttcctgcatgtctcagaacgcttctctgctgaaagtctactctaaagaagatcaggatctcctgaagctcgtcaagtctgcccattggatggggctcgtccacattcctaccaacggaagctggcaatgggaagatggctccatcctgtctccaaatctgctcacgattattgaaatgcagaaaggggattgtgctctctacgccagctccttcaagggatatattgagaactgtagcacgcccaatacttatatctgtatgcaacggaccgtgggatccggcggcggaggatctggcggaggcggatctgggggcggaggctctttcgaagaagtgcagctggttgaatcaggcggaggactggttcagcctggcggatctctgagactgtcttgtgccgccagcggctacaccttcagcagctactggatgaactgggtccgacaggcccctggcaaaggactggaatgggtcggaatgatcgaccccagcgacagcgagacacactacaaccacatcttcaaggaccgcttcaccatcagcgccgacaccagcaagaataccgcctacctccagatgaactccctgagagccgaggacaccgccgtgtactactgcgccagaaacctgtatctgtggggccagggaaccctggtcacagtgtcatctacgcgtatccagaaccctgatcctgccgtgtaccagctgcgggatagcaagagcagcgacaagagcgtgtgtctgttcaccgacttcgacagccagaccaacgtgtcccagagcaaggactccgacgtgtacatcaccgataagtgcgtgctggacatgcggagcatggacttcaagagcaactccgccgtggcctggtccaacaagtccgatttcgcctgcgccaacgccttcaacaacagcattatccccgaggacacattcttcccaagccccgagagcagctgcggctttaccagcgagagctaccagcagggcgtgctgagcgccaccatcctgtacgagatcctgctgggcaaggccaccctgtacgccgtgctggtgtctgccctggtgctgatggctatggtcaagcggaaggacagccggggacgcgccaagagaagcggatctggcgtgaagcagaccctgaatttcgacctgctgaagctggctggcgacgtggaatccaacccaggcccttctagaggccatatgaccgagtacaagcccacggtgcgcctcgccacccgcgacgacgtccccagggccgtacgcaccctcgccgccgcgttcgccgactaccccgccacgcgccacaccgtcgatccggaccgccacatcgagcgggtcaccgagctgcaagaactcttcctcacgcgcgtcgggctcgacatcggcaaggtgtgggtcgcggacgacggcgccgcggtggcggtctggaccacgccggagagcgtcgaagcgggggcggtgttcgccgagatcggcccgcgcatggccgagttgagcggttcccggctggccgcgcagcaacagatggaaggcctcctggcgccgcaccggcccaaggagcccgcgtggttcctggccaccgtcggcgtctcgcccgaccaccagggcaagggtctgggcagcgccgtcgtgctccccggagtggaggcggccgagcgcgccggggtgcccgccttcctggagacctccgcgccccgcaacctccccttctacgagcggctcggcttcaccgtcaccgccgacgtcgaggtgcccgaaggaccgcgcacctggtgcatgacccgcaagcccggtgcctga

SEQ ID NO: 36614 - DNA, 1857 bp, synthetic construct
  source 1..1857: mol_type = other DNA
atggccttaccagtgaccgccttgctcctgccgctggccttgctgctccacgccgccaggccggacatccagatgacacagagccctagcagcctgtctgccagcgtgggagacagagtgaccatcacatgcaagagcagccagagcctgctggactccgatggcaagacctacctgaactggtatcagcagaagcccggcaaggcccctaagctgctgatctacctggtgtccaagctggatagcggcgtgcccagcagattttctggcagcggcagcggaaccgacttcaccctgacaatatccagcctccagcctgaggacttcgccacctactactgcttccaaggcacccactttccattcaccttcggccagggcaccaaggtggaaatcaaaagactcgaggacctgaagaacgtgttcccacctgaggtggccgtgttcgagcctagcgaggccgagatcagccacacccagaaagccaccctcgtgtgcctggctaccggcttctaccccgaccatgtggaactgtcttggtgggtcaacggcaaagaggtgcacagcggcgtgtgtaccgacccccagccactgaaagaacagcccgccctgaacgacagccggtactgcctgagcagcagactgagagtgtccgccaccttctggcagaacccccggaaccacttcagatgccaggtgcagttctacggcctgagcgagaacgacgagtggacccaggacagagccaagcccgtgacccagatcgtgtctgccgaagcctggggcagagccgattgcggctttaccagcgagagctaccagcagggcgtgctgagcgccaccaacctgagcgtgatcggcttcagaatcctgctgctgaaagtggccggctttaacctgctgatgaccctgcggctgtggtccagcagggccaagcgatctggatctggagcaacaaacttctcactactcaaacaagcaggtgacgtggaggagaatcccgggcctactagtatggactggatttggcgcatccttttccttgtcggcgctgctaccggcgcgcattccttcgaagaagtgcagctggttgaatcaggcggaggactggttcagcctggcggatctctgagactgtcttgtgccgccagcggctacaccttcagcagctactggatgaactgggtccgacaggcccctggcaaaggactggaatgggtcggaatgatcgaccccagcgacagcgagacacactacaaccacatcttcaaggaccgcttcaccatcagcgccgacaccagcaagaataccgcctacctccagatgaactccctgagagccgaggacaccgccgtgtactactgcgccagaaacctgtatctgtggggccagggaaccctggtcacagtgtcatctacgcgtatccagaaccctgatcctgccgtgtaccagctgcgggatagcaagagcagcgacaagagcgtgtgtctgttcaccgacttcgacagccagaccaacgtgtcccagagcaaggactccgacgtgtacatcaccgataagtgcgtgctggacatgcggagcatggacttcaagagcaactccgccgtggcctggtccaacaagtccgatttcgcctgcgccaacgccttcaacaacagcattatccccgaggacacattcttcccaagccccgagagcagctgcgacgtgaagctggtggaaaagagcttcgagacagacaccaacctgaacttccagatcctgtacgagatcctgctgggcaaggccaccctgtacgccgtgctggtgtctgccctggtgctgatggctatggtcaagcggaaggacagccgggga

SEQ ID NO: 36615 - DNA, 1869 bp, synthetic construct
  source 1..1869: mol_type = other DNA
atggccttaccagtgaccgccttgctcctgccgctggccttgctgctccacgccgccaggccggacatccagatgacacagagccctagcagcctgtctgccagcgtgggagacagagtgaccatcacatgcaagagcagccagagcctgctggactccgatggcaagacctacctgaactggtatcagcagaagcccggcaaggcccctaagctgctgatctacctggtgtccaagctggatagcggcgtgcccagcagattttctggcagcggcagcggaaccgacttcaccctgacaatatccagcctccagcctgaggacttcgccacctactactgcttccaaggcacccactttccattcaccttcggccagggcaccaaggtggaaatcaaaagactcgagatccagaaccctgatcctgccgtgtaccagctgcgggatagcaagagcagcgacaagagcgtgtgtctgttcaccgacttcgacagccagaccaacgtgtcccagagcaaggactccgacgtgtacatcaccgataagtgcgtgctggacatgcggagcatggacttcaagagcaactccgccgtggcctggtccaacaagtccgatttcgcctgcgccaacgccttcaacaacagcattatccccgaggacacattcttcccaagccccgagagcagctgcgacgtgaagctggtggaaaagagcttcgagacagacaccaacctgaacttccagatcctgtacgagatcctgctgggcaaggccaccctgtacgccgtgctggtgtctgccctggtgctgatggctatggtcaagcggaaggacagccggggacgcgccaagagaagcggatctggcgtgaagcagaccctgaatttcgacctgctgaagctggctggcgacgtggaatccaacccaggccctactagtatggactggatttggcgcatccttttccttgtcggcgctgctaccggcgcgcattccttcgaagaagtgcagctggttgaatcaggcggaggactggttcagcctggcggatctctgagactgtcttgtgccgccagcggctacaccttcagcagctactggatgaactgggtccgacaggcccctggcaaaggactggaatgggtcggaatgatcgaccccagcgacagcgagacacactacaaccacatcttcaaggaccgcttcaccatcagcgccgacaccagcaagaataccgcctacctccagatgaactccctgagagccgaggacaccgccgtgtactactgcgccagaaacctgtatctgtggggccagggaaccctggtcacagtgtcatctacgcgtgaggacctgaagaacgtgttcccacctgaggtggccgtgttcgagcctagcgaggccgagatcagccacacccagaaagccaccctcgtgtgcctggctaccggcttctaccccgaccatgtggaactgtcttggtgggtcaacggcaaagaggtgcacagcggcgtgtgtaccgacccccagccactgaaagaacagcccgccctgaacgacagccggtactgcctgagcagcagactgagagtgtccgccaccttctggcagaacccccggaaccacttcagatgccaggtgcagttctacggcctgagcgagaacgacgagtggacccaggacagagccaagcccgtgacccagatcgtgtctgccgaagcctggggcagagccgattgcggctttaccagcgagagctaccagcagggcgtgctgagcgccaccaacctgagcgtgatcggcttcagaatcctgctgctgaaagtggccggctttaacctgctgatgaccctgcggctgtggtccagc

SEQ ID NO: 36616 - DNA, 2262 bp, synthetic construct
  source 1..2262: mol_type = other DNA
atggccttaccagtgaccgccttgctcctgccgctggccttgctgctccacgccgccaggccggaagtgcagctggttgaatctggcggaggactggttcagcctggcggatctctgagactgtcttgtgccgccagcggcttcagcttcagcgacttttggatgagctgggtccgacaggcccctggcaaaggacttgaatgggtcgccacaatcagccaggccggcagcgagaaggactacgtggactctgtgaagggcagattcaccatcagccgggacaacgccaagaagtccctgtacctccagatgaacagcctgagagccgaggacaccgccgtgtactattgtgcctctggcgtgtacagcttcgactacagaggccagggcaccctggtcacagtctcttctggtaccggcggaggcggatctggcggcggaggtagcggtggcggaggatctgaattcgacatccagatgacacagagccctagcagcctgtctgccagcgtgggagacagagtgaccatcacatgcaagagcagccagagcctgctggactccgatggcaagacctacctgaactggtatcagcagaagcccggcaaggcccctaagctgctgatctacctggtgtccaagctggatagcggcgtgcccagcagattttctggcagcggcagcggaaccgacttcaccctgacaatatccagcctccagcctgaggacttcgccacctactactgcttccaaggcacccactttccattcaccttcggccagggcaccaaggtggaaatcaaaagactcgaggacctgaagaacgtgttcccacctgaggtggccgtgttcgagcctagcgaggccgagatcagccacacccagaaagccaccctcgtgtgcctggctaccggcttctaccccgaccatgtggaactgtcttggtgggtcaacggcaaagaggtgcacagcggcgtgtgtaccgacccccagccactgaaagaacagcccgccctgaacgacagccggtactgcctgagcagcagactgagagtgtccgccaccttctggcagaacccccggaaccacttcagatgccaggtgcagttctacggcctgagcgagaacgacgagtggacccaggacagagccaagcccgtgacccagatcgtgtctgccgaagcctggggcagagccgattgcggctttaccagcgagagctaccagcagggcgtgctgagcgccaccaacctgagcgtgatcggcttcagaatcctgctgctgaaagtggccggctttaacctgctgatgaccctgcggctgtggtccagcagggccaagcgatctggatctggagcaacaaacttctcactactcaaacaagcaggtgacgtggaggagaatcccgggcctactagtatggactggatttggcgcatccttttccttgtcggcgctgctaccggcgcgcattccttcgaagaagtgcagctggttgaatcaggcggaggactggttcagcctggcggatctctgagactgtcttgtgccgccagcggctacaccttcagcagctactggatgaactgggtccgacaggcccctggcaaaggactggaatgggtcggaatgatcgaccccagcgacagcgagacacactacaaccacatcttcaaggaccgcttcaccatcagcgccgacaccagcaagaataccgcctacctccagatgaactccctgagagccgaggacaccgccgtgtactactgcgccagaaacctgtatctgtggggccagggaaccctggtcacagtgtcatctacgcgtatccagaaccctgatcctgccgtgtaccagctgcgggatagcaagagcagcgacaagagcgtgtgtctgttcaccgacttcgacagccagaccaacgtgtcccagagcaaggactccgacgtgtacatcaccgataagtgcgtgctggacatgcggagcatggacttcaagagcaactccgccgtggcctggtccaacaagtccgatttcgcctgcgccaacgccttcaacaacagcattatccccgaggacacattcttcccaagccccgagagcagctgcgacgtgaagctggtggaaaagagcttcgagacagacaccaacctgaacttccagatcctgtacgagatcctgctgggcaaggccaccctgtacgccgtgctggtgtctgccctggtgctgatggctatggtcaagcggaaggacagccgggga

SEQ ID NO: 36617 - DNA, 2274 bp, synthetic construct
  source 1..2274: mol_type = other DNA
atggccttaccagtgaccgccttgctcctgccgctggccttgctgctccacgccgccaggccggaagtgcagctggttgaatctggcggaggactggttcagcctggcggatctctgagactgtcttgtgccgccagcggcttcagcttcagcgacttttggatgagctgggtccgacaggcccctggcaaaggacttgaatgggtcgccacaatcagccaggccggcagcgagaaggactacgtggactctgtgaagggcagattcaccatcagccgggacaacgccaagaagtccctgtacctccagatgaacagcctgagagccgaggacaccgccgtgtactattgtgcctctggcgtgtacagcttcgactacagaggccagggcaccctggtcacagtctcttctggtaccggcggaggcggatctggcggcggaggtagcggtggcggaggatctgaattcgacatccagatgacacagagccctagcagcctgtctgccagcgtgggagacagagtgaccatcacatgcaagagcagccagagcctgctggactccgatggcaagacctacctgaactggtatcagcagaagcccggcaaggcccctaagctgctgatctacctggtgtccaagctggatagcggcgtgcccagcagattttctggcagcggcagcggaaccgacttcaccctgacaatatccagcctccagcctgaggacttcgccacctactactgcttccaaggcacccactttccattcaccttcggccagggcaccaaggtggaaatcaaaagactcgagatccagaaccctgatcctgccgtgtaccagctgcgggatagcaagagcagcgacaagagcgtgtgtctgttcaccgacttcgacagccagaccaacgtgtcccagagcaaggactccgacgtgtacatcaccgataagtgcgtgctggacatgcggagcatggacttcaagagcaactccgccgtggcctggtccaacaagtccgatttcgcctgcgccaacgccttcaacaacagcattatccccgaggacacattcttcccaagccccgagagcagctgcgacgtgaagctggtggaaaagagcttcgagacagacaccaacctgaacttccagatcctgtacgagatcctgctgggcaaggccaccctgtacgccgtgctggtgtctgccctggtgctgatggctatggtcaagcggaaggacagccggggacgcgccaagagaagcggatctggcgtgaagcagaccctgaatttcgacctgctgaagctggctggcgacgtggaatccaacccaggccctactagtatggactggatttggcgcatccttttccttgtcggcgctgctaccggcgcgcattccttcgaagaagtgcagctggttgaatcaggcggaggactggttcagcctggcggatctctgagactgtcttgtgccgccagcggctacaccttcagcagctactggatgaactgggtccgacaggcccctggcaaaggactggaatgggtcggaatgatcgaccccagcgacagcgagacacactacaaccacatcttcaaggaccgcttcaccatcagcgccgacaccagcaagaataccgcctacctccagatgaactccctgagagccgaggacaccgccgtgtactactgcgccagaaacctgtatctgtggggccagggaaccctggtcacagtgtcatctacgcgtgaggacctgaagaacgtgttcccacctgaggtggccgtgttcgagcctagcgaggccgagatcagccacacccagaaagccaccctcgtgtgcctggctaccggcttctaccccgaccatgtggaactgtcttggtgggtcaacggcaaagaggtgcacagcggcgtgtgtaccgacccccagccactgaaagaacagcccgccctgaacgacagccggtactgcctgagcagcagactgagagtgtccgccaccttctggcagaacccccggaaccacttcagatgccaggtgcagttctacggcctgagcgagaacgacgagtggacccaggacagagccaagcccgtgacccagatcgtgtctgccgaagcctggggcagagccgattgcggctttaccagcgagagctaccagcagggcgtgctgagcgccaccaacctgagcgtgatcggcttcagaatcctgctgctgaaagtggccggctttaacctgctgatgaccctgcggctgtggtccagc

SEQ ID NO: 36618 - DNA, 2673 bp, synthetic construct
  source 1..2673: mol_type = other DNA
atggccttaccagtgaccgccttgctcctgccgctggccttgctgctccacgccgccaggccggaagtgcagctggttgaatctggcggaggactggttcagcctggcggatctctgagactgtcttgtgccgccagcggcttcagcttcagcgacttttggatgagctgggtccgacaggcccctggcaaaggacttgaatgggtcgccacaatcagccaggccggcagcgagaaggactacgtggactctgtgaagggcagattcaccatcagccgggacaacgccaagaagtccctgtacctccagatgaacagcctgagagccgaggacaccgccgtgtactattgtgcctctggcgtgtacagcttcgactacagaggccagggcaccctggtcacagtctcttctggtaccggcggaggcggatctggcggcggaggtagcggtggcggaggatctgaattcgacatccagatgacacagagccctagcagcctgtctgccagcgtgggagacagagtgaccatcacatgcaagagcagccagagcctgctggactccgatggcaagacctacctgaactggtatcagcagaagcccggcaaggcccctaagctgctgatctacctggtgtccaagctggatagcggcgtgcccagcagattttctggcagcggcagcggaaccgacttcaccctgacaatatccagcctccagcctgaggacttcgccacctactactgcttccaaggcacccactttccattcaccttcggccagggcaccaaggtggaaatcaaaagactcgaggacctgaagaacgtgttcccacctgaggtggccgtgttcgagcctagcgaggccgagatcagccacacccagaaagccaccctcgtgtgcctggctaccggcttctaccccgaccatgtggaactgtcttggtgggtcaacggcaaagaggtgcacagcggcgtgtgtaccgacccccagccactgaaagaacagcccgccctgaacgacagccggtactgcctgagcagcagactgagagtgtccgccaccttctggcagaacccccggaaccacttcagatgccaggtgcagttctacggcctgagcgagaacgacgagtggacccaggacagagccaagcccgtgacccagatcgtgtctgccgaagcctggggcagagccgattgcggctttaccagcgagagctaccagcagggcgtgctgagcgccaccaacctgagcgtgatcggcttcagaatcctgctgctgaaagtggccggctttaacctgctgatgaccctgcggctgtggtccagcagggccaagcgatctggatctggagcaacaaacttctcactactcaaacaagcaggtgacgtggaggagaatcccgggcctactagtatggactggatttggcgcatccttttccttgtcggcgctgctaccggcgcgcattccgggccccagctccagctgcaagagtctggacctggcctggtcaagcctagcgagacactgagcctgacctgtaccgtgtccggcgatagcatcagcagcggcgattactactggggctggatcagacagcctcctggcaaaggactggaatggatcggccacatctactacagcggcgtgacctactacaaccccagcctgaagtccagagtgaccatcagcgtggacaccagccggaaccagttctccctgaagctgtctagcgtgacagccgccgataccgccgtgtactactgcaccagagaggacagcagcaactggcggagtagaggccagggaacactggtcacagttagctctggatccggcggaggcggaagtggaggcggaggatctggcggcggaggctctttcgaagaagtgcagctggttgaatcaggcggaggactggttcagcctggcggatctctgagactgtcttgtgccgccagcggctacaccttcagcagctactggatgaactgggtccgacaggcccctggcaaaggactggaatgggtcggaatgatcgaccccagcgacagcgagacacactacaaccacatcttcaaggaccgcttcaccatcagcgccgacaccagcaagaataccgcctacctccagatgaactccctgagagccgaggacaccgccgtgtactactgcgccagaaacctgtatctgtggggccagggaaccctggtcacagtgtcatctacgcgtatccagaaccctgatcctgccgtgtaccagctgcgggatagcaagagcagcgacaagagcgtgtgtctgttcaccgacttcgacagccagaccaacgtgtcccagagcaaggactccgacgtgtacatcaccgataagtgcgtgctggacatgcggagcatggacttcaagagcaactccgccgtggcctggtccaacaagtccgatttcgcctgcgccaacgccttcaacaacagcattatccccgaggacacattcttcccaagccccgagagcagctgcgacgtgaagctggtggaaaagagcttcgagacagacaccaacctgaacttccagatcctgtacgagatcctgctgggcaaggccaccctgtacgccgtgctggtgtctgccctggtgctgatggctatggtcaagcggaaggacagccgggga

SEQ ID NO: 36619 - DNA, 2685 bp, synthetic construct
  source 1..2685: mol_type = other DNA
atggccttaccagtgaccgccttgctcctgccgctggccttgctgctccacgccgccaggccggaagtgcagctggttgaatctggcggaggactggttcagcctggcggatctctgagactgtcttgtgccgccagcggcttcagcttcagcgacttttggatgagctgggtccgacaggcccctggcaaaggacttgaatgggtcgccacaatcagccaggccggcagcgagaaggactacgtggactctgtgaagggcagattcaccatcagccgggacaacgccaagaagtccctgtacctccagatgaacagcctgagagccgaggacaccgccgtgtactattgtgcctctggcgtgtacagcttcgactacagaggccagggcaccctggtcacagtctcttctggtaccggcggaggcggatctggcggcggaggtagcggtggcggaggatctgaattcgacatccagatgacacagagccctagcagcctgtctgccagcgtgggagacagagtgaccatcacatgcaagagcagccagagcctgctggactccgatggcaagacctacctgaactggtatcagcagaagcccggcaaggcccctaagctgctgatctacctggtgtccaagctggatagcggcgtgcccagcagattttctggcagcggcagcggaaccgacttcaccctgacaatatccagcctccagcctgaggacttcgccacctactactgcttccaaggcacccactttccattcaccttcggccagggcaccaaggtggaaatcaaaagactcgagatccagaaccctgatcctgccgtgtaccagctgcgggatagcaagagcagcgacaagagcgtgtgtctgttcaccgacttcgacagccagaccaacgtgtcccagagcaaggactccgacgtgtacatcaccgataagtgcgtgctggacatgcggagcatggacttcaagagcaactccgccgtggcctggtccaacaagtccgatttcgcctgcgccaacgccttcaacaacagcattatccccgaggacacattcttcccaagccccgagagcagctgcgacgtgaagctggtggaaaagagcttcgagacagacaccaacctgaacttccagatcctgtacgagatcctgctgggcaaggccaccctgtacgccgtgctggtgtctgccctggtgctgatggctatggtcaagcggaaggacagccggggacgcgccaagagaagcggatctggcgtgaagcagaccctgaatttcgacctgctgaagctggctggcgacgtggaatccaacccaggccctactagtatggactggatttggcgcatccttttccttgtcggcgctgctaccggcgcgcattccgggccccagctccagctgcaagagtctggacctggcctggtcaagcctagcgagacactgagcctgacctgtaccgtgtccggcgatagcatcagcagcggcgattactactggggctggatcagacagcctcctggcaaaggactggaatggatcggccacatctactacagcggcgtgacctactacaaccccagcctgaagtccagagtgaccatcagcgtggacaccagccggaaccagttctccctgaagctgtctagcgtgacagccgccgataccgccgtgtactactgcaccagagaggacagcagcaactggcggagtagaggccagggaacactggtcacagttagctctggatccggcggaggcggaagtggaggcggaggatctggcggcggaggctctttcgaagaagtgcagctggttgaatcaggcggaggactggttcagcctggcggatctctgagactgtcttgtgccgccagcggctacaccttcagcagctactggatgaactgggtccgacaggcccctggcaaaggactggaatgggtcggaatgatcgaccccagcgacagcgagacacactacaaccacatcttcaaggaccgcttcaccatcagcgccgacaccagcaagaataccgcctacctccagatgaactccctgagagccgaggacaccgccgtgtactactgcgccagaaacctgtatctgtggggccagggaaccctggtcacagtgtcatctacgcgtgaggacctgaagaacgtgttcccacctgaggtggccgtgttcgagcctagcgaggccgagatcagccacacccagaaagccaccctcgtgtgcctggctaccggcttctaccccgaccatgtggaactgtcttggtgggtcaacggcaaagaggtgcacagcggcgtgtgtaccgacccccagccactgaaagaacagcccgccctgaacgacagccggtactgcctgagcagcagactgagagtgtccgccaccttctggcagaacccccggaaccacttcagatgccaggtgcagttctacggcctgagcgagaacgacgagtggacccaggacagagccaagcccgtgacccagatcgtgtctgccgaagcctggggcagagccgattgcggctttaccagcgagagctaccagcagggcgtgctgagcgccaccaacctgagcgtgatcggcttcagaatcctgctgctgaaagtggccggctttaacctgctgatgaccctgcggctgtggtccagc

SEQ ID NO: 36620 - DNA, 2169 bp, synthetic construct
  source 1..2169: mol_type = other DNA
atggccttaccagtgaccgccttgctcctgccgctggccttgctgctccacgccgccaggccggacatccagatgacacagagccctagcagcctgtctgccagcgtgggagacagagtgaccatcacatgcaagagcagccagagcctgctggactccgatggcaagacctacctgaactggtatcagcagaagcccggcaaggcccctaagctgctgatctacctggtgtccaagctggatagcggcgtgcccagcagattttctggcagcggcagcggaaccgacttcaccctgacaatatccagcctccagcctgaggacttcgccacctactactgcttccaaggcacccactttccattcaccttcggccagggcaccaaggtggaaatcaaaagactcgaggacctgaagaacgtgttcccacctgaggtggccgtgttcgagcctagcgaggccgagatcagccacacccagaaagccaccctcgtgtgcctggctaccggcttctaccccgaccatgtggaactgtcttggtgggtcaacggcaaagaggtgcacagcggcgtgtgtaccgacccccagccactgaaagaacagcccgccctgaacgacagccggtactgcctgagcagcagactgagagtgtccgccaccttctggcagaacccccggaaccacttcagatgccaggtgcagttctacggcctgagcgagaacgacgagtggacccaggacagagccaagcccgtgacccagatcgtgtctgccgaagcctggggcagagccgatgatgtgattaagatccactggcaggaaaagaagtccaacaccatcctgggcagccaggaaggcaacaccatgaagaccaacgacacctacatgaagttcagctggctgaccgtgcccgagaagtccctggacaaagaacacagatgcatcgtgcggcacgaaaacaacaagaacggcgtggaccaggaaatcatcttcccacccatcaagaccgatgtgattacaatggaccccaaggacaactgctccaaggacgccaacgataccctgctgctccagctgaccaacaccagcgcctactacatgtacttgttgctgctgctgaagtccgtggtgtacttcgccatcatcacatgctgcctgctgatggctatggtcaagcggaaggacagccggggaagggccaagcgatctggatctggagcaacaaacttctcactactcaaacaagcaggtgacgtggaggagaatcccgggcctactagtatggactggatttggcgcatccttttccttgtcggcgctgctaccggcgcgcattccttcgaagaagtgcagctggttgaatcaggcggaggactggttcagcctggcggatctctgagactgtcttgtgccgccagcggctacaccttcagcagctactggatgaactgggtccgacaggcccctggcaaaggactggaatgggtcggaatgatcgaccccagcgacagcgagacacactacaaccacatcttcaaggaccgcttcaccatcagcgccgacaccagcaagaataccgcctacctccagatgaactccctgagagccgaggacaccgccgtgtactactgcgccagaaacctgtatctgtggggccagggaaccctggtcacagtgtcatctacgcgtatccagaaccctgatcctgccgtgtaccagctgcgggatagcaagagcagcgacaagagcgtgtgtctgttcaccgacttcgacagccagaccaacgtgtcccagagcaaggactccgacgtgtacatcaccgataagtgcgtgctggacatgcggagcatggacttcaagagcaactccgccgtggcctggtccaacaagtccgatttcgcctgcgccaacgccttcaacaacagcattatccccgaggacacattcttcccaagccccgagagcagcgactccaccgaccacgtgaagcccaaagagacagagaacaccaagcagcccagcaagagctgccacaagcccaaggccatcgtgcacaccgagaaagtgaacatgatgagcctgaccgtgctgggcctgcggatgctgttcgccaaaaccgtggccgtgaacttcctgctgaccgccaagctgttcttcctcctcaccgcc

SEQ ID NO: 36621 - DNA, 2181 bp, synthetic construct
  source 1..2181: mol_type = other DNA
atggccttaccagtgaccgccttgctcctgccgctggccttgctgctccacgccgccaggccggacatccagatgacacagagccctagcagcctgtctgccagcgtgggagacagagtgaccatcacatgcaagagcagccagagcctgctggactccgatggcaagacctacctgaactggtatcagcagaagcccggcaaggcccctaagctgctgatctacctggtgtccaagctggatagcggcgtgcccagcagattttctggcagcggcagcggaaccgacttcaccctgacaatatccagcctccagcctgaggacttcgccacctactactgcttccaaggcacccactttccattcaccttcggccagggcaccaaggtggaaatcaaaagactcgagatccagaaccctgatcctgccgtgtaccagctgcgggatagcaagagcagcgacaagagcgtgtgtctgttcaccgacttcgacagccagaccaacgtgtcccagagcaaggactccgacgtgtacatcaccgataagtgcgtgctggacatgcggagcatggacttcaagagcaactccgccgtggcctggtccaacaagtccgatttcgcctgcgccaacgccttcaacaacagcattatccccgaggacacattcttcccaagccccgagagcagcgactccaccgaccacgtgaagcccaaagagacagagaacaccaagcagcccagcaagagctgccacaagcccaaggccatcgtgcacaccgagaaagtgaacatgatgagcctgaccgtgctgggcctgcggatgctgttcgccaaaaccgtggccgtgaacttcctgctgaccgccaagctgttcttcctcctcaccgcccgcgccaagagaagcggatctggcgtgaagcagaccctgaatttcgacctgctgaagctggctggcgacgtggaatccaacccaggccctactagtatggactggatttggcgcatccttttccttgtcggcgctgctaccggcgcgcattccttcgaagaagtgcagctggttgaatcaggcggaggactggttcagcctggcggatctctgagactgtcttgtgccgccagcggctacaccttcagcagctactggatgaactgggtccgacaggcccctggcaaaggactggaatgggtcggaatgatcgaccccagcgacagcgagacacactacaaccacatcttcaaggaccgcttcaccatcagcgccgacaccagcaagaataccgcctacctccagatgaactccctgagagccgaggacaccgccgtgtactactgcgccagaaacctgtatctgtggggccagggaaccctggtcacagtgtcatctacgcgtgaggacctgaagaacgtgttcccacctgaggtggccgtgttcgagcctagcgaggccgagatcagccacacccagaaagccaccctcgtgtgcctggctaccggcttctaccccgaccatgtggaactgtcttggtgggtcaacggcaaagaggtgcacagcggcgtgtgtaccgacccccagccactgaaagaacagcccgccctgaacgacagccggtactgcctgagcagcagactgagagtgtccgccaccttctggcagaacccccggaaccacttcagatgccaggtgcagttctacggcctgagcgagaacgacgagtggacccaggacagagccaagcccgtgacccagatcgtgtctgccgaagcctggggcagagccgatgatgtgattaagatccactggcaggaaaagaagtccaacaccatcctgggcagccaggaaggcaacaccatgaagaccaacgacacctacatgaagttcagctggctgaccgtgcccgagaagtccctggacaaagaacacagatgcatcgtgcggcacgaaaacaacaagaacggcgtggaccaggaaatcatcttcccacccatcaagaccgatgtgattacaatggaccccaaggacaactgctccaaggacgccaacgataccctgctgctccagctgaccaacaccagcgcctactacatgtacttgttgctgctgctgaagtccgtggtgtacttcgccatcatcacatgctgcctgctgatggctatggtcaagcggaaggacagccgggga

SEQ ID NO: 36622 - DNA, 2574 bp, synthetic construct
  source 1..2574: mol_type = other DNA
atggccttaccagtgaccgccttgctcctgccgctggccttgctgctccacgccgccaggccggaagtgcagctggttgaatctggcggaggactggttcagcctggcggatctctgagactgtcttgtgccgccagcggcttcagcttcagcgacttttggatgagctgggtccgacaggcccctggcaaaggacttgaatgggtcgccacaatcagccaggccggcagcgagaaggactacgtggactctgtgaagggcagattcaccatcagccgggacaacgccaagaagtccctgtacctccagatgaacagcctgagagccgaggacaccgccgtgtactattgtgcctctggcgtgtacagcttcgactacagaggccagggcaccctggtcacagtctcttctggtaccggcggaggcggatctggcggcggaggtagcggtggcggaggatctgaattcgacatccagatgacacagagccctagcagcctgtctgccagcgtgggagacagagtgaccatcacatgcaagagcagccagagcctgctggactccgatggcaagacctacctgaactggtatcagcagaagcccggcaaggcccctaagctgctgatctacctggtgtccaagctggatagcggcgtgcccagcagattttctggcagcggcagcggaaccgacttcaccctgacaatatccagcctccagcctgaggacttcgccacctactactgcttccaaggcacccactttccattcaccttcggccagggcaccaaggtggaaatcaaaagactcgaggacctgaagaacgtgttcccacctgaggtggccgtgttcgagcctagcgaggccgagatcagccacacccagaaagccaccctcgtgtgcctggctaccggcttctaccccgaccatgtggaactgtcttggtgggtcaacggcaaagaggtgcacagcggcgtgtgtaccgacccccagccactgaaagaacagcccgccctgaacgacagccggtactgcctgagcagcagactgagagtgtccgccaccttctggcagaacccccggaaccacttcagatgccaggtgcagttctacggcctgagcgagaacgacgagtggacccaggacagagccaagcccgtgacccagatcgtgtctgccgaagcctggggcagagccgatgatgtgattaagatccactggcaggaaaagaagtccaacaccatcctgggcagccaggaaggcaacaccatgaagaccaacgacacctacatgaagttcagctggctgaccgtgcccgagaagtccctggacaaagaacacagatgcatcgtgcggcacgaaaacaacaagaacggcgtggaccaggaaatcatcttcccacccatcaagaccgatgtgattacaatggaccccaaggacaactgctccaaggacgccaacgataccctgctgctccagctgaccaacaccagcgcctactacatgtacttgttgctgctgctgaagtccgtggtgtacttcgccatcatcacatgctgcctgctgatggctatggtcaagcggaaggacagccggggaagggccaagcgatctggatctggagcaacaaacttctcactactcaaacaagcaggtgacgtggaggagaatcccgggcctactagtatggactggatttggcgcatccttttccttgtcggcgctgctaccggcgcgcattccttcgaagaagtgcagctggttgaatcaggcggaggactggttcagcctggcggatctctgagactgtcttgtgccgccagcggctacaccttcagcagctactggatgaactgggtccgacaggcccctggcaaaggactggaatgggtcggaatgatcgaccccagcgacagcgagacacactacaaccacatcttcaaggaccgcttcaccatcagcgccgacaccagcaagaataccgcctacctccagatgaactccctgagagccgaggacaccgccgtgtactactgcgccagaaacctgtatctgtggggccagggaaccctggtcacagtgtcatctacgcgtatccagaaccctgatcctgccgtgtaccagctgcgggatagcaagagcagcgacaagagcgtgtgtctgttcaccgacttcgacagccagaccaacgtgtcccagagcaaggactccgacgtgtacatcaccgataagtgcgtgctggacatgcggagcatggacttcaagagcaactccgccgtggcctggtccaacaagtccgatttcgcctgcgccaacgccttcaacaacagcattatccccgaggacacattcttcccaagccccgagagcagcgactccaccgaccacgtgaagcccaaagagacagagaacaccaagcagcccagcaagagctgccacaagcccaaggccatcgtgcacaccgagaaagtgaacatgatgagcctgaccgtgctgggcctgcggatgctgttcgccaaaaccgtggccgtgaacttcctgctgaccgccaagctgttcttcctcctcaccgcc

SEQ ID NO: 36623 - DNA, 2586 bp, synthetic construct
  source 1..2586: mol_type = other DNA
atggccttaccagtgaccgccttgctcctgccgctggccttgctgctccacgccgccaggccggaagtgcagctggttgaatctggcggaggactggttcagcctggcggatctctgagactgtcttgtgccgccagcggcttcagcttcagcgacttttggatgagctgggtccgacaggcccctggcaaaggacttgaatgggtcgccacaatcagccaggccggcagcgagaaggactacgtggactctgtgaagggcagattcaccatcagccgggacaacgccaagaagtccctgtacctccagatgaacagcctgagagccgaggacaccgccgtgtactattgtgcctctggcgtgtacagcttcgactacagaggccagggcaccctggtcacagtctcttctggtaccggcggaggcggatctggcggcggaggtagcggtggcggaggatctgaattcgacatccagatgacacagagccctagcagcctgtctgccagcgtgggagacagagtgaccatcacatgcaagagcagccagagcctgctggactccgatggcaagacctacctgaactggtatcagcagaagcccggcaaggcccctaagctgctgatctacctggtgtccaagctggatagcggcgtgcccagcagattttctggcagcggcagcggaaccgacttcaccctgacaatatccagcctccagcctgaggacttcgccacctactactgcttccaaggcacccactttccattcaccttcggccagggcaccaaggtggaaatcaaaagactcgagatccagaaccctgatcctgccgtgtaccagctgcgggatagcaagagcagcgacaagagcgtgtgtctgttcaccgacttcgacagccagaccaacgtgtcccagagcaaggactccgacgtgtacatcaccgataagtgcgtgctggacatgcggagcatggacttcaagagcaactccgccgtggcctggtccaacaagtccgatttcgcctgcgccaacgccttcaacaacagcattatccccgaggacacattcttcccaagccccgagagcagcgactccaccgaccacgtgaagcccaaagagacagagaacaccaagcagcccagcaagagctgccacaagcccaaggccatcgtgcacaccgagaaagtgaacatgatgagcctgaccgtgctgggcctgcggatgctgttcgccaaaaccgtggccgtgaacttcctgctgaccgccaagctgttcttcctcctcaccgcccgcgccaagagaagcggatctggcgtgaagcagaccctgaatttcgacctgctgaagctggctggcgacgtggaatccaacccaggccctactagtatggactggatttggcgcatccttttccttgtcggcgctgctaccggcgcgcattccttcgaagaagtgcagctggttgaatcaggcggaggactggttcagcctggcggatctctgagactgtcttgtgccgccagcggctacaccttcagcagctactggatgaactgggtccgacaggcccctggcaaaggactggaatgggtcggaatgatcgaccccagcgacagcgagacacactacaaccacatcttcaaggaccgcttcaccatcagcgccgacaccagcaagaataccgcctacctccagatgaactccctgagagccgaggacaccgccgtgtactactgcgccagaaacctgtatctgtggggccagggaaccctggtcacagtgtcatctacgcgtgaggacctgaagaacgtgttcccacctgaggtggccgtgttcgagcctagcgaggccgagatcagccacacccagaaagccaccctcgtgtgcctggctaccggcttctaccccgaccatgtggaactgtcttggtgggtcaacggcaaagaggtgcacagcggcgtgtgtaccgacccccagccactgaaagaacagcccgccctgaacgacagccggtactgcctgagcagcagactgagagtgtccgccaccttctggcagaacccccggaaccacttcagatgccaggtgcagttctacggcctgagcgagaacgacgagtggacccaggacagagccaagcccgtgacccagatcgtgtctgccgaagcctggggcagagccgatgatgtgattaagatccactggcaggaaaagaagtccaacaccatcctgggcagccaggaaggcaacaccatgaagaccaacgacacctacatgaagttcagctggctgaccgtgcccgagaagtccctggacaaagaacacagatgcatcgtgcggcacgaaaacaacaagaacggcgtggaccaggaaatcatcttcccacccatcaagaccgatgtgattacaatggaccccaaggacaactgctccaaggacgccaacgataccctgctgctccagctgaccaacaccagcgcctactacatgtacttgttgctgctgctgaagtccgtggtgtacttcgccatcatcacatgctgcctgctgatggctatggtcaagcggaaggacagccgggga

SEQ ID NO: 36624 - DNA, 2985 bp, synthetic construct
  source 1..2985: mol_type = other DNA
atggccttaccagtgaccgccttgctcctgccgctggccttgctgctccacgccgccaggccggaagtgcagctggttgaatctggcggaggactggttcagcctggcggatctctgagactgtcttgtgccgccagcggcttcagcttcagcgacttttggatgagctgggtccgacaggcccctggcaaaggacttgaatgggtcgccacaatcagccaggccggcagcgagaaggactacgtggactctgtgaagggcagattcaccatcagccgggacaacgccaagaagtccctgtacctccagatgaacagcctgagagccgaggacaccgccgtgtactattgtgcctctggcgtgtacagcttcgactacagaggccagggcaccctggtcacagtctcttctggtaccggcggaggcggatctggcggcggaggtagcggtggcggaggatctgaattcgacatccagatgacacagagccctagcagcctgtctgccagcgtgggagacagagtgaccatcacatgcaagagcagccagagcctgctggactccgatggcaagacctacctgaactggtatcagcagaagcccggcaaggcccctaagctgctgatctacctggtgtccaagctggatagcggcgtgcccagcagattttctggcagcggcagcggaaccgacttcaccctgacaatatccagcctccagcctgaggacttcgccacctactactgcttccaaggcacccactttccattcaccttcggccagggcaccaaggtggaaatcaaaagactcgaggacctgaagaacgtgttcccacctgaggtggccgtgttcgagcctagcgaggccgagatcagccacacccagaaagccaccctcgtgtgcctggctaccggcttctaccccgaccatgtggaactgtcttggtgggtcaacggcaaagaggtgcacagcggcgtgtgtaccgacccccagccactgaaagaacagcccgccctgaacgacagccggtactgcctgagcagcagactgagagtgtccgccaccttctggcagaacccccggaaccacttcagatgccaggtgcagttctacggcctgagcgagaacgacgagtggacccaggacagagccaagcccgtgacccagatcgtgtctgccgaagcctggggcagagccgatgatgtgattaagatccactggcaggaaaagaagtccaacaccatcctgggcagccaggaaggcaacaccatgaagaccaacgacacctacatgaagttcagctggctgaccgtgcccgagaagtccctggacaaagaacacagatgcatcgtgcggcacgaaaacaacaagaacggcgtggaccaggaaatcatcttcccacccatcaagaccgatgtgattacaatggaccccaaggacaactgctccaaggacgccaacgataccctgctgctccagctgaccaacaccagcgcctactacatgtacttgttgctgctgctgaagtccgtggtgtacttcgccatcatcacatgctgcctgctgatggctatggtcaagcggaaggacagccggggaagggccaagcgatctggatctggagcaacaaacttctcactactcaaacaagcaggtgacgtggaggagaatcccgggcctactagtatggactggatttggcgcatccttttccttgtcggcgctgctaccggcgcgcattccgggccccagctccagctgcaagagtctggacctggcctggtcaagcctagcgagacactgagcctgacctgtaccgtgtccggcgatagcatcagcagcggcgattactactggggctggatcagacagcctcctggcaaaggactggaatggatcggccacatctactacagcggcgtgacctactacaaccccagcctgaagtccagagtgaccatcagcgtggacaccagccggaaccagttctccctgaagctgtctagcgtgacagccgccgataccgccgtgtactactgcaccagagaggacagcagcaactggcggagtagaggccagggaacactggtcacagttagctctggatccggcggaggcggaagtggaggcggaggatctggcggcggaggctctttcgaagaagtgcagctggttgaatcaggcggaggactggttcagcctggcggatctctgagactgtcttgtgccgccagcggctacaccttcagcagctactggatgaactgggtccgacaggcccctggcaaaggactggaatgggtcggaatgatcgaccccagcgacagcgagacacactacaaccacatcttcaaggaccgcttcaccatcagcgccgacaccagcaagaataccgcctacctccagatgaactccctgagagccgaggacaccgccgtgtactactgcgccagaaacctgtatctgtggggccagggaaccctggtcacagtgtcatctacgcgtatccagaaccctgatcctgccgtgtaccagctgcgggatagcaagagcagcgacaagagcgtgtgtctgttcaccgacttcgacagccagaccaacgtgtcccagagcaaggactccgacgtgtacatcaccgataagtgcgtgctggacatgcggagcatggacttcaagagcaactccgccgtggcctggtccaacaagtccgatttcgcctgcgccaacgccttcaacaacagcattatccccgaggacacattcttcccaagccccgagagcagcgactccaccgaccacgtgaagcccaaagagacagagaacaccaagcagcccagcaagagctgccacaagcccaaggccatcgtgcacaccgagaaagtgaacatgatgagcctgaccgtgctgggcctgcggatgctgttcgccaaaaccgtggccgtgaacttcctgctgaccgccaagctgttcttcctcctcaccgcc

SEQ ID NO: 36625 - DNA, 2997 bp, synthetic construct
  source 1..2997: mol_type = other DNA
atggccttaccagtgaccgccttgctcctgccgctggccttgctgctccacgccgccaggccggaagtgcagctggttgaatctggcggaggactggttcagcctggcggatctctgagactgtcttgtgccgccagcggcttcagcttcagcgacttttggatgagctgggtccgacaggcccctggcaaaggacttgaatgggtcgccacaatcagccaggccggcagcgagaaggactacgtggactctgtgaagggcagattcaccatcagccgggacaacgccaagaagtccctgtacctccagatgaacagcctgagagccgaggacaccgccgtgtactattgtgcctctggcgtgtacagcttcgactacagaggccagggcaccctggtcacagtctcttctggtaccggcggaggcggatctggcggcggaggtagcggtggcggaggatctgaattcgacatccagatgacacagagccctagcagcctgtctgccagcgtgggagacagagtgaccatcacatgcaagagcagccagagcctgctggactccgatggcaagacctacctgaactggtatcagcagaagcccggcaaggcccctaagctgctgatctacctggtgtccaagctggatagcggcgtgcccagcagattttctggcagcggcagcggaaccgacttcaccctgacaatatccagcctccagcctgaggacttcgccacctactactgcttccaaggcacccactttccattcaccttcggccagggcaccaaggtggaaatcaaaagactcgagatccagaaccctgatcctgccgtgtaccagctgcgggatagcaagagcagcgacaagagcgtgtgtctgttcaccgacttcgacagccagaccaacgtgtcccagagcaaggactccgacgtgtacatcaccgataagtgcgtgctggacatgcggagcatggacttcaagagcaactccgccgtggcctggtccaacaagtccgatttcgcctgcgccaacgccttcaacaacagcattatccccgaggacacattcttcccaagccccgagagcagcgactccaccgaccacgtgaagcccaaagagacagagaacaccaagcagcccagcaagagctgccacaagcccaaggccatcgtgcacaccgagaaagtgaacatgatgagcctgaccgtgctgggcctgcggatgctgttcgccaaaaccgtggccgtgaacttcctgctgaccgccaagctgttcttcctcctcaccgcccgcgccaagagaagcggatctggcgtgaagcagaccctgaatttcgacctgctgaagctggctggcgacgtggaatccaacccaggccctactagtatggactggatttggcgcatccttttccttgtcggcgctgctaccggcgcgcattccgggccccagctccagctgcaagagtctggacctggcctggtcaagcctagcgagacactgagcctgacctgtaccgtgtccggcgatagcatcagcagcggcgattactactggggctggatcagacagcctcctggcaaaggactggaatggatcggccacatctactacagcggcgtgacctactacaaccccagcctgaagtccagagtgaccatcagcgtggacaccagccggaaccagttctccctgaagctgtctagcgtgacagccgccgataccgccgtgtactactgcaccagagaggacagcagcaactggcggagtagaggccagggaacactggtcacagttagctctggatccggcggaggcggaagtggaggcggaggatctggcggcggaggctctttcgaagaagtgcagctggttgaatcaggcggaggactggttcagcctggcggatctctgagactgtcttgtgccgccagcggctacaccttcagcagctactggatgaactgggtccgacaggcccctggcaaaggactggaatgggtcggaatgatcgaccccagcgacagcgagacacactacaaccacatcttcaaggaccgcttcaccatcagcgccgacaccagcaagaataccgcctacctccagatgaactccctgagagccgaggacaccgccgtgtactactgcgccagaaacctgtatctgtggggccagggaaccctggtcacagtgtcatctacgcgtgaggacctgaagaacgtgttcccacctgaggtggccgtgttcgagcctagcgaggccgagatcagccacacccagaaagccaccctcgtgtgcctggctaccggcttctaccccgaccatgtggaactgtcttggtgggtcaacggcaaagaggtgcacagcggcgtgtgtaccgacccccagccactgaaagaacagcccgccctgaacgacagccggtactgcctgagcagcagactgagagtgtccgccaccttctggcagaacccccggaaccacttcagatgccaggtgcagttctacggcctgagcgagaacgacgagtggacccaggacagagccaagcccgtgacccagatcgtgtctgccgaagcctggggcagagccgatgatgtgattaagatccactggcaggaaaagaagtccaacaccatcctgggcagccaggaaggcaacaccatgaagaccaacgacacctacatgaagttcagctggctgaccgtgcccgagaagtccctggacaaagaacacagatgcatcgtgcggcacgaaaacaacaagaacggcgtggaccaggaaatcatcttcccacccatcaagaccgatgtgattacaatggaccccaaggacaactgctccaaggacgccaacgataccctgctgctccagctgaccaacaccagcgcctactacatgtacttgttgctgctgctgaagtccgtggtgtacttcgccatcatcacatgctgcctgctgatggctatggtcaagcggaaggacagccgggga

SEQ ID NO: 36626 - DNA, 2163 bp, synthetic construct
  source 1..2163: mol_type = other DNA
atggccttaccagtgaccgccttgctcctgccgctggccttgctgctccacgccgccaggccggacatccagatgacacagagccctagcagcctgtctgccagcgtgggagacagagtgaccatcacatgcaagagcagccagagcctgctggactccgatggcaagacctacctgaactggtatcagcagaagcccggcaaggcccctaagctgctgatctacctggtgtccaagctggatagcggcgtgcccagcagattttctggcagcggcagcggaaccgacttcaccctgacaatatccagcctccagcctgaggacttcgccacctactactgcttccaaggcacccactttccattcaccttcggccagggcaccaaggtggaaatcaaaagactcgaggacctgaagaacgtgttcccacctgaggtggccgtgttcgagcctagcgaggccgagatcagccacacccagaaagccaccctcgtgtgcctggctaccggcttctaccccgaccatgtggaactgtcttggtgggtcaacggcaaagaggtgcacagcggcgtgtgtaccgacccccagccactgaaagaacagcccgccctgaacgacagccggtactgcctgagcagcagactgagagtgtccgccaccttctggcagaacccccggaaccacttcagatgccaggtgcagttctacggcctgagcgagaacgacgagtggacccaggacagagccaagcccgtgacccagatcgtgtctgccgaagcctggggcagagccgatgatgtgattaagatccactggcaggaaaagaagtccaacaccatcctgggcagccaggaaggcaacaccatgaagaccaacgacacctacatgaagttcagctggctgaccgtgcccgagaagtccctggacaaagaacacagatgcatcgtgcggcacgaaaacaacaagaacggcgtggaccaggaaatcatcttcccacccatcaagaccgatgtgattacaatggaccccaaggacaactgctccaaggacgccaacgataccctgctgctccagctgaccaacaccagcgcctactacatgtacttgttgctgctgctgaagtccgtggtgtacttcgccatcatcacatgctgcctgctgcggagaaccgccttctgctgcaacggcgagaagtctagggccaagcgatctggatctggagcaacaaacttctcactactcaaacaagcaggtgacgtggaggagaatcccgggcctactagtatggactggatttggcgcatccttttccttgtcggcgctgctaccggcgcgcattccttcgaagaagtgcagctggttgaatcaggcggaggactggttcagcctggcggatctctgagactgtcttgtgccgccagcggctacaccttcagcagctactggatgaactgggtccgacaggcccctggcaaaggactggaatgggtcggaatgatcgaccccagcgacagcgagacacactacaaccacatcttcaaggaccgcttcaccatcagcgccgacaccagcaagaataccgcctacctccagatgaactccctgagagccgaggacaccgccgtgtactactgcgccagaaacctgtatctgtggggccagggaaccctggtcacagtgtcatctacgcgtatccagaaccctgatcctgccgtgtaccagctgcgggatagcaagagcagcgacaagagcgtgtgtctgttcaccgacttcgacagccagaccaacgtgtcccagagcaaggactccgacgtgtacatcaccgataagtgcgtgctggacatgcggagcatggacttcaagagcaactccgccgtggcctggtccaacaagtccgatttcgcctgcgccaacgccttcaacaacagcattatccccgaggacacattcttcccaagccccgagagcagcgactccaccgaccacgtgaagcccaaagagacagagaacaccaagcagcccagcaagagctgccacaagcccaaggccatcgtgcacaccgagaaagtgaacatgatgagcctgaccgtgctgggcctgcggatgctgttcgccaaaaccgtggccgtgaacttcctgctgaccgccaagctgttcttcctc

SEQ ID NO: 36627 - DNA, 2175 bp, synthetic construct
  source 1..2175: mol_type = other DNA
atggccttaccagtgaccgccttgctcctgccgctggccttgctgctccacgccgccaggccggacatccagatgacacagagccctagcagcctgtctgccagcgtgggagacagagtgaccatcacatgcaagagcagccagagcctgctggactccgatggcaagacctacctgaactggtatcagcagaagcccggcaaggcccctaagctgctgatctacctggtgtccaagctggatagcggcgtgcccagcagattttctggcagcggcagcggaaccgacttcaccctgacaatatccagcctccagcctgaggacttcgccacctactactgcttccaaggcacccactttccattcaccttcggccagggcaccaaggtggaaatcaaaagactcgagatccagaaccctgatcctgccgtgtaccagctgcgggatagcaagagcagcgacaagagcgtgtgtctgttcaccgacttcgacagccagaccaacgtgtcccagagcaaggactccgacgtgtacatcaccgataagtgcgtgctggacatgcggagcatggacttcaagagcaactccgccgtggcctggtccaacaagtccgatttcgcctgcgccaacgccttcaacaacagcattatccccgaggacacattcttcccaagccccgagagcagcgactccaccgaccacgtgaagcccaaagagacagagaacaccaagcagcccagcaagagctgccacaagcccaaggccatcgtgcacaccgagaaagtgaacatgatgagcctgaccgtgctgggcctgcggatgctgttcgccaaaaccgtggccgtgaacttcctgctgaccgccaagctgttcttcctccgcgccaagagaagcggatctggcgtgaagcagaccctgaatttcgacctgctgaagctggctggcgacgtggaatccaacccaggccctactagtatggactggatttggcgcatccttttccttgtcggcgctgctaccggcgcgcattccttcgaagaagtgcagctggttgaatcaggcggaggactggttcagcctggcggatctctgagactgtcttgtgccgccagcggctacaccttcagcagctactggatgaactgggtccgacaggcccctggcaaaggactggaatgggtcggaatgatcgaccccagcgacagcgagacacactacaaccacatcttcaaggaccgcttcaccatcagcgccgacaccagcaagaataccgcctacctccagatgaactccctgagagccgaggacaccgccgtgtactactgcgccagaaacctgtatctgtggggccagggaaccctggtcacagtgtcatctacgcgtgaggacctgaagaacgtgttcccacctgaggtggccgtgttcgagcctagcgaggccgagatcagccacacccagaaagccaccctcgtgtgcctggctaccggcttctaccccgaccatgtggaactgtcttggtgggtcaacggcaaagaggtgcacagcggcgtgtgtaccgacccccagccactgaaagaacagcccgccctgaacgacagccggtactgcctgagcagcagactgagagtgtccgccaccttctggcagaacccccggaaccacttcagatgccaggtgcagttctacggcctgagcgagaacgacgagtggacccaggacagagccaagcccgtgacccagatcgtgtctgccgaagcctggggcagagccgatgatgtgattaagatccactggcaggaaaagaagtccaacaccatcctgggcagccaggaaggcaacaccatgaagaccaacgacacctacatgaagttcagctggctgaccgtgcccgagaagtccctggacaaagaacacagatgcatcgtgcggcacgaaaacaacaagaacggcgtggaccaggaaatcatcttcccacccatcaagaccgatgtgattacaatggaccccaaggacaactgctccaaggacgccaacgataccctgctgctccagctgaccaacaccagcgcctactacatgtacttgttgctgctgctgaagtccgtggtgtacttcgccatcatcacatgctgcctgctgcggagaaccgccttctgctgcaacggcgagaagtct

SEQ ID NO: 36628 - DNA, 2568 bp, synthetic construct
  source 1..2568: mol_type = other DNA
atggccttaccagtgaccgccttgctcctgccgctggccttgctgctccacgccgccaggccggaagtgcagctggttgaatctggcggaggactggttcagcctggcggatctctgagactgtcttgtgccgccagcggcttcagcttcagcgacttttggatgagctgggtccgacaggcccctggcaaaggacttgaatgggtcgccacaatcagccaggccggcagcgagaaggactacgtggactctgtgaagggcagattcaccatcagccgggacaacgccaagaagtccctgtacctccagatgaacagcctgagagccgaggacaccgccgtgtactattgtgcctctggcgtgtacagcttcgactacagaggccagggcaccctggtcacagtctcttctggtaccggcggaggcggatctggcggcggaggtagcggtggcggaggatctgaattcgacatccagatgacacagagccctagcagcctgtctgccagcgtgggagacagagtgaccatcacatgcaagagcagccagagcctgctggactccgatggcaagacctacctgaactggtatcagcagaagcccggcaaggcccctaagctgctgatctacctggtgtccaagctggatagcggcgtgcccagcagattttctggcagcggcagcggaaccgacttcaccctgacaatatccagcctccagcctgaggacttcgccacctactactgcttccaaggcacccactttccattcaccttcggccagggcaccaaggtggaaatcaaaagactcgaggacctgaagaacgtgttcccacctgaggtggccgtgttcgagcctagcgaggccgagatcagccacacccagaaagccaccctcgtgtgcctggctaccggcttctaccccgaccatgtggaactgtcttggtgggtcaacggcaaagaggtgcacagcggcgtgtgtaccgacccccagccactgaaagaacagcccgccctgaacgacagccggtactgcctgagcagcagactgagagtgtccgccaccttctggcagaacccccggaaccacttcagatgccaggtgcagttctacggcctgagcgagaacgacgagtggacccaggacagagccaagcccgtgacccagatcgtgtctgccgaagcctggggcagagccgatgatgtgattaagatccactggcaggaaaagaagtccaacaccatcctgggcagccaggaaggcaacaccatgaagaccaacgacacctacatgaagttcagctggctgaccgtgcccgagaagtccctggacaaagaacacagatgcatcgtgcggcacgaaaacaacaagaacggcgtggaccaggaaatcatcttcccacccatcaagaccgatgtgattacaatggaccccaaggacaactgctccaaggacgccaacgataccctgctgctccagctgaccaacaccagcgcctactacatgtacttgttgctgctgctgaagtccgtggtgtacttcgccatcatcacatgctgcctgctgcggagaaccgccttctgctgcaacggcgagaagtctagggccaagcgatctggatctggagcaacaaacttctcactactcaaacaagcaggtgacgtggaggagaatcccgggcctactagtatggactggatttggcgcatccttttccttgtcggcgctgctaccggcgcgcattccttcgaagaagtgcagctggttgaatcaggcggaggactggttcagcctggcggatctctgagactgtcttgtgccgccagcggctacaccttcagcagctactggatgaactgggtccgacaggcccctggcaaaggactggaatgggtcggaatgatcgaccccagcgacagcgagacacactacaaccacatcttcaaggaccgcttcaccatcagcgccgacaccagcaagaataccgcctacctccagatgaactccctgagagccgaggacaccgccgtgtactactgcgccagaaacctgtatctgtggggccagggaaccctggtcacagtgtcatctacgcgtatccagaaccctgatcctgccgtgtaccagctgcgggatagcaagagcagcgacaagagcgtgtgtctgttcaccgacttcgacagccagaccaacgtgtcccagagcaaggactccgacgtgtacatcaccgataagtgcgtgctggacatgcggagcatggacttcaagagcaactccgccgtggcctggtccaacaagtccgatttcgcctgcgccaacgccttcaacaacagcattatccccgaggacacattcttcccaagccccgagagcagcgactccaccgaccacgtgaagcccaaagagacagagaacaccaagcagcccagcaagagctgccacaagcccaaggccatcgtgcacaccgagaaagtgaacatgatgagcctgaccgtgctgggcctgcggatgctgttcgccaaaaccgtggccgtgaacttcctgctgaccgccaagctgttcttcctc

SEQ ID NO: 36629 - DNA, 2979 bp, synthetic construct
  source 1..2979: mol_type = other DNA
atggccttaccagtgaccgccttgctcctgccgctggccttgctgctccacgccgccaggccggaagtgcagctggttgaatctggcggaggactggttcagcctggcggatctctgagactgtcttgtgccgccagcggcttcagcttcagcgacttttggatgagctgggtccgacaggcccctggcaaaggacttgaatgggtcgccacaatcagccaggccggcagcgagaaggactacgtggactctgtgaagggcagattcaccatcagccgggacaacgccaagaagtccctgtacctccagatgaacagcctgagagccgaggacaccgccgtgtactattgtgcctctggcgtgtacagcttcgactacagaggccagggcaccctggtcacagtctcttctggtaccggcggaggcggatctggcggcggaggtagcggtggcggaggatctgaattcgacatccagatgacacagagccctagcagcctgtctgccagcgtgggagacagagtgaccatcacatgcaagagcagccagagcctgctggactccgatggcaagacctacctgaactggtatcagcagaagcccggcaaggcccctaagctgctgatctacctggtgtccaagctggatagcggcgtgcccagcagattttctggcagcggcagcggaaccgacttcaccctgacaatatccagcctccagcctgaggacttcgccacctactactgcttccaaggcacccactttccattcaccttcggccagggcaccaaggtggaaatcaaaagactcgaggacctgaagaacgtgttcccacctgaggtggccgtgttcgagcctagcgaggccgagatcagccacacccagaaagccaccctcgtgtgcctggctaccggcttctaccccgaccatgtggaactgtcttggtgggtcaacggcaaagaggtgcacagcggcgtgtgtaccgacccccagccactgaaagaacagcccgccctgaacgacagccggtactgcctgagcagcagactgagagtgtccgccaccttctggcagaacccccggaaccacttcagatgccaggtgcagttctacggcctgagcgagaacgacgagtggacccaggacagagccaagcccgtgacccagatcgtgtctgccgaagcctggggcagagccgatgatgtgattaagatccactggcaggaaaagaagtccaacaccatcctgggcagccaggaaggcaacaccatgaagaccaacgacacctacatgaagttcagctggctgaccgtgcccgagaagtccctggacaaagaacacagatgcatcgtgcggcacgaaaacaacaagaacggcgtggaccaggaaatcatcttcccacccatcaagaccgatgtgattacaatggaccccaaggacaactgctccaaggacgccaacgataccctgctgctccagctgaccaacaccagcgcctactacatgtacttgttgctgctgctgaagtccgtggtgtacttcgccatcatcacatgctgcctgctgcggagaaccgccttctgctgcaacggcgagaagtctagggccaagcgatctggatctggagcaacaaacttctcactactcaaacaagcaggtgacgtggaggagaatcccgggcctactagtatggactggatttggcgcatccttttccttgtcggcgctgctaccggcgcgcattccgggccccagctccagctgcaagagtctggacctggcctggtcaagcctagcgagacactgagcctgacctgtaccgtgtccggcgatagcatcagcagcggcgattactactggggctggatcagacagcctcctggcaaaggactggaatggatcggccacatctactacagcggcgtgacctactacaaccccagcctgaagtccagagtgaccatcagcgtggacaccagccggaaccagttctccctgaagctgtctagcgtgacagccgccgataccgccgtgtactactgcaccagagaggacagcagcaactggcggagtagaggccagggaacactggtcacagttagctctggatccggcggaggcggaagtggaggcggaggatctggcggcggaggctctttcgaagaagtgcagctggttgaatcaggcggaggactggttcagcctggcggatctctgagactgtcttgtgccgccagcggctacaccttcagcagctactggatgaactgggtccgacaggcccctggcaaaggactggaatgggtcggaatgatcgaccccagcgacagcgagacacactacaaccacatcttcaaggaccgcttcaccatcagcgccgacaccagcaagaataccgcctacctccagatgaactccctgagagccgaggacaccgccgtgtactactgcgccagaaacctgtatctgtggggccagggaaccctggtcacagtgtcatctacgcgtatccagaaccctgatcctgccgtgtaccagctgcgggatagcaagagcagcgacaagagcgtgtgtctgttcaccgacttcgacagccagaccaacgtgtcccagagcaaggactccgacgtgtacatcaccgataagtgcgtgctggacatgcggagcatggacttcaagagcaactccgccgtggcctggtccaacaagtccgatttcgcctgcgccaacgccttcaacaacagcattatccccgaggacacattcttcccaagccccgagagcagcgactccaccgaccacgtgaagcccaaagagacagagaacaccaagcagcccagcaagagctgccacaagcccaaggccatcgtgcacaccgagaaagtgaacatgatgagcctgaccgtgctgggcctgcggatgctgttcgccaaaaccgtggccgtgaacttcctgctgaccgccaagctgttcttcctc

SEQ ID NO: 36630 - DNA, 1857 bp, synthetic construct
  source 1..1857: mol_type = other DNA
atggccttaccagtgaccgccttgctcctgccgctggccttgctgctccacgccgccaggccggacatccagatgacacagagccctagcagcctgtctgccagcgtgggagacagagtgaccatcacatgcaagagcagccagagcctgctggactccgatggcaagacctacctgaactggtatcagcagaagcccggcaaggcccctaagctgctgatctacctggtgtccaagctggatagcggcgtgcccagcagattttctggcagcggcagcggaaccgacttcaccctgacaatatccagcctccagcctgaggacttcgccacctactactgcttccaaggcacccactttccattcaccttcggccagggcaccaaggtggaaatcaaaagactcgaggacctgaagaacgtgttcccacctgaggtggccgtgttcgagcctagcgaggccgagatcagccacacccagaaagccaccctcgtgtgcctggctaccggcttctaccccgaccatgtggaactgtcttggtgggtcaacggcaaagaggtgcacagcggcgtgtctaccgacccccagccactgaaagaacagcccgccctgaacgacagccggtactgcctgagcagcagactgagagtgtccgccaccttctggcagaacccccggaaccacttcagatgccaggtgcagttctacggcctgagcgagaacgacgagtggacccaggacagagccaagcccgtgacccagatcgtgtctgccgaagcctggggcagagccgattgcgacgtgaagctggtggaaaagagcttcgagacagacaccaacctgaacttccagaacctgagcgtgatcggcttcagaatcctgctgctgaaagtggccggctttaacctgctgatgaccctgcggctgtggtccagcagggccaagcgatctggatctggagcaacaaacttctcactactcaaacaagcaggtgacgtggaggagaatcccgggcctactagtatggactggatttggcgcatccttttccttgtcggcgctgctaccggcgcgcattccttcgaagaagtgcagctggttgaatcaggcggaggactggttcagcctggcggatctctgagactgtcttgtgccgccagcggctacaccttcagcagctactggatgaactgggtccgacaggcccctggcaaaggactggaatgggtcggaatgatcgaccccagcgacagcgagacacactacaaccacatcttcaaggaccgcttcaccatcagcgccgacaccagcaagaataccgcctacctccagatgaactccctgagagccgaggacaccgccgtgtactactgcgccagaaacctgtatctgtggggccagggaaccctggtcacagtgtcatctacgcgtatccagaaccctgatcctgccgtgtaccagctgcgggatagcaagagcagcgacaagagcgtgtgtctgttcaccgacttcgacagccagaccaacgtgtcccagagcaaggactccgacgtgtacatcaccgataagaccgtgctggacatgcggagcatggacttcaagagcaactccgccgtggcctggtccaacaagtccgatttcgcctgcgccaacgccttcaacaacagcattatccccgaggacacattcttcccaagccccgagagcagctgcggctttaccagcgagagctaccagcagggcgtgctgagcgccaccatcctgtacgagatcctgctgggcaaggccaccctgtacgccgtgctggtgtctgccctggtgctgatggctatggtcaagcggaaggacagccgggga

SEQ ID NO: 36631 - DNA, 1857 bp, synthetic construct
  source 1..1857: mol_type = other DNA
atggccttaccagtgaccgccttgctcctgccgctggccttgctgctccacgccgccaggccggacatccagatgacacagagccctagcagcctgtctgccagcgtgggagacagagtgaccatcacatgcaagagcagccagagcctgctggactccgatggcaagacctacctgaactggtatcagcagaagcccggcaaggcccctaagctgctgatctacctggtgtccaagctggatagcggcgtgcccagcagattttctggcagcggcagcggaaccgacttcaccctgacaatatccagcctccagcctgaggacttcgccacctactactgcttccaaggcacccactttccattcaccttcggccagggcaccaaggtggaaatcaaaagactcgaggacctgaagaacgtgttcccacctgaggtggccgtgttcgagcctagcgaggccgagatcagccacacccagaaagccaccctcgtgtgcctggctaccggcttctaccccgaccatgtggaactgtcttggtgggtcaacggcaaagaggtgcacagcggcgtgtctaccgacccccagccactgaaagaacagcccgccctgaacgacagccggtactgcctgagcagcagactgagagtgtccgccaccttctggcagaacccccggaaccacttcagatgccaggtgcagttctacggcctgagcgagaacgacgagtggacccaggacagagccaagcccgtgacccagatcgtgtctgccgaagcctggggcagagccgattgcggctttaccagcgagagctaccagcagggcgtgctgagcgccaccaacctgagcgtgatcggcttcagaatcctgctgctgaaagtggccggctttaacctgctgatgaccctgcggctgtggtccagcagggccaagcgatctggatctggagcaacaaacttctcactactcaaacaagcaggtgacgtggaggagaatcccgggcctactagtatggactggatttggcgcatccttttccttgtcggcgctgctaccggcgcgcattccttcgaagaagtgcagctggttgaatcaggcggaggactggttcagcctggcggatctctgagactgtcttgtgccgccagcggctacaccttcagcagctactggatgaactgggtccgacaggcccctggcaaaggactggaatgggtcggaatgatcgaccccagcgacagcgagacacactacaaccacatcttcaaggaccgcttcaccatcagcgccgacaccagcaagaataccgcctacctccagatgaactccctgagagccgaggacaccgccgtgtactactgcgccagaaacctgtatctgtggggccagggaaccctggtcacagtgtcatctacgcgtatccagaaccctgatcctgccgtgtaccagctgcgggatagcaagagcagcgacaagagcgtgtgtctgttcaccgacttcgacagccagaccaacgtgtcccagagcaaggactccgacgtgtacatcaccgataagaccgtgctggacatgcggagcatggacttcaagagcaactccgccgtggcctggtccaacaagtccgatttcgcctgcgccaacgccttcaacaacagcattatccccgaggacacattcttcccaagccccgagagcagctgcgacgtgaagctggtggaaaagagcttcgagacagacaccaacctgaacttccagatcctgtacgagatcctgctgggcaaggccaccctgtacgccgtgctggtgtctgccctggtgctgatggctatggtcaagcggaaggacagccgggga

SEQ ID NO: 36632 - DNA, 2169 bp, synthetic construct
  source 1..2169: mol_type = other DNA
atggccttaccagtgaccgccttgctcctgccgctggccttgctgctccacgccgccaggccggacatccagatgacacagagccctagcagcctgtctgccagcgtgggagacagagtgaccatcacatgcaagagcagccagagcctgctggactccgatggcaagacctacctgaactggtatcagcagaagcccggcaaggcccctaagctgctgatctacctggtgtccaagctggatagcggcgtgcccagcagattttctggcagcggcagcggaaccgacttcaccctgacaatatccagcctccagcctgaggacttcgccacctactactgcttccaaggcacccactttccattcaccttcggccagggcaccaaggtggaaatcaaaagactcgaggacctgaagaacgtgttcccacctgaggtggccgtgttcgagcctagcgaggccgagatcagccacacccagaaagccaccctcgtgtgcctggctaccggcttctaccccgaccatgtggaactgtcttggtgggtcaacggcaaagaggtgcacagcggcgtgtctaccgacccccagccactgaaagaacagcccgccctgaacgacagccggtactgcctgagcagcagactgagagtgtccgccaccttctggcagaacccccggaaccacttcagatgccaggtgcagttctacggcctgagcgagaacgacgagtggacccaggacagagccaagcccgtgacccagatcgtgtctgccgaagcctggggcagagccgatgatgtgattaagatccactggcaggaaaagaagtccaacaccatcctgggcagccaggaaggcaacaccatgaagaccaacgacacctacatgaagttcagctggctgaccgtgcccgagaagtccctggacaaagaacacagatgcatcgtgcggcacgaaaacaacaagaacggcgtggaccaggaaatcatcttcccacccatcaagaccgatgtgattacaatggaccccaaggacaactgctccaaggacgccaacgataccctgctgctccagctgaccaacaccagcgcctactacatgtacttgttgctgctgctgaagtccgtggtgtacttcgccatcatcacatgctgcctgctgatggctatggtcaagcggaaggacagccggggaagggccaagcgatctggatctggagcaacaaacttctcactactcaaacaagcaggtgacgtggaggagaatcccgggcctactagtatggactggatttggcgcatccttttccttgtcggcgctgctaccggcgcgcattccttcgaagaagtgcagctggttgaatcaggcggaggactggttcagcctggcggatctctgagactgtcttgtgccgccagcggctacaccttcagcagctactggatgaactgggtccgacaggcccctggcaaaggactggaatgggtcggaatgatcgaccccagcgacagcgagacacactacaaccacatcttcaaggaccgcttcaccatcagcgccgacaccagcaagaataccgcctacctccagatgaactccctgagagccgaggacaccgccgtgtactactgcgccagaaacctgtatctgtggggccagggaaccctggtcacagtgtcatctacgcgtatccagaaccctgatcctgccgtgtaccagctgcgggatagcaagagcagcgacaagagcgtgtgtctgttcaccgacttcgacagccagaccaacgtgtcccagagcaaggactccgacgtgtacatcaccgataagaccgtgctggacatgcggagcatggacttcaagagcaactccgccgtggcctggtccaacaagtccgatttcgcctgcgccaacgccttcaacaacagcattatccccgaggacacattcttcccaagccccgagagcagcgactccaccgaccacgtgaagcccaaagagacagagaacaccaagcagcccagcaagagctgccacaagcccaaggccatcgtgcacaccgagaaagtgaacatgatgagcctgaccgtgctgggcctgcggatgctgttcgccaaaaccgtggccgtgaacttcctgctgaccgccaagctgttcttcctcctcaccgcc

SEQ ID NO: 36633 - DNA, 2163 bp, synthetic construct
  source 1..2163: mol_type = other DNA
atggccttaccagtgaccgccttgctcctgccgctggccttgctgctccacgccgccaggccggacatccagatgacacagagccctagcagcctgtctgccagcgtgggagacagagtgaccatcacatgcaagagcagccagagcctgctggactccgatggcaagacctacctgaactggtatcagcagaagcccggcaaggcccctaagctgctgatctacctggtgtccaagctggatagcggcgtgcccagcagattttctggcagcggcagcggaaccgacttcaccctgacaatatccagcctccagcctgaggacttcgccacctactactgcttccaaggcacccactttccattcaccttcggccagggcaccaaggtggaaatcaaaagactcgaggacctgaagaacgtgttcccacctgaggtggccgtgttcgagcctagcgaggccgagatcagccacacccagaaagccaccctcgtgtgcctggctaccggcttctaccccgaccatgtggaactgtcttggtgggtcaacggcaaagaggtgcacagcggcgtgtctaccgacccccagccactgaaagaacagcccgccctgaacgacagccggtactgcctgagcagcagactgagagtgtccgccaccttctggcagaacccccggaaccacttcagatgccaggtgcagttctacggcctgagcgagaacgacgagtggacccaggacagagccaagcccgtgacccagatcgtgtctgccgaagcctggggcagagccgatgatgtgattaagatccactggcaggaaaagaagtccaacaccatcctgggcagccaggaaggcaacaccatgaagaccaacgacacctacatgaagttcagctggctgaccgtgcccgagaagtccctggacaaagaacacagatgcatcgtgcggcacgaaaacaacaagaacggcgtggaccaggaaatcatcttcccacccatcaagaccgatgtgattacaatggaccccaaggacaactgctccaaggacgccaacgataccctgctgctccagctgaccaacaccagcgcctactacatgtacttgttgctgctgctgaagtccgtggtgtacttcgccatcatcacatgctgcctgctgcggagaaccgccttctgctgcaacggcgagaagtctagggccaagcgatctggatctggagcaacaaacttctcactactcaaacaagcaggtgacgtggaggagaatcccgggcctactagtatggactggatttggcgcatccttttccttgtcggcgctgctaccggcgcgcattccttcgaagaagtgcagctggttgaatcaggcggaggactggttcagcctggcggatctctgagactgtcttgtgccgccagcggctacaccttcagcagctactggatgaactgggtccgacaggcccctggcaaaggactggaatgggtcggaatgatcgaccccagcgacagcgagacacactacaaccacatcttcaaggaccgcttcaccatcagcgccgacaccagcaagaataccgcctacctccagatgaactccctgagagccgaggacaccgccgtgtactactgcgccagaaacctgtatctgtggggccagggaaccctggtcacagtgtcatctacgcgtatccagaaccctgatcctgccgtgtaccagctgcgggatagcaagagcagcgacaagagcgtgtgtctgttcaccgacttcgacagccagaccaacgtgtcccagagcaaggactccgacgtgtacatcaccgataagaccgtgctggacatgcggagcatggacttcaagagcaactccgccgtggcctggtccaacaagtccgatttcgcctgcgccaacgccttcaacaacagcattatccccgaggacacattcttcccaagccccgagagcagcgactccaccgaccacgtgaagcccaaagagacagagaacaccaagcagcccagcaagagctgccacaagcccaaggccatcgtgcacaccgagaaagtgaacatgatgagcctgaccgtgctgggcctgcggatgctgttcgccaaaaccgtggccgtgaacttcctgctgaccgccaagctgttcttcctc

SEQ ID NO: 36634 - DNA, 2595 bp, synthetic construct
  source 1..2595: mol_type = other DNA
atggccttaccagtgaccgccttgctcctgccgctggccttgctgctccacgccgccaggccgctcgaggaggacctgaagaacgtgttcccacctgaggtggccgtgttcgagcctagcgaggccgagatcagccacacccagaaagccaccctcgtgtgcctggctaccggcttctaccccgaccatgtggaactgtcttggtgggtcaacggcaaagaggtgcacagcggcgtgtgtaccgacccccagccactgaaagaacagcccgccctgaacgacagccggtactgcctgagcagcagactgagagtgtccgccaccttctggcagaacccccggaaccacttcagatgccaggtgcagttctacggcctgagcgagaacgacgagtggacccaggacagagccaagcccgtgacccagatcgtgtctgccgaagcctggggcagagccgattgcggctttaccagcgagagctaccagcagggcgtgctgagcgccaccaacctgagcgtgatcggcttcagaatcctgctgctgaaagtggccggctttaacctgctgatgaccctgcggctgtggtccagcagggccaagcgatctggatctggagcaacaaacttctcactactcaaacaagcaggtgacgtggaggagaatcccgggcctactagcatggccttaccagtgaccgccttgctcctgccgctggccttgctgctccacgccgccaggccggacatccagatgacacagagccctagcagcctgtctgccagcgtgggagacagagtgaccatcacatgcaagagcagccagagcctgctggactccgatggcaagacctacctgaactggtatcagcagaagcccggcaaggcccctaagctgctgatctacctggtgtccaagctggatagcggcgtgcccagcagattttctggcagcggcagcggaaccgacttcaccctgacaatatccagcctccagcctgaggacttcgccacctactactgcttccaaggcacccactttccattcaccttcggccagggcaccaaggtggaaatcaaaagaggcggaggcggaagtggaggcggaggatctggcggcggaggctctgaagtgcagctggttgaatcaggcggaggactggttcagcctggcggatctctgagactgtcttgtgccgccagcggctacaccttcagcagctactggatgaactgggtccgacaggcccctggcaaaggactggaatgggtcggaatgatcgaccccagcgacagcgagacacactacaaccacatcttcaaggaccgcttcaccatcagcgccgacaccagcaagaataccgcctacctccagatgaactccctgagagccgaggacaccgccgtgtactactgcgccagaaacctgtatctgtggggccagggaaccctggtcacagtgtcatctacgcgtatccagaaccctgatcctgccgtgtaccagctgcgggatagcaagagcagcgacaagagcgtgtgtctgttcaccgacttcgacagccagaccaacgtgtcccagagcaaggactccgacgtgtacatcaccgataagtgcgtgctggacatgcggagcatggacttcaagagcaactccgccgtggcctggtccaacaagtccgatttcgcctgcgccaacgccttcaacaacagcattatccccgaggacacattcttcccaagccccgagagcagctgcgacgtgaagctggtggaaaagagcttcgagacagacaccaacctgaacttccagatcctgtacgaggtgatcggcttcagaatcctgctgctgaaagtggccggctttaacctgctgatgaccctgcggctgtggtccagccgcgccaagagaagcggatctggcgtgaagcagaccctgaatttcgacctgctgaagctggctggcgacgtggaatccaacccaggcccttctagaggccatatgaccgagtacaagcccacggtgcgcctcgccacccgcgacgacgtccccagggccgtacgcaccctcgccgccgcgttcgccgactaccccgccacgcgccacaccgtcgatccggaccgccacatcgagcgggtcaccgagctgcaagaactcttcctcacgcgcgtcgggctcgacatcggcaaggtgtgggtcgcggacgacggcgccgcggtggcggtctggaccacgccggagagcgtcgaagcgggggcggtgttcgccgagatcggcccgcgcatggccgagttgagcggttcccggctggccgcgcagcaacagatggaaggcctcctggcgccgcaccggcccaaggagcccgcgtggttcctggccaccgtcggcgtctcgcccgaccaccagggcaagggtctgggcagcgccgtcgtgctccccggagtggaggcggccgagcgcgccggggtgcccgccttcctggagacctccgcgccccgcaacctccccttctacgagcggctcggcttcaccgtcaccgccgacgtcgaggtgcccgaaggaccgcgcacctggtgcatgacccgcaagcccggtgcctga

SEQ ID NO: 36635 - DNA, 2595 bp, synthetic construct
  source 1..2595: mol_type = other DNA
atggccttaccagtgaccgccttgctcctgccgctggccttgctgctccacgccgccaggccgctcgagatccagaaccctgatcctgccgtgtaccagctgcgggatagcaagagcagcgacaagagcgtgtgtctgttcaccgacttcgacagccagaccaacgtgtcccagagcaaggactccgacgtgtacatcaccgataagtgcgtgctggacatgcggagcatggacttcaagagcaactccgccgtggcctggtccaacaagtccgatttcgcctgcgccaacgccttcaacaacagcattatccccgaggacacattcttcccaagccccgagagcagctgcgacgtgaagctggtggaaaagagcttcgagacagacaccaacctgaacttccagatcctgtacgaggtgatcggcttcagaatcctgctgctgaaagtggccggctttaacctgctgatgaccctgcggctgtggtccagcagggccaagcgatctggatctggagcaacaaacttctcactactcaaacaagcaggtgacgtggaggagaatcccgggcctactagcatggccttaccagtgaccgccttgctcctgccgctggccttgctgctccacgccgccaggccggacatccagatgacacagagccctagcagcctgtctgccagcgtgggagacagagtgaccatcacatgcaagagcagccagagcctgctggactccgatggcaagacctacctgaactggtatcagcagaagcccggcaaggcccctaagctgctgatctacctggtgtccaagctggatagcggcgtgcccagcagattttctggcagcggcagcggaaccgacttcaccctgacaatatccagcctccagcctgaggacttcgccacctactactgcttccaaggcacccactttccattcaccttcggccagggcaccaaggtggaaatcaaaagaggcggaggcggaagtggaggcggaggatctggcggcggaggctctgaagtgcagctggttgaatcaggcggaggactggttcagcctggcggatctctgagactgtcttgtgccgccagcggctacaccttcagcagctactggatgaactgggtccgacaggcccctggcaaaggactggaatgggtcggaatgatcgaccccagcgacagcgagacacactacaaccacatcttcaaggaccgcttcaccatcagcgccgacaccagcaagaataccgcctacctccagatgaactccctgagagccgaggacaccgccgtgtactactgcgccagaaacctgtatctgtggggccagggaaccctggtcacagtgtcatctacgcgtgaggacctgaagaacgtgttcccacctgaggtggccgtgttcgagcctagcgaggccgagatcagccacacccagaaagccaccctcgtgtgcctggctaccggcttctaccccgaccatgtggaactgtcttggtgggtcaacggcaaagaggtgcacagcggcgtgtgtaccgacccccagccactgaaagaacagcccgccctgaacgacagccggtactgcctgagcagcagactgagagtgtccgccaccttctggcagaacccccggaaccacttcagatgccaggtgcagttctacggcctgagcgagaacgacgagtggacccaggacagagccaagcccgtgacccagatcgtgtctgccgaagcctggggcagagccgattgcggctttaccagcgagagctaccagcagggcgtgctgagcgccaccaacctgagcgtgatcggcttcagaatcctgctgctgaaagtggccggctttaacctgctgatgaccctgcggctgtggtccagccgcgccaagagaagcggatctggcgtgaagcagaccctgaatttcgacctgctgaagctggctggcgacgtggaatccaacccaggcccttctagaggccatatgaccgagtacaagcccacggtgcgcctcgccacccgcgacgacgtccccagggccgtacgcaccctcgccgccgcgttcgccgactaccccgccacgcgccacaccgtcgatccggaccgccacatcgagcgggtcaccgagctgcaagaactcttcctcacgcgcgtcgggctcgacatcggcaaggtgtgggtcgcggacgacggcgccgcggtggcggtctggaccacgccggagagcgtcgaagcgggggcggtgttcgccgagatcggcccgcgcatggccgagttgagcggttcccggctggccgcgcagcaacagatggaaggcctcctggcgccgcaccggcccaaggagcccgcgtggttcctggccaccgtcggcgtctcgcccgaccaccagggcaagggtctgggcagcgccgtcgtgctccccggagtggaggcggccgagcgcgccggggtgcccgccttcctggagacctccgcgccccgcaacctccccttctacgagcggctcggcttcaccgtcaccgccgacgtcgaggtgcccgaaggaccgcgcacctggtgcatgacccgcaagcccggtgcctga

SEQ ID NO: 36636 - DNA, 2595 bp, synthetic construct; identical to SEQ ID NO: 36634
  source 1..2595: mol_type = other DNA

SEQ ID NO: 36637 - DNA, 2919 bp, synthetic construct
  source 1..2919: mol_type = other DNA
atggccttaccagtgaccgccttgctcctgccgctggccttgctgctccacgccgccaggccgctcgaggaggacctgaagaacgtgttcccacctgaggtggccgtgttcgagcctagcgaggccgagatcagccacacccagaaagccaccctcgtgtgcctggctaccggcttctaccccgaccatgtggaactgtcttggtgggtcaacggcaaagaggtgcacagcggcgtgtctaccgacccccagccactgaaagaacagcccgccctgaacgacagccggtactgcctgagcagcagactgagagtgtccgccaccttctggcagaacccccggaaccacttcagatgccaggtgcagttctacggcctgagcgagaacgacgagtggacccaggacagagccaagcccgtgacccagatcgtgtctgccgaagcctggggcagagccgatgatgtgattaagatccactggcaggaaaagaagtccaacaccatcctgggcagccaggaaggcaacaccatgaagaccaacgacacctacatgaagttcagctggctgaccgtgcccgagaagtccctggacaaagaacacagatgcatcgtgcggcacgaaaacaacaagaacggcgtggaccaggaaatcatcttcccacccatcaagaccgatgtgattacaatggaccccaaggacaactgctccaaggacgccaacgataccctgctgctccagctgaccaacaccagcgcctactacatgtacttgttgctgctgctgaagtccgtggtgtacttcgccatcatcacatgctgcctgctgatggctatggtcaagcggaaggacagccggggaagggccaagcgatctggatctggagcaacaaacttctcactactcaaacaagcaggtgacgtggaggagaatcccgggcctactagcatggccttaccagtgaccgccttgctcctgccgctggccttgctgctccacgccgccaggccggacatccagatgacacagagccctagcagcctgtctgccagcgtgggagacagagtgaccatcacatgcaagagcagccagagcctgctggactccgatggcaagacctacctgaactggtatcagcagaagcccggcaaggcccctaagctgctgatctacctggtgtccaagctggatagcggcgtgcccagcagattttctggcagcggcagcggaaccgacttcaccctgacaatatccagcctccagcctgaggacttcgccacctactactgcttccaaggcacccactttccattcaccttcggccagggcaccaaggtggaaatcaaaagaggcggaggcggaagtggaggcggaggatctggcggcggaggctctgaagtgcagctggttgaatcaggcggaggactggttcagcctggcggatctctgagactgtcttgtgccgccagcggctacaccttcagcagctactggatgaactgggtccgacaggcccctggcaaaggactggaatgggtcggaatgatcgaccccagcgacagcgagacacactacaaccacatcttcaaggaccgcttcaccatcagcgccgacaccagcaagaataccgcctacctccagatgaactccctgagagccgaggacaccgccgtgtactactgcgccagaaacctgtatctgtggggccagggaaccctggtcacagtgtcatctacgcgtatccagaaccctgatcctgccgtgtaccagctgcgggatagcaagagcagcgacaagagcgtgtgtctgttcaccgacttcgacagccagaccaacgtgtcccagagcaaggactccgacgtgtacatcaccgataagaccgtgctggacatgcggagcatggacttcaagagcaactccgccgtggcctggtccaacaagtccgatttcgcctgcgccaacgccttcaacaacagcattatccccgaggacacattcttcccaagccccgagagcagcgactccaccgaccacgtgaagcccaaagagacagagaacaccaagcagcccagcaagagctgccacaagcccaaggccatcgtgcacaccgagaaagtgaacatgatgagcctgaccgtgctgggcctgcggatgctgttcgccaaaaccgtggccgtgaacttcctgctgaccgccaagctgttcttcctcctcaccgcccgcgccaagagaagcggatctggcgtgaagcagaccctgaatttcgacctgctgaagctggctggcgacgtggaatccaacccaggcccttctagaggccatatgaccgagtacaagcccacggtgcgcctcgccacccgcgacgacgtccccagggccgtacgcaccctcgccgccgcgttcgccgactaccccgccacgcgccacaccgtcgatccggaccgccacatcgagcgggtcaccgagctgcaagaactcttcctcacgcgcgtcgggctcgacatcggcaaggtgtgggtcgcggacgacggcgccgcggtggcggtctggaccacgccggagagcgtcgaagcgggggcggtgttcgccgagatcggcccgcgcatggccgagttgagcggttcccggctggccgcgcagcaacagatggaaggcctcctggcgccgcaccggcccaaggagcccgcgtggttcctggccaccgtcggcgtctcgcccgaccaccagggcaagggtctgggcagcgccgtcgtgctccccggagtggaggcggccgagcgcgccggggtgcccgccttcctggagacctccgcgccccgcaacctccccttctacgagcggctcggcttcaccgtcaccgccgacgtcgaggtgcccgaaggaccgcgcacctggtgcatgacccgcaagcccggtgcctga

SEQ ID NO: 36638 - DNA, 2919 bp, synthetic construct
  source 1..2919: mol_type = other DNA
atggccttaccagtgaccgccttgctcctgccgctggccttgctgctccacgccgccaggccgctcgagatccagaaccctgatcctgccgtgtaccagctgcgggatagcaagagcagcgacaagagcgtgtgtctgttcaccgacttcgacagccagaccaacgtgtcccagagcaaggactccgacgtgtacatcaccgataagaccgtgctggacatgcggagcatggacttcaagagcaactccgccgtggcctggtccaacaagtccgatttcgcctgcgccaacgccttcaacaacagcattatccccgaggacacattcttcccaagccccgagagcagcgactccaccgaccacgtgaagcccaaagagacagagaacaccaagcagcccagcaagagctgccacaagcccaaggccatcgtgcacaccgagaaagtgaacatgatgagcctgaccgtgctgggcctgcggatgctgttcgccaaaaccgtggccgtgaacttcctgctgaccgccaagctgttcttcctcctcaccgccagggccaagcgatctggatctggagcaacaaacttctcactactcaaacaagcaggtgacgtggaggagaatcccgggcctactagcatggccttaccagtgaccgccttgctcctgccgctggccttgctgctccacgccgccaggccggacatccagatgacacagagccctagcagcctgtctgccagcgtgggagacagagtgaccatcacatgcaagagcagccagagcctgctggactccgatggcaagacctacctgaactggtatcagcagaagcccggcaaggcccctaagctgctgatctacctggtgtccaagctggatagcggcgtgcccagcagattttctggcagcggcagcggaaccgacttcaccctgacaatatccagcctccagcctgaggacttcgccacctactactgcttccaaggcacccactttccattcaccttcggccagggcaccaaggtggaaatcaaaagaggcggaggcggaagtggaggcggaggatctggcggcggaggctctgaagtgcagctggttgaatcaggcggaggactggttcagcctggcggatctctgagactgtcttgtgccgccagcggctacaccttcagcagctactggatgaactgggtccgacaggcccctggcaaaggactggaatgggtcggaatgatcgaccccagcgacagcgagacacactacaaccacatcttcaaggaccgcttcaccatcagcgccgacaccagcaagaataccgcctacctccagatgaactccctgagagccgaggacaccgccgtgtactactgcgccagaaacctgtatctgtggggccagggaaccctggtcacagtgtcatctacgcgtgaggacctgaagaacgtgttcccacctgaggtggccgtgttcgagcctagcgaggccgagatcagccacacccagaaagccaccctcgtgtgcctggctaccggcttctaccccgaccatgtggaactgtcttggtgggtcaacggcaaagaggtgcacagcggcgtgtctaccgacccccagccactgaaagaacagcccgccctgaacgacagccggtactgcctgagcagcagactgagagtgtccgccaccttctggcagaacccccggaaccacttcagatgccaggtgcagttctacggcctgagcgagaacgacgagtggacccaggacagagccaagcccgtgacccagatcgtgtctgccgaagcctggggcagagccgatgatgtgattaagatccactggcaggaaaagaagtccaacaccatcctgggcagccaggaaggcaacaccatgaagaccaacgacacctacatgaagttcagctggctgaccgtgcccgagaagtccctggacaaagaacacagatgcatcgtgcggcacgaaaacaacaagaacggcgtggaccaggaaatcatcttcccacccatcaagaccgatgtgattacaatggaccccaaggacaactgctccaaggacgccaacgataccctgctgctccagctgaccaacaccagcgcctactacatgtacttgttgctgctgctgaagtccgtggtgtacttcgccatcatcacatgctgcctgctgatggctatggtcaagcggaaggacagccggggacgcgccaagagaagcggatctggcgtgaagcagaccctgaatttcgacctgctgaagctggctggcgacgtggaatccaacccaggcccttctagaggccatatgaccgagtacaagcccacggtgcgcctcgccacccgcgacgacgtccccagggccgtacgcaccctcgccgccgcgttcgccgactaccccgccacgcgccacaccgtcgatccggaccgccacatcgagcgggtcaccgagctgcaagaactcttcctcacgcgcgtcgggctcgacatcggcaaggtgtgggtcgcggacgacggcgccgcggtggcggtctggaccacgccggagagcgtcgaagcgggggcggtgttcgccgagatcggcccgcgcatggccgagttgagcggttcccggctggccgcgcagcaacagatggaaggcctcctggcgccgcaccggcccaaggagcccgcgtggttcctggccaccgtcggcgtctcgcccgaccaccagggcaagggtctgggcagcgccgtcgtgctccccggagtggaggcggccgagcgcgccggggtgcccgccttcctggagacctccgcgccccgcaacctccccttctacgagcggctcggcttcaccgtcaccgccgacgtcgaggtgcccgaaggaccgcgcacctggtgcatgacccgcaagcccggtgcctga

SEQ ID NO: 36639 - DNA, 2913 bp, synthetic construct
  source 1..2913: mol_type = other DNA
atggccttaccagtgaccgccttgctcctgccgctggccttgctgctccacgccgccaggccgctcgaggaggacctgaagaacgtgttcccacctgaggtggccgtgttcgagcctagcgaggccgagatcagccacacccagaaagccaccctcgtgtgcctggctaccggcttctaccccgaccatgtggaactgtcttggtgggtcaacggcaaagaggtgcacagcggcgtgtgtaccgacccccagccactgaaagaacagcccgccctgaacgacagccggtactgcctgagcagcagactgagagtgtccgccaccttctggcagaacccccggaaccacttcagatgccaggtgcagttctacggcctgagcgagaacgacgagtggacccaggacagagccaagcccgtgacccagatcgtgtctgccgaagcctggggcagagccgatgatgtgattaagatccactggcaggaaaagaagtccaacaccatcctgggcagccaggaaggcaacaccatgaagaccaacgacacctacatgaagttcagctggctgaccgtgcccgagaagtccctggacaaagaacacagatgcatcgtgcggcacgaaaacaacaagaacggcgtggaccaggaaatcatcttcccacccatcaagaccgatgtgattacaatggaccccaaggacaactgctccaaggacgccaacgataccctgctgctccagctgaccaacaccagcgcctactacatgtacttgttgctgctgctgaagtccgtggtgtacttcgccatcatcacatgctgcctgctgcggagaaccgccttctgctgcaacggcgagaagtctagggccaagcgatctggatctggagcaacaaacttctcactactcaaacaagcaggtgacgtggaggagaatcccgggcctactagcatggccttaccagtgaccgccttgctcctgccgctggccttgctgctccacgccgccaggccggacatccagatgacacagagccctagcagcctgtctgccagcgtgggagacagagtgaccatcacatgcaagagcagccagagcctgctggactccgatggcaagacctacctgaactggtatcagcagaagcccggcaaggcccctaagctgctgatctacctggtgtccaagctggatagcggcgtgcccagcagattttctggcagcggcagcggaaccgacttcaccctgacaatatccagcctccagcctgaggacttcgccacctactactgcttccaaggcacccactttccattcaccttcggccagggcaccaaggtggaaatcaaaagaggcggaggcggaagtggaggcggaggatctggcggcggaggctctgaagtgcagctggttgaatcaggcggaggactggttcagcctggcggatctctgagactgtcttgtgccgccagcggctacaccttcagcagctactggatgaactgggtccgacaggcccctggcaaaggactggaatgggtcggaatgatcgaccccagcgacagcgagacacactacaaccacatcttcaaggaccgcttcaccatcagcgccgacaccagcaagaataccgcctacctccagatgaactccctgagagccgaggacaccgccgtgtactactgcgccagaaacctgtatctgtggggccagggaaccctggtcacagtgtcatctacgcgtatccagaaccctgatcctgccgtgtaccagctgcgggatagcaagagcagcgacaagagcgtgtgtctgttcaccgacttcgacagccagaccaacgtgtcccagagcaaggactccgacgtgtacatcaccgataagtgcgtgctggacatgcggagcatggacttcaagagcaactccgccgtggcctggtccaacaagtccgatttcgcctgcgccaacgccttcaacaacagcattatccccgaggacacattcttcccaagccccgagagcagcgactccaccgaccacgtgaagcccaaagagacagagaacaccaagcagcccagcaagagctgccacaagcccaaggccatcgtgcacaccgagaaagtgaacatgatgagcctgaccgtgctgggcctgcggatgctgttcgccaaaaccgtggccgtgaacttcctgctgaccgccaagctgttcttcctccgcgccaagagaagcggatctggcgtgaagcagaccctgaatttcgacctgctgaagctggctggcgacgtggaatccaacccaggcccttctagaggccatatgaccgagtacaagcccacggtgcgcctcgccacccgcgacgacgtccccagggccgtacgcaccctcgccgccgcgttcgccgactaccccgccacgcgccacaccgtcgatccggaccgccacatcgagcgggtcaccgagctgcaagaactcttcctcacgcgcgtcgggctcgacatcggcaaggtgtgggtcgcggacgacggcgccgcggtggcggtctggaccacgccggagagcgtcgaagcgggggcggtgttcgccgagatcggcccgcgcatggccgagttgagcggttcccggctggccgcgcagcaacagatggaaggcctcctggcgccgcaccggcccaaggagcccgcgtggttcctggccaccgtcggcgtctcgcccgaccaccagggcaagggtctgggcagcgccgtcgtgctccccggagtggaggcggccgagcgcgccggggtgcccgccttcctggagacctccgcgccccgcaacctccccttctacgagcggctcggcttcaccgtcaccgccgacgtcgaggtgcccgaaggaccgcgcacctggtgcatgacccgcaagcccggtgcctga

SEQ ID NO: 36640 - DNA, 2913 bp, synthetic construct
  source 1..2913: mol_type = other DNA
atggccttaccagtgaccgccttgctcctgccgctggccttgctgctccacgccgccaggccgctcgagatccagaaccctgatcctgccgtgtaccagctgcgggatagcaagagcagcgacaagagcgtgtgtctgttcaccgacttcgacagccagaccaacgtgtcccagagcaaggactccgacgtgtacatcaccgataagtgcgtgctggacatgcggagcatggacttcaagagcaactccgccgtggcctggtccaacaagtccgatttcgcctgcgccaacgccttcaacaacagcattatccccgaggacacattcttcccaagccccgagagcagcgactccaccgaccacgtgaagcccaaagagacagagaacaccaagcagcccagcaagagctgccacaagcccaaggccatcgtgcacaccgagaaagtgaacatgatgagcctgaccgtgctgggcctgcggatgctgttcgccaaaaccgtggccgtgaacttcctgctgaccgccaagctgttcttcctcagggccaagcgatctggatctggagcaacaaacttctcactactcaaacaagcaggtgacgtggaggagaatcccgggcctactagcatggccttaccagtgaccgccttgctcctgccgctggccttgctgctccacgccgccaggccggacatccagatgacacagagccctagcagcctgtctgccagcgtgggagacagagtgaccatcacatgcaagagcagccagagcctgctggactccgatggcaagacctacctgaactggtatcagcagaagcccggcaaggcccctaagctgctgatctacctggtgtccaagctggatagcggcgtgcccagcagattttctggcagcggcagcggaaccgacttcaccctgacaatatccagcctccagcctgaggacttcgccacctactactgcttccaaggcacccactttccattcaccttcggccagggcaccaaggtggaaatcaaaagaggcggaggcggaagtggaggcggaggatctggcggcggaggctctgaagtgcagctggttgaatcaggcggaggactggttcagcctggcggatctctgagactgtcttgtgccgccagcggctacaccttcagcagctactggatgaactgggtccgacaggcccctggcaaaggactggaatgggtcggaatgatcgaccccagcgacagcgagacacactacaaccacatcttcaaggaccgcttcaccatcagcgccgacaccagcaagaataccgcctacctccagatgaactccctgagagccgaggacaccgccgtgtactactgcgccagaaacctgtatctgtggggccagggaaccctggtcacagtgtcatctacgcgtgaggacctgaagaacgtgttcccacctgaggtggccgtgttcgagcctagcgaggccgagatcagccacacccagaaagccaccctcgtgtgcctggctaccggcttctaccccgaccatgtggaactgtcttggtgggtcaacggcaaagaggtgcacagcggcgtgtgtaccgacccccagccactgaaagaacagcccgccctgaacgacagccggtactgcctgagcagcagactgagagtgtccgccaccttctggcagaacccccggaaccacttcagatgccaggtgcagttctacggcctgagcgagaacgacgagtggacccaggacagagccaagcccgtgacccagatcgtgtctgccgaagcctggggcagagccgatgatgtgattaagatccactggcaggaaaagaagtccaacaccatcctgggcagccaggaaggcaacaccatgaagaccaacgacacctacatgaagttcagctggctgaccgtgcccgagaagtccctggacaaagaacacagatgcatcgtgcggcacgaaaacaacaagaacggcgtggaccaggaaatcatcttcccacccatcaagaccgatgtgattacaatggaccccaaggacaactgctccaaggacgccaacgataccctgctgctccagctgaccaacaccagcgcctactacatgtacttgttgctgctgctgaagtccgtggtgtacttcgccatcatcacatgctgcctgctgcggagaaccgccttctgctgcaacggcgagaagtctcgcgccaagagaagcggatctggcgtgaagcagaccctgaatttcgacctgctgaagctggctggcgacgtggaatccaacccaggcccttctagaggccatatgaccgagtacaagcccacggtgcgcctcgccacccgcgacgacgtccccagggccgtacgcaccctcgccgccgcgttcgccgactaccccgccacgcgccacaccgtcgatccggaccgccacatcgagcgggtcaccgagctgcaagaactcttcctcacgcgcgtcgggctcgacatcggcaaggtgtgggtcgcggacgacggcgccgcggtggcggtctggaccacgccggagagcgtcgaagcgggggcggtgttcgccgagatcggcccgcgcatggccgagttgagcggttcccggctggccgcgcagcaacagatggaaggcctcctggcgccgcaccggcccaaggagcccgcgtggttcctggccaccgtcggcgtctcgcccgaccaccagggcaagggtctgggcagcgccgtcgtgctccccggagtggaggcggccgagcgcgccggggtgcccgccttcctggagacctccgcgccccgcaacctccccttctacgagcggctcggcttcaccgtcaccgccgacgtcgaggtgcccgaaggaccgcgcacctggtgcatgacccgcaagcccggtgcctga

SEQ ID NO: 36641 - DNA, 2913 bp, synthetic construct
  source 1..2913: mol_type = other DNA
atggccttaccagtgaccgccttgctcctgccgctggccttgctgctccacgccgccaggccgctcgaggaggacctgaagaacgtgttcccacctgaggtggccgtgttcgagcctagcgaggccgagatcagccacacccagaaagccaccctcgtgtgcctggctaccggcttctaccccgaccatgtggaactgtcttggtgggtcaacggcaaagaggtgcacagcggcgtgtctaccgacccccagccactgaaagaacagcccgccctgaacgacagccggtactgcctgagcagcagactgagagtgtccgccaccttctggcagaacccccggaaccacttcagatgccaggtgcagttctacggcctgagcgagaacgacgagtggacccaggacagagccaagcccgtgacccagatcgtgtctgccgaagcctggggcagagccgatgatgtgattaagatccactggcaggaaaagaagtccaacaccatcctgggcagccaggaaggcaacaccatgaagaccaacgacacctacatgaagttcagctggctgaccgtgcccgagaagtccctggacaaagaacacagatgcatcgtgcggcacgaaaacaacaagaacggcgtggaccaggaaatcatcttcccacccatcaagaccgatgtgattacaatggaccccaaggacaactgctccaaggacgccaacgataccctgctgctccagctgaccaacaccagcgcctactacatgtacttgttgctgctgctgaagtccgtggtgtacttcgccatcatcacatgctgcctgctgcggagaaccgccttctgctgcaacggcgagaagtctagggccaagcgatctggatctggagcaacaaacttctcactactcaaacaagcaggtgacgtggaggagaatcccgggcctactagcatggccttaccagtgaccgccttgctcctgccgctggccttgctgctccacgccgccaggccggacatccagatgacacagagccctagcagcctgtctgccagcgtgggagacagagtgaccatcacatgcaagagcagccagagcctgctggactccgatggcaagacctacctgaactggtatcagcagaagcccggcaaggcccctaagctgctgatctacctggtgtccaagctggatagcggcgtgcccagcagattttctggcagcggcagcggaaccgacttcaccctgacaatatccagcctccagcctgaggacttcgccacctactactgcttccaaggcacccactttccattcaccttcggccagggcaccaaggtggaaatcaaaagaggcggaggcggaagtggaggcggaggatctggcggcggaggctctgaagtgcagctggttgaatcaggcggaggactggttcagcctggcggatctctgagactgtcttgtgccgccagcggctacaccttcagcagctactggatgaactgggtccgacaggcccctggcaaaggactggaatgggtcggaatgatcgaccccagcgacagcgagacacactacaaccacatcttcaaggaccgcttcaccatcagcgccgacaccagcaagaataccgcctacctccagatgaactccctgagagccgaggacaccgccgtgtactactgcgccagaaacctgtatctgtggggccagggaaccctggtcacagtgtcatctacgcgtatccagaaccctgatcctgccgtgtaccagctgcgggatagcaagagcagcgacaagagcgtgtgtctgttcaccgacttcgacagccagaccaacgtgtcccagagcaaggactccgacgtgtacatcaccgataagaccgtgctggacatgcggagcatggacttcaagagcaactccgccgtggcctggtccaacaagtccgatttcgcctgcgccaacgccttcaacaacagcattatccccgaggacacattcttcccaagccccgagagcagcgactccaccgaccacgtgaagcccaaagagacagagaacaccaagcagcccagcaagagctgccacaagcccaaggccatcgtgcacaccgagaaagtgaacatgatgagcctgaccgtgctgggcctgcggatgctgttcgccaaaaccgtggccgtgaacttcctgctgaccgccaagctgttcttcctccgcgccaagagaagcggatctggcgtgaagcagaccctgaatttcgacctgctgaagctggctggcgacgtggaatccaacccaggcccttctagaggccatatgaccgagtacaagcccacggtgcgcctcgccacccgcgacgacgtccccagggccgtacgcaccctcgccgccgcgttcgccgactaccccgccacgcgccacaccgtcgatccggaccgccacatcgagcgggtcaccgagctgcaagaactcttcctcacgcgcgtcgggctcgacatcggcaaggtgtgggtcgcggacgacggcgccgcggtggcggtctggaccacgccggagagcgtcgaagcgggggcggtgttcgccgagatcggcccgcgcatggccgagttgagcggttcccggctggccgcgcagcaacagatggaaggcctcctggcgccgcaccggcccaaggagcccgcgtggttcctggccaccgtcggcgtctcgcccgaccaccagggcaagggtctgggcagcgccgtcgtgctccccggagtggaggcggccgagcgcgccggggtgcccgccttcctggagacctccgcgccccgcaacctccccttctacgagcggctcggcttcaccgtcaccgccgacgtcgaggtgcccgaaggaccgcgcacctggtgcatgacccgcaagcccggtgcctga

SEQ ID NO: 36642 - DNA, 2913 bp, synthetic construct
  source 1..2913: mol_type = other DNA
atggccttaccagtgaccgccttgctcctgccgctggccttgctgctccacgccgccaggccgctcgagatccagaaccctgatcctgccgtgtaccagctgcgggatagcaagagcagcgacaagagcgtgtgtctgttcaccgacttcgacagccagaccaacgtgtcccagagcaaggactccgacgtgtacatcaccgataagaccgtgctggacatgcggagcatggacttcaagagcaactccgccgtggcctggtccaacaagtccgatttcgcctgcgccaacgccttcaacaacagcattatccccgaggacacattcttcccaagccccgagagcagcgactccaccgaccacgtgaagcccaaagagacagagaacaccaagcagcccagcaagagctgccacaagcccaaggccatcgtgcacaccgagaaagtgaacatgatgagcctgaccgtgctgggcctgcggatgctgttcgccaaaaccgtggccgtgaacttcctgctgaccgccaagctgttcttcctcagggccaagcgatctggatctggagcaacaaacttctcactactcaaacaagcaggtgacgtggaggagaatcccgggcctactagcatggccttaccagtgaccgccttgctcctgccgctggccttgctgctccacgccgccaggccggacatccagatgacacagagccctagcagcctgtctgccagcgtgggagacagagtgaccatcacatgcaagagcagccagagcctgctggactccgatggcaagacctacctgaactggtatcagcagaagcccggcaaggcccctaagctgctgatctacctggtgtccaagctggatagcggcgtgcccagcagattttctggcagcggcagcggaaccgacttcaccctgacaatatccagcctccagcctgaggacttcgccacctactactgcttccaaggcacccactttccattcaccttcggccagggcaccaaggtggaaatcaaaagaggcggaggcggaagtggaggcggaggatctggcggcggaggctctgaagtgcagctggttgaatcaggcggaggactggttcagcctggcggatctctgagactgtcttgtgccgccagcggctacaccttcagcagctactggatgaactgggtccgacaggcccctggcaaaggactggaatgggtcggaatgatcgaccccagcgacagcgagacacactacaaccacatcttcaaggaccgcttcaccatcagcgccgacaccagcaagaataccgcctacctccagatgaactccctgagagccgaggacaccgccgtgtactactgcgccagaaacctgtatctgtggggccagggaaccctggtcacagtgtcatctacgcgtgaggacctgaagaacgtgttcccacctgaggtggccgtgttcgagcctagcgaggccgagatcagccacacccagaaagccaccctcgtgtgcctggctaccggcttctaccccgaccatgtggaactgtcttggtgggtcaacggcaaagaggtgcacagcggcgtgtctaccgacccccagccactgaaagaacagcccgccctgaacgacagccggtactgcctgagcagcagactgagagtgtccgccaccttctggcagaacccccggaaccacttcagatgccaggtgcagttctacggcctgagcgagaacgacgagtggacccaggacagagccaagcccgtgacccagatcgtgtctgccgaagcctggggcagagccgatgatgtgattaagatccactggcaggaaaagaagtccaacaccatcctgggcagccaggaaggcaacaccatgaagaccaacgacacctacatgaagttcagctggctgaccgtgcccgagaagtccctggacaaagaacacagatgcatcgtgcggcacgaaaacaacaagaacggcgtggaccaggaaatcatcttcccacccatcaagaccgatgtgattacaatggaccccaaggacaactgctccaaggacgccaacgataccctgctgctccagctgaccaacaccagcgcctactacatgtacttgttgctgctgctgaagtccgtggtgtacttcgccatcatcacatgctgcctgctgcggagaaccgccttctgctgcaacggcgagaagtctcgcgccaagagaagcggatctggcgtgaagcagaccctgaatttcgacctgctgaagctggctggcgacgtggaatccaacccaggcccttctagaggccatatgaccgagtacaagcccacggtgcgcctcgccacccgcgacgacgtccccagggccgtacgcaccctcgccgccgcgttcgccgactaccccgccacgcgccacaccgtcgatccggaccgccacatcgagcgggtcaccgagctgcaagaactcttcctcacgcgcgtcgggctcgacatcggcaaggtgtgggtcgcggacgacggcgccgcggtggcggtctggaccacgccggagagcgtcgaagcgggggcggtgttcgccgagatcggcccgcgcatggccgagttgagcggttcccggctggccgcgcagcaacagatggaaggcctcctggcgccgcaccggcccaaggagcccgcgtggttcctggccaccgtcggcgtctcgcccgaccaccagggcaagggtctgggcagcgccgtcgtgctccccggagtggaggcggccgagcgcgccggggtgcccgccttcctggagacctccgcgccccgcaacctccccttctacgagcggctcggcttcaccgtcaccgccgacgtcgaggtgcccgaaggaccgcgcacctggtgcatgacccgcaagcccggtgcctga

SEQ ID NO: 36643 - DNA, 2607 bp, synthetic construct
  source 1..2607: mol_type = other DNA
atggccttaccagtgaccgccttgctcctgccgctggccttgctgctccacgccgccaggccgctcgaggaggacctgaagaacgtgttcccacctgaggtggccgtgttcgagcctagcaaggccgagatcgcccacacccagaaagccaccctcgtgtgcctggctaccggcttctaccccgaccatgtggaactgtcttggtgggtcaacggcaaagaggtgcacagcggcgtgtgtaccgacccccagccactgaaagaacagcccgccctgaacgacagccggtactgcctgagcagcagactgagagtgtccgccaccttctggcagaacccccggaaccacttcagatgccaggtgcagttctacggcctgagcgagaacgacgagtggacccaggacagagccaagcccgtgacccagatcgtgtctgccgaagcctggggcagagccgattgcggcatcaccagcgccagctaccaccagggcgtgctgagcgccaccatcctgtacgagatcctgctgggcaaggccaccctgtacgccgtgctggtgtctgccctggtgctgatggctatggtcaagcggaaggacagccggggaagggccaagcgatctggatctggagcaacaaacttctcactactcaaacaagcaggtgacgtggaggagaatcccgggcctactagcatggccttaccagtgaccgccttgctcctgccgctggccttgctgctccacgccgccaggccggacatccagatgacacagagccctagcagcctgtctgccagcgtgggagacagagtgaccatcacatgcaagagcagccagagcctgctggactccgatggcaagacctacctgaactggtatcagcagaagcccggcaaggcccctaagctgctgatctacctggtgtccaagctggatagcggcgtgcccagcagattttctggcagcggcagcggaaccgacttcaccctgacaatatccagcctccagcctgaggacttcgccacctactactgcttccaaggcacccactttccattcaccttcggccagggcaccaaggtggaaatcaaaagaggcggaggcggaagtggaggcggaggatctggcggcggaggctctgaagtgcagctggttgaatcaggcggaggactggttcagcctggcggatctctgagactgtcttgtgccgccagcggctacaccttcagcagctactggatgaactgggtccgacaggcccctggcaaaggactggaatgggtcggaatgatcgaccccagcgacagcgagacacactacaaccacatcttcaaggaccgcttcaccatcagcgccgacaccagcaagaataccgcctacctccagatgaactccctgagagccgaggacaccgccgtgtactactgcgccagaaacctgtatctgtggggccagggaaccctggtcacagtgtcatctacgcgtatccagaaccctgatcctgccgtgtaccagctgcgggatagcaagagcagcgacaagagcgtgtgtctgttcaccgacttcgacagccagaccaacgtgtcccagagcaaggactccgacgtgtacatcaccgataagtgcgtgctggacatgcggagcatggacttcaagagcaactccgccgtggcctggtccaacaagtccgatttcgcctgcgccaacgccttcaacaacagcattatccccgaggacacattcttcccaagcagcgacgtgccctgcgacgtgaagctggtggaaaagagcttcgagacagacaccaacctgaacttccagaacctgagcgtgatcggcttcagaatcctgctgctgaaagtggccggctttaacctgctgatgaccctgcggctgtggtccagccgcgccaagagaagcggatctggcgtgaagcagaccctgaatttcgacctgctgaagctggctggcgacgtggaatccaacccaggcccttctagaggccatatgaccgagtacaagcccacggtgcgcctcgccacccgcgacgacgtccccagggccgtacgcaccctcgccgccgcgttcgccgactaccccgccacgcgccacaccgtcgatccggaccgccacatcgagcgggtcaccgagctgcaagaactcttcctcacgcgcgtcgggctcgacatcggcaaggtgtgggtcgcggacgacggcgccgcggtggcggtctggaccacgccggagagcgtcgaagcgggggcggtgttcgccgagatcggcccgcgcatggccgagttgagcggttcccggctggccgcgcagcaacagatggaaggcctcctggcgccgcaccggcccaaggagcccgcgtggttcctggccaccgtcggcgtctcgcccgaccaccagggcaagggtctgggcagcgccgtcgtgctccccggagtggaggcggccgagcgcgccggggtgcccgccttcctggagacctccgcgccccgcaacctccccttctacgagcggctcggcttcaccgtcaccgccgacgtcgaggtgcccgaaggaccgcgcacctggtgcatgacccgcaagcccggtgcctga

SEQ ID NO: 36644 - DNA, 2607 bp, synthetic construct
  source 1..2607: mol_type = other DNA
atggccttaccagtgaccgccttgctcctgccgctggccttgctgctccacgccgccaggccgctcgagatccagaaccctgatcctgccgtgtaccagctgcgggatagcaagagcagcgacaagagcgtgtgtctgttcaccgacttcgacagccagaccaacgtgtcccagagcaaggactccgacgtgtacatcaccgataagtgcgtgctggacatgcggagcatggacttcaagagcaactccgccgtggcctggtccaacaagtccgatttcgcctgcgccaacgccttcaacaacagcattatccccgaggacacattcttcccaagcagcgacgtgccctgcgacgtgaagctggtggaaaagagcttcgagacagacaccaacctgaacttccagaacctgagcgtgatcggcttcagaatcctgctgctgaaagtggccggctttaacctgctgatgaccctgcggctgtggtccagcagggccaagcgatctggatctggagcaacaaacttctcactactcaaacaagcaggtgacgtggaggagaatcccgggcctactagcatggccttaccagtgaccgccttgctcctgccgctggccttgctgctccacgccgccaggccggacatccagatgacacagagccctagcagcctgtctgccagcgtgggagacagagtgaccatcacatgcaagagcagccagagcctgctggactccgatggcaagacctacctgaactggtatcagcagaagcccggcaaggcccctaagctgctgatctacctggtgtccaagctggatagcggcgtgcccagcagattttctggcagcggcagcggaaccgacttcaccctgacaatatccagcctccagcctgaggacttcgccacctactactgcttccaaggcacccactttccattcaccttcggccagggcaccaaggtggaaatcaaaagaggcggaggcggaagtggaggcggaggatctggcggcggaggctctgaagtgcagctggttgaatcaggcggaggactggttcagcctggcggatctctgagactgtcttgtgccgccagcggctacaccttcagcagctactggatgaactgggtccgacaggcccctggcaaaggactggaatgggtcggaatgatcgaccccagcgacagcgagacacactacaaccacatcttcaaggaccgcttcaccatcagcgccgacaccagcaagaataccgcctacctccagatgaactccctgagagccgaggacaccgccgtgtactactgcgccagaaacctgtatctgtggggccagggaaccctggtcacagtgtcatctacgcgtgaggacctgaagaacgtgttcccacctgaggtggccgtgttcgagcctagcaaggccgagatcgcccacacccagaaagccaccctcgtgtgcctggctaccggcttctaccccgaccatgtggaactgtcttggtgggtcaacggcaaagaggtgcacagcggcgtgtgtaccgacccccagccactgaaagaacagcccgccctgaacgacagccggtactgcctgagcagcagactgagagtgtccgccaccttctggcagaacccccggaaccacttcagatgccaggtgcagttctacggcctgagcgagaacgacgagtggacccaggacagagccaagcccgtgacccagatcgtgtctgccgaagcctggggcagagccgattgcggcatcaccagcgccagctaccaccagggcgtgctgagcgccaccatcctgtacgagatcctgctgggcaaggccaccctgtacgccgtgctggtgtctgccctggtgctgatggctatggtcaagcggaaggacagccggggacgcgccaagagaagcggatctggcgtgaagcagaccctgaatttcgacctgctgaagctggctggcgacgtggaatccaacccaggcccttctagaggccatatgaccgagtacaagcccacggtgcgcctcgccacccgcgacgacgtccccagggccgtacgcaccctcgccgccgcgttcgccgactaccccgccacgcgccacaccgtcgatccggaccgccacatcgagcgggtcaccgagctgcaagaactcttcctcacgcgcgtcgggctcgacatcggcaaggtgtgggtcgcggacgacggcgccgcggtggcggtctggaccacgccggagagcgtcgaagcgggggcggtgttcgccgagatcggcccgcgcatggccgagttgagcggttcccggctggccgcgcagcaacagatggaaggcctcctggcgccgcaccggcccaaggagcccgcgtggttcctggccaccgtcggcgtctcgcccgaccaccagggcaagggtctgggcagcgccgtcgtgctccccggagtggaggcggccgagcgcgccggggtgcccgccttcctggagacctccgcgccccgcaacctccccttctacgagcggctcggcttcaccgtcaccgccgacgtcgaggtgcccgaaggaccgcgcacctggtgcatgacccgcaagcccggtgcctga

SEQ ID NO: 36645 - DNA, 2286 bp, synthetic construct
  source 1..2286: mol_type = other DNA
atggccttaccagtgaccgccttgctcctgccgctggccttgctgctccacgccgccaggccgctcgagcagagttttgggttgttggaccctaaattgtgctatctgttggacggaatcctgttcatttacggagtgatcctgaccgcattgttcctgcgggttaagttttccagatccgcagacgcacccgcttaccaacaagggcagaaccaactctacaatgaacttaatttggggcggagggaagagtacgacgttctggacaaaaggaggggacgagatcccgagatgggcggaaagcctcagcgaaggaagaatccgcaagaggggctttataacgaactccagaaagataaaatggcagaagcctatagtgagattgggatgaagggagaaaggaggaggggtaaaggtcacgatgggttgtaccaaggattgagcacagccactaaagatacctatgatgcgctccacatgcaggccctgccgccaagaagggccaagcgatctggatctggagcaacaaacttctcactactcaaacaagcaggtgacgtggaggagaatcccgggcctactagcatggccttaccagtgaccgccttgctcctgccgctggccttgctgctccacgccgccaggccggacatccagatgacacagagccctagcagcctgtctgccagcgtgggagacagagtgaccatcacatgcaagagcagccagagcctgctggactccgatggcaagacctacctgaactggtatcagcagaagcccggcaaggcccctaagctgctgatctacctggtgtccaagctggatagcggcgtgcccagcagattttctggcagcggcagcggaaccgacttcaccctgacaatatccagcctccagcctgaggacttcgccacctactactgcttccaaggcacccactttccattcaccttcggccagggcaccaaggtggaaatcaaaagaggcggaggcggaagtggaggcggaggatctggcggcggaggctctgaagtgcagctggttgaatcaggcggaggactggttcagcctggcggatctctgagactgtcttgtgccgccagcggctacaccttcagcagctactggatgaactgggtccgacaggcccctggcaaaggactggaatgggtcggaatgatcgaccccagcgacagcgagacacactacaaccacatcttcaaggaccgcttcaccatcagcgccgacaccagcaagaataccgcctacctccagatgaactccctgagagccgaggacaccgccgtgtactactgcgccagaaacctgtatctgtggggccagggaaccctggtcacagtgtcatctacgcgtgagctgggagagcctcagctgtgctatatcctggacgccatcctgtttctgtacggcatcgtgctgaccctgctgtactgccggctgaagatccaagtgcggaaggccgccatcaccagctacgagaaatccgacggcgtgtacaccggcctgagcaccagaaatcaagagacatacgagacactgaagcacgaaaagcctccacaacgcgccaagagaagcggatctggcgtgaagcagaccctgaatttcgacctgctgaagctggctggcgacgtggaatccaacccaggcccttctagaggccatatgaccgagtacaagcccacggtgcgcctcgccacccgcgacgacgtccccagggccgtacgcaccctcgccgccgcgttcgccgactaccccgccacgcgccacaccgtcgatccggaccgccacatcgagcgggtcaccgagctgcaagaactcttcctcacgcgcgtcgggctcgacatcggcaaggtgtgggtcgcggacgacggcgccgcggtggcggtctggaccacgccggagagcgtcgaagcgggggcggtgttcgccgagatcggcccgcgcatggccgagttgagcggttcccggctggccgcgcagcaacagatggaaggcctcctggcgccgcaccggcccaaggagcccgcgtggttcctggccaccgtcggcgtctcgcccgaccaccagggcaagggtctgggcagcgccgtcgtgctccccggagtggaggcggccgagcgcgccggggtgcccgccttcctggagacctccgcgccccgcaacctccccttctacgagcggctcggcttcaccgtcaccgccgacgtcgaggtgcccgaaggaccgcgcacctggtgcatgacccgcaagcccggtgcctga

SEQ ID NO: 36646 - DNA, 2919 bp, synthetic construct; identical to SEQ ID NO: 36637
  source 1..2919: mol_type = other DNA

SEQ ID NO: 36647 - DNA, 2919 bp, synthetic construct; identical to SEQ ID NO: 36638
  source 1..2919: mol_type = other DNA

SEQ ID NO: 36648 - DNA, 2916 bp, synthetic construct
  source 1..2916: mol_type = other DNA
atggccttaccagtgaccgccttgctcctgccgctggccttgctgctccacgccgccaggccgctcgaggaggaggacctgaagaacgtgttcccacctgaggtggccgtgttcgagcctagcgaggccgagatcagccacacccagaaagccaccctcgtgtgcctggctaccggcttctaccccgaccatgtggaactgtcttggtgggtcaacggcaaagaggtgcacagcggcgtgtgtaccgacccccagccactgaaagaacagcccgccctgaacgacagccggtactgcctgagcagcagactgagagtgtccgccaccttctggcagaacccccggaaccacttcagatgccaggtgcagttctacggcctgagcgagaacgacgagtggacccaggacagagccaagcccgtgacccagatcgtgtctgccgaagcctggggcagagccgatgatgtgattaagatccactggcaggaaaagaagtccaacaccatcctgggcagccaggaaggcaacaccatgaagaccaacgacacctacatgaagttcagctggctgaccgtgcccgagaagtccctggacaaagaacacagatgcatcgtgcggcacgaaaacaacaagaacggcgtggaccaggaaatcatcttcccacccatcaagaccgatgtgattacaatggaccccaaggacaactgctccaaggacgccaacgataccctgctgctccagctgaccaacaccagcgcctactacatgtacttgttgctgctgctgaagtccgtggtgtacttcgccatcatcacatgctgcctgctgcggagaaccgccttctgctgcaacggcgagaagtctagggccaagcgatctggatctggagcaacaaacttctcactactcaaacaagcaggtgacgtggaggagaatcccgggcctactagcatggccttaccagtgaccgccttgctcctgccgctggccttgctgctccacgccgccaggccggacatccagatgacacagagccctagcagcctgtctgccagcgtgggagacagagtgaccatcacatgcaagagcagccagagcctgctggactccgatggcaagacctacctgaactggtatcagcagaagcccggcaaggcccctaagctgctgatctacctggtgtccaagctggatagcggcgtgcccagcagattttctggcagcggcagcggaaccgacttcaccctgacaatatccagcctccagcctgaggacttcgccacctactactgcttccaaggcacccactttccattcaccttcggccagggcaccaaggtggaaatcaaaagaggcggaggcggaagtggaggcggaggatctggcggcggaggctctgaagtgcagctggttgaatcaggcggaggactggttcagcctggcggatctctgagactgtcttgtgccgccagcggctacaccttcagcagctactggatgaactgggtccgacaggcccctggcaaaggactggaatgggtcggaatgatcgaccccagcgacagcgagacacactacaaccacatcttcaaggaccgcttcaccatcagcgccgacaccagcaagaataccgcctacctccagatgaactccctgagagccgaggacaccgccgtgtactactgcgccagaaacctgtatctgtggggccagggaaccctggtcacagtgtcatctacgcgtatccagaaccctgatcctgccgtgtaccagctgcgggatagcaagagcagcgacaagagcgtgtgtctgttcaccgacttcgacagccagaccaacgtgtcccagagcaaggactccgacgtgtacatcaccgataagtgcgtgctggacatgcggagcatggacttcaagagcaactccgccgtggcctggtccaacaagtccgatttcgcctgcgccaacgccttcaacaacagcattatccccgaggacacattcttcccaagccccgagagcagcgactccaccgaccacgtgaagcccaaagagacagagaacaccaagcagcccagcaagagctgccacaagcccaaggccatcgtgcacaccgagaaagtgaacatgatgagcctgaccgtgctgggcctgcggatgctgttcgccaaaaccgtggccgtgaacttcctgctgaccgccaagctgttcttcctccgcgccaagagaagcggatctggcgtgaagcagaccctgaatttcgacctgctgaagctggctggcgacgtggaatccaacccaggcccttctagaggccatatgaccgagtacaagcccacggtgcgcctcgccacccgcgacgacgtccccagggccgtacgcaccctcgccgccgcgttcgccgactaccccgccacgcgccacaccgtcgatccggaccgccacatcgagcgggtcaccgagctgcaagaactcttcctcacgcgcgtcgggctcgacatcggcaaggtgtgggtcgcggacgacggcgccgcggtggcggtctggaccacgccggagagcgtcgaagcgggggcggtgttcgccgagatcggcccgcgcatggccgagttgagcggttcccggctggccgcgcagcaacagatggaaggcctcctggcgccgcaccggcccaaggagcccgcgtggttcctggccaccgtcggcgtctcgcccgaccaccagggcaagggtctgggcagcgccgtcgtgctccccggagtggaggcggccgagcgcgccggggtgcccgccttcctggagacctccgcgccccgcaacctccccttctacgagcggctcggcttcaccgtcaccgccgacgtcgaggtgcccgaaggaccgcgcacctggtgcatgacccgcaagcccggtgcctga

SEQ ID NO: 36649 - DNA, 2916 bp, synthetic construct
  source 1..2916: mol_type = other DNA
atggccttaccagtgaccgccttgctcctgccgctggccttgctgctccacgccgccaggccgctcgagatccagaaccctgatcctgccgtgtaccagctgcgggatagcaagagcagcgacaagagcgtgtgtctgttcaccgacttcgacagccagaccaacgtgtcccagagcaaggactccgacgtgtacatcaccgataagtgcgtgctggacatgcggagcatggacttcaagagcaactccgccgtggcctggtccaacaagtccgatttcgcctgcgccaacgccttcaacaacagcattatccccgaggacacattcttcccaagccccgagagcagcgactccaccgaccacgtgaagcccaaagagacagagaacaccaagcagcccagcaagagctgccacaagcccaaggccatcgtgcacaccgagaaagtgaacatgatgagcctgaccgtgctgggcctgcggatgctgttcgccaaaaccgtggccgtgaacttcctgctgaccgccaagctgttcttcctcagggccaagcgatctggatctggagcaacaaacttctcactactcaaacaagcaggtgacgtggaggagaatcccgggcctactagcatggccttaccagtgaccgccttgctcctgccgctggccttgctgctccacgccgccaggccggacatccagatgacacagagccctagcagcctgtctgccagcgtgggagacagagtgaccatcacatgcaagagcagccagagcctgctggactccgatggcaagacctacctgaactggtatcagcagaagcccggcaaggcccctaagctgctgatctacctggtgtccaagctggatagcggcgtgcccagcagattttctggcagcggcagcggaaccgacttcaccctgacaatatccagcctccagcctgaggacttcgccacctactactgcttccaaggcacccactttccattcaccttcggccagggcaccaaggtggaaatcaaaagaggcggaggcggaagtggaggcggaggatctggcggcggaggctctgaagtgcagctggttgaatcaggcggaggactggttcagcctggcggatctctgagactgtcttgtgccgccagcggctacaccttcagcagctactggatgaactgggtccgacaggcccctggcaaaggactggaatgggtcggaatgatcgaccccagcgacagcgagacacactacaaccacatcttcaaggaccgcttcaccatcagcgccgacaccagcaagaataccgcctacctccagatgaactccctgagagccgaggacaccgccgtgtactactgcgccagaaacctgtatctgtggggccagggaaccctggtcacagtgtcatctacgcgtgaggaggacctgaagaacgtgttcccacctgaggtggccgtgttcgagcctagcgaggccgagatcagccacacccagaaagccaccctcgtgtgcctggctaccggcttctaccccgaccatgtggaactgtcttggtgggtcaacggcaaagaggtgcacagcggcgtgtgtaccgacccccagccactgaaagaacagcccgccctgaacgacagccggtactgcctgagcagcagactgagagtgtccgccaccttctggcagaacccccggaaccacttcagatgccaggtgcagttctacggcctgagcgagaacgacgagtggacccaggacagagccaagcccgtgacccagatcgtgtctgccgaagcctggggcagagccgatgatgtgattaagatccactggcaggaaaagaagtccaacaccatcctgggcagccaggaaggcaacaccatgaagaccaacgacacctacatgaagttcagctggctgaccgtgcccgagaagtccctggacaaagaacacagatgcatcgtgcggcacgaaaacaacaagaacggcgtggaccaggaaatcatcttcccacccatcaagaccgatgtgattacaatggaccccaaggacaactgctccaaggacgccaacgataccctgctgctccagctgaccaacaccagcgcctactacatgtacttgttgctgctgctgaagtccgtggtgtacttcgccatcatcacatgctgcctgctgcggagaaccgccttctgctgcaacggcgagaagtctcgcgccaagagaagcggatctggcgtgaagcagaccctgaatttcgacctgctgaagctggctggcgacgtggaatccaacccaggcccttctagaggccatatgaccgagtacaagcccacggtgcgcctcgccacccgcgacgacgtccccagggccgtacgcaccctcgccgccgcgttcgccgactaccccgccacgcgccacaccgtcgatccggaccgccacatcgagcgggtcaccgagctgcaagaactcttcctcacgcgcgtcgggctcgacatcggcaaggtgtgggtcgcggacgacggcgccgcggtggcggtctggaccacgccggagagcgtcgaagcgggggcggtgttcgccgagatcggcccgcgcatggccgagttgagcggttcccggctggccgcgcagcaacagatggaaggcctcctggcgccgcaccggcccaaggagcccgcgtggttcctggccaccgtcggcgtctcgcccgaccaccagggcaagggtctgggcagcgccgtcgtgctccccggagtggaggcggccgagcgcgccggggtgcccgccttcctggagacctccgcgccccgcaacctccccttctacgagcggctcggcttcaccgtcaccgccgacgtcgaggtgcccgaaggaccgcgcacctggtgcatgacccgcaagcccggtgcctga

SEQ ID NO: 36650 - DNA, 2607 bp, synthetic construct
  source 1..2607: mol_type = other DNA
atggccttaccagtgaccgccttgctcctgccgctggccttgctgctccacgccgccaggccgctcgaggaggacctgaagaacgtgttcccacctgaggtggccgtgttcgagcctagcgaggccgagatcagccacacccagaaagccaccctcgtgtgcctggctaccggcttctaccccgaccatgtggaactgtcttggtgggtcaacggcaaagaggtgcacagcggcgtgtctaccgacccccagccactgaaagaacagcccgccctgaacgacagccggtactgcctgagcagcagactgagagtgtccgccaccttctggcagaacccccggaaccacttcagatgccaggtgcagttctacggcctgagcgagaacgacgagtggacccaggacagagccaagcccgtgacccagatcgtgtctgccgaagcctggggcagagccgattgcggctttaccagcgagagctaccagcagggcgtgctgagcgccaccaacctgagcgtgatcggcttcagaatcctgctgctgaaagtggccggctttaacctgctgatgaccctgcggctgtggtccagcagggccaagcgatctggatctggagcaacaaacttctcactactcaaacaagcaggtgacgtggaggagaatcccgggcctactagcatggccttaccagtgaccgccttgctcctgccgctggccttgctgctccacgccgccaggccggacatccagatgacacagagccctagcagcctgtctgccagcgtgggagacagagtgaccatcacatgcaagagcagccagagcctgctggactccgatggcaagacctacctgaactggtatcagcagaagcccggcaaggcccctaagctgctgatctacctggtgtccaagctggatagcggcgtgcccagcagattttctggcagcggcagcggaaccgacttcaccctgacaatatccagcctccagcctgaggacttcgccacctactactgcttccaaggcacccactttccattcaccttcggccagggcaccaaggtggaaatcaaaagaggcggaggcggaagtggaggcggaggatctggcggcggaggctctgaagtgcagctggttgaatcaggcggaggactggttcagcctggcggatctctgagactgtcttgtgccgccagcggctacaccttcagcagctactggatgaactgggtccgacaggcccctggcaaaggactggaatgggtcggaatgatcgaccccagcgacagcgagacacactacaaccacatcttcaaggaccgcttcaccatcagcgccgacaccagcaagaataccgcctacctccagatgaactccctgagagccgaggacaccgccgtgtactactgcgccagaaacctgtatctgtggggccagggaaccctggtcacagtgtcatctacgcgtatccagaaccctgatcctgccgtgtaccagctgcgggatagcaagagcagcgacaagagcgtgtgtctgttcaccgacttcgacagccagaccaacgtgtcccagagcaaggactccgacgtgtacatcaccgataagaccgtgctggacatgcggagcatggacttcaagagcaactccgccgtggcctggtccaacaagtccgatttcgcctgcgccaacgccttcaacaacagcattatccccgaggacacattcttcccaagccccgagagcagctgcgacgtgaagctggtggaaaagagcttcgagacagacaccaacctgaacttccagatcctgtacgagatcctgctgggcaaggccaccctgtacgccgtgctggtgtctgccctggtgctgatggctatggtcaagcggaaggacagccggggacgcgccaagagaagcggatctggcgtgaagcagaccctgaatttcgacctgctgaagctggctggcgacgtggaatccaacccaggcccttctagaggccatatgaccgagtacaagcccacggtgcgcctcgccacccgcgacgacgtccccagggccgtacgcaccctcgccgccgcgttcgccgactaccccgccacgcgccacaccgtcgatccggaccgccacatcgagcgggtcaccgagctgcaagaactcttcctcacgcgcgtcgggctcgacatcggcaaggtgtgggtcgcggacgacggcgccgcggtggcggtctggaccacgccggagagcgtcgaagcgggggcggtgttcgccgagatcggcccgcgcatggccgagttgagcggttcccggctggccgcgcagcaacagatggaaggcctcctggcgccgcaccggcccaaggagcccgcgtggttcctggccaccgtcggcgtctcgcccgaccaccagggcaagggtctgggcagcgccgtcgtgctccccggagtggaggcggccgagcgcgccggggtgcccgccttcctggagacctccgcgccccgcaacctccccttctacgagcggctcggcttcaccgtcaccgccgacgtcgaggtgcccgaaggaccgcgcacctggtgcatgacccgcaagcccggtgcctga

SEQ ID NO: 36651 - DNA, 2607 bp, synthetic construct
  source 1..2607: mol_type = other DNA
atggccttaccagtgaccgccttgctcctgccgctggccttgctgctccacgccgccaggccgctcgagatccagaaccctgatcctgccgtgtaccagctgcgggatagcaagagcagcgacaagagcgtgtgtctgttcaccgacttcgacagccagaccaacgtgtcccagagcaaggactccgacgtgtacatcaccgataagaccgtgctggacatgcggagcatggacttcaagagcaactccgccgtggcctggtccaacaagtccgatttcgcctgcgccaacgccttcaacaacagcattatccccgaggacacattcttcccaagccccgagagcagctgcgacgtgaagctggtggaaaagagcttcgagacagacaccaacctgaacttccagatcctgtacgagatcctgctgggcaaggccaccctgtacgccgtgctggtgtctgccctggtgctgatggctatggtcaagcggaaggacagccggggaagggccaagcgatctggatctggagcaacaaacttctcactactcaaacaagcaggtgacgtggaggagaatcccgggcctactagcatggccttaccagtgaccgccttgctcctgccgctggccttgctgctccacgccgccaggccggacatccagatgacacagagccctagcagcctgtctgccagcgtgggagacagagtgaccatcacatgcaagagcagccagagcctgctggactccgatggcaagacctacctgaactggtatcagcagaagcccggcaaggcccctaagctgctgatctacctggtgtccaagctggatagcggcgtgcccagcagattttctggcagcggcagcggaaccgacttcaccctgacaatatccagcctccagcctgaggacttcgccacctactactgcttccaaggcacccactttccattcaccttcggccagggcaccaaggtggaaatcaaaagaggcggaggcggaagtggaggcggaggatctggcggcggaggctctgaagtgcagctggttgaatcaggcggaggactggttcagcctggcggatctctgagactgtcttgtgccgccagcggctacaccttcagcagctactggatgaactgggtccgacaggcccctggcaaaggactggaatgggtcggaatgatcgaccccagcgacagcgagacacactacaaccacatcttcaaggaccgcttcaccatcagcgccgacaccagcaagaataccgcctacctccagatgaactccctgagagccgaggacaccgccgtgtactactgcgccagaaacctgtatctgtggggccagggaaccctggtcacagtgtcatctacgcgtgaggacctgaagaacgtgttcccacctgaggtggccgtgttcgagcctagcgaggccgagatcagccacacccagaaagccaccctcgtgtgcctggctaccggcttctaccccgaccatgtggaactgtcttggtgggtcaacggcaaagaggtgcacagcggcgtgtctaccgacccccagccactgaaagaacagcccgccctgaacgacagccggtactgcctgagcagcagactgagagtgtccgccaccttctggcagaacccccggaaccacttcagatgccaggtgcagttctacggcctgagcgagaacgacgagtggacccaggacagagccaagcccgtgacccagatcgtgtctgccgaagcctggggcagagccgattgcggctttaccagcgagagctaccagcagggcgtgctgagcgccaccaacctgagcgtgatcggcttcagaatcctgctgctgaaagtggccggctttaacctgctgatgaccctgcggctgtggtccagccgcgccaagagaagcggatctggcgtgaagcagaccctgaatttcgacctgctgaagctggctggcgacgtggaatccaacccaggcccttctagaggccatatgaccgagtacaagcccacggtgcgcctcgccacccgcgacgacgtccccagggccgtacgcaccctcgccgccgcgttcgccgactaccccgccacgcgccacaccgtcgatccggaccgccacatcgagcgggtcaccgagctgcaagaactcttcctcacgcgcgtcgggctcgacatcggcaaggtgtgggtcgcggacgacggcgccgcggtggcggtctggaccacgccggagagcgtcgaagcgggggcggtgttcgccgagatcggcccgcgcatggccgagttgagcggttcccggctggccgcgcagcaacagatggaaggcctcctggcgccgcaccggcccaaggagcccgcgtggttcctggccaccgtcggcgtctcgcccgaccaccagggcaagggtctgggcagcgccgtcgtgctccccggagtggaggcggccgagcgcgccggggtgcccgccttcctggagacctccgcgccccgcaacctccccttctacgagcggctcggcttcaccgtcaccgccgacgtcgaggtgcccgaaggaccgcgcacctggtgcatgacccgcaagcccggtgcctga

SEQ ID NO: 36652 - DNA, 2607 bp, synthetic construct
  source 1..2607: mol_type = other DNA
atggccttaccagtgaccgccttgctcctgccgctggccttgctgctccacgccgccaggccgctcgaggaggacctgaagaacgtgttcccacctgaggtggccgtgttcgagcctagcgaggccgagatcagccacacccagaaagccaccctcgtgtgcctggctaccggcttctaccccgaccatgtggaactgtcttggtgggtcaacggcaaagaggtgcacagcggcgtgtgtaccgacccccagccactgaaagaacagcccgccctgaacgacagccggtactgcctgagcagcagactgagagtgtccgccaccttctggcagaacccccggaaccacttcagatgccaggtgcagttctacggcctgagcgagaacgacgagtggacccaggacagagccaagcccgtgacccagatcgtgtctgccgaagcctggggcagagccgattgcgacgtgaagctggtggaaaagagcttcgagacagacaccaacctgaacttccagaacctgagcgtgatcggcttcagaatcctgctgctgaaagtggccggctttaacctgctgatgaccctgcggctgtggtccagcagggccaagcgatctggatctggagcaacaaacttctcactactcaaacaagcaggtgacgtggaggagaatcccgggcctactagcatggccttaccagtgaccgccttgctcctgccgctggccttgctgctccacgccgccaggccggacatccagatgacacagagccctagcagcctgtctgccagcgtgggagacagagtgaccatcacatgcaagagcagccagagcctgctggactccgatggcaagacctacctgaactggtatcagcagaagcccggcaaggcccctaagctgctgatctacctggtgtccaagctggatagcggcgtgcccagcagattttctggcagcggcagcggaaccgacttcaccctgacaatatccagcctccagcctgaggacttcgccacctactactgcttccaaggcacccactttccattcaccttcggccagggcaccaaggtggaaatcaaaagaggcggaggcggaagtggaggcggaggatctggcggcggaggctctgaagtgcagctggttgaatcaggcggaggactggttcagcctggcggatctctgagactgtcttgtgccgccagcggctacaccttcagcagctactggatgaactgggtccgacaggcccctggcaaaggactggaatgggtcggaatgatcgaccccagcgacagcgagacacactacaaccacatcttcaaggaccgcttcaccatcagcgccgacaccagcaagaataccgcctacctccagatgaactccctgagagccgaggacaccgccgtgtactactgcgccagaaacctgtatctgtggggccagggaaccctggtcacagtgtcatctacgcgtatccagaaccctgatcctgccgtgtaccagctgcgggatagcaagagcagcgacaagagcgtgtgtctgttcaccgacttcgacagccagaccaacgtgtcccagagcaaggactccgacgtgtacatcaccgataagtgcgtgctggacatgcggagcatggacttcaagagcaactccgccgtggcctggtccaacaagtccgatttcgcctgcgccaacgccttcaacaacagcattatccccgaggacacattcttcccaagccccgagagcagctgcggctttaccagcgagagctaccagcagggcgtgctgagcgccaccatcctgtacgagatcctgctgggcaaggccaccctgtacgccgtgctggtgtctgccctggtgctgatggctatggtcaagcggaaggacagccggggacgcgccaagagaagcggatctggcgtgaagcagaccctgaatttcgacctgctgaagctggctggcgacgtggaatccaacccaggcccttctagaggccatatgaccgagtacaagcccacggtgcgcctcgccacccgcgacgacgtccccagggccgtacgcaccctcgccgccgcgttcgccgactaccccgccacgcgccacaccgtcgatccggaccgccacatcgagcgggtcaccgagctgcaagaactcttcctcacgcgcgtcgggctcgacatcggcaaggtgtgggtcgcggacgacggcgccgcggtggcggtctggaccacgccggagagcgtcgaagcgggggcggtgttcgccgagatcggcccgcgcatggccgagttgagcggttcccggctggccgcgcagcaacagatggaaggcctcctggcgccgcaccggcccaaggagcccgcgtggttcctggccaccgtcggcgtctcgcccgaccaccagggcaagggtctgggcagcgccgtcgtgctccccggagtggaggcggccgagcgcgccggggtgcccgccttcctggagacctccgcgccccgcaacctccccttctacgagcggctcggcttcaccgtcaccgccgacgtcgaggtgcccgaaggaccgcgcacctggtgcatgacccgcaagcccggtgcctga

SEQ ID NO: 36653 - DNA, 2607 bp, synthetic construct
  source 1..2607: mol_type = other DNA
atggccttaccagtgaccgccttgctcctgccgctggccttgctgctccacgccgccaggccgctcgaggaggacctgaagaacgtgttcccacctgaggtggccgtgttcgagcctagcgaggccgagatcagccacacccagaaagccaccctcgtgtgcctggctaccggcttctaccccgaccatgtggaactgtcttggtgggtcaacggcaaagaggtgcacagcggcgtgtctaccgacccccagccactgaaagaacagcccgccctgaacgacagccggtactgcctgagcagcagactgagagtgtccgccaccttctggcagaacccccggaaccacttcagatgccaggtgcagttctacggcctgagcgagaacgacgagtggacccaggacagagccaagcccgtgacccagatcgtgtctgccgaagcctggggcagagccgattgcgacgtgaagctggtggaaaagagcttcgagacagacaccaacctgaacttccagaacctgagcgtgatcggcttcagaatcctgctgctgaaagtggccggctttaacctgctgatgaccctgcggctgtggtccagcagggccaagcgatctggatctggagcaacaaacttctcactactcaaacaagcaggtgacgtggaggagaatcccgggcctactagcatggccttaccagtgaccgccttgctcctgccgctggccttgctgctccacgccgccaggccggacatccagatgacacagagccctagcagcctgtctgccagcgtgggagacagagtgaccatcacatgcaagagcagccagagcctgctggactccgatggcaagacctacctgaactggtatcagcagaagcccggcaaggcccctaagctgctgatctacctggtgtccaagctggatagcggcgtgcccagcagattttctggcagcggcagcggaaccgacttcaccctgacaatatccagcctccagcctgaggacttcgccacctactactgcttccaaggcacccactttccattcaccttcggccagggcaccaaggtggaaatcaaaagaggcggaggcggaagtggaggcggaggatctggcggcggaggctctgaagtgcagctggttgaatcaggcggaggactggttcagcctggcggatctctgagactgtcttgtgccgccagcggctacaccttcagcagctactggatgaactgggtccgacaggcccctggcaaaggactggaatgggtcggaatgatcgaccccagcgacagcgagacacactacaaccacatcttcaaggaccgcttcaccatcagcgccgacaccagcaagaataccgcctacctccagatgaactccctgagagccgaggacaccgccgtgtactactgcgccagaaacctgtatctgtggggccagggaaccctggtcacagtgtcatctacgcgtatccagaaccctgatcctgccgtgtaccagctgcgggatagcaagagcagcgacaagagcgtgtgtctgttcaccgacttcgacagccagaccaacgtgtcccagagcaaggactccgacgtgtacatcaccgataagaccgtgctggacatgcggagcatggacttcaagagcaactccgccgtggcctggtccaacaagtccgatttcgcctgcgccaacgccttcaacaacagcattatccccgaggacacattcttcccaagccccgagagcagctgcggctttaccagcgagagctaccagcagggcgtgctgagcgccaccatcctgtacgagatcctgctgggcaaggccaccctgtacgccgtgctggtgtctgccctggtgctgatggctatggtcaagcggaaggacagccggggacgcgccaagagaagcggatctggcgtgaagcagaccctgaatttcgacctgctgaagctggctggcgacgtggaatccaacccaggcccttctagaggccatatgaccgagtacaagcccacggtgcgcctcgccacccgcgacgacgtccccagggccgtacgcaccctcgccgccgcgttcgccgactaccccgccacgcgccacaccgtcgatccggaccgccacatcgagcgggtcaccgagctgcaagaactcttcctcacgcgcgtcgggctcgacatcggcaaggtgtgggtcgcggacgacggcgccgcggtggcggtctggaccacgccggagagcgtcgaagcgggggcggtgttcgccgagatcggcccgcgcatggccgagttgagcggttcccggctggccgcgcagcaacagatggaaggcctcctggcgccgcaccggcccaaggagcccgcgtggttcctggccaccgtcggcgtctcgcccgaccaccagggcaagggtctgggcagcgccgtcgtgctccccggagtggaggcggccgagcgcgccggggtgcccgccttcctggagacctccgcgccccgcaacctccccttctacgagcggctcggcttcaccgtcaccgccgacgtcgaggtgcccgaaggaccgcgcacctggtgcatgacccgcaagcccggtgcctga

SEQ ID NO: 36654 - DNA, 2916 bp, synthetic construct
  source 1..2916: mol_type = other DNA
atggccttaccagtgaccgccttgctcctgccgctggccttgctgctccacgccgccaggccgctcgaggaggaggacctgaagaacgtgttcccacctgaggtggccgtgttcgagcctagcgaggccgagatcagccacacccagaaagccaccctcgtgtgcctggctaccggcttctaccccgaccatgtggaactgtcttggtgggtcaacggcaaagaggtgcacagcggcgtgtctaccgacccccagccactgaaagaacagcccgccctgaacgacagccggtactgcctgagcagcagactgagagtgtccgccaccttctggcagaacccccggaaccacttcagatgccaggtgcagttctacggcctgagcgagaacgacgagtggacccaggacagagccaagcccgtgacccagatcgtgtctgccgaagcctggggcagagccgatgatgtgattaagatccactggcaggaaaagaagtccaacaccatcctgggcagccaggaaggcaacaccatgaagaccaacgacacctacatgaagttcagctggctgaccgtgcccgagaagtccctggacaaagaacacagatgcatcgtgcggcacgaaaacaacaagaacggcgtggaccaggaaatcatcttcccacccatcaagaccgatgtgattacaatggaccccaaggacaactgctccaaggacgccaacgataccctgctgctccagctgaccaacaccagcgcctactacatgtacttgttgctgctgctgaagtccgtggtgtacttcgccatcatcacatgctgcctgctgcggagaaccgccttctgctgcaacggcgagaagtctagggccaagcgatctggatctggagcaacaaacttctcactactcaaacaagcaggtgacgtggaggagaatcccgggcctactagcatggccttaccagtgaccgccttgctcctgccgctggccttgctgctccacgccgccaggccggacatccagatgacacagagccctagcagcctgtctgccagcgtgggagacagagtgaccatcacatgcaagagcagccagagcctgctggactccgatggcaagacctacctgaactggtatcagcagaagcccggcaaggcccctaagctgctgatctacctggtgtccaagctggatagcggcgtgcccagcagattttctggcagcggcagcggaaccgacttcaccctgacaatatccagcctccagcctgaggacttcgccacctactactgcttccaaggcacccactttccattcaccttcggccagggcaccaaggtggaaatcaaaagaggcggaggcggaagtggaggcggaggatctggcggcggaggctctgaagtgcagctggttgaatcaggcggaggactggttcagcctggcggatctctgagactgtcttgtgccgccagcggctacaccttcagcagctactggatgaactgggtccgacaggcccctggcaaaggactggaatgggtcggaatgatcgaccccagcgacagcgagacacactacaaccacatcttcaaggaccgcttcaccatcagcgccgacaccagcaagaataccgcctacctccagatgaactccctgagagccgaggacaccgccgtgtactactgcgccagaaacctgtatctgtggggccagggaaccctggtcacagtgtcatctacgcgtatccagaaccctgatcctgccgtgtaccagctgcgggatagcaagagcagcgacaagagcgtgtgtctgttcaccgacttcgacagccagaccaacgtgtcccagagcaaggactccgacgtgtacatcaccgataagaccgtgctggacatgcggagcatggacttcaagagcaactccgccgtggcctggtccaacaagtccgatttcgcctgcgccaacgccttcaacaacagcattatccccgaggacacattcttcccaagccccgagagcagcgactccaccgaccacgtgaagcccaaagagacagagaacaccaagcagcccagcaagagctgccacaagcccaaggccatcgtgcacaccgagaaagtgaacatgatgagcctgaccgtgctgggcctgcggatgctgttcgccaaaaccgtggccgtgaacttcctgctgaccgccaagctgttcttcctccgcgccaagagaagcggatctggcgtgaagcagaccctgaatttcgacctgctgaagctggctggcgacgtggaatccaacccaggcccttctagaggccatatgaccgagtacaagcccacggtgcgcctcgccacccgcgacgacgtccccagggccgtacgcaccctcgccgccgcgttcgccgactaccccgccacgcgccacaccgtcgatccggaccgccacatcgagcgggtcaccgagctgcaagaactcttcctcacgcgcgtcgggctcgacatcggcaaggtgtgggtcgcggacgacggcgccgcggtggcggtctggaccacgccggagagcgtcgaagcgggggcggtgttcgccgagatcggcccgcgcatggccgagttgagcggttcccggctggccgcgcagcaacagatggaaggcctcctggcgccgcaccggcccaaggagcccgcgtggttcctggccaccgtcggcgtctcgcccgaccaccagggcaagggtctgggcagcgccgtcgtgctccccggagtggaggcggccgagcgcgccggggtgcccgccttcctggagacctccgcgccccgcaacctccccttctacgagcggctcggcttcaccgtcaccgccgacgtcgaggtgcccgaaggaccgcgcacctggtgcatgacccgcaagcccggtgcctga

SEQ ID NO: 36655 - DNA, 2607 bp, synthetic construct
  source 1..2607: mol_type = other DNA
atggccttaccagtgaccgccttgctcctgccgctggccttgctgctccacgccgccaggccgctcgaggaggacctgaagaacgtgttcccacctgaggtggccgtgttcgagcctagcgaggccgagatcagccacacccagaaagccaccctcgtgtgcctggctaccggcttctaccccgaccatgtggaactgtcttggtgggtcaacggcaaagaggtgcacagcggcgtgtgtaccgacccccagccactgaaagaacagcccgccctgaacgacagccggtactgcctgagcagcagactgagagtgtccgccaccttctggcagaacccccggaaccacttcagatgccaggtgcagttctacggcctgagcgagaacgacgagtggacccaggacagagccaagcccgtgacccagatcgtgtctgccgaagcctggggcagagccgattgcggctttaccagcgagagctaccagcagggcgtgctgagcgccaccaacctgagcgtgatcggcttcagaatcctgctgctgaaagtggccggctttaacctgctgatgaccctgcggctgtggtccagcagggccaagcgatctggatctggagcaacaaacttctcactactcaaacaagcaggtgacgtggaggagaatcccgggcctactagcatggccttaccagtgaccgccttgctcctgccgctggccttgctgctccacgccgccaggccggacatccagatgacacagagccctagcagcctgtctgccagcgtgggagacagagtgaccatcacatgcaagagcagccagagcctgctggactccgatggcaagacctacctgaactggtatcagcagaagcccggcaaggcccctaagctgctgatctacctggtgtccaagctggatagcggcgtgcccagcagattttctggcagcggcagcggaaccgacttcaccctgacaatatccagcctccagcctgaggacttcgccacctactactgcttccaaggcacccactttccattcaccttcggccagggcaccaaggtggaaatcaaaagaggcggaggcggaagtggaggcggaggatctggcggcggaggctctgaagtgcagctggttgaatcaggcggaggactggttcagcctggcggatctctgagactgtcttgtgccgccagcggctacaccttcagcagctactggatgaactgggtccgacaggcccctggcaaaggactggaatgggtcggaatgatcgaccccagcgacagcgagacacactacaaccacatcttcaaggaccgcttcaccatcagcgccgacaccagcaagaataccgcctacctccagatgaactccctgagagccgaggacaccgccgtgtactactgcgccagaaacctgtatctgtggggccagggaaccctggtcacagtgtcatctacgcgtatccagaaccctgatcctgccgtgtaccagctgcgggatagcaagagcagcgacaagagcgtgtgtctgttcaccgacttcgacagccagaccaacgtgtcccagagcaaggactccgacgtgtacatcaccgataagtgcgtgctggacatgcggagcatggacttcaagagcaactccgccgtggcctggtccaacaagtccgatttcgcctgcgccaacgccttcaacaacagcattatccccgaggacacattcttcccaagccccgagagcagctgcgacgtgaagctggtggaaaagagcttcgagacagacaccaacctgaacttccagatcctgtacgagatcctgctgggcaaggccaccctgtacgccgtgctggtgtctgccctggtgctgatggctatggtcaagcggaaggacagccggggacgcgccaagagaagcggatctggcgtgaagcagaccctgaatttcgacctgctgaagctggctggcgacgtggaatccaacccaggcccttctagaggccatatgaccgagtacaagcccacggtgcgcctcgccacccgcgacgacgtccccagggccgtacgcaccctcgccgccgcgttcgccgactaccccgccacgcgccacaccgtcgatccggaccgccacatcgagcgggtcaccgagctgcaagaactcttcctcacgcgcgtcgggctcgacatcggcaaggtgtgggtcgcggacgacggcgccgcggtggcggtctggaccacgccggagagcgtcgaagcgggggcggtgttcgccgagatcggcccgcgcatggccgagttgagcggttcccggctggccgcgcagcaacagatggaaggcctcctggcgccgcaccggcccaaggagcccgcgtggttcctggccaccgtcggcgtctcgcccgaccaccagggcaagggtctgggcagcgccgtcgtgctccccggagtggaggcggccgagcgcgccggggtgcccgccttcctggagacctccgcgccccgcaacctccccttctacgagcggctcggcttcaccgtcaccgccgacgtcgaggtgcccgaaggaccgcgcacctggtgcatgacccgcaagcccggtgcctga

SEQ ID NO: 36656 - DNA, 2694 bp, synthetic construct
  source 1..2694: mol_type = other DNA
atggccttaccagtgaccgccttgctcctgccgctggccttgctgctccacgccgccaggccgctcgaggaggaggacctgaagaacgtgttcccacctgaggtggccgtgttcgagcctagcgaggccgagatcagccacacccagaaagccaccctcgtgtgcctggctaccggcttctaccccgaccatgtggaactgtcttggtgggtcaacggcaaagaggtgcacagcggcgtgtgtaccgacccccagccactgaaagaacagcccgccctgaacgacagccggtactgcctgagcagcagactgagagtgtccgccaccttctggcagaacccccggaaccacttcagatgccaggtgcagttctacggcctgagcgagaacgacgagtggacccaggacagagccaagcccgtgacccagatcgtgtctgccgaagcctggggcagagccgattgcggctttaccagcgagagctaccagcagggcgtgctgagcgccaccaacctgagcgtgatcggcttcagaatcctgctgctgaaagtggccggctttaacctgctgatgaccctgcggctgtggtccagcagggccaagcgatctggatctggagcaacaaacttctcactactcaaacaagcaggtgacgtggaggagaatcccgggcctactagcatggccttaccagtgaccgccttgctcctgccgctggccttgctgctccacgccgccaggccggacatccagatgacacagagccctagcagcctgtctgccagcgtgggagacagagtgaccatcacatgcaagagcagccagagcctgctggactccgatggcaagacctacctgaactggtatcagcagaagcccggcaaggcccctaagctgctgatctacctggtgtccaagctggatagcggcgtgcccagcagattttctggcagcggcagcggaaccgacttcaccctgacaatatccagcctccagcctgaggacttcgccacctactactgcttccaaggcacccactttccattcaccttcggccagggcaccaaggtggaaatcaaaagaggcggaggcggaagtggaggcggaggatctggcggcggaggctctgaagtgcagctggttgaatcaggcggaggactggttcagcctggcggatctctgagactgtcttgtgccgccagcggctacaccttcagcagctactggatgaactgggtccgacaggcccctggcaaaggactggaatgggtcggaatgatcgaccccagcgacagcgagacacactacaaccacatcttcaaggaccgcttcaccatcagcgccgacaccagcaagaataccgcctacctccagatgaactccctgagagccgaggacaccgccgtgtactactgcgccagaaacctgtatctgtggggccagggaaccctggtcacagtgtcatctacgcgtggacagcctaaggccaatcctaccgtgacactgttccctccaagcagcgaagaactccaggccaacaaggccacacttgtgtgcctgatctccgacttctaccctggggctgtgacagtggcttggaaggccgatggatctcctgtgaaagccggcgtggaaaccaccaagccatccaagcagagcaacaacaaatacgccgccagctcctacctgagcctgacacctgagcagtggaagtcccacagatcctacagctgccaagtgacccacgaaggcagcaccgtggaaaagacagtggcccctacagagtgcagccccatcaagaccgatgtgattacaatggaccccaaggacaactgctccaaggacgccaacgataccctgctgctccagctgaccaacaccagcgcctactacatgtacttgttgctgctgctgaagtccgtggtgtacttcgccatcatcacatgctgcctgctgcggagaaccgccttctgctgcaacggcgagaagtctcgcgccaagagaagcggatctggcgtgaagcagaccctgaatttcgacctgctgaagctggctggcgacgtggaatccaacccaggcccttctagaggccatatgaccgagtacaagcccacggtgcgcctcgccacccgcgacgacgtccccagggccgtacgcaccctcgccgccgcgttcgccgactaccccgccacgcgccacaccgtcgatccggaccgccacatcgagcgggtcaccgagctgcaagaactcttcctcacgcgcgtcgggctcgacatcggcaaggtgtgggtcgcggacgacggcgccgcggtggcggtctggaccacgccggagagcgtcgaagcgggggcggtgttcgccgagatcggcccgcgcatggccgagttgagcggttcccggctggccgcgcagcaacagatggaaggcctcctggcgccgcaccggcccaaggagcccgcgtggttcctggccaccgtcggcgtctcgcccgaccaccagggcaagggtctgggcagcgccgtcgtgctccccggagtggaggcggccgagcgcgccggggtgcccgccttcctggagacctccgcgccccgcaacctccccttctacgagcggctcggcttcaccgtcaccgccgacgtcgaggtgcccgaaggaccgcgcacctggtgcatgacccgcaagcccggtgcctga

SEQ ID NO: 36657 - DNA, 2694 bp, synthetic construct
  source 1..2694: mol_type = other DNA
atggccttaccagtgaccgccttgctcctgccgctggccttgctgctccacgccgccaggccgctcgagggacagcctaaggccaatcctaccgtgacactgttccctccaagcagcgaagaactccaggccaacaaggccacacttgtgtgcctgatctccgacttctaccctggggctgtgacagtggcttggaaggccgatggatctcctgtgaaagccggcgtggaaaccaccaagccatccaagcagagcaacaacaaatacgccgccagctcctacctgagcctgacacctgagcagtggaagtcccacagatcctacagctgccaagtgacccacgaaggcagcaccgtggaaaagacagtggcccctacagagtgcagccccatcaagaccgatgtgattacaatggaccccaaggacaactgctccaaggacgccaacgataccctgctgctccagctgaccaacaccagcgcctactacatgtacttgttgctgctgctgaagtccgtggtgtacttcgccatcatcacatgctgcctgctgcggagaaccgccttctgctgcaacggcgagaagtctagggccaagcgatctggatctggagcaacaaacttctcactactcaaacaagcaggtgacgtggaggagaatcccgggcctactagcatggccttaccagtgaccgccttgctcctgccgctggccttgctgctccacgccgccaggccggacatccagatgacacagagccctagcagcctgtctgccagcgtgggagacagagtgaccatcacatgcaagagcagccagagcctgctggactccgatggcaagacctacctgaactggtatcagcagaagcccggcaaggcccctaagctgctgatctacctggtgtccaagctggatagcggcgtgcccagcagattttctggcagcggcagcggaaccgacttcaccctgacaatatccagcctccagcctgaggacttcgccacctactactgcttccaaggcacccactttccattcaccttcggccagggcaccaaggtggaaatcaaaagaggcggaggcggaagtggaggcggaggatctggcggcggaggctctgaagtgcagctggttgaatcaggcggaggactggttcagcctggcggatctctgagactgtcttgtgccgccagcggctacaccttcagcagctactggatgaactgggtccgacaggcccctggcaaaggactggaatgggtcggaatgatcgaccccagcgacagcgagacacactacaaccacatcttcaaggaccgcttcaccatcagcgccgacaccagcaagaataccgcctacctccagatgaactccctgagagccgaggacaccgccgtgtactactgcgccagaaacctgtatctgtggggccagggaaccctggtcacagtgtcatctacgcgtgaggaggacctgaagaacgtgttcccacctgaggtggccgtgttcgagcctagcgaggccgagatcagccacacccagaaagccaccctcgtgtgcctggctaccggcttctaccccgaccatgtggaactgtcttggtgggtcaacggcaaagaggtgcacagcggcgtgtgtaccgacccccagccactgaaagaacagcccgccctgaacgacagccggtactgcctgagcagcagactgagagtgtccgccaccttctggcagaacccccggaaccacttcagatgccaggtgcagttctacggcctgagcgagaacgacgagtggacccaggacagagccaagcccgtgacccagatcgtgtctgccgaagcctggggcagagccgattgcggctttaccagcgagagctaccagcagggcgtgctgagcgccaccaacctgagcgtgatcggcttcagaatcctgctgctgaaagtggccggctttaacctgctgatgaccctgcggctgtggtccagccgcgccaagagaagcggatctggcgtgaagcagaccctgaatttcgacctgctgaagctggctggcgacgtggaatccaacccaggcccttctagaggccatatgaccgagtacaagcccacggtgcgcctcgccacccgcgacgacgtccccagggccgtacgcaccctcgccgccgcgttcgccgactaccccgccacgcgccacaccgtcgatccggaccgccacatcgagcgggtcaccgagctgcaagaactcttcctcacgcgcgtcgggctcgacatcggcaaggtgtgggtcgcggacgacggcgccgcggtggcggtctggaccacgccggagagcgtcgaagcgggggcggtgttcgccgagatcggcccgcgcatggccgagttgagcggttcccggctggccgcgcagcaacagatggaaggcctcctggcgccgcaccggcccaaggagcccgcgtggttcctggccaccgtcggcgtctcgcccgaccaccagggcaagggtctgggcagcgccgtcgtgctccccggagtggaggcggccgagcgcgccggggtgcccgccttcctggagacctccgcgccccgcaacctccccttctacgagcggctcggcttcaccgtcaccgccgacgtcgaggtgcccgaaggaccgcgcacctggtgcatgacccgcaagcccggtgcctga

SEQ ID NO: 36658 - DNA, 2685 bp, synthetic construct
  source 1..2685: mol_type = other DNA
atggccttaccagtgaccgccttgctcctgccgctggccttgctgctccacgccgccaggccgctcgaggaggcctctacaaagggaccctccgtgtttcctctggctcccagcagcaagtctacaagcggaggaacagccgctctgggctgcctggtcaaggattactttcccgagcctgtgaccgtgtcctggaatagcggagcactgacaagcggcgtgcacacctttccagccgtgctgcaaagcagcggcctgtactctctgagcagcgtggtcacagtgcctagctctagcctgggcacccagacctacatctgcaatgtgaaccacaagcctagcaacaccaaggtggacaagagagtggaacccaagagctgtcccatcaagaccgatgtgattacaatggaccccaaggacaactgctccaaggacgccaacgataccctgctgctccagctgaccaacaccagcgcctactacatgtacttgttgctgctgctgaagtccgtggtgtacttcgccatcatcacatgctgcctgctgcggagaaccgccttctgctgcaacggcgagaagtctagggccaagcgatctggatctggagcaacaaacttctcactactcaaacaagcaggtgacgtggaggagaatcccgggcctactagcatggccttaccagtgaccgccttgctcctgccgctggccttgctgctccacgccgccaggccggacatccagatgacacagagccctagcagcctgtctgccagcgtgggagacagagtgaccatcacatgcaagagcagccagagcctgctggactccgatggcaagacctacctgaactggtatcagcagaagcccggcaaggcccctaagctgctgatctacctggtgtccaagctggatagcggcgtgcccagcagattttctggcagcggcagcggaaccgacttcaccctgacaatatccagcctccagcctgaggacttcgccacctactactgcttccaaggcacccactttccattcaccttcggccagggcaccaaggtggaaatcaaaagaggcggaggcggaagtggaggcggaggatctggcggcggaggctctgaagtgcagctggttgaatcaggcggaggactggttcagcctggcggatctctgagactgtcttgtgccgccagcggctacaccttcagcagctactggatgaactgggtccgacaggcccctggcaaaggactggaatgggtcggaatgatcgaccccagcgacagcgagacacactacaaccacatcttcaaggaccgcttcaccatcagcgccgacaccagcaagaataccgcctacctccagatgaactccctgagagccgaggacaccgccgtgtactactgcgccagaaacctgtatctgtggggccagggaaccctggtcacagtgtcatctacgcgtggacagcctaaggccaatcctaccgtgacactgttccctccaagcagcgaagaactccaggccaacaaggccacacttgtgtgcctgatctccgacttctaccctggggctgtgacagtggcttggaaggccgatggatctcctgtgaaagccggcgtggaaaccaccaagccatccaagcagagcaacaacaaatacgccgccagctcctacctgagcctgacacctgagcagtggaagtcccacagatcctacagctgccaagtgacccacgaaggcagcaccgtggaaaagacagtggcccctacagagtgcagcgaagtgaaaaccgactccaccgaccacgtgaagcccaaagagacagagaacaccaagcagcccagcaagagctgccacaagcccaaggccatcgtgcacaccgagaaagtgaacatgatgagcctgaccgtgctgggcctgcggatgctgttcgccaaaaccgtggccgtgaacttcctgctgaccgccaagctgttcttcctccgcgccaagagaagcggatctggcgtgaagcagaccctgaatttcgacctgctgaagctggctggcgacgtggaatccaacccaggcccttctagaggccatatgaccgagtacaagcccacggtgcgcctcgccacccgcgacgacgtccccagggccgtacgcaccctcgccgccgcgttcgccgactaccccgccacgcgccacaccgtcgatccggaccgccacatcgagcgggtcaccgagctgcaagaactcttcctcacgcgcgtcgggctcgacatcggcaaggtgtgggtcgcggacgacggcgccgcggtggcggtctggaccacgccggagagcgtcgaagcgggggcggtgttcgccgagatcggcccgcgcatggccgagttgagcggttcccggctggccgcgcagcaacagatggaaggcctcctggcgccgcaccggcccaaggagcccgcgtggttcctggccaccgtcggcgtctcgcccgaccaccagggcaagggtctgggcagcgccgtcgtgctccccggagtggaggcggccgagcgcgccggggtgcccgccttcctggagacctccgcgccccgcaacctccccttctacgagcggctcggcttcaccgtcaccgccgacgtcgaggtgcccgaaggaccgcgcacctggtgcatgacccgcaagcccggtgcctga

SEQ ID NO: 36659 - DNA, 2619 bp, synthetic construct
  source 1..2619: mol_type = other DNA
atggccttaccagtgaccgccttgctcctgccgctggccttgctgctccacgccgccaggccgctcgaggaggcctctacaaagggaccctccgtgtttcctctggctcccagcagcaagtctacaagcggaggaacagccgctctgggctgcctggtcaaggattactttcccgagcctgtgaccgtgtcctggaatagcggagcactgacaagcggcgtgcacacctttccagccgtgctgcaaagcagcggcctgtactctctgagcagcgtggtcacagtgcctagctctagcctgggcacccagacctacatctgcaatgtgaaccacaagcctagcaacaccaaggtggacaagagagtggaacccaagagctgtggcagagccgattgcggctttaccagcgagagctaccagcagggcgtgctgagcgccaccatcctgtacgagatcctgctgggcaaggccaccctgtacgccgtgctggtgtctgccctggtgctgatggctatggtcaagcggaaggacagccggggaagggccaagcgatctggatctggagcaacaaacttctcactactcaaacaagcaggtgacgtggaggagaatcccgggcctactagcatggccttaccagtgaccgccttgctcctgccgctggccttgctgctccacgccgccaggccggacatccagatgacacagagccctagcagcctgtctgccagcgtgggagacagagtgaccatcacatgcaagagcagccagagcctgctggactccgatggcaagacctacctgaactggtatcagcagaagcccggcaaggcccctaagctgctgatctacctggtgtccaagctggatagcggcgtgcccagcagattttctggcagcggcagcggaaccgacttcaccctgacaatatccagcctccagcctgaggacttcgccacctactactgcttccaaggcacccactttccattcaccttcggccagggcaccaaggtggaaatcaaaagaggcggaggcggaagtggaggcggaggatctggcggcggaggctctgaagtgcagctggttgaatcaggcggaggactggttcagcctggcggatctctgagactgtcttgtgccgccagcggctacaccttcagcagctactggatgaactgggtccgacaggcccctggcaaaggactggaatgggtcggaatgatcgaccccagcgacagcgagacacactacaaccacatcttcaaggaccgcttcaccatcagcgccgacaccagcaagaataccgcctacctccagatgaactccctgagagccgaggacaccgccgtgtactactgcgccagaaacctgtatctgtggggccagggaaccctggtcacagtgtcatctacgcgtggacagcctaaggccaatcctaccgtgacactgttccctccaagcagcgaagaactccaggccaacaaggccacacttgtgtgcctgatctccgacttctaccctggggctgtgacagtggcttggaaggccgatggatctcctgtgaaagccggcgtggaaaccaccaagccatccaagcagagcaacaacaaatacgccgccagctcctacctgagcctgacacctgagcagtggaagtcccacagatcctacagctgccaagtgacccacgaaggcagcaccgtggaaaagacagtggcccctacagagtgcagcatccccgaggacacattcttcccaagccccgagagcagctgcgacgtgaagctggtggaaaagagcttcgagacagacaccaacctgaacttccagaacctgagcgtgatcggcttcagaatcctgctgctgaaagtggccggctttaacctgctgatgaccctgcggctgtggtccagccgcgccaagagaagcggatctggcgtgaagcagaccctgaatttcgacctgctgaagctggctggcgacgtggaatccaacccaggcccttctagaggccatatgaccgagtacaagcccacggtgcgcctcgccacccgcgacgacgtccccagggccgtacgcaccctcgccgccgcgttcgccgactaccccgccacgcgccacaccgtcgatccggaccgccacatcgagcgggtcaccgagctgcaagaactcttcctcacgcgcgtcgggctcgacatcggcaaggtgtgggtcgcggacgacggcgccgcggtggcggtctggaccacgccggagagcgtcgaagcgggggcggtgttcgccgagatcggcccgcgcatggccgagttgagcggttcccggctggccgcgcagcaacagatggaaggcctcctggcgccgcaccggcccaaggagcccgcgtggttcctggccaccgtcggcgtctcgcccgaccaccagggcaagggtctgggcagcgccgtcgtgctccccggagtggaggcggccgagcgcgccggggtgcccgccttcctggagacctccgcgccccgcaacctccccttctacgagcggctcggcttcaccgtcaccgccgacgtcgaggtgcccgaaggaccgcgcacctggtgcatgacccgcaagcccggtgcctga

SEQ ID NO: 36660 - DNA, 2619 bp, synthetic construct
  source 1..2619: mol_type = other DNA
atggccttaccagtgaccgccttgctcctgccgctggccttgctgctccacgccgccaggccgctcgaggaggcctctacaaagggaccctccgtgtttcctctggctcccagcagcaagtctacaagcggaggaacagccgctctgggctgcctggtcaaggattactttcccgagcctgtgaccgtgtcctggaatagcggagcactgacaagcggcgtgcacacctttccagccgtgctgcaaagcagcggcctgtactctctgagcagcgtggtcacagtgcctagctctagcctgggcacccagacctacatctgcaatgtgaaccacaagcctagcaacaccaaggtggacaagagagtggaacccaagagctgtatccccgaggacacattcttcccaagccccgagagcagctgcgacgtgaagctggtggaaaagagcttcgagacagacaccaacctgaacttccagaacctgagcgtgatcggcttcagaatcctgctgctgaaagtggccggctttaacctgctgatgaccctgcggctgtggtccagcagggccaagcgatctggatctggagcaacaaacttctcactactcaaacaagcaggtgacgtggaggagaatcccgggcctactagcatggccttaccagtgaccgccttgctcctgccgctggccttgctgctccacgccgccaggccggacatccagatgacacagagccctagcagcctgtctgccagcgtgggagacagagtgaccatcacatgcaagagcagccagagcctgctggactccgatggcaagacctacctgaactggtatcagcagaagcccggcaaggcccctaagctgctgatctacctggtgtccaagctggatagcggcgtgcccagcagattttctggcagcggcagcggaaccgacttcaccctgacaatatccagcctccagcctgaggacttcgccacctactactgcttccaaggcacccactttccattcaccttcggccagggcaccaaggtggaaatcaaaagaggcggaggcggaagtggaggcggaggatctggcggcggaggctctgaagtgcagctggttgaatcaggcggaggactggttcagcctggcggatctctgagactgtcttgtgccgccagcggctacaccttcagcagctactggatgaactgggtccgacaggcccctggcaaaggactggaatgggtcggaatgatcgaccccagcgacagcgagacacactacaaccacatcttcaaggaccgcttcaccatcagcgccgacaccagcaagaataccgcctacctccagatgaactccctgagagccgaggacaccgccgtgtactactgcgccagaaacctgtatctgtggggccagggaaccctggtcacagtgtcatctacgcgtggacagcctaaggccaatcctaccgtgacactgttccctccaagcagcgaagaactccaggccaacaaggccacacttgtgtgcctgatctccgacttctaccctggggctgtgacagtggcttggaaggccgatggatctcctgtgaaagccggcgtggaaaccaccaagccatccaagcagagcaacaacaaatacgccgccagctcctacctgagcctgacacctgagcagtggaagtcccacagatcctacagctgccaagtgacccacgaaggcagcaccgtggaaaagacagtggcccctacagagtgcagcggcagagccgattgcggctttaccagcgagagctaccagcagggcgtgctgagcgccaccatcctgtacgagatcctgctgggcaaggccaccctgtacgccgtgctggtgtctgccctggtgctgatggctatggtcaagcggaaggacagccggggacgcgccaagagaagcggatctggcgtgaagcagaccctgaatttcgacctgctgaagctggctggcgacgtggaatccaacccaggcccttctagaggccatatgaccgagtacaagcccacggtgcgcctcgccacccgcgacgacgtccccagggccgtacgcaccctcgccgccgcgttcgccgactaccccgccacgcgccacaccgtcgatccggaccgccacatcgagcgggtcaccgagctgcaagaactcttcctcacgcgcgtcgggctcgacatcggcaaggtgtgggtcgcggacgacggcgccgcggtggcggtctggaccacgccggagagcgtcgaagcgggggcggtgttcgccgagatcggcccgcgcatggccgagttgagcggttcccggctggccgcgcagcaacagatggaaggcctcctggcgccgcaccggcccaaggagcccgcgtggttcctggccaccgtcggcgtctcgcccgaccaccagggcaagggtctgggcagcgccgtcgtgctccccggagtggaggcggccgagcgcgccggggtgcccgccttcctggagacctccgcgccccgcaacctccccttctacgagcggctcggcttcaccgtcaccgccgacgtcgaggtgcccgaaggaccgcgcacctggtgcatgacccgcaagcccggtgcctga

SEQ ID NO: 36661 - DNA, 1857 bp, synthetic construct
  source 1..1857: mol_type = other DNA
atggccttaccagtgaccgccttgctcctgccgctggccttgctgctccacgccgccaggccggacatccagatgacacagagccctagcagcctgtctgccagcgtgggagacagagtgaccatcacatgcaagagcagccagagcctgctggactccgatggcaagacctacctgaactggtatcagcagaagcccggcaaggcccctaagctgctgatctacctggtgtccaagctggatagcggcgtgcccagcagattttctggcagcggcagcggaaccgacttcaccctgacaatatccagcctccagcctgaggacttcgccacctactactgcttccaaggcacccactttccattcaccttcggccagggcaccaaggtggaaatcaaaagactcgaggacctgaagaacgtgttcccacctgaggtggccgtgttcgagcctagcgaggccgagatcagccacacccagaaagccaccctcgtgtgcctggctaccggcttctaccccgaccatgtggaactgtcttggtgggtcaacggcaaagaggtgcacagcggcgtgtgtaccgacccccagccactgaaagaacagcccgccctgaacgacagccggtactgcctgagcagcagactgagagtgtccgccaccttctggcagaacccccggaaccacttcagatgccaggtgcagttctacggcctgagcgagaacgacgagtggacccaggacagagccaagcccgtgacccagatcgtgtctgccgaagcctggggcagagccgatagcggctttaccagcgagagctaccagcagggcgtgctgagcgccaccatcctgtacgagatcctgctgggcaaggccaccctgtacgccgtgctggtgtctgccctggtgctgatggctatggtcaagcggaaggacagccggggaagggccaagcgatctggatctggagcaacaaacttctcactactcaaacaagcaggtgacgtggaggagaatcccgggcctactagtatggactggatttggcgcatccttttccttgtcggcgctgctaccggcgcgcattccttcgaagaagtgcagctggttgaatcaggcggaggactggttcagcctggcggatctctgagactgtcttgtgccgccagcggctacaccttcagcagctactggatgaactgggtccgacaggcccctggcaaaggactggaatgggtcggaatgatcgaccccagcgacagcgagacacactacaaccacatcttcaaggaccgcttcaccatcagcgccgacaccagcaagaataccgcctacctccagatgaactccctgagagccgaggacaccgccgtgtactactgcgccagaaacctgtatctgtggggccagggaaccctggtcacagtgtcatctacgcgtatccagaaccctgatcctgccgtgtaccagctgcgggatagcaagagcagcgacaagagcgtgtgtctgttcaccgacttcgacagccagaccaacgtgtcccagagcaaggactccgacgtgtacatcaccgataagtgcgtgctggacatgcggagcatggacttcaagagcaactccgccgtggcctggtccaacaagtccgatttcgcctgcgccaacgccttcaacaacagcattatccccgaggacacattcttcccaagccccgagagcagcagcgacgtgaagctggtggaaaagagcttcgagacagacaccaacctgaacttccagaacctgagcgtgatcggcttcagaatcctgctgctgaaagtggccggctttaacctgctgatgaccctgcggctgtggtccagc

SEQ ID NO: 36662 - DNA, 2697 bp, synthetic construct
  source 1..2697: mol_type = other DNA
atggccttaccagtgaccgccttgctcctgccgctggccttgctgctccacgccgccaggccggaggttcagctgcttgagtctggcggaggactggttcaacctggcggaagcctgagactgtcttgtgccgcctctggcagaaccttcagcatgggctggtatagacaggcccctggcaagggcctcgaatttgtgtctgccatcacatacagcggcggcagcccttactacgccgattctgtgaagggcagattcaccatcagccgggacaacagcaagaacaccgtgtacctccagatgaacagcctgagagccgaggacaccgccgtgtactactgtgccgccaatccaacctacggcagcgactggaatgccgagaattggggccagggcacactggtcacagtgtctagtggtaccggcggaggcggatctggcggcggaggtagcggtggcggaggatctgaattcgacatccagatgacacagagccctagcagcctgtctgccagcgtgggagacagagtgaccatcacatgcaagagcagccagagcctgctggactccgatggcaagacctacctgaactggtatcagcagaagcccggcaaggcccctaagctgctgatctacctggtgtccaagctggatagcggcgtgcccagcagattttctggcagcggcagcggaaccgacttcaccctgacaatatccagcctccagcctgaggacttcgccacctactactgcttccaaggcacccactttccattcaccttcggccagggcaccaaggtggaaatcaaaagactcgagatccagaaccctgatcctgccgtgtaccagctgcgggatagcaagagcagcgacaagagcgtgtgtctgttcaccgacttcgacagccagaccaacgtgtcccagagcaaggactccgacgtgtacatcaccgataagtgcgtgctggacatgcggagcatggacttcaagagcaactccgccgtggcctggtccaacaagtccgatttcgcctgcgccaacgccttcaacaacagcattatccccgaggacacattcttcccaagcagcgacgtgccctgcgacgtgaagctggtggaaaagagcttcgagacagacaccaacctgaacttccagaacctgagcgtgatcggcttcagaatcctgctgctgaaagtggccggctttaacctgctgatgaccctgcggctgtggtccagccgcgccaagagaagcggatctggcgtgaagcagaccctgaatttcgacctgctgaagctggctggcgacgtggaatccaacccaggccctactagtaccatggactggatttggcgcatccttttccttgtcggcgctgctaccggcacccattccgggcccgaagtgcaactggttgaatccggtggcggcctggtgcaacccggcggatctctcagacttagctgtgccgcctccggcagaaccttcacaatgggatggtacaggcaggctccagggaaagagagagagttcgtcgccgccatctctctgtctcccacactggcctactacgccgactctgtgaaaggccggttcaccatctccagagataatagcaagaacaccgtggtgctgcaaatgaactctctgagagccgaggatacagccctgtactattgtgccgctgaccggaagtccgtgatgagcatcagacccgattactggggacagggcacactggtcacagtgtctagtggatccggcggcggaggatctggcggaggcggatctgggggcggaggctctttcgaagaagtgcagctggttgaatcaggcggaggactggttcagcctggcggatctctgagactgtcttgtgccgccagcggctacaccttcagcagctactggatgaactgggtccgacaggcccctggcaaaggactggaatgggtcggaatgatcgaccccagcgacagcgagacacactacaaccacatcttcaaggaccgcttcaccatcagcgccgacaccagcaagaataccgcctacctccagatgaactccctgagagccgaggacaccgccgtgtactactgcgccagaaacctgtatctgtggggccagggaaccctggtcacagtgtcatctacgcgtgaggacctgaagaacgtgttcccacctgaggtggccgtgttcgagcctagcaaggccgagatcgcccacacccagaaagccaccctcgtgtgcctggctaccggcttctaccccgaccatgtggaactgtcttggtgggtcaacggcaaagaggtgcacagcggcgtgtgtaccgacccccagccactgaaagaacagcccgccctgaacgacagccggtactgcctgagcagcagactgagagtgtccgccaccttctggcagaacccccggaaccacttcagatgccaggtgcagttctacggcctgagcgagaacgacgagtggacccaggacagagccaagcccgtgacccagatcgtgtctgccgaagcctggggcagagccgattgcggcatcaccagcgccagctaccaccagggcgtgctgagcgccaccatcctgtacgagatcctgctgggcaaggccaccctgtacgccgtgctggtgtctgccctggtgctgatggctatggtcaagcggaaggacagccggggataa

SEQ ID NO: 36663 - DNA, 2697 bp, synthetic construct
  source 1..2697: mol_type = other DNA
atggccttaccagtgaccgccttgctcctgccgctggccttgctgctccacgccgccaggccggaagtgcagctggttgaatctggcggaggactggttcaggctggcggatctctgagactgtcttgtgccgccagcggcagaacctttagcatgggctggtttagacaggcccctggcaaagagagagagttcgtcgccgccatcacatactctggcggcagcccttactacgccgactctgtgaagggcagattcaccatcagccgggacaacgccaagaacaccgtgtacctccagatgaacagcctgaagcctgaggacaccgccgtgtactactgcgccgccaatccaacatacggcagcgactggaacgccgagaattggggccagggaacccaagtgacagtgtctagcggtaccggcggaggcggatctggcggcggaggtagcggtggcggaggatctgaattcgacatccagatgacacagagccctagcagcctgtctgccagcgtgggagacagagtgaccatcacatgcaagagcagccagagcctgctggactccgatggcaagacctacctgaactggtatcagcagaagcccggcaaggcccctaagctgctgatctacctggtgtccaagctggatagcggcgtgcccagcagattttctggcagcggcagcggaaccgacttcaccctgacaatatccagcctccagcctgaggacttcgccacctactactgcttccaaggcacccactttccattcaccttcggccagggcaccaaggtggaaatcaaaagactcgagatccagaaccctgatcctgccgtgtaccagctgcgggatagcaagagcagcgacaagagcgtgtgtctgttcaccgacttcgacagccagaccaacgtgtcccagagcaaggactccgacgtgtacatcaccgataagtgcgtgctggacatgcggagcatggacttcaagagcaactccgccgtggcctggtccaacaagtccgatttcgcctgcgccaacgccttcaacaacagcattatccccgaggacacattcttcccaagcagcgacgtgccctgcgacgtgaagctggtggaaaagagcttcgagacagacaccaacctgaacttccagaacctgagcgtgatcggcttcagaatcctgctgctgaaagtggccggctttaacctgctgatgaccctgcggctgtggtccagccgcgccaagagaagcggatctggcgtgaagcagaccctgaatttcgacctgctgaagctggctggcgacgtggaatccaacccaggccctactagtaccatggactggatttggcgcatccttttccttgtcggcgctgctaccggcgcccattccgggcccgaagtgcaactggttgaatccggtggcggcctggtgcaacccggcggatctctcagacttagctgtgccgcctccggcagaaccttcacaatgggatggtacaggcaggctccagggaaagagagagagttcgtcgccgccatctctctgtctcccacactggcctactacgccgactctgtgaaaggccggttcaccatctccagagataatagcaagaacaccgtggtgctgcaaatgaactctctgagagccgaggatacagccctgtactattgtgccgctgaccggaagtccgtgatgagcatcagacccgattactggggacagggcacactggtcacagtgtctagtggatccggcggcggaggatctggcggaggcggatctgggggcggaggctctttcgaagaagtgcagctggttgaatcaggcggaggactggttcagcctggcggatctctgagactgtcttgtgccgccagcggctacaccttcagcagctactggatgaactgggtccgacaggcccctggcaaaggactggaatgggtcggaatgatcgaccccagcgacagcgagacacactacaaccacatcttcaaggaccgcttcaccatcagcgccgacaccagcaagaataccgcctacctccagatgaactccctgagagccgaggacaccgccgtgtactactgcgccagaaacctgtatctgtggggccagggaaccctggtcacagtgtcatctacgcgtgaggacctgaagaacgtgttcccacctgaggtggccgtgttcgagcctagcaaggccgagatcgcccacacccagaaagccaccctcgtgtgcctggctaccggcttctaccccgaccatgtggaactgtcttggtgggtcaacggcaaagaggtgcacagcggcgtgtgtaccgacccccagccactgaaagaacagcccgccctgaacgacagccggtactgcctgagcagcagactgagagtgtccgccaccttctggcagaacccccggaaccacttcagatgccaggtgcagttctacggcctgagcgagaacgacgagtggacccaggacagagccaagcccgtgacccagatcgtgtctgccgaagcctggggcagagccgattgcggcatcaccagcgccagctaccaccagggcgtgctgagcgccaccatcctgtacgagatcctgctgggcaaggccaccctgtacgccgtgctggtgtctgccctggtgctgatggctatggtcaagcggaaggacagccggggataa

SEQ ID NO: 36664 - DNA, 2688 bp, synthetic construct
  source 1..2688: mol_type = other DNA
atggccttaccagtgaccgccttgctcctgccgctggccttgctgctccacgccgccaggccggaagtgcagctggttgaatctggcggaggactggttcaggctggcggatctctgagactgtcttgtgccgccagcggcagaacctttagcatgggctggtttagacaggcccctggcaaagagagagagttcgtcgccgccatcacatactctggcggcagcccttactacgccgactctgtgaagggcagattcaccatcagccgggacaacgccaagaacaccgtgtacctccagatgaacagcctgaagcctgaggacaccgccgtgtactactgcgccgccaatccaacatacggcagcgactggaacgccgagaattggggccagggaacccaagtgacagtgtctagcggtaccggcggaggcggatctggcggcggaggtagcggtggcggaggatctgaattcgacatccagatgacacagagccctagcagcctgtctgccagcgtgggagacagagtgaccatcacatgcaagagcagccagagcctgctggactccgatggcaagacctacctgaactggtatcagcagaagcccggcaaggcccctaagctgctgatctacctggtgtccaagctggatagcggcgtgcccagcagattttctggcagcggcagcggaaccgacttcaccctgacaatatccagcctccagcctgaggacttcgccacctactactgcttccaaggcacccactttccattcaccttcggccagggcaccaaggtggaaatcaaaagactcgaggacctgaagaacgtgttcccacctgaggtggccgtgttcgagcctagcgaggccgagatcagccacacccagaaagccaccctcgtgtgcctggctaccggcttctaccccgaccatgtggaactgtcttggtgggtcaacggcaaagaggtgcacagcggcgtgtgtaccgacccccagccactgaaagaacagcccgccctgaacgacagccggtactgcctgagcagcagactgagagtgtccgccaccttctggcagaacccccggaaccacttcagatgccaggtgcagttctacggcctgagcgagaacgacgagtggacccaggacagagccaagcccgtgacccagatcgtgtctgccgaagcctggggcagagccgattgcggctttaccagcgagagctaccagcagggcgtgctgagcgccaccatcctgtacgagatcctgctgggcaaggccaccctgtacgccgtgctggtgtctgccctggtgctgatggctatggtcaagcggaaggacagccggggaagggccaagcgatctggatctggagcaacaaacttctcactactcaaacaagcaggtgacgtggaggagaatcccgggcctactagtgccaccatggactggatttggcgcatccttttccttgtcggcgctgctaccggcgcccattccgggcccgaagtgcaactggttgaatccggtggcggcctggtgcaagcaggcggatctctcagacttagctgtgccgcctccggcagaaccttcacaatgggatggtttaggcaggctccagggaaagagagagagttcgtcgccgccatctctctgtctcccacactggcctactacgccgactctgtgaaaggccggttcaccatctccagagataatgccaagaacaccgtggtgctgcaaatgaactctctgaaacccgaggatacagccctgtactattgtgccgctgaccggaagtccgtgatgagcatcagacccgattactggggacagggcacacaagtcacagtgtcctctggatccggcggcggaggatctggcggaggcggatctgggggcggaggctctttcgaagaagtgcagctggttgaatcaggcggaggactggttcagcctggcggatctctgagactgtcttgtgccgccagcggctacaccttcagcagctactggatgaactgggtccgacaggcccctggcaaaggactggaatgggtcggaatgatcgaccccagcgacagcgagacacactacaaccacatcttcaaggaccgcttcaccatcagcgccgacaccagcaagaataccgcctacctccagatgaactccctgagagccgaggacaccgccgtgtactactgcgccagaaacctgtatctgtggggccagggaaccctggtcacagtgtcatctacgcgtatccagaaccctgatcctgccgtgtaccagctgcgggatagcaagagcagcgacaagagcgtgtgtctgttcaccgacttcgacagccagaccaacgtgtcccagagcaaggactccgacgtgtacatcaccgataagtgcgtgctggacatgcggagcatggacttcaagagcaactccgccgtggcctggtccaacaagtccgatttcgcctgcgccaacgccttcaacaacagcattatccccgaggacacattcttcccaagccccgagagcagctgcgacgtgaagctggtggaaaagagcttcgagacagacaccaacctgaacttccagaacctgagcgtgatcggcttcagaatcctgctgctgaaagtggccggctttaacctgctgatgaccctgcggctgtggtccagctaa

SEQ ID NO: 36665 - DNA, 2301 bp, synthetic construct
  source 1..2301: mol_type = other DNA
atggccttaccagtgaccgccttgctcctgccgctggccttgctgctccacgccgccaggccggaagtgcagctggttgaatctggcggaggactggttcagcctggcggatctctgagactgagctgtgaagccagcggcttcgccagcgacgattacatcatcggctggttcagacaggcccctggcaaagagagagagggcgtcagctgcatcagctctaagtacgccaacaccgtgtacaccgacagcgtgaagggcagattcagactgagcagaggcaccgccaagaataccgtgtacctccagatgagcgccctgaagcctgaggataccgccgtgtactactgcgctatggacagccgcagagtgacatgccctgagatcagcaccatgcaccggaacttcgattcttggggccagggcacactggtcacagtgtcatctggtaccggcggaggcggatctggcggcggaggtagcggtggcggaggatctgaattcgacatccagatgacacagagccctagcagcctgtctgccagcgtgggagacagagtgaccatcacatgcaagagcagccagagcctgctggactccgatggcaagacctacctgaactggtatcagcagaagcccggcaaggcccctaagctgctgatctacctggtgtccaagctggatagcggcgtgcccagcagattttctggcagcggcagcggaaccgacttcaccctgacaatatccagcctccagcctgaggacttcgccacctactactgcttccaaggcacccactttccattcaccttcggccagggcaccaaggtggaaatcaaaagactcgaggacctgaagaacgtgttcccacctgaggtggccgtgttcgagcctagcaaggccgagatcgcccacacccagaaagccaccctcgtgtgcctggctaccggcttctaccccgaccatgtggaactgtcttggtgggtcaacggcaaagaggtgcacagcggcgtgtgtaccgacccccagccactgaaagaacagcccgccctgaacgacagccggtactgcctgagcagcagactgagagtgtccgccaccttctggcagaacccccggaaccacttcagatgccaggtgcagttctacggcctgagcgagaacgacgagtggacccaggacagagccaagcccgtgacccagatcgtgtctgccgaagcctggggcagagccgattgcggcatcaccagcgccagctaccaccagggcgtgctgagcgccaccatcctgtacgagatcctgctgggcaaggccaccctgtacgccgtgctggtgtctgccctggtgctgatggctatggtcaagcggaaggacagccggggaagggccaagcgatctggatctggagcaacaaacttctcactactcaaacaagcaggtgacgtggaggagaatcccgggcctactagtatggactggatttggcgcatccttttccttgtcggcgctgctaccggcgcgcattccttcgaagaagtgcagctggttgaatcaggcggaggactggttcagcctggcggatctctgagactgtcttgtgccgccagcggctacaccttcagcagctactggatgaactgggtccgacaggcccctggcaaaggactggaatgggtcggaatgatcgaccccagcgacagcgagacacactacaaccacatcttcaaggaccgcttcaccatcagcgccgacaccagcaagaataccgcctacctccagatgaactccctgagagccgaggacaccgccgtgtactactgcgccagaaacctgtatctgtggggccagggaaccctggtcacagtgtcatctacgcgtatccagaaccctgatcctgccgtgtaccagctgcgggatagcaagagcagcgacaagagcgtgtgtctgttcaccgacttcgacagccagaccaacgtgtcccagagcaaggactccgacgtgtacatcaccgataagtgcgtgctggacatgcggagcatggacttcaagagcaactccgccgtggcctggtccaacaagtccgatttcgcctgcgccaacgccttcaacaacagcattatccccgaggacacattcttcccaagcagcgacgtgccctgcgacgtgaagctggtggaaaagagcttcgagacagacaccaacctgaacttccagaacctgagcgtgatcggcttcagaatcctgctgctgaaagtggccggctttaacctgctgatgaccctgcggctgtggtccagctaa

SEQ ID NO: 36666 - DNA, 2274 bp, synthetic construct
  source 1..2274: mol_type = other DNA
atggccttaccagtgaccgccttgctcctgccgctggccttgctgctccacgccgccaggccggacatccagatgacacagagccctagcagcctgtctgccagcgtgggagacagagtgaccatcacatgcaagagcagccagagcctgctggactccgatggcaagacctacctgaactggtatcagcagaagcccggcaaggcccctaagctgctgatctacctggtgtccaagctggatagcggcgtgcccagcagattttctggcagcggcagcggaaccgacttcaccctgacaatatccagcctccagcctgaggacttcgccacctactactgcttccaaggcacccactttccattcaccttcggccagggcaccaaggtggaaatcaaaagactcgaggacctgaagaacgtgttcccacctgaggtggccgtgttcgagcctagcgaggccgagatcagccacacccagaaagccaccctcgtgtgcctggctaccggcttctaccccgaccatgtggaactgtcttggtgggtcaacggcaaagaggtgcacagcggcgtgtgtaccgacccccagccactgaaagaacagcccgccctgaacgacagccggtactgcctgagcagcagactgagagtgtccgccaccttctggcagaacccccggaaccacttcagatgccaggtgcagttctacggcctgagcgagaacgacgagtggacccaggacagagccaagcccgtgacccagatcgtgtctgccgaagcctggggcagagccgattgcggctttaccagcgagagctaccagcagggcgtgctgagcgccaccatcctgtacgagatcctgctgggcaaggccaccctgtacgccgtgctggtgtctgccctggtgctgatggctatggtcaagcggaaggacagccggggaagggccaagcgatctggatctggagcaacaaacttctcactactcaaacaagcaggtgacgtggaggagaatcccgggcctactagtaccatggactggatttggcgcatccttttccttgtcggcgctgctaccggcgcccattccgggcccgaagtgcaactggttgaatccggtggcggcctggtgcaacccggcggatctctcagacttagctgtgccgcctccggcagaaccttcacaatgggatggtacaggcaggctccagggaaagagagagagttcgtcgccgccatctctctgtctcccacactggcctactacgccgactctgtgaaaggccggttcaccatctccagagataatagcaagaacaccgtggtgctgcaaatgaactctctgagagccgaggatacagccctgtactattgtgccgctgaccggaagtccgtgatgagcatcagacccgattactggggacagggcacactggtcacagtgtctagtggatccggcggcggaggatctggcggaggcggatctgggggcggaggctctttcgaagaagtgcagctggttgaatcaggcggaggactggttcagcctggcggatctctgagactgtcttgtgccgccagcggctacaccttcagcagctactggatgaactgggtccgacaggcccctggcaaaggactggaatgggtcggaatgatcgaccccagcgacagcgagacacactacaaccacatcttcaaggaccgcttcaccatcagcgccgacaccagcaagaataccgcctacctccagatgaactccctgagagccgaggacaccgccgtgtactactgcgccagaaacctgtatctgtggggccagggaaccctggtcacagtgtcatctacgcgtatccagaaccctgatcctgccgtgtaccagctgcgggatagcaagagcagcgacaagagcgtgtgtctgttcaccgacttcgacagccagaccaacgtgtcccagagcaaggactccgacgtgtacatcaccgataagtgcgtgctggacatgcggagcatggacttcaagagcaactccgccgtggcctggtccaacaagtccgatttcgcctgcgccaacgccttcaacaacagcattatccccgaggacacattcttcccaagccccgagagcagctgcgacgtgaagctggtggaaaagagcttcgagacagacaccaacctgaacttccagaacctgagcgtgatcggcttcagaatcctgctgctgaaagtggccggctttaacctgctgatgaccctgcggctgtggtccagctaa

SEQ ID NO: 36667 - DNA, 2292 bp, synthetic construct
  source 1..2292: mol_type = other DNA
atggccttaccagtgaccgccttgctcctgccgctggccttgctgctccacgccgccaggccggacatccagatgacacagagccctagcagcctgtctgccagcgtgggagacagagtgaccatcacatgcaagagcagccagagcctgctggactccgatggcaagacctacctgaactggtatcagcagaagcccggcaaggcccctaagctgctgatctacctggtgtccaagctggatagcggcgtgcccagcagattttctggcagcggcagcggaaccgacttcaccctgacaatatccagcctccagcctgaggacttcgccacctactactgcttccaaggcacccactttccattcaccttcggccagggcaccaaggtggaaatcaaaagactcgaggacctgaagaacgtgttcccacctgaggtggccgtgttcgagcctagcgaggccgagatcagccacacccagaaagccaccctcgtgtgcctggctaccggcttctaccccgaccatgtggaactgtcttggtgggtcaacggcaaagaggtgcacagcggcgtgtgtaccgacccccagccactgaaagaacagcccgccctgaacgacagccggtactgcctgagcagcagactgagagtgtccgccaccttctggcagaacccccggaaccacttcagatgccaggtgcagttctacggcctgagcgagaacgacgagtggacccaggacagagccaagcccgtgacccagatcgtgtctgccgaagcctggggcagagccgattgcggctttaccagcgagagctaccagcagggcgtgctgagcgccaccatcctgtacgagatcctgctgggcaaggccaccctgtacgccgtgctggtgtctgccctggtgctgatggctatggtcaagcggaaggacagccggggaagggccaagcgatctggatctggagcaacaaacttctcactactcaaacaagcaggtgacgtggaggagaatcccgggcctactagtaccatggactggatttggcgcatccttttccttgtcggcgctgctaccggcgcccattccgggccccaggtgcagctggttgaatctggcggaggactggttcagcctggcggatctctgagactgtcttgtgccgccagcggcaacatcaacagcagaaactgcatgggctggttcagacaggcccctggcaagggaagagaaggcgtggcagctatcggccaagtgaccggcagaacctactacgtggacagcgtgaagggcagattcaccatcagcctggacaacagcaagaacaccctgtacctccagatgaacagcctgagagccgaggacaccgccgtgtactattgtgctgctgcccctggctgtctgctgtctgcacttagaagcgccgactacagaaactggggccagggcacactggtcaccgtttcttctggatccggcggcggaggatctggcggaggcggatctgggggcggaggctctttcgaagaagtgcagctggttgaatcaggcggaggactggttcagcctggcggatctctgagactgtcttgtgccgccagcggctacaccttcagcagctactggatgaactgggtccgacaggcccctggcaaaggactggaatgggtcggaatgatcgaccccagcgacagcgagacacactacaaccacatcttcaaggaccgcttcaccatcagcgccgacaccagcaagaataccgcctacctccagatgaactccctgagagccgaggacaccgccgtgtactactgcgccagaaacctgtatctgtggggccagggaaccctggtcacagtgtcatctacgcgtatccagaaccctgatcctgccgtgtaccagctgcgggatagcaagagcagcgacaagagcgtgtgtctgttcaccgacttcgacagccagaccaacgtgtcccagagcaaggactccgacgtgtacatcaccgataagtgcgtgctggacatgcggagcatggacttcaagagcaactccgccgtggcctggtccaacaagtccgatttcgcctgcgccaacgccttcaacaacagcattatccccgaggacacattcttcccaagccccgagagcagctgcgacgtgaagctggtggaaaagagcttcgagacagacaccaacctgaacttccagaacctgagcgtgatcggcttcagaatcctgctgctgaaagtggccggctttaacctgctgatgaccctgcggctgtggtccagc

SEQ ID NO: 36668 - DNA, 2295 bp, synthetic construct
  source 1..2295: mol_type = other DNA
atggccttaccagtgaccgccttgctcctgccgctggccttgctgctccacgccgccaggccggacatccagatgacacagagccctagcagcctgtctgccagcgtgggagacagagtgaccatcacatgcaagagcagccagagcctgctggactccgatggcaagacctacctgaactggtatcagcagaagcccggcaaggcccctaagctgctgatctacctggtgtccaagctggatagcggcgtgcccagcagattttctggcagcggcagcggaaccgacttcaccctgacaatatccagcctccagcctgaggacttcgccacctactactgcttccaaggcacccactttccattcaccttcggccagggcaccaaggtggaaatcaaaagactcgaggacctgaagaacgtgttcccacctgaggtggccgtgttcgagcctagcgaggccgagatcagccacacccagaaagccaccctcgtgtgcctggctaccggcttctaccccgaccatgtggaactgtcttggtgggtcaacggcaaagaggtgcacagcggcgtgtgtaccgacccccagccactgaaagaacagcccgccctgaacgacagccggtactgcctgagcagcagactgagagtgtccgccaccttctggcagaacccccggaaccacttcagatgccaggtgcagttctacggcctgagcgagaacgacgagtggacccaggacagagccaagcccgtgacccagatcgtgtctgccgaagcctggggcagagccgattgcggctttaccagcgagagctaccagcagggcgtgctgagcgccaccatcctgtacgagatcctgctgggcaaggccaccctgtacgccgtgctggtgtctgccctggtgctgatggctatggtcaagcggaaggacagccggggaagggccaagcgatctggatctggagcaacaaacttctcactactcaaacaagcaggtgacgtggaggagaatcccgggcctactagtaccatggactggatttggcgcatccttttccttgtcggcgctgctaccggcgcccattccgggccccaggtgcagctggttgaatctggcggaggatctgttcaggctggcggctctctgagactgtcttgtggcgcttccggcaacatcagcagcagaaactgcatgggctggttcagacaggcccctggcaaagagagagaaggcgttgccgccatcggacaagtgaccggcagatcctactacgtggacagcgtgaagggcagattcaccatcagcctggacaacgccaagaacaccctgtacctccagatgaacacactgaagcccgaggacaccgccatgtactactgtgctgctgcccctggctgtctgctgtctgcacttagaagcgccgactacagaaactggggccagggaacccaagtgacagtgtctagtggatccggcggcggaggatctggcggaggcggatctgggggcggaggctctttcgaagaagtgcagctggttgaatcaggcggaggactggttcagcctggcggatctctgagactgtcttgtgccgccagcggctacaccttcagcagctactggatgaactgggtccgacaggcccctggcaaaggactggaatgggtcggaatgatcgaccccagcgacagcgagacacactacaaccacatcttcaaggaccgcttcaccatcagcgccgacaccagcaagaataccgcctacctccagatgaactccctgagagccgaggacaccgccgtgtactactgcgccagaaacctgtatctgtggggccagggaaccctggtcacagtgtcatctacgcgtatccagaaccctgatcctgccgtgtaccagctgcgggatagcaagagcagcgacaagagcgtgtgtctgttcaccgacttcgacagccagaccaacgtgtcccagagcaaggactccgacgtgtacatcaccgataagtgcgtgctggacatgcggagcatggacttcaagagcaactccgccgtggcctggtccaacaagtccgatttcgcctgcgccaacgccttcaacaacagcattatccccgaggacacattcttcccaagccccgagagcagctgcgacgtgaagctggtggaaaagagcttcgagacagacaccaacctgaacttccagaacctgagcgtgatcggcttcagaatcctgctgctgaaagtggccggctttaacctgctgatgaccctgcggctgtggtccagctaa

SEQ ID NO: 36669 - DNA, 2718 bp, synthetic construct
  source 1..2718: mol_type = other DNA
atggccttaccagtgaccgccttgctcctgccgctggccttgctgctccacgccgccaggccggaagtgcagctggttgaatctggcggaggactggttcaggctggcggatctctgagactgtcttgtgccgccagcggcagaacctttagcatgggctggtttagacaggcccctggcaaagagagagagttcgtcgccgccatcacatactctggcggcagcccttactacgccgactctgtgaagggcagattcaccatcagccgggacaacgccaagaacaccgtgtacctccagatgaacagcctgaagcctgaggacaccgccgtgtactactgcgccgccaatccaacatacggcagcgactggaacgccgagaattggggccagggaacccaagtgacagtgtctagcggtaccggcggaggcggatctggcggcggaggtagcggtggcggaggatctgaattcgacatccagatgacacagagccctagcagcctgtctgccagcgtgggagacagagtgaccatcacatgcaagagcagccagagcctgctggactccgatggcaagacctacctgaactggtatcagcagaagcccggcaaggcccctaagctgctgatctacctggtgtccaagctggatagcggcgtgcccagcagattttctggcagcggcagcggaaccgacttcaccctgacaatatccagcctccagcctgaggacttcgccacctactactgcttccaaggcacccactttccattcaccttcggccagggcaccaaggtggaaatcaaaagactcgagatccagaaccctgatcctgccgtgtaccagctgcgggatagcaagagcagcgacaagagcgtgtgtctgttcaccgacttcgacagccagaccaacgtgtcccagagcaaggactccgacgtgtacatcaccgataagtgcgtgctggacatgcggagcatggacttcaagagcaactccgccgtggcctggtccaacaagtccgatttcgcctgcgccaacgccttcaacaacagcattatccccgaggacacattcttcccaagcagcgacgtgccctgcgacgtgaagctggtggaaaagagcttcgagacagacaccaacctgaacttccagaacctgagcgtgatcggcttcagaatcctgctgctgaaagtggccggctttaacctgctgatgaccctgcggctgtggtccagccgcgccaagagaagcggatctggcgtgaagcagaccctgaatttcgacctgctgaagctggctggcgacgtggaatccaacccaggccctactagtaccatggactggatttggcgcatccttttccttgtcggcgctgctaccggcgcccattccgggccccaggtgcagctggttgaatctggcggaggatctgttcaggctggcggctctctgagactgtcttgtggcgcttccggcaacatcagcagcagaaactgcatgggctggttcagacaggcccctggcaaagagagagaaggcgttgccgccatcggacaagtgaccggcagatcctactacgtggacagcgtgaagggcagattcaccatcagcctggacaacgccaagaacaccctgtacctccagatgaacacactgaagcccgaggacaccgccatgtactactgtgctgctgcccctggctgtctgctgtctgcacttagaagcgccgactacagaaactggggccagggaacccaagtgacagtgtctagtggatccggcggcggaggatctggcggaggcggatctgggggcggaggctctttcgaagaagtgcagctggttgaatcaggcggaggactggttcagcctggcggatctctgagactgtcttgtgccgccagcggctacaccttcagcagctactggatgaactgggtccgacaggcccctggcaaaggactggaatgggtcggaatgatcgaccccagcgacagcgagacacactacaaccacatcttcaaggaccgcttcaccatcagcgccgacaccagcaagaataccgcctacctccagatgaactccctgagagccgaggacaccgccgtgtactactgcgccagaaacctgtatctgtggggccagggaaccctggtcacagtgtcatctacgcgtgaggacctgaagaacgtgttcccacctgaggtggccgtgttcgagcctagcaaggccgagatcgcccacacccagaaagccaccctcgtgtgcctggctaccggcttctaccccgaccatgtggaactgtcttggtgggtcaacggcaaagaggtgcacagcggcgtgtgtaccgacccccagccactgaaagaacagcccgccctgaacgacagccggtactgcctgagcagcagactgagagtgtccgccaccttctggcagaacccccggaaccacttcagatgccaggtgcagttctacggcctgagcgagaacgacgagtggacccaggacagagccaagcccgtgacccagatcgtgtctgccgaagcctggggcagagccgattgcggcatcaccagcgccagctaccaccagggcgtgctgagcgccaccatcctgtacgagatcctgctgggcaaggccaccctgtacgccgtgctggtgtctgccctggtgctgatggctatggtcaagcggaaggacagccggggataa

SEQ ID NO: 36670 - DNA, 2709 bp, synthetic construct
  source 1..2709: mol_type = other DNA
atggccttaccagtgaccgccttgctcctgccgctggccttgctgctccacgccgccaggccgcaggtgcagctggttgaatctggcggaggatctgttcaggctggcggctctctgagactgtcttgtggcgcttccggcaacatcagcagcagaaactgcatgggctggttcagacaggcccctggcaaagagagagaaggcgttgccgccatcggacaagtgaccggcagatcctactacgtggacagcgtgaagggcagattcaccatcagcctggacaacgccaagaacaccctgtacctccagatgaacacactgaagcccgaggacaccgccatgtactactgtgctgctgcccctggctgtctgctgtctgcacttagaagcgccgactacagaaactggggccagggaacccaagtgacagtgtctagtggtaccggcggaggcggatctggcggcggaggtagcggtggcggaggatctgaattcgacatccagatgacacagagccctagcagcctgtctgccagcgtgggagacagagtgaccatcacatgcaagagcagccagagcctgctggactccgatggcaagacctacctgaactggtatcagcagaagcccggcaaggcccctaagctgctgatctacctggtgtccaagctggatagcggcgtgcccagcagattttctggcagcggcagcggaaccgacttcaccctgacaatatccagcctccagcctgaggacttcgccacctactactgcttccaaggcacccactttccattcaccttcggccagggcaccaaggtggaaatcaaaagactcgaggacctgaagaacgtgttcccacctgaggtggccgtgttcgagcctagcgaggccgagatcagccacacccagaaagccaccctcgtgtgcctggctaccggcttctaccccgaccatgtggaactgtcttggtgggtcaacggcaaagaggtgcacagcggcgtgtgtaccgacccccagccactgaaagaacagcccgccctgaacgacagccggtactgcctgagcagcagactgagagtgtccgccaccttctggcagaacccccggaaccacttcagatgccaggtgcagttctacggcctgagcgagaacgacgagtggacccaggacagagccaagcccgtgacccagatcgtgtctgccgaagcctggggcagagccgattgcggctttaccagcgagagctaccagcagggcgtgctgagcgccaccatcctgtacgagatcctgctgggcaaggccaccctgtacgccgtgctggtgtctgccctggtgctgatggctatggtcaagcggaaggacagccggggaagggccaagcgatctggatctggagcaacaaacttctcactactcaaacaagcaggtgacgtggaggagaatcccgggcctactagtgccaccatggactggatttggcgcatccttttccttgtcggcgctgctaccggcgcccattccgggcccgaagtgcaactggttgaatccggtggcggcctggtgcaagcaggcggatctctcagacttagctgtgccgcctccggcagaaccttcacaatgggatggtttaggcaggctccagggaaagagagagagttcgtcgccgccatctctctgtctcccacactggcctactacgccgactctgtgaaaggccggttcaccatctccagagataatgccaagaacaccgtggtgctgcaaatgaactctctgaaacccgaggatacagccctgtactattgtgccgctgaccggaagtccgtgatgagcatcagacccgattactggggacagggcacacaagtcacagtgtcctctggatccggcggcggaggatctggcggaggcggatctgggggcggaggctctttcgaagaagtgcagctggttgaatcaggcggaggactggttcagcctggcggatctctgagactgtcttgtgccgccagcggctacaccttcagcagctactggatgaactgggtccgacaggcccctggcaaaggactggaatgggtcggaatgatcgaccccagcgacagcgagacacactacaaccacatcttcaaggaccgcttcaccatcagcgccgacaccagcaagaataccgcctacctccagatgaactccctgagagccgaggacaccgccgtgtactactgcgccagaaacctgtatctgtggggccagggaaccctggtcacagtgtcatctacgcgtatccagaaccctgatcctgccgtgtaccagctgcgggatagcaagagcagcgacaagagcgtgtgtctgttcaccgacttcgacagccagaccaacgtgtcccagagcaaggactccgacgtgtacatcaccgataagtgcgtgctggacatgcggagcatggacttcaagagcaactccgccgtggcctggtccaacaagtccgatttcgcctgcgccaacgccttcaacaacagcattatccccgaggacacattcttcccaagccccgagagcagctgcgacgtgaagctggtggaaaagagcttcgagacagacaccaacctgaacttccagaacctgagcgtgatcggcttcagaatcctgctgctgaaagtggccggctttaacctgctgatgaccctgcggctgtggtccagctaa

SEQ ID NO: 36671 - DNA, 2298 bp, synthetic construct
  source 1..2298: mol_type = other DNA
atggccttaccagtgaccgccttgctcctgccgctggccttgctgctccacgccgccaggccgcaggtgcagctggttgaatctggcggaggatctgttcaggctggcggctctctgagactgtcttgtggcgcttccggcaacatcagcagcagaaactgcatgggctggttcagacaggcccctggcaaagagagagaaggcgttgccgccatcggacaagtgaccggcagatcctactacgtggacagcgtgaagggcagattcaccatcagcctggacaacgccaagaacaccctgtacctccagatgaacacactgaagcccgaggacaccgccatgtactactgtgctgctgcccctggctgtctgctgtctgcacttagaagcgccgactacagaaactggggccagggaacccaagtgacagtgtctagtggtaccggcggaggcggatctggcggcggaggtagcggtggcggaggatctgaattcgacatccagatgacacagagccctagcagcctgtctgccagcgtgggagacagagtgaccatcacatgcaagagcagccagagcctgctggactccgatggcaagacctacctgaactggtatcagcagaagcccggcaaggcccctaagctgctgatctacctggtgtccaagctggatagcggcgtgcccagcagattttctggcagcggcagcggaaccgacttcaccctgacaatatccagcctccagcctgaggacttcgccacctactactgcttccaaggcacccactttccattcaccttcggccagggcaccaaggtggaaatcaaaagactcgaggacctgaagaacgtgttcccacctgaggtggccgtgttcgagcctagcgaggccgagatcagccacacccagaaagccaccctcgtgtgcctggctaccggcttctaccccgaccatgtggaactgtcttggtgggtcaacggcaaagaggtgcacagcggcgtgtgtaccgacccccagccactgaaagaacagcccgccctgaacgacagccggtactgcctgagcagcagactgagagtgtccgccaccttctggcagaacccccggaaccacttcagatgccaggtgcagttctacggcctgagcgagaacgacgagtggacccaggacagagccaagcccgtgacccagatcgtgtctgccgaagcctggggcagagccgattgcggctttaccagcgagagctaccagcagggcgtgctgagcgccaccatcctgtacgagatcctgctgggcaaggccaccctgtacgccgtgctggtgtctgccctggtgctgatggctatggtcaagcggaaggacagccggggaagggccaagcgatctggatctggagcaacaaacttctcactactcaaacaagcaggtgacgtggaggagaatcccgggcctactagtgccaccatggactggatttggcgcatccttttccttgtcggcgctgctaccggcgcccattccttcgaagaagtgcagctggttgaatcaggcggaggactggttcagcctggcggatctctgagactgtcttgtgccgccagcggctacaccttcagcagctactggatgaactgggtccgacaggcccctggcaaaggactggaatgggtcggaatgatcgaccccagcgacagcgagacacactacaaccacatcttcaaggaccgcttcaccatcagcgccgacaccagcaagaataccgcctacctccagatgaactccctgagagccgaggacaccgccgtgtactactgcgccagaaacctgtatctgtggggccagggaaccctggtcacagtgtcatctacgcgtatccagaaccctgatcctgccgtgtaccagctgcgggatagcaagagcagcgacaagagcgtgtgtctgttcaccgacttcgacagccagaccaacgtgtcccagagcaaggactccgacgtgtacatcaccgataagtgcgtgctggacatgcggagcatggacttcaagagcaactccgccgtggcctggtccaacaagtccgatttcgcctgcgccaacgccttcaacaacagcattatccccgaggacacattcttcccaagccccgagagcagctgcgacgtgaagctggtggaaaagagcttcgagacagacaccaacctgaacttccagaacctgagcgtgatcggcttcagaatcctgctgctgaaagtggccggctttaacctgctgatgaccctgcggctgtggtccagctaa

SEQ ID NO: 36672 - DNA, 2298 bp, synthetic construct
  source 1..2298: mol_type = other DNA
atggccttaccagtgaccgccttgctcctgccgctggccttgctgctccacgccgccaggccgcaagttcagctggtggaaagcggtggtggcgttgtgcaacctggtggaagtctgaggctgagctgtgccgcttctggcctgagctttagcacctacactgtggcctggttcaggcaggctcccggaaagggtcttgaaggcgtggccgccattccttacaccagccagcacatggtgtacacagacagcgtcagaggccggttcaccatcagcagagacaactccaagaatacgctctatctccagatgaactctctgcgcgccgaagatacagccgtgtattactgcgccaccgacagacggcctggcacctctatgctggctatcaacggctacaacagatggggacagggaaccaccgtgaccgtgtcatctggtaccggcggaggcggatctggcggcggaggtagcggtggcggaggatctgaattcgacatccagatgacacagagccctagcagcctgtctgccagcgtgggagacagagtgaccatcacatgcaagagcagccagagcctgctggactccgatggcaagacctacctgaactggtatcagcagaagcccggcaaggcccctaagctgctgatctacctggtgtccaagctggatagcggcgtgcccagcagattttctggcagcggcagcggaaccgacttcaccctgacaatatccagcctccagcctgaggacttcgccacctactactgcttccaaggcacccactttccattcaccttcggccagggcaccaaggtggaaatcaaaagactcgaggacctgaagaacgtgttcccacctgaggtggccgtgttcgagcctagcgaggccgagatcagccacacccagaaagccaccctcgtgtgcctggctaccggcttctaccccgaccatgtggaactgtcttggtgggtcaacggcaaagaggtgcacagcggcgtgtgtaccgacccccagccactgaaagaacagcccgccctgaacgacagccggtactgcctgagcagcagactgagagtgtccgccaccttctggcagaacccccggaaccacttcagatgccaggtgcagttctacggcctgagcgagaacgacgagtggacccaggacagagccaagcccgtgacccagatcgtgtctgccgaagcctggggcagagccgattgcggctttaccagcgagagctaccagcagggcgtgctgagcgccaccatcctgtacgagatcctgctgggcaaggccaccctgtacgccgtgctggtgtctgccctggtgctgatggctatggtcaagcggaaggacagccggggaagggccaagcgatctggatctggagcaacaaacttctcactactcaaacaagcaggtgacgtggaggagaatcccgggcctactagtgccaccatggactggatttggcgcatccttttccttgtcggcgctgctaccggcgcccattccttcgaagaagtgcagctggttgaatcaggcggaggactggttcagcctggcggatctctgagactgtcttgtgccgccagcggctacaccttcagcagctactggatgaactgggtccgacaggcccctggcaaaggactggaatgggtcggaatgatcgaccccagcgacagcgagacacactacaaccacatcttcaaggaccgcttcaccatcagcgccgacaccagcaagaataccgcctacctccagatgaactccctgagagccgaggacaccgccgtgtactactgcgccagaaacctgtatctgtggggccagggaaccctggtcacagtgtcatctacgcgtatccagaaccctgatcctgccgtgtaccagctgcgggatagcaagagcagcgacaagagcgtgtgtctgttcaccgacttcgacagccagaccaacgtgtcccagagcaaggactccgacgtgtacatcaccgataagtgcgtgctggacatgcggagcatggacttcaagagcaactccgccgtggcctggtccaacaagtccgatttcgcctgcgccaacgccttcaacaacagcattatccccgaggacacattcttcccaagccccgagagcagctgcgacgtgaagctggtggaaaagagcttcgagacagacaccaacctgaacttccagaacctgagcgtgatcggcttcagaatcctgctgctgaaagtggccggctttaacctgctgatgaccctgcggctgtggtccagctaa

SEQ ID NO: 36673 - DNA, 2295 bp, synthetic construct
  source 1..2295: mol_type = other DNA
atggccttaccagtgaccgccttgctcctgccgctggccttgctgctccacgccgccaggccggacatccagatgacacagagccctagcagcctgtctgccagcgtgggagacagagtgaccatcacatgcaagagcagccagagcctgctggactccgatggcaagacctacctgaactggtatcagcagaagcccggcaaggcccctaagctgctgatctacctggtgtccaagctggatagcggcgtgcccagcagattttctggcagcggcagcggaaccgacttcaccctgacaatatccagcctccagcctgaggacttcgccacctactactgcttccaaggcacccactttccattcaccttcggccagggcaccaaggtggaaatcaaaagactcgaggacctgaagaacgtgttcccacctgaggtggccgtgttcgagcctagcgaggccgagatcagccacacccagaaagccaccctcgtgtgcctggctaccggcttctaccccgaccatgtggaactgtcttggtgggtcaacggcaaagaggtgcacagcggcgtgtgtaccgacccccagccactgaaagaacagcccgccctgaacgacagccggtactgcctgagcagcagactgagagtgtccgccaccttctggcagaacccccggaaccacttcagatgccaggtgcagttctacggcctgagcgagaacgacgagtggacccaggacagagccaagcccgtgacccagatcgtgtctgccgaagcctggggcagagccgattgcggctttaccagcgagagctaccagcagggcgtgctgagcgccaccatcctgtacgagatcctgctgggcaaggccaccctgtacgccgtgctggtgtctgccctggtgctgatggctatggtcaagcggaaggacagccggggaagggccaagcgatctggatctggagcaacaaacttctcactactcaaacaagcaggtgacgtggaggagaatcccgggcctactagtaccatggactggatttggcgcatccttttccttgtcggcgctgctaccggcgcccattccgggccccaagttcagctggtggaaagcggtggtggcgttgtgcaacctggtggaagtctgaggctgagctgtgccgcttctggcctgagctttagcacctacactgtggcctggttcaggcaggctcccggaaagggtcttgaaggcgtggccgccattccttacaccagccagcacatggtgtacacagacagcgtcagaggccggttcaccatcagcagagacaactccaagaatacgctctatctccagatgaactctctgcgcgccgaagatacagccgtgtattactgcgccaccgacagacggcctggcacctctatgctggctatcaacggctacaacagatggggacagggaaccaccgtgaccgtgtcatctggatccggcggcggaggatctggcggaggcggatctgggggcggaggctctttcgaagaagtgcagctggttgaatcaggcggaggactggttcagcctggcggatctctgagactgtcttgtgccgccagcggctacaccttcagcagctactggatgaactgggtccgacaggcccctggcaaaggactggaatgggtcggaatgatcgaccccagcgacagcgagacacactacaaccacatcttcaaggaccgcttcaccatcagcgccgacaccagcaagaataccgcctacctccagatgaactccctgagagccgaggacaccgccgtgtactactgcgccagaaacctgtatctgtggggccagggaaccctggtcacagtgtcatctacgcgtatccagaaccctgatcctgccgtgtaccagctgcgggatagcaagagcagcgacaagagcgtgtgtctgttcaccgacttcgacagccagaccaacgtgtcccagagcaaggactccgacgtgtacatcaccgataagtgcgtgctggacatgcggagcatggacttcaagagcaactccgccgtggcctggtccaacaagtccgatttcgcctgcgccaacgccttcaacaacagcattatccccgaggacacattcttcccaagccccgagagcagctgcgacgtgaagctggtggaaaagagcttcgagacagacaccaacctgaacttccagaacctgagcgtgatcggcttcagaatcctgctgctgaaagtggccggctttaacctgctgatgaccctgcggctgtggtccagctaa

SEQ ID NO: 36674 - DNA, 2301 bp, synthetic construct
  source 1..2301: mol_type = other DNA
atggccttaccagtgaccgccttgctcctgccgctggccttgctgctccacgccgccaggccggacatccagatgacacagagccctagcagcctgtctgccagcgtgggagacagagtgaccatcacatgcaagagcagccagagcctgctggactccgatggcaagacctacctgaactggtatcagcagaagcccggcaaggcccctaagctgctgatctacctggtgtccaagctggatagcggcgtgcccagcagattttctggcagcggcagcggaaccgacttcaccctgacaatatccagcctccagcctgaggacttcgccacctactactgcttccaaggcacccactttccattcaccttcggccagggcaccaaggtggaaatcaaaagactcgaggacctgaagaacgtgttcccacctgaggtggccgtgttcgagcctagcgaggccgagatcagccacacccagaaagccaccctcgtgtgcctggctaccggcttctaccccgaccatgtggaactgtcttggtgggtcaacggcaaagaggtgcacagcggcgtgtgtaccgacccccagccactgaaagaacagcccgccctgaacgacagccggtactgcctgagcagcagactgagagtgtccgccaccttctggcagaacccccggaaccacttcagatgccaggtgcagttctacggcctgagcgagaacgacgagtggacccaggacagagccaagcccgtgacccagatcgtgtctgccgaagcctggggcagagccgattgcggctttaccagcgagagctaccagcagggcgtgctgagcgccaccatcctgtacgagatcctgctgggcaaggccaccctgtacgccgtgctggtgtctgccctggtgctgatggctatggtcaagcggaaggacagccggggaagggccaagcgatctggatctggagcaacaaacttctcactactcaaacaagcaggtgacgtggaggagaatcccgggcctactagtaccatggactggatttggcgcatccttttccttgtcggcgctgctaccggcgcccattccgggcccgaggtgcagctggttgaatctggcggaggatctgttcaggctggcggctctctgagactgtcttgtgccgccagcggctacacctacagcatcaactgcatgggctggttcagacaggcccctggcaaagagagagaaggcgttgccgccatctctaccggcggaggcagaaccgattaccgggattctgtgaagggcagattcaccatcagccaggacaacgccaagaacaccgtgtacctccagatgaacagcctgaagcctgaggacaccgccatgtactactgtgccggcaagaccacctatcctggctacggatgtggcctgggcagaagcgcctacaattattggggccagggcacccaagtgaccgtgtcatctggatccggcggcggaggatctggcggaggcggatctgggggcggaggctctttcgaagaagtgcagctggttgaatcaggcggaggactggttcagcctggcggatctctgagactgtcttgtgccgccagcggctacaccttcagcagctactggatgaactgggtccgacaggcccctggcaaaggactggaatgggtcggaatgatcgaccccagcgacagcgagacacactacaaccacatcttcaaggaccgcttcaccatcagcgccgacaccagcaagaataccgcctacctccagatgaactccctgagagccgaggacaccgccgtgtactactgcgccagaaacctgtatctgtggggccagggaaccctggtcacagtgtcatctacgcgtatccagaaccctgatcctgccgtgtaccagctgcgggatagcaagagcagcgacaagagcgtgtgtctgttcaccgacttcgacagccagaccaacgtgtcccagagcaaggactccgacgtgtacatcaccgataagtgcgtgctggacatgcggagcatggacttcaagagcaactccgccgtggcctggtccaacaagtccgatttcgcctgcgccaacgccttcaacaacagcattatccccgaggacacattcttcccaagccccgagagcagctgcgacgtgaagctggtggaaaagagcttcgagacagacaccaacctgaacttccagaacctgagcgtgatcggcttcagaatcctgctgctgaaagtggccggctttaacctgctgatgaccctgcggctgtggtccagctaa

SEQ ID NO: 36675 - DNA, 1857 bp, synthetic construct
  source 1..1857: mol_type = other DNA
atggccttaccagtgaccgccttgctcctgccgctggccttgctgctccacgccgccaggccggacatccagatgacacagagccctagcagcctgtctgccagcgtgggagacagagtgaccatcacatgcaagagcagccagagcctgctggactccgatggcaagacctacctgaactggtatcagcagaagcccggcaaggcccctaagctgctgatctacctggtgtccaagctggatagcggcgtgcccagcagattttctggcagcggcagcggaaccgacttcaccctgacaatatccagcctccagcctgaggacttcgccacctactactgcttccaaggcacccactttccattcaccttcggccagggcaccaaggtggaaatcaaaagactcgaggacctgaagcacgtgttcccacctgaggtggccgtgttcgagcctagcgacgccgagatctggcacacccagaaagccaccctcgtgtgcctggctaccggcttctaccccgaccatgtggaactgtcttggtgggtcaacggcaaagaggtgcacagcggcgtgtctaccgacccccagccactgaaagaacagcccgccctgaacgacagccggtactgcctgagcagcagactgagagtgtccgccaccttctggcagaacccccggaaccacttcagatgccaggtgcagttctacggcctgagcgagaacgacgagtggacccaggacagagccaagcccgtgacccagatcgtgtctgccgaagcctggggcagagccgattgcggctttaccagcgagagctaccagcagggcgtgctgagcgccaccatcctgtacgagatcctgctgggcaaggccaccctgtacgccgtgctggtgtctgccctggtgctgatggctatggtcaagcggaaggacagccggggaagggccaagcgatctggatctggagcaacaaacttctcactactcaaacaagcaggtgacgtggaggagaatcccgggcctactagtatggactggatttggcgcatccttttccttgtcggcgctgctaccggcgcgcattccttcgaagaagtgcagctggttgaatcaggcggaggactggttcagcctggcggatctctgagactgtcttgtgccgccagcggctacaccttcagcagctactggatgaactgggtccgacaggcccctggcaaaggactggaatgggtcggaatgatcgaccccagcgacagcgagacacactacaaccacatcttcaaggaccgcttcaccatcagcgccgacaccagcaagaataccgcctacctccagatgaactccctgagagccgaggacaccgccgtgtactactgcgccagaaacctgtatctgtggggccagggaaccctggtcacagtgtcatctacgcgtatccagaaccctgatcctgccgtgtaccagctgcgggatagcaagagcagcgacaagagcgtgtgtctgttcaccgacttcgacagccagaccaacgtgtcccagagcaaggactccgacgtgtacatcaccgataagaccgtgctggacatgcggagcatggacttcaagagcaactccgccgtggcctggtccagcaagtccgatttcgcctgcgccaacgccttcaacaacagcattatccccgaggacacattcttcccaagccccgagatggcctgcgacgtgaagctggtggaaaagagcttcgagacagacaccaacctgaacttccagaacctgctcgtgatctggctgagaatcctgctgctgaaagtggccggctttaacctgctgatgaccctgcggctgtggtccagc

SEQ ID NO: 36676 - DNA, 1857 bp, synthetic construct
  source 1..1857: mol_type = other DNA
atggccttaccagtgaccgccttgctcctgccgctggccttgctgctccacgccgccaggccggacatccagatgacacagagccctagcagcctgtctgccagcgtgggagacagagtgaccatcacatgcaagagcagccagagcctgctggactccgatggcaagacctacctgaactggtatcagcagaagcccggcaaggcccctaagctgctgatctacctggtgtccaagctggatagcggcgtgcccagcagattttctggcagcggcagcggaaccgacttcaccctgacaatatccagcctccagcctgaggacttcgccacctactactgcttccaaggcacccactttccattcaccttcggccagggcaccaaggtggaaatcaaaagactcgaggacctgaagcacgtgttcccacctgaggtggccgtgttcgagcctagcgacgccgagatctggcacacccagaaagccaccctcgtgtgcctggctaccggcttctaccccgaccatgtggaactgtcttggtgggtcaacggcaaagaggtgcacagcggcgtgtctaccgacccccagccactgaaagaacagcccgccctgaacgacagccggtactgcctgagcagcagactgagagtgtccgccaccttctggcagaacccccggaaccacttcagatgccaggtgcagttctacggcctgagcgagaacgacgagtggacccaggacagagccaagcccgtgacccagatcgtgtctgccgaagcctggggcagagccgattgcggctttaccagcgagagctaccagcagggcgtgctgagcgccaccatcctgtacgagatcctgctgggcaaggccaccctgtacgccgtgctggtgtctgccctggtgctgatggctatggtcaagcggaaggacagccggggaagggccaagcgatctggatctggagcaacaaacttctcactactcaaacaagcaggtgacgtggaggagaatcccgggcctactagtatggactggatttggcgcatccttttccttgtcggcgctgctaccggcgcgcattccttcgaagaagtgcagctggttgaatcaggcggaggactggttcagcctggcggatctctgagactgtcttgtgccgccagcggctacaccttcagcagctactggatgaactgggtccgacaggcccctggcaaaggactggaatgggtcggaatgatcgaccccagcgacagcgagacacactacaaccacatcttcaaggaccgcttcaccatcagcgccgacaccagcaagaataccgcctacctccagatgaactccctgagagccgaggacaccgccgtgtactactgcgccagaaacctgtatctgtggggccagggaaccctggtcacagtgtcatctacgcgtatccagaaccctgatcctgccgtgtaccagctgcgggatagcaagagcagcgacaagagcgtgtgtctgttcaccgacttcgacagccagaccaacgtgtcccagagcaaggactccgacgtgtacatcaccgataagaccgtgctggacatgcggagcatggacttcaagagcaactccgccgtggcctggtccaccaagtccgatttcgcctgcgccaacgccttcaacaacagcattatccccgaggacacattcttcccaagccccgaggtggtgtgcgacgtgaagctggtggaaaagagcttcgagacagacaccaacctgaacttccagaacctggtggtgatcggcgccagaatcctgctgctgaaagtggccggctttaacctgctgatgaccctgcggctgtggtccagc

SEQ ID NO: 36677 - DNA, 1857 bp, synthetic construct
  source 1..1857: mol_type = other DNA
atggccttaccagtgaccgccttgctcctgccgctggccttgctgctccacgccgccaggccggacatccagatgacacagagccctagcagcctgtctgccagcgtgggagacagagtgaccatcacatgcaagagcagccagagcctgctggactccgatggcaagacctacctgaactggtatcagcagaagcccggcaaggcccctaagctgctgatctacctggtgtccaagctggatagcggcgtgcccagcagattttctggcagcggcagcggaaccgacttcaccctgacaatatccagcctccagcctgaggacttcgccacctactactgcttccaaggcacccactttccattcaccttcggccagggcaccaaggtggaaatcaaaagactcgaggacctgaagaacgtgttcccacctgaggtggccgtgttcgagcctagcaaggccgagatcagcagaacccagaaagccaccctcgtgtgcctggctaccggcttctaccctcctcatgtggaactgtcttggtgggtcaacggcaaagaggtgcacgacggcgtgtgtaccgacccccagccactgaaagaacagcccgccctgaacgacagccggtactgcctgagcagcagactgagagtgtccgccaccttctggcagaacccccggaaccacttcagatgccaggtgcagttctacggcctgagcgagaacgacgagtggacccaggacagagccaagcccgtgacccagatcgtgtctgccgaagcctggggcagagccgattgcggctttaccagcgagagctaccagcagggcgtgctgagcgccaccatcctgtacgagatcctgctgggcaaggccaccctgtacgccgtgctggtgtctgccctggtgctgatggctatggtcaagcggaaggacagccggggaagggccaagcgatctggatctggagcaacaaacttctcactactcaaacaagcaggtgacgtggaggagaatcccgggcctactagtatggactggatttggcgcatccttttccttgtcggcgctgctaccggcgcgcattccttcgaagaagtgcagctggttgaatcaggcggaggactggttcagcctggcggatctctgagactgtcttgtgccgccagcggctacaccttcagcagctactggatgaactgggtccgacaggcccctggcaaaggactggaatgggtcggaatgatcgaccccagcgacagcgagacacactacaaccacatcttcaaggaccgcttcaccatcagcgccgacaccagcaagaataccgcctacctccagatgaactccctgagagccgaggacaccgccgtgtactactgcgccagaaacctgtatctgtggggccagggaaccctggtcacagtgtcatctacgcgtatccagaaccctgatcctgccgtgtaccagctgcgggatagcaagagcagcgacaagttcgtgtgtctgttcaccgacttcgacagccagatcaacgtgtcccagagcaaggactccgacgtgtacatcaccgataagtgcgtgctggacatgcggagcatggacttcaagagcaactccgccgtggcctggtccaacaagtccgatttcacctgcgccaacgccttcaacaacagcattatccccgaggacacattcttcccaagccccgagagcagctgcgacgtgaagctggtggaaaagagcttcgagacagacaccaacctgaacttccagaacctgagcgtgatcggcttcagaatcctgctgctgaaagtggccggctttaacctgctgatgaccctgcggctgtggtccagc

SEQ ID NO: 36678 - DNA, 2283 bp, synthetic construct
  source 1..2283: mol_type = other DNA
atggccttaccagtgaccgccttgctcctgccgctggccttgctgctccacgccgccaggccggacatccagatgacacagagccctagcagcctgtctgccagcgtgggagacagagtgaccatcacatgcaagagcagccagagcctgctggactccgatggcaagacctacctgaactggtatcagcagaagcccggcaaggcccctaagctgctgatctacctggtgtccaagctggatagcggcgtgcccagcagattttctggcagcggcagcggaaccgacttcaccctgacaatatccagcctccagcctgaggacttcgccacctactactgcttccaaggcacccactttccattcaccttcggccagggcaccaaggtggaaatcaaaagactcgaggacctgaagaacgtgttcccacctgaggtggccgtgttcgagcctagcgaggccgagatcagccacacccagaaagccaccctcgtgtgcctggctaccggcttctaccccgaccatgtggaactgtcttggtgggtcaacggcaaagaggtgcacagcggcgtgtgtaccgacccccagccactgaaagaacagcccgccctgaacgacagccggtactgcctgagcagcagactgagagtgtccgccaccttctggcagaacccccggaaccacttcagatgccaggtgcagttctacggcctgagcgagaacgacgagtggacccaggacagagccaagcccgtgacccagatcgtgtctgccgaagcctggggcagagccgattgcggctttaccagcgagagctaccagcagggcgtgctgagcgccaccatcctgtacgagatcctgctgggcaaggccaccctgtacgccgtgctggtgtctgccctggtgctgatggctatggtcaagcggaaggacagccggggaagggccaagcgatctggatctggagcaacaaacttctcactactcaaacaagcaggtgacgtggaggagaatcccgggcctactagtaccatggactggatttggcgcatccttttccttgtcggcgctgctaccggcgcccattccgggccccaggtgcagctccaagaaagcggacccggactggttaagccctctcagaccctgtctctgacctgcacagttagcggagccagcattaccacaggcgagtattattggaattggtttcggcagccaccaggcaaggggcttgagtggatgggtgctattgctgcctctggcagcaccacctactctcccagctttgagagcagaacctccatcagccgggacacctccaaaaaccagttctctctgaagctgtcctccgtgaccgctgctgacaccgccgtctattattgtggccggtctttcggcgtggcagctgtgaccacaggacagaacagaggccagggaacacttgtgaccgtgtcctctggatccggcggcggaggatctggcggaggcggatctgggggcggaggctctttcgaagaagtgcagctggttgaatcaggcggaggactggttcagcctggcggatctctgagactgtcttgtgccgccagcggctacaccttcagcagctactggatgaactgggtccgacaggcccctggcaaaggactggaatgggtcggaatgatcgaccccagcgacagcgagacacactacaaccacatcttcaaggaccgcttcaccatcagcgccgacaccagcaagaataccgcctacctccagatgaactccctgagagccgaggacaccgccgtgtactactgcgccagaaacctgtatctgtggggccagggaaccctggtcacagtgtcatctacgcgtatccagaaccctgatcctgccgtgtaccagctgcgggatagcaagagcagcgacaagagcgtgtgtctgttcaccgacttcgacagccagaccaacgtgtcccagagcaaggactccgacgtgtacatcaccgataagtgcgtgctggacatgcggagcatggacttcaagagcaactccgccgtggcctggtccaacaagtccgatttcgcctgcgccaacgccttcaacaacagcattatccccgaggacacattcttcccaagccccgagagcagctgcgacgtgaagctggtggaaaagagcttcgagacagacaccaacctgaacttccagaacctgagcgtgatcggcttcagaatcctgctgctgaaagtggccggctttaacctgctgatgaccctgcggctgtggtccagc

SEQ ID NO: 36679 - DNA, 2706 bp, synthetic construct
  source 1..2706: mol_type = other DNA
atggccttaccagtgaccgccttgctcctgccgctggccttgctgctccacgccgccaggccgcaggttcagctgcaagagtctggccctggcctggtcaagcctagccaaacactgagcctgacctgtaccgtgtctggcggctctatcaccaccggcgagttctactggaactggttcagacagcctcctggcaaaggactggaatggatgggagccattgccgccagcggcagcacaacatacagccctagcttcgagagccggaccagcatcagcagagacaccagcaagaatcagttcagcctgaagctgagcagcgtgacagccgccgatacagccgtgtattactgcggcagatcctttggagtggccgccgtgacaaccggccagaatagaggacagggcaccctggtcacagtgtctagcggtaccggcggaggcggatctggcggcggaggtagcggtggcggaggatctgaattcgacatccagatgacacagagccctagcagcctgtctgccagcgtgggagacagagtgaccatcacatgcaagagcagccagagcctgctggactccgatggcaagacctacctgaactggtatcagcagaagcccggcaaggcccctaagctgctgatctacctggtgtccaagctggatagcggcgtgcccagcagattttctggcagcggcagcggaaccgacttcaccctgacaatatccagcctccagcctgaggacttcgccacctactactgcttccaaggcacccactttccattcaccttcggccagggcaccaaggtggaaatcaaaagactcgagatccagaaccctgatcctgccgtgtaccagctgcgggatagcaagagcagcgacaagagcgtgtgtctgttcaccgacttcgacagccagaccaacgtgtcccagagcaaggactccgacgtgtacatcaccgataagtgcgtgctggacatgcggagcatggacttcaagagcaactccgccgtggcctggtccaacaagtccgatttcgcctgcgccaacgccttcaacaacagcattatccccgaggacacattcttcccaagcagcgacgtgccctgcgacgtgaagctggtggaaaagagcttcgagacagacaccaacctgaacttccagaacctgagcgtgatcggcttcagaatcctgctgctgaaagtggccggctttaacctgctgatgaccctgcggctgtggtccagccgcgccaagagaagcggatctggcgtgaagcagaccctgaatttcgacctgctgaagctggctggcgacgtggaatccaacccaggccctactagtaccatggactggatttggcgcatccttttccttgtcggcgctgctaccggcgcccattccgggcccgaagtgcaactggttgaatccggtggcggcctggtgcaacccggcggatctctcagacttagctgtgccgcctccggcagaaccttcacaatgggatggtacaggcaggctccagggaaagagagagagttcgtcgccgccatctctctgtctcccacactggcctactacgccgactctgtgaaaggccggttcaccatctccagagataatagcaagaacaccgtggtgctgcaaatgaactctctgagagccgaggatacagccctgtactattgtgccgctgaccggaagtccgtgatgagcatcagacccgattactggggacagggcacactggtcacagtgtctagtggatccggcggcggaggatctggcggaggcggatctgggggcggaggctctttcgaagaagtgcagctggttgaatcaggcggaggactggttcagcctggcggatctctgagactgtcttgtgccgccagcggctacaccttcagcagctactggatgaactgggtccgacaggcccctggcaaaggactggaatgggtcggaatgatcgaccccagcgacagcgagacacactacaaccacatcttcaaggaccgcttcaccatcagcgccgacaccagcaagaataccgcctacctccagatgaactccctgagagccgaggacaccgccgtgtactactgcgccagaaacctgtatctgtggggccagggaaccctggtcacagtgtcatctacgcgtgaggacctgaagaacgtgttcccacctgaggtggccgtgttcgagcctagcaaggccgagatcgcccacacccagaaagccaccctcgtgtgcctggctaccggcttctaccccgaccatgtggaactgtcttggtgggtcaacggcaaagaggtgcacagcggcgtgtgtaccgacccccagccactgaaagaacagcccgccctgaacgacagccggtactgcctgagcagcagactgagagtgtccgccaccttctggcagaacccccggaaccacttcagatgccaggtgcagttctacggcctgagcgagaacgacgagtggacccaggacagagccaagcccgtgacccagatcgtgtctgccgaagcctggggcagagccgattgcggcatcaccagcgccagctaccaccagggcgtgctgagcgccaccatcctgtacgagatcctgctgggcaaggccaccctgtacgccgtgctggtgtctgccctggtgctgatggctatggtcaagcggaaggacagccgggga

SEQ ID NO: 36680 - DNA, 2295 bp, synthetic construct
  source 1..2295: mol_type = other DNA
atggccttaccagtgaccgccttgctcctgccgctggccttgctgctccacgccgccaggccgcaggttcagctgcaagagtctggccctggcctggtcaagcctagccaaacactgagcctgacctgtaccgtgtctggcggctctatcaccaccggcgagttctactggaactggttcagacagcctcctggcaaaggactggaatggatgggagccattgccgccagcggcagcacaacatacagccctagcttcgagagccggaccagcatcagcagagacaccagcaagaatcagttcagcctgaagctgagcagcgtgacagccgccgatacagccgtgtattactgcggcagatcctttggagtggccgccgtgacaaccggccagaatagaggacagggcaccctggtcacagtgtctagcggtaccggcggaggcggatctggcggcggaggtagcggtggcggaggatctgaattcgacatccagatgacacagagccctagcagcctgtctgccagcgtgggagacagagtgaccatcacatgcaagagcagccagagcctgctggactccgatggcaagacctacctgaactggtatcagcagaagcccggcaaggcccctaagctgctgatctacctggtgtccaagctggatagcggcgtgcccagcagattttctggcagcggcagcggaaccgacttcaccctgacaatatccagcctccagcctgaggacttcgccacctactactgcttccaaggcacccactttccattcaccttcggccagggcaccaaggtggaaatcaaaagactcgagatccagaaccctgatcctgccgtgtaccagctgcgggatagcaagagcagcgacaagagcgtgtgtctgttcaccgacttcgacagccagaccaacgtgtcccagagcaaggactccgacgtgtacatcaccgataagtgcgtgctggacatgcggagcatggacttcaagagcaactccgccgtggcctggtccaacaagtccgatttcgcctgcgccaacgccttcaacaacagcattatccccgaggacacattcttcccaagcagcgacgtgccctgcgacgtgaagctggtggaaaagagcttcgagacagacaccaacctgaacttccagaacctgagcgtgatcggcttcagaatcctgctgctgaaagtggccggctttaacctgctgatgaccctgcggctgtggtccagccgcgccaagagaagcggatctggcgtgaagcagaccctgaatttcgacctgctgaagctggctggcgacgtggaatccaacccaggccctactagtaccatggactggatttggcgcatccttttccttgtcggcgctgctaccggcgcccattccttcgaagaagtgcagctggttgaatcaggcggaggactggttcagcctggcggatctctgagactgtcttgtgccgccagcggctacaccttcagcagctactggatgaactgggtccgacaggcccctggcaaaggactggaatgggtcggaatgatcgaccccagcgacagcgagacacactacaaccacatcttcaaggaccgcttcaccatcagcgccgacaccagcaagaataccgcctacctccagatgaactccctgagagccgaggacaccgccgtgtactactgcgccagaaacctgtatctgtggggccagggaaccctggtcacagtgtcatctacgcgtgaggacctgaagaacgtgttcccacctgaggtggccgtgttcgagcctagcaaggccgagatcgcccacacccagaaagccaccctcgtgtgcctggctaccggcttctaccccgaccatgtggaactgtcttggtgggtcaacggcaaagaggtgcacagcggcgtgtgtaccgacccccagccactgaaagaacagcccgccctgaacgacagccggtactgcctgagcagcagactgagagtgtccgccaccttctggcagaacccccggaaccacttcagatgccaggtgcagttctacggcctgagcgagaacgacgagtggacccaggacagagccaagcccgtgacccagatcgtgtctgccgaagcctggggcagagccgattgcggcatcaccagcgccagctaccaccagggcgtgctgagcgccaccatcctgtacgagatcctgctgggcaaggccaccctgtacgccgtgctggtgtctgccctggtgctgatggctatggtcaagcggaaggacagccgggga

SEQ ID NO: 36681 - DNA, 2694 bp, synthetic construct
  source 1..2694: mol_type = other DNA
atggccttaccagtgaccgccttgctcctgccgctggccttgctgctccacgccgccaggccggaagtgcagctggttgaatctggcggaggactggttcaggctggcggatctctgagactgtcttgtgccgccagcggcagaacctttagcatgggctggtttagacaggcccctggcaaagagagagagttcgtcgccgccatcacatactctggcggcagcccttactacgccgactctgtgaagggcagattcaccatcagccgggacaacgccaagaacaccgtgtacctccagatgaacagcctgaagcctgaggacaccgccgtgtactactgcgccgccaatccaacatacggcagcgactggaacgccgagaattggggccagggaacccaagtgacagtgtctagcggtaccggcggaggcggatctggcggcggaggtagcggtggcggaggatctgaattcgacatccagatgacacagagccctagcagcctgtctgccagcgtgggagacagagtgaccatcacatgcaagagcagccagagcctgctggactccgatggcaagacctacctgaactggtatcagcagaagcccggcaaggcccctaagctgctgatctacctggtgtccaagctggatagcggcgtgcccagcagattttctggcagcggcagcggaaccgacttcaccctgacaatatccagcctccagcctgaggacttcgccacctactactgcttccaaggcacccactttccattcaccttcggccagggcaccaaggtggaaatcaaaagactcgaggacctgaagaacgtgttcccacctgaggtggccgtgttcgagcctagcgaggccgagatcagccacacccagaaagccaccctcgtgtgcctggctaccggcttctaccccgaccatgtggaactgtcttggtgggtcaacggcaaagaggtgcacagcggcgtgtgtaccgacccccagccactgaaagaacagcccgccctgaacgacagccggtactgcctgagcagcagactgagagtgtccgccaccttctggcagaacccccggaaccacttcagatgccaggtgcagttctacggcctgagcgagaacgacgagtggacccaggacagagccaagcccgtgacccagatcgtgtctgccgaagcctggggcagagccgattgcggctttaccagcgagagctaccagcagggcgtgctgagcgccaccatcctgtacgagatcctgctgggcaaggccaccctgtacgccgtgctggtgtctgccctggtgctgatggctatggtcaagcggaaggacagccggggaagggccaagcgatctggatctggagcaacaaacttctcactactcaaacaagcaggtgacgtggaggagaatcccgggcctactagtaccatggactggatttggcgcatccttttccttgtcggcgctgctaccggcgcccattccgggccccaggtgcagctccaagaaagcggacccggactggttaagccctctcagaccctgtctctgacctgcacagttagcggagccagcattaccacaggcgagtattattggaattggtttcggcagccaccaggcaaggggcttgagtggatgggtgctattgctgcctctggcagcaccacctactctcccagctttgagagcagaacctccatcagccgggacacctccaaaaaccagttctctctgaagctgtcctccgtgaccgctgctgacaccgccgtctattattgtggccggtctttcggcgtggcagctgtgaccacaggacagaacagaggccagggaacacttgtgaccgtgtcctctggatccggcggcggaggatctggcggaggcggatctgggggcggaggctctttcgaagaagtgcagctggttgaatcaggcggaggactggttcagcctggcggatctctgagactgtcttgtgccgccagcggctacaccttcagcagctactggatgaactgggtccgacaggcccctggcaaaggactggaatgggtcggaatgatcgaccccagcgacagcgagacacactacaaccacatcttcaaggaccgcttcaccatcagcgccgacaccagcaagaataccgcctacctccagatgaactccctgagagccgaggacaccgccgtgtactactgcgccagaaacctgtatctgtggggccagggaaccctggtcacagtgtcatctacgcgtatccagaaccctgatcctgccgtgtaccagctgcgggatagcaagagcagcgacaagagcgtgtgtctgttcaccgacttcgacagccagaccaacgtgtcccagagcaaggactccgacgtgtacatcaccgataagtgcgtgctggacatgcggagcatggacttcaagagcaactccgccgtggcctggtccaacaagtccgatttcgcctgcgccaacgccttcaacaacagcattatccccgaggacacattcttcccaagccccgagagcagctgcgacgtgaagctggtggaaaagagcttcgagacagacaccaacctgaacttccagaacctgagcgtgatcggcttcagaatcctgctgctgaaagtggccggctttaacctgctgatgaccctgcggctgtggtccagc

SEQ ID NO: 36682 - DNA, 2715 bp, synthetic construct
  source 1..2715: mol_type = other DNA
atggccttaccagtgaccgccttgctcctgccgctggccttgctgctccacgccgccaggccggaagtgcagctggttgaatctggcggaggactggttcaggctggcggatctctgagactgtcttgtgccgccagcggcagaacctttagcatgggctggtttagacaggcccctggcaaagagagagagttcgtcgccgccatcacatactctggcggcagcccttactacgccgactctgtgaagggcagattcaccatcagccgggacaacgccaagaacaccgtgtacctccagatgaacagcctgaagcctgaggacaccgccgtgtactactgcgccgccaatccaacatacggcagcgactggaacgccgagaattggggccagggaacccaagtgacagtgtctagcggtaccggcggaggcggatctggcggcggaggtagcggtggcggaggatctgaattcgacatccagatgacacagagccctagcagcctgtctgccagcgtgggagacagagtgaccatcacatgcaagagcagccagagcctgctggactccgatggcaagacctacctgaactggtatcagcagaagcccggcaaggcccctaagctgctgatctacctggtgtccaagctggatagcggcgtgcccagcagattttctggcagcggcagcggaaccgacttcaccctgacaatatccagcctccagcctgaggacttcgccacctactactgcttccaaggcacccactttccattcaccttcggccagggcaccaaggtggaaatcaaaagactcgagatccagaaccctgatcctgccgtgtaccagctgcgggatagcaagagcagcgacaagagcgtgtgtctgttcaccgacttcgacagccagaccaacgtgtcccagagcaaggactccgacgtgtacatcaccgataagtgcgtgctggacatgcggagcatggacttcaagagcaactccgccgtggcctggtccaacaagtccgatttcgcctgcgccaacgccttcaacaacagcattatccccgaggacacattcttcccaagcagcgacgtgccctgcgacgtgaagctggtggaaaagagcttcgagacagacaccaacctgaacttccagaacctgagcgtgatcggcttcagaatcctgctgctgaaagtggccggctttaacctgctgatgaccctgcggctgtggtccagccgcgccaagagaagcggatctggcgtgaagcagaccctgaatttcgacctgctgaagctggctggcgacgtggaatccaacccaggccctactagtaccatggactggatttggcgcatccttttccttgtcggcgctgctaccggcgcccattccgggccccaggtgcagctggttgaatctggcggaggactggttcagcctggcggatctctgagactgtcttgtgccgccagcggcaacatcaacagcagaaactgcatgggctggttcagacaggcccctggcaagggaagagaaggcgtggcagctatcggccaagtgaccggcagaacctactacgtggacagcgtgaagggcagattcaccatcagcctggacaacagcaagaacaccctgtacctccagatgaacagcctgagagccgaggacaccgccgtgtactattgtgctgctgcccctggctgtctgctgtctgcacttagaagcgccgactacagaaactggggccagggcacactggtcaccgtttcttctggatccggcggcggaggatctggcggaggcggatctgggggcggaggctctttcgaagaagtgcagctggttgaatcaggcggaggactggttcagcctggcggatctctgagactgtcttgtgccgccagcggctacaccttcagcagctactggatgaactgggtccgacaggcccctggcaaaggactggaatgggtcggaatgatcgaccccagcgacagcgagacacactacaaccacatcttcaaggaccgcttcaccatcagcgccgacaccagcaagaataccgcctacctccagatgaactccctgagagccgaggacaccgccgtgtactactgcgccagaaacctgtatctgtggggccagggaaccctggtcacagtgtcatctacgcgtgaggacctgaagaacgtgttcccacctgaggtggccgtgttcgagcctagcaaggccgagatcgcccacacccagaaagccaccctcgtgtgcctggctaccggcttctaccccgaccatgtggaactgtcttggtgggtcaacggcaaagaggtgcacagcggcgtgtgtaccgacccccagccactgaaagaacagcccgccctgaacgacagccggtactgcctgagcagcagactgagagtgtccgccaccttctggcagaacccccggaaccacttcagatgccaggtgcagttctacggcctgagcgagaacgacgagtggacccaggacagagccaagcccgtgacccagatcgtgtctgccgaagcctggggcagagccgattgcggcatcaccagcgccagctaccaccagggcgtgctgagcgccaccatcctgtacgagatcctgctgggcaaggccaccctgtacgccgtgctggtgtctgccctggtgctgatggctatggtcaagcggaaggacagccgggga

SEQ ID NO: 36683 - DNA, 2703 bp, synthetic construct
  source 1..2703: mol_type = other DNA
atggccttaccagtgaccgccttgctcctgccgctggccttgctgctccacgccgccaggccggaagtgcagctggttgaatctggcggaggactggttcaggctggcggatctctgagactgtcttgtgccgccagcggcagaacctttagcatgggctggtttagacaggcccctggcaaagagagagagttcgtcgccgccatcacatactctggcggcagcccttactacgccgactctgtgaagggcagattcaccatcagccgggacaacgccaagaacaccgtgtacctccagatgaacagcctgaagcctgaggacaccgccgtgtactactgcgccgccaatccaacatacggcagcgactggaacgccgagaattggggccagggaacccaagtgacagtgtctagcggtaccggcggaggcggatctggcggcggaggtagcggtggcggaggatctgaattcgacatccagatgacacagagccctagcagcctgtctgccagcgtgggagacagagtgaccatcacatgcaagagcagccagagcctgctggactccgatggcaagacctacctgaactggtatcagcagaagcccggcaaggcccctaagctgctgatctacctggtgtccaagctggatagcggcgtgcccagcagattttctggcagcggcagcggaaccgacttcaccctgacaatatccagcctccagcctgaggacttcgccacctactactgcttccaaggcacccactttccattcaccttcggccagggcaccaaggtggaaatcaaaagactcgaggacctgaagaacgtgttcccacctgaggtggccgtgttcgagcctagcgaggccgagatcagccacacccagaaagccaccctcgtgtgcctggctaccggcttctaccccgaccatgtggaactgtcttggtgggtcaacggcaaagaggtgcacagcggcgtgtgtaccgacccccagccactgaaagaacagcccgccctgaacgacagccggtactgcctgagcagcagactgagagtgtccgccaccttctggcagaacccccggaaccacttcagatgccaggtgcagttctacggcctgagcgagaacgacgagtggacccaggacagagccaagcccgtgacccagatcgtgtctgccgaagcctggggcagagccgattgcggctttaccagcgagagctaccagcagggcgtgctgagcgccaccatcctgtacgagatcctgctgggcaaggccaccctgtacgccgtgctggtgtctgccctggtgctgatggctatggtcaagcggaaggacagccggggaagggccaagcgatctggatctggagcaacaaacttctcactactcaaacaagcaggtgacgtggaggagaatcccgggcctactagtaccatggactggatttggcgcatccttttccttgtcggcgctgctaccggcgcccattccgggccccaggtgcagctggttgaatctggcggaggactggttcagcctggcggatctctgagactgtcttgtgccgccagcggcaacatcaacagcagaaactgcatgggctggttcagacaggcccctggcaagggaagagaaggcgtggcagctatcggccaagtgaccggcagaacctactacgtggacagcgtgaagggcagattcaccatcagcctggacaacagcaagaacaccctgtacctccagatgaacagcctgagagccgaggacaccgccgtgtactattgtgctgctgcccctggctgtctgctgtctgcacttagaagcgccgactacagaaactggggccagggcacactggtcaccgtttcttctggatccggcggcggaggatctggcggaggcggatctgggggcggaggctctttcgaagaagtgcagctggttgaatcaggcggaggactggttcagcctggcggatctctgagactgtcttgtgccgccagcggctacaccttcagcagctactggatgaactgggtccgacaggcccctggcaaaggactggaatgggtcggaatgatcgaccccagcgacagcgagacacactacaaccacatcttcaaggaccgcttcaccatcagcgccgacaccagcaagaataccgcctacctccagatgaactccctgagagccgaggacaccgccgtgtactactgcgccagaaacctgtatctgtggggccagggaaccctggtcacagtgtcatctacgcgtatccagaaccctgatcctgccgtgtaccagctgcgggatagcaagagcagcgacaagagcgtgtgtctgttcaccgacttcgacagccagaccaacgtgtcccagagcaaggactccgacgtgtacatcaccgataagtgcgtgctggacatgcggagcatggacttcaagagcaactccgccgtggcctggtccaacaagtccgatttcgcctgcgccaacgccttcaacaacagcattatccccgaggacacattcttcccaagccccgagagcagctgcgacgtgaagctggtggaaaagagcttcgagacagacaccaacctgaacttccagaacctgagcgtgatcggcttcagaatcctgctgctgaaagtggccggctttaacctgctgatgaccctgcggctgtggtccagc

SEQ ID NO: 36684 - DNA, 2703 bp, synthetic construct
  source 1..2703: mol_type = other DNA
atggccttaccagtgaccgccttgctcctgccgctggccttgctgctccacgccgccaggccggaagtgcaactggttgaatccggtggcggcctggtgcaagcaggcggatctctcagacttagctgtgccgcctccggcagaaccttcacaatgggatggtttaggcaggctccagggaaagagagagagttcgtcgccgccatctctctgtctcccacactggcctactacgccgactctgtgaaaggccggttcaccatctccagagataatgccaagaacaccgtggtgctgcaaatgaactctctgaaacccgaggatacagccctgtactattgtgccgctgaccggaagtccgtgatgagcatcagacccgattactggggacagggcacacaagtcacagtgtcctctggtaccggcggaggcggatctggcggcggaggtagcggtggcggaggatctgaattcgacatccagatgacacagagccctagcagcctgtctgccagcgtgggagacagagtgaccatcacatgcaagagcagccagagcctgctggactccgatggcaagacctacctgaactggtatcagcagaagcccggcaaggcccctaagctgctgatctacctggtgtccaagctggatagcggcgtgcccagcagattttctggcagcggcagcggaaccgacttcaccctgacaatatccagcctccagcctgaggacttcgccacctactactgcttccaaggcacccactttccattcaccttcggccagggcaccaaggtggaaatcaaaagactcgaggacctgaagaacgtgttcccacctgaggtggccgtgttcgagcctagcgaggccgagatcagccacacccagaaagccaccctcgtgtgcctggctaccggcttctaccccgaccatgtggaactgtcttggtgggtcaacggcaaagaggtgcacagcggcgtgtgtaccgacccccagccactgaaagaacagcccgccctgaacgacagccggtactgcctgagcagcagactgagagtgtccgccaccttctggcagaacccccggaaccacttcagatgccaggtgcagttctacggcctgagcgagaacgacgagtggacccaggacagagccaagcccgtgacccagatcgtgtctgccgaagcctggggcagagccgattgcggctttaccagcgagagctaccagcagggcgtgctgagcgccaccatcctgtacgagatcctgctgggcaaggccaccctgtacgccgtgctggtgtctgccctggtgctgatggctatggtcaagcggaaggacagccggggaagggccaagcgatctggatctggagcaacaaacttctcactactcaaacaagcaggtgacgtggaggagaatcccgggcctactagtaccatggactggatttggcgcatccttttccttgtcggcgctgctaccggcgcccattccgggccccaggtgcagctggttgaatctggcggaggactggttcagcctggcggatctctgagactgtcttgtgccgccagcggcaacatcaacagcagaaactgcatgggctggttcagacaggcccctggcaagggaagagaaggcgtggcagctatcggccaagtgaccggcagaacctactacgtggacagcgtgaagggcagattcaccatcagcctggacaacagcaagaacaccctgtacctccagatgaacagcctgagagccgaggacaccgccgtgtactattgtgctgctgcccctggctgtctgctgtctgcacttagaagcgccgactacagaaactggggccagggcacactggtcaccgtttcttctggatccggcggcggaggatctggcggaggcggatctgggggcggaggctctttcgaagaagtgcagctggttgaatcaggcggaggactggttcagcctggcggatctctgagactgtcttgtgccgccagcggctacaccttcagcagctactggatgaactgggtccgacaggcccctggcaaaggactggaatgggtcggaatgatcgaccccagcgacagcgagacacactacaaccacatcttcaaggaccgcttcaccatcagcgccgacaccagcaagaataccgcctacctccagatgaactccctgagagccgaggacaccgccgtgtactactgcgccagaaacctgtatctgtggggccagggaaccctggtcacagtgtcatctacgcgtatccagaaccctgatcctgccgtgtaccagctgcgggatagcaagagcagcgacaagagcgtgtgtctgttcaccgacttcgacagccagaccaacgtgtcccagagcaaggactccgacgtgtacatcaccgataagtgcgtgctggacatgcggagcatggacttcaagagcaactccgccgtggcctggtccaacaagtccgatttcgcctgcgccaacgccttcaacaacagcattatccccgaggacacattcttcccaagccccgagagcagctgcgacgtgaagctggtggaaaagagcttcgagacagacaccaacctgaacttccagaacctgagcgtgatcggcttcagaatcctgctgctgaaagtggccggctttaacctgctgatgaccctgcggctgtggtccagc

SEQ ID NO: 36685 - DNA, 2715 bp, synthetic construct
  source 1..2715: mol_type = other DNA
atggccttaccagtgaccgccttgctcctgccgctggccttgctgctccacgccgccaggccgcaggttcagctgcaagagtctggccctggcctggtcaagcctagccaaacactgagcctgacctgtaccgtgtctggcggctctatcaccaccggcgagttctactggaactggttcagacagcctcctggcaaaggactggaatggatgggagccattgccgccagcggcagcacaacatacagccctagcttcgagagccggaccagcatcagcagagacaccagcaagaatcagttcagcctgaagctgagcagcgtgacagccgccgatacagccgtgtattactgcggcagatcctttggagtggccgccgtgacaaccggccagaatagaggacagggcaccctggtcacagtgtctagcggtaccggcggaggcggatctggcggcggaggtagcggtggcggaggatctgaattcgacatccagatgacacagagccctagcagcctgtctgccagcgtgggagacagagtgaccatcacatgcaagagcagccagagcctgctggactccgatggcaagacctacctgaactggtatcagcagaagcccggcaaggcccctaagctgctgatctacctggtgtccaagctggatagcggcgtgcccagcagattttctggcagcggcagcggaaccgacttcaccctgacaatatccagcctccagcctgaggacttcgccacctactactgcttccaaggcacccactttccattcaccttcggccagggcaccaaggtggaaatcaaaagactcgaggacctgaagaacgtgttcccacctgaggtggccgtgttcgagcctagcgaggccgagatcagccacacccagaaagccaccctcgtgtgcctggctaccggcttctaccccgaccatgtggaactgtcttggtgggtcaacggcaaagaggtgcacagcggcgtgtgtaccgacccccagccactgaaagaacagcccgccctgaacgacagccggtactgcctgagcagcagactgagagtgtccgccaccttctggcagaacccccggaaccacttcagatgccaggtgcagttctacggcctgagcgagaacgacgagtggacccaggacagagccaagcccgtgacccagatcgtgtctgccgaagcctggggcagagccgattgcggctttaccagcgagagctaccagcagggcgtgctgagcgccaccatcctgtacgagatcctgctgggcaaggccaccctgtacgccgtgctggtgtctgccctggtgctgatggctatggtcaagcggaaggacagccggggaagggccaagcgatctggatctggagcaacaaacttctcactactcaaacaagcaggtgacgtggaggagaatcccgggcctactagtaccatggactggatttggcgcatccttttccttgtcggcgctgctaccggcgcccattccgggccccaggtgcagctggttgaatctggcggaggactggttcagcctggcggatctctgagactgtcttgtgccgccagcggcaacatcaacagcagaaactgcatgggctggttcagacaggcccctggcaagggaagagaaggcgtggcagctatcggccaagtgaccggcagaacctactacgtggacagcgtgaagggcagattcaccatcagcctggacaacagcaagaacaccctgtacctccagatgaacagcctgagagccgaggacaccgccgtgtactattgtgctgctgcccctggctgtctgctgtctgcacttagaagcgccgactacagaaactggggccagggcacactggtcaccgtttcttctggatccggcggcggaggatctggcggaggcggatctgggggcggaggctctttcgaagaagtgcagctggttgaatcaggcggaggactggttcagcctggcggatctctgagactgtcttgtgccgccagcggctacaccttcagcagctactggatgaactgggtccgacaggcccctggcaaaggactggaatgggtcggaatgatcgaccccagcgacagcgagacacactacaaccacatcttcaaggaccgcttcaccatcagcgccgacaccagcaagaataccgcctacctccagatgaactccctgagagccgaggacaccgccgtgtactactgcgccagaaacctgtatctgtggggccagggaaccctggtcacagtgtcatctacgcgtatccagaaccctgatcctgccgtgtaccagctgcgggatagcaagagcagcgacaagagcgtgtgtctgttcaccgacttcgacagccagaccaacgtgtcccagagcaaggactccgacgtgtacatcaccgataagtgcgtgctggacatgcggagcatggacttcaagagcaactccgccgtggcctggtccaacaagtccgatttcgcctgcgccaacgccttcaacaacagcattatccccgaggacacattcttcccaagccccgagagcagctgcgacgtgaagctggtggaaaagagcttcgagacagacaccaacctgaacttccagaacctgagcgtgatcggcttcagaatcctgctgctgaaagtggccggctttaacctgctgatgaccctgcggctgtggtccagc

SEQ ID NO: 36686 - DNA, 1452 bp, synthetic construct
  source 1..1452: mol_type = other DNA
atggccttaccagtgaccgccttgctcctgccgctggccttgctgctccacgccgccaggccggacatccagatgacacagagccctagcagcctgtctgccagcgtgggagacagagtgaccatcacatgcaagagcagccagagcctgctggactccgatggcaagacctacctgaactggtatcagcagaagcccggcaaggcccctaagctgctgatctacctggtgtccaagctggatagcggcgtgcccagcagattttctggcagcggcagcggaaccgacttcaccctgacaatatccagcctccagcctgaggacttcgccacctactactgctggcaaggcacccactttccattcaccttcggccagggcaccaaggtggaaatcaaaagaggcggaggcggaagtggaggcggaggatctggcggcggaggctctgaagtgcagctggttgaatcaggcggaggactggttcagcctggcggatctctgagactgtcttgtgccgccagcggctacaccttcaccagctactggatgaactgggtccgacaggcccctggcaaaggactggaatgggtcggaatgatcgaccccagcgacagcgagacacactacaaccacatcttcaaggaccgcttcaccatcagcgccgacaccagcaagaataccgcctacctccagatgaactccctgagagccgaggacaccgccgtgtactactgcgccagaaacctgtatctgttcggccagggaaccctggtcacagtgtcatctacgcgtaaaattgaagttatgtatcctcctccttacctagacaatgagaagagcaatggaaccattatccatgtgaaagggaaacacctttgtccaagtcccctatttcccggaccttctaagcccttttgggtgctggtggtggttgggggagtcctggcttgctatagcttgctagtaacagtggcctttattattttctgggtgaggagtaagaggagcaggctcctgcacagtgactacatgaacatgactccacgccgccccggacccacccgcaagcattaccagccctatgccccaccacgcgacttcgcagcctatcgctccagagtgaagttcagcaggagcgcagacgcccccgcgtaccagcagggccagaaccagctctataacgagctcaatctaggacgaagagaggagtacgatgttttggacaagagacgtggccgggaccctgagatggggggaaagccgagaaggaagaaccctcaggaaggcctgtacaatgaactgcagaaagataagatggcggaggcctacagtgagattgggatgaaaggcgagcgccggaggggcaaggggcacgatggcctttaccagggtctcagtacagccaccaaggacacctacgacgcccttcacatgcaggccctgccccctcgc

SEQ ID NO: 36687 - DNA, 1470 bp, synthetic construct
  source 1..1470: mol_type = other DNA
atggccttaccagtgaccgccttgctcctgccgctggccttgctgctccacgccgccaggccggacatccagatgacacagagccctagcagcctgtctgccagcgtgggagacagagtgaccatcacatgcaagagcagccagagcctgctggactccgatggcaagacctacctgaactggtatcagcagaagcccggcaaggcccctaagctgctgatctacctggtgtccaagctggatagcggcgtgcccagcagattttctggcagcggcagcggaaccgacttcaccctgacaatatccagcctccagcctgaggacttcgccacctactactgctggcaaggcacccactttccattcaccttcggccagggcaccaaggtggaaatcaaaagaggcggaggcggaagtggaggcggaggatctggcggcggaggctctgaagtgcagctggttgaatcaggcggaggactggttcagcctggcggatctctgagactgtcttgtgccgccagcggctacaccttcaccagctactggatgaactgggtccgacaggcccctggcaaaggactggaatgggtcggaatgatcgaccccagcgacagcgagacacactacaaccacatcttcaaggaccgcttcaccatcagcgccgacaccagcaagaataccgcctacctccagatgaactccctgagagccgaggacaccgccgtgtactactgcgccagaaacctgtatctgttcggccagggaaccctggtcacagtgtcatctacgcgtgcgaagcccaccacgacgccagcgccgcgaccaccaacaccggcgcccaccatcgcgtcgcagcccctgtccctgcgcccagaggcgtgccggccagcggcggggggcgcagtgcacacgagggggctggacttcgcctgtgacatctacatctgggcgcccttggccgggacttgtggggtccttctcctgtcactggttatcaccctttactgcaaacggggcagaaagaaactcctgtatatattcaaacaaccatttatgagaccagtacaaactactcaagaggaagatggctgtagctgccgatttccagaagaagaagaaggaggatgtgaactgagagtgaagttcagcaggagcgcagacgcccccgcgtaccagcagggccagaaccagctctataacgagctgaatctaggacgaagagaggagtacgatgttttggacaagagacgtggccgggaccctgagatggggggaaagccgagaaggaagaaccctcaggaaggcctgtacaatgaactgcagaaagataagatggcggaggcctacagtgagattgggatgaaaggcgagcgccggaggggcaaggggcacgatggcctttaccagggtctcagtacagccaccaaggacacctacgacgcccttcacatgcaggccctgccccctcgc

SEQ ID NO: 36688 - DNA, 1470 bp, synthetic construct
  source 1..1470: mol_type = other DNA
atggccttaccagtgaccgccttgctcctgccgctggccttgctgctccacgccgccaggccggaagtgcagctggttgaatcaggcggaggactggttcagcctggcggatctctgagactgtcttgtgccgccagcggctacaccttcaccagctactggatgaactgggtccgacaggcccctggcaaaggactggaatgggtcggaatgatcgaccccagcgacagcgagacacactacaaccacatcttcaaggaccgcttcaccatcagcgccgacaccagcaagaataccgcctacctccagatgaactccctgagagccgaggacaccgccgtgtactactgcgccagaaacctgtatctgttcggccagggaaccctggtcacagtgtcatctggcggaggcggaagtggaggcggaggatctggcggcggaggctctgacatccagatgacacagagccctagcagcctgtctgccagcgtgggagacagagtgaccatcacatgcaagagcagccagagcctgctggactccgatggcaagacctacctgaactggtatcagcagaagcccggcaaggcccctaagctgctgatctacctggtgtccaagctggatagcggcgtgcccagcagattttctggcagcggcagcggaaccgacttcaccctgacaatatccagcctccagcctgaggacttcgccacctactactgctggcaaggcacccactttccattcaccttcggccagggcaccaaggtggaaatcaaaagaacgcgtgcgaagcccaccacgacgccagcgccgcgaccaccaacaccggcgcccaccatcgcgtcgcagcccctgtccctgcgcccagaggcgtgccggccagcggcggggggcgcagtgcacacgagggggctggacttcgcctgtgacatctacatctgggcgcccttggccgggacttgtggggtccttctcctgtcactggttatcaccctttactgcaaacggggcagaaagaaactcctgtatatattcaaacaaccatttatgagaccagtacaaactactcaagaggaagatggctgtagctgccgatttccagaagaagaagaaggaggatgtgaactgagagtgaagttcagcaggagcgcagacgcccccgcgtaccagcagggccagaaccagctctataacgagctgaatctaggacgaagagaggagtacgatgttttggacaagagacgtggccgggaccctgagatggggggaaagccgagaaggaagaaccctcaggaaggcctgtacaatgaactgcagaaagataagatggcggaggcctacagtgagattgggatgaaaggcgagcgccggaggggcaaggggcacgatggcctttaccagggtctcagtacagccaccaaggacacctacgacgcccttcacatgcaggccctgccccctcgc

SEQ ID NO: 36689 - DNA, 1869 bp, synthetic construct
  source 1..1869: mol_type = other DNA
atggccttaccagtgaccgccttgctcctgccgctggccttgctgctccacgccgccaggccggacatccagatgacacagagccctagcagcctgtctgccagcgtgggagacagagtgaccatcacatgcaagagcagccagagcctgctggactccgatggcaagacctacctgaactggtatcagcagaagcccggcaaggcccctaagctgctgatctacctggtgtccaagctggatagcggcgtgcccagcagattttctggcagcggcagcggaaccgacttcaccctgacaatatccagcctccagcctgaggacttcgccacctactactgctggcaaggcacccactttccattcaccttcggccagggcaccaaggtggaaatcaaaagactcgagatccagaaccctgatcctgccgtgtaccagctgcgggatagcaagagcagcgacaagagcgtgtgtctgttcaccgacttcgacagccagaccaacgtgtcccagagcaaggactccgacgtgtacatcaccgataagtgcgtgctggacatgcggagcatggacttcaagagcaactccgccgtggcctggtccaacaagtccgatttcgcctgcgccaacgccttcaacaacagcattatccccgaggacacattcttcccaagcagcgacgtgccctgcgacgtgaagctggtggaaaagagcttcgagacagacaccaacctgaacttccagaacctgagcgtgatcggcttcagaatcctgctgctgaaagtggccggctttaacctgctgatgaccctgcggctgtggtccagccgcgccaagagaagcggatctggcgtgaagcagaccctgaatttcgacctgctgaagctggctggcgacgtggaatccaacccaggccctactagtatggactggatttggcgcatccttttccttgtcggcgctgctaccggcgcgcattccttcgaagaagtgcagctggttgaatcaggcggaggactggttcagcctggcggatctctgagactgtcttgtgccgccagcggctacaccttcaccagctactggatgaactgggtccgacaggcccctggcaaaggactggaatgggtcggaatgatcgaccccagcgacagcgagacacactacaaccacatcttcaaggaccgcttcaccatcagcgccgacaccagcaagaataccgcctacctccagatgaactccctgagagccgaggacaccgccgtgtactactgcgccagaaacctgtatctgttcggccagggaaccctggtcacagtgtcatctacgcgtgaggacctgaagaacgtgttcccacctgaggtggccgtgttcgagcctagcaaggccgagatcgcccacacccagaaagccaccctcgtgtgcctggctaccggcttctaccccgaccatgtggaactgtcttggtgggtcaacggcaaagaggtgcacagcggcgtgtgtaccgacccccagccactgaaagaacagcccgccctgaacgacagccggtactgcctgagcagcagactgagagtgtccgccaccttctggcagaacccccggaaccacttcagatgccaggtgcagttctacggcctgagcgagaacgacgagtggacccaggacagagccaagcccgtgacccagatcgtgtctgccgaagcctggggcagagccgattgcggcatcaccagcgccagctaccaccagggcgtgctgagcgccaccatcctgtacgagatcctgctgggcaaggccaccctgtacgccgtgctggtgtctgccctggtgctgatggctatggtcaagcggaaggacagccgggga

SEQ ID NO: 36690 - DNA, 1857 bp, synthetic construct
  source 1..1857: mol_type = other DNA
atggccttaccagtgaccgccttgctcctgccgctggccttgctgctccacgccgccaggccggacatccagatgacacagagccctagcagcctgtctgccagcgtgggagacagagtgaccatcacatgcaagagcagccagagcctgctggactccgatggcaagacctacctgaactggtatcagcagaagcccggcaaggcccctaagctgctgatctacctggtgtccaagctggatagcggcgtgcccagcagattttctggcagcggcagcggaaccgacttcaccctgacaatatccagcctccagcctgaggacttcgccacctactactgctggcaaggcacccactttccattcaccttcggccagggcaccaaggtggaaatcaaaagactcgaggacctgaagaacgtgttcccacctgaggtggccgtgttcgagcctagcaaggccgagatcgcccacacccagaaagccaccctcgtgtgcctggctaccggcttctaccccgaccatgtggaactgtcttggtgggtcaacggcaaagaggtgcacagcggcgtgtgtaccgacccccagccactgaaagaacagcccgccctgaacgacagccggtactgcctgagcagcagactgagagtgtccgccaccttctggcagaacccccggaaccacttcagatgccaggtgcagttctacggcctgagcgagaacgacgagtggacccaggacagagccaagcccgtgacccagatcgtgtctgccgaagcctggggcagagccgattgcggcatcaccagcgccagctaccaccagggcgtgctgagcgccaccatcctgtacgagatcctgctgggcaaggccaccctgtacgccgtgctggtgtctgccctggtgctgatggctatggtcaagcggaaggacagccggggaagggccaagcgatctggatctggagcaacaaacttctcactactcaaacaagcaggtgacgtggaggagaatcccgggcctactagtatggactggatttggcgcatccttttccttgtcggcgctgctaccggcgcgcattccttcgaagaagtgcagctggttgaatcaggcggaggactggttcagcctggcggatctctgagactgtcttgtgccgccagcggctacaccttcaccagctactggatgaactgggtccgacaggcccctggcaaaggactggaatgggtcggaatgatcgaccccagcgacagcgagacacactacaaccacatcttcaaggaccgcttcaccatcagcgccgacaccagcaagaataccgcctacctccagatgaactccctgagagccgaggacaccgccgtgtactactgcgccagaaacctgtatctgttcggccagggaaccctggtcacagtgtcatctacgcgtatccagaaccctgatcctgccgtgtaccagctgcgggatagcaagagcagcgacaagagcgtgtgtctgttcaccgacttcgacagccagaccaacgtgtcccagagcaaggactccgacgtgtacatcaccgataagtgcgtgctggacatgcggagcatggacttcaagagcaactccgccgtggcctggtccaacaagtccgatttcgcctgcgccaacgccttcaacaacagcattatccccgaggacacattcttcccaagcagcgacgtgccctgcgacgtgaagctggtggaaaagagcttcgagacagacaccaacctgaacttccagaacctgagcgtgatcggcttcagaatcctgctgctgaaagtggccggctttaacctgctgatgaccctgcggctgtggtccagc

SEQ ID NO: 36691 - DNA, 1857 bp, synthetic construct
  source 1..1857: mol_type = other DNA
atggccttaccagtgaccgccttgctcctgccgctggccttgctgctccacgccgccaggccggacatccagatgacacagagccctagcagcctgtctgccagcgtgggagacagagtgaccatcacatgcaagagcagccagagcctgctggactccgatggcaagacctacctgaactggtatcagcagaagcccggcaaggcccctaagctgctgatctacctggtgtccaagctggatagcggcgtgcccagcagattttctggcagcggcagcggaaccgacttcaccctgacaatatccagcctccagcctgaggacttcgccacctactactgctggcaaggcacccactttccattcaccttcggccagggcaccaaggtggaaatcaaaagactcgaggacctgaagaacgtgttcccacctgaggtggccgtgttcgagcctagcgaggccgagatcagccacacccagaaagccaccctcgtgtgcctggctaccggcttctaccccgaccatgtggaactgtcttggtgggtcaacggcaaagaggtgcacagcggcgtgtgtaccgacccccagccactgaaagaacagcccgccctgaacgacagccggtactgcctgagcagcagactgagagtgtccgccaccttctggcagaacccccggaaccacttcagatgccaggtgcagttctacggcctgagcgagaacgacgagtggacccaggacagagccaagcccgtgacccagatcgtgtctgccgaagcctggggcagagccgattgcggctttaccagcgagagctaccagcagggcgtgctgagcgccaccatcctgtacgagatcctgctgggcaaggccaccctgtacgccgtgctggtgtctgccctggtgctgatggctatggtcaagcggaaggacagccggggaagggccaagcgatctggatctggagcaacaaacttctcactactcaaacaagcaggtgacgtggaggagaatcccgggcctactagtatggactggatttggcgcatccttttccttgtcggcgctgctaccggcgcgcattccttcgaagaagtgcagctggttgaatcaggcggaggactggttcagcctggcggatctctgagactgtcttgtgccgccagcggctacaccttcaccagctactggatgaactgggtccgacaggcccctggcaaaggactggaatgggtcggaatgatcgaccccagcgacagcgagacacactacaaccacatcttcaaggaccgcttcaccatcagcgccgacaccagcaagaataccgcctacctccagatgaactccctgagagccgaggacaccgccgtgtactactgcgccagaaacctgtatctgttcggccagggaaccctggtcacagtgtcatctacgcgtatccagaaccctgatcctgccgtgtaccagctgcgggatagcaagagcagcgacaagagcgtgtgtctgttcaccgacttcgacagccagaccaacgtgtcccagagcaaggactccgacgtgtacatcaccgataagtgcgtgctggacatgcggagcatggacttcaagagcaactccgccgtggcctggtccaacaagtccgatttcgcctgcgccaacgccttcaacaacagcattatccccgaggacacattcttcccaagccccgagagcagctgcgacgtgaagctggtggaaaagagcttcgagacagacaccaacctgaacttccagaacctgagcgtgatcggcttcagaatcctgctgctgaaagtggccggctttaacctgctgatgaccctgcggctgtggtccagc

SEQ ID NO: 36692 - DNA, 1869 bp, synthetic construct
  source 1..1869: mol_type = other DNA
atggccttaccagtgaccgccttgctcctgccgctggccttgctgctccacgccgccaggccggacatccagatgacacagagccctagcagcctgtctgccagcgtgggagacagagtgaccatcacatgcaagagcagccagagcctgctggactccgatggcaagacctacctgaactggtatcagcagaagcccggcaaggcccctaagctgctgatctacctggtgtccaagctggatagcggcgtgcccagcagattttctggcagcggcagcggaaccgacttcaccctgacaatatccagcctccagcctgaggacttcgccacctactactgctggcaaggcacccactttccattcaccttcggccagggcaccaaggtggaaatcaaaagactcgagatccagaaccctgatcctgccgtgtaccagctgcgggatagcaagagcagcgacaagagcgtgtgtctgttcaccgacttcgacagccagaccaacgtgtcccagagcaaggactccgacgtgtacatcaccgataagtgcgtgctggacatgcggagcatggacttcaagagcaactccgccgtggcctggtccaacaagtccgatttcgcctgcgccaacgccttcaacaacagcattatccccgaggacacattcttcccaagccccgagagcagctgcgacgtgaagctggtggaaaagagcttcgagacagacaccaacctgaacttccagaacctgagcgtgatcggcttcagaatcctgctgctgaaagtggccggctttaacctgctgatgaccctgcggctgtggtccagccgcgccaagagaagcggatctggcgtgaagcagaccctgaatttcgacctgctgaagctggctggcgacgtggaatccaacccaggccctactagtatggactggatttggcgcatccttttccttgtcggcgctgctaccggcgcgcattccttcgaagaagtgcagctggttgaatcaggcggaggactggttcagcctggcggatctctgagactgtcttgtgccgccagcggctacaccttcaccagctactggatgaactgggtccgacaggcccctggcaaaggactggaatgggtcggaatgatcgaccccagcgacagcgagacacactacaaccacatcttcaaggaccgcttcaccatcagcgccgacaccagcaagaataccgcctacctccagatgaactccctgagagccgaggacaccgccgtgtactactgcgccagaaacctgtatctgttcggccagggaaccctggtcacagtgtcatctacgcgtgaggacctgaagaacgtgttcccacctgaggtggccgtgttcgagcctagcgaggccgagatcagccacacccagaaagccaccctcgtgtgcctggctaccggcttctaccccgaccatgtggaactgtcttggtgggtcaacggcaaagaggtgcacagcggcgtgtgtaccgacccccagccactgaaagaacagcccgccctgaacgacagccggtactgcctgagcagcagactgagagtgtccgccaccttctggcagaacccccggaaccacttcagatgccaggtgcagttctacggcctgagcgagaacgacgagtggacccaggacagagccaagcccgtgacccagatcgtgtctgccgaagcctggggcagagccgattgcggctttaccagcgagagctaccagcagggcgtgctgagcgccaccatcctgtacgagatcctgctgggcaaggccaccctgtacgccgtgctggtgtctgccctggtgctgatggctatggtcaagcggaaggacagccgggga

SEQ ID NO: 36693 - DNA, 1905 bp, synthetic construct
  source 1..1905: mol_type = other DNA
atggccttaccagtgaccgccttgctcctgccgctggccttgctgctccacgccgccaggccgctcgaggaggacctgaagaacgtgttcccacctgaggtggccgtgttcgagcctagcaaggccgagatcgcccacacccagaaagccaccctcgtgtgcctggctaccggcttctaccccgaccatgtggaactgtcttggtgggtcaacggcaaagaggtgcacagcggcgtgtgtaccgacccccagccactgaaagaacagcccgccctgaacgacagccggtactgcctgagcagcagactgagagtgtccgccaccttctggcagaacccccggaaccacttcagatgccaggtgcagttctacggcctgagcgagaacgacgagtggacccaggacagagccaagcccgtgacccagatcgtgtctgccgaagcctggggcagagccgattgcggcatcaccagcgccagctaccaccagggcgtgctgagcgccaccatcctgtacgagatcctgctgggcaaggccaccctgtacgccgtgctggtgtctgccctggtgctgatggctatggtcaagcggaaggacagccggggaagggccaagcgatctggatctggagcaacaaacttctcactactcaaacaagcaggtgacgtggaggagaatcccgggcctactagcatggccttaccagtgaccgccttgctcctgccgctggccttgctgctccacgccgccaggccggacatccagatgacacagagccctagcagcctgtctgccagcgtgggagacagagtgaccatcacatgcaagagcagccagagcctgctggactccgatggcaagacctacctgaactggtatcagcagaagcccggcaaggcccctaagctgctgatctacctggtgtccaagctggatagcggcgtgcccagcagattttctggcagcggcagcggaaccgacttcaccctgacaatatccagcctccagcctgaggacttcgccacctactactgctggcaaggcacccactttccattcaccttcggccagggcaccaaggtggaaatcaaaagaggcggaggcggaagtggaggcggaggatctggcggcggaggctctgaagtgcagctggttgaatcaggcggaggactggttcagcctggcggatctctgagactgtcttgtgccgccagcggctacaccttcaccagctactggatgaactgggtccgacaggcccctggcaaaggactggaatgggtcggaatgatcgaccccagcgacagcgagacacactacaaccacatcttcaaggaccgcttcaccatcagcgccgacaccagcaagaataccgcctacctccagatgaactccctgagagccgaggacaccgccgtgtactactgcgccagaaacctgtatctgttcggccagggaaccctggtcacagtgtcatctacgcgtatccagaaccctgatcctgccgtgtaccagctgcgggatagcaagagcagcgacaagagcgtgtgtctgttcaccgacttcgacagccagaccaacgtgtcccagagcaaggactccgacgtgtacatcaccgataagtgcgtgctggacatgcggagcatggacttcaagagcaactccgccgtggcctggtccaacaagtccgatttcgcctgcgccaacgccttcaacaacagcattatccccgaggacacattcttcccaagcagcgacgtgccctgcgacgtgaagctggtggaaaagagcttcgagacagacaccaacctgaacttccagaacctgagcgtgatcggcttcagaatcctgctgctgaaagtggccggctttaacctgctgatgaccctgcggctgtggtccagc

SEQ ID NO: 36694 - DNA, 1926 bp, synthetic construct
  source 1..1926: mol_type = other DNA
atggccttaccagtgaccgccttgctcctgccgctggccttgctgctccacgccgccaggccgctcgagggctccggcgatcgccctgatcctgccgtgtaccagctgcgggatagcaagagcagcgacaagagcgtgtgtctgttcaccgacttcgacagccagaccaacgtgtcccagagcaaggactccgacgtgtacatcaccgataagtgcgtgctggacatgcggagcatggacttcaagagcaactccgccgtggcctggtccaacaagtccgatttcgcctgcgccaacgccttcaacaacagcattatccccgaggacacattcttcccaagccccgagagcagctgcgacgtgaagctggtggaaaagagcttcgagacagacaccaacctgaacttccagaacctgagcgtgatcggcttcagaatcctgctgctgaaagtggccggctttaacctgctgatgaccctgcggctgtggtccagctctagtcgcgccaagagaagcggatctggcgtgaagcagaccctgaatttcgacctgctgaagctggctggcgacgtggaatccaacccaggccccactagcatggccttaccagtgaccgccttgctcctgccgctggccttgctgctccacgccgccaggccggacatccagatgacacagagccctagcagcctgtctgccagcgtgggagacagagtgaccatcacatgcaagagcagccagagcctgctggactccgatggcaagacctacctgaactggtatcagcagaagcccggcaaggcccctaagctgctgatctacctggtgtccaagctggatagcggcgtgcccagcagattttctggcagcggcagcggaaccgacttcaccctgacaatatccagcctccagcctgaggacttcgccacctactactgctggcaaggcacccactttccattcaccttcggccagggcaccaaggtggaaatcaaaagaggcggaggcggaagtggaggcggaggatctggcggcggaggctctgaagtgcagctggttgaatcaggcggaggactggttcagcctggcggatctctgagactgtcttgtgccgccagcggctacaccttcaccagctactggatgaactgggtccgacaggcccctggcaaaggactggaatgggtcggaatgatcgaccccagcgacagcgagacacactacaaccacatcttcaaggaccgcttcaccatcagcgccgacaccagcaagaataccgcctacctccagatgaactccctgagagccgaggacaccgccgtgtactactgcgccagaaacctgtatctgttcggccagggaaccctggtcacagtgtcatctacgcgtgaggacctgaagaacgtgttcccacctgaggtggccgtgttcgagcctagcgaggccgagatcagccacacccagaaagccaccctcgtgtgcctggctaccggcttctaccccgaccatgtggaactgtcttggtgggtcaacggcaaagaggtgcacagcggcgtgtgtaccgacccccagccactgaaagaacagcccgccctgaacgacagccggtactgcctgagcagcagactgagagtgtccgccaccttctggcagaacccccggaaccacttcagatgccaggtgcagttctacggcctgagcgagaacgacgagtggacccaggacagagccaagcccgtgacccagatcgtgtctgccgaagcctggggcagagccgattgcggctttaccagcgagagctaccagcagggcgtgctgagcgccaccatcctgtacgagatcctgctgggcaaggccaccctgtacgccgtgctggtgtctgccctggtgctgatggctatggtcaagcggaaggacagccgggga

SEQ ID NO: 36695 - DNA, 1857 bp, synthetic construct
  source 1..1857: mol_type = other DNA
atggccttaccagtgaccgccttgctcctgccgctggccttgctgctccacgccgccaggccggacatccagatgacacagagccctagcagcctgtctgccagcgtgggagacagagtgaccatcacatgcaagagcagccagagcctgctggactccgatggcaagacctacctgaactggtatcagcagaagcccggcaaggcccctaagctgctgatctacctggtgtccaagctggatagcggcgtgcccagcagattttctggcagcggcagcggaaccgacttcaccctgacaatatccagcctccagcctgaggacttcgccacctactactgctggcaaggcacccactttccattcaccttcggccagggcaccaaggtggaaatcaaaagactcgaggacctgaagaacgtgttcccacctgaggtggccgtgttcgagcctagcgaggccgagatcagccacacccagaaagccaccctcgtgtgcctggctaccggcttctaccccgaccatgtggaactgtcttggtgggtcaacggcaaagaggtgcacagcggcgtgtctaccgacccccagccactgaaagaacagcccgccctgaacgacagccggtactgcctgagcagcagactgagagtgtccgccaccttctggcagaacccccggaaccacttcagatgccaggtgcagttctacggcctgagcgagaacgacgagtggacccaggacagagccaagcccgtgacccagatcgtgtctgccgaagcctggggcagagccgattgcggctttaccagcgagagctaccagcagggcgtgctgagcgccaccatcctgtacgagatcctgctgggcaaggccaccctgtacgccgtgctggtgtctgccctggtgctgatggctatggtcaagcggaaggacagccggggaagggccaagcgatctggatctggagcaacaaacttctcactactcaaacaagcaggtgacgtggaggagaatcccgggcctactagtatggactggatttggcgcatccttttccttgtcggcgctgctaccggcgcgcattccttcgaagaagtgcagctggttgaatcaggcggaggactggttcagcctggcggatctctgagactgtcttgtgccgccagcggctacaccttcaccagctactggatgaactgggtccgacaggcccctggcaaaggactggaatgggtcggaatgatcgaccccagcgacagcgagacacactacaaccacatcttcaaggaccgcttcaccatcagcgccgacaccagcaagaataccgcctacctccagatgaactccctgagagccgaggacaccgccgtgtactactgcgccagaaacctgtatctgttcggccagggaaccctggtcacagtgtcatctacgcgtatccagaaccctgatcctgccgtgtaccagctgcgggatagcaagagcagcgacaagagcgtgtgtctgttcaccgacttcgacagccagaccaacgtgtcccagagcaaggactccgacgtgtacatcaccgataagaccgtgctggacatgcggagcatggacttcaagagcaactccgccgtggcctggtccaacaagtccgatttcgcctgcgccaacgccttcaacaacagcattatccccgaggacacattcttcccaagccccgagagcagctgcgacgtgaagctggtggaaaagagcttcgagacagacaccaacctgaacttccagaacctgagcgtgatcggcttcagaatcctgctgctgaaagtggccggctttaacctgctgatgaccctgcggctgtggtccagc

SEQ ID NO: 36696 - DNA, 1881 bp, synthetic construct
  source 1..1881: mol_type = other DNA
atggccttaccagtgaccgccttgctcctgccgctggccttgctgctccacgccgccaggccggacatccagatgacacagagccctagcagcctgtctgccagcgtgggagacagagtgaccatcacatgcaagagcagccagagcctgctggactccgatggcaagacctacctgaactggtatcagcagaagcccggcaaggcccctaagctgctgatctacctggtgtccaagctggatagcggcgtgcccagcagattttctggcagcggcagcggaaccgacttcaccctgacaatatccagcctccagcctgaggacttcgccacctactactgctggcaaggcacccactttccattcaccttcggccagggcaccaaggtggaaatcaaaagactcgaggacaagcagctggacgccgacgtgtcccccaagcctaccatcttcctgccctctatcgccgagacaaagctccagaaggccggcacctacctgtgcctgctggaaaagttcttcccagatgtgattaagatccactggcaggaaaagaagtccaacaccatcctgggcagccaggaaggcaacaccatgaagaccaacgacacctacatgaagttcagctggctgaccgtgcccgagaagtccctggacaaagaacacagatgcatcgtgcggcacgaaaacaacaagaacggcgtggaccaggaaatcatcttcccacccatcaagaccgatgtgattacaatggaccccaaggacaactgctccaaggacgccaacgataccctgctgctccagctgaccaacaccagcgcctactacatgtacttgttgctgctgctgaagtccgtggtgtacttcgccatcatcacatgctgcctgctgcggagaaccgccttctgctgcaacggcgagaagtctagggccaagcgatctggatctggagcaacaaacttctcactactcaaacaagcaggtgacgtggaggagaatcccgggcctactagtatggactggatttggcgcatccttttccttgtcggcgctgctaccggcgcgcattccttcgaagaagtgcagctggttgaatcaggcggaggactggttcagcctggcggatctctgagactgtcttgtgccgccagcggctacaccttcaccagctactggatgaactgggtccgacaggcccctggcaaaggactggaatgggtcggaatgatcgaccccagcgacagcgagacacactacaaccacatcttcaaggaccgcttcaccatcagcgccgacaccagcaagaataccgcctacctccagatgaactccctgagagccgaggacaccgccgtgtactactgcgccagaaacctgtatctgttcggccagggaaccctggtcacagtgtcatctacgcgtagccagcctcacaccaagcccagcgtgttcgtgatgaagaacggcaccaacgtggcctgcctcgtgaaagagttctaccccaaggacatcaggatcaacctggtgtccagcaagaagatcaccgagttcgaccccgccatcgtgatctcccccagcggcaagtacaacgccgtgaagctggggaagtacgaggacagcaacagcgtgacctgctccgtgcagcacgacaacaagaccgtgcacagcaccgactttgaagtgaaaaccgactccaccgaccacgtgaagcccaaagagacagagaacaccaagcagcccagcaagagctgccacaagcccaaggccatcgtgcacaccgagaaagtgaacatgatgagcctgaccgtgctgggcctgcggatgctgttcgccaaaaccgtggccgtgaacttcctgctgaccgccaagctgttcttcctc

SEQ ID NO: 36697 - DNA, 1881 bp, synthetic construct
  source 1..1881: mol_type = other DNA
atggccttaccagtgaccgccttgctcctgccgctggccttgctgctccacgccgccaggccggacatccagatgacacagagccctagcagcctgtctgccagcgtgggagacagagtgaccatcacatgcaagagcagccagagcctgctggactccgatggcaagacctacctgaactggtatcagcagaagcccggcaaggcccctaagctgctgatctacctggtgtccaagctggatagcggcgtgcccagcagattttctggcagcggcagcggaaccgacttcaccctgacaatatccagcctccagcctgaggacttcgccacctactactgctggcaaggcacccactttccattcaccttcggccagggcaccaaggtggaaatcaaaagactcgagagccagcctcacaccaagcccagcgtgttcgtgatgaagaacggcaccaacgtggcctgcctcgtgaaagagttctaccccaaggacatcaggatcaacctggtgtccagcaagaagatcaccgagttcgaccccgccatcgtgatctcccccagcggcaagtacaacgccgtgaagctggggaagtacgaggacagcaacagcgtgacctgctccgtgcagcacgacaacaagaccgtgcacagcaccgactttgaagtgaaaaccgactccaccgaccacgtgaagcccaaagagacagagaacaccaagcagcccagcaagagctgccacaagcccaaggccatcgtgcacaccgagaaagtgaacatgatgagcctgaccgtgctgggcctgcggatgctgttcgccaaaaccgtggccgtgaacttcctgctgaccgccaagctgttcttcctcagggccaagcgatctggatctggagcaacaaacttctcactactcaaacaagcaggtgacgtggaggagaatcccgggcctactagtatggactggatttggcgcatccttttccttgtcggcgctgctaccggcgcgcattccttcgaagaagtgcagctggttgaatcaggcggaggactggttcagcctggcggatctctgagactgtcttgtgccgccagcggctacaccttcaccagctactggatgaactgggtccgacaggcccctggcaaaggactggaatgggtcggaatgatcgaccccagcgacagcgagacacactacaaccacatcttcaaggaccgcttcaccatcagcgccgacaccagcaagaataccgcctacctccagatgaactccctgagagccgaggacaccgccgtgtactactgcgccagaaacctgtatctgttcggccagggaaccctggtcacagtgtcatctacgcgtgacaagcagctggacgccgacgtgtcccccaagcctaccatcttcctgccctctatcgccgagacaaagctccagaaggccggcacctacctgtgcctgctggaaaagttcttcccagatgtgattaagatccactggcaggaaaagaagtccaacaccatcctgggcagccaggaaggcaacaccatgaagaccaacgacacctacatgaagttcagctggctgaccgtgcccgagaagtccctggacaaagaacacagatgcatcgtgcggcacgaaaacaacaagaacggcgtggaccaggaaatcatcttcccacccatcaagaccgatgtgattacaatggaccccaaggacaactgctccaaggacgccaacgataccctgctgctccagctgaccaacaccagcgcctactacatgtacttgttgctgctgctgaagtccgtggtgtacttcgccatcatcacatgctgcctgctgcggagaaccgccttctgctgcaacggcgagaagtct

SEQ ID NO: 36698 - DNA, 1926 bp, synthetic construct
  source 1..1926: mol_type = other DNA
atggccttaccagtgaccgccttgctcctgccgctggccttgctgctccacgccgccaggccgctcgaggacaagcagctggacgccgacgtgtcccccaagcctaccatcttcctgccctctatcgccgagacaaagctccagaaggccggcacctacctgtgcctgctggaaaagttcttcccagatgtgattaagatccactggcaggaaaagaagtccaacaccatcctgggcagccaggaaggcaacaccatgaagaccaacgacacctacatgaagttcagctggctgaccgtgcccgagaagtccctggacaaagaacacagatgcatcgtgcggcacgaaaacaacaagaacggcgtggaccaggaaatcatcttcccacccatcaagaccgatgtgattacaatggaccccaaggacaactgctccaaggacgccaacgataccctgctgctccagctgaccaacaccagcgcctactacatgtacttgttgctgctgctgaagtccgtggtgtacttcgccatcatcacatgctgcctgctgcggagaaccgccttctgctgcaacggcgagaagtctagggccaagcgatctggatctggagcaacaaacttctcactactcaaacaagcaggtgacgtggaggagaatcccgggcctactagcatggccttaccagtgaccgccttgctcctgccgctggccttgctgctccacgccgccaggccggacatccagatgacacagagccctagcagcctgtctgccagcgtgggagacagagtgaccatcacatgcaagagcagccagagcctgctggactccgatggcaagacctacctgaactggtatcagcagaagcccggcaaggcccctaagctgctgatctacctggtgtccaagctggatagcggcgtgcccagcagattttctggcagcggcagcggaaccgacttcaccctgacaatatccagcctccagcctgaggacttcgccacctactactgctggcaaggcacccactttccattcaccttcggccagggcaccaaggtggaaatcaaaagaggcggaggcggaagtggaggcggaggatctggcggcggaggctctgaagtgcagctggttgaatcaggcggaggactggttcagcctggcggatctctgagactgtcttgtgccgccagcggctacaccttcaccagctactggatgaactgggtccgacaggcccctggcaaaggactggaatgggtcggaatgatcgaccccagcgacagcgagacacactacaaccacatcttcaaggaccgcttcaccatcagcgccgacaccagcaagaataccgcctacctccagatgaactccctgagagccgaggacaccgccgtgtactactgcgccagaaacctgtatctgttcggccagggaaccctggtcacagtgtcatctacgcgtagccagcctcacaccaagcccagcgtgttcgtgatgaagaacggcaccaacgtggcctgcctcgtgaaagagttctaccccaaggacatcaggatcaacctggtgtccagcaagaagatcaccgagttcgaccccgccatcgtgatctcccccagcggcaagtacaacgccgtgaagctggggaagtacgaggacagcaacagcgtgacctgctccgtgcagcacgacaacaagaccgtgcacagcaccgactttgaagtgaaaaccgactccaccgaccacgtgaagcccaaagagacagagaacaccaagcagcccagcaagagctgccacaagcccaaggccatcgtgcacaccgagaaagtgaacatgatgagcctgaccgtgctgggcctgcggatgctgttcgccaaaaccgtggccgtgaacttcctgctgaccgccaagctgttcttcctc

SEQ ID NO: 36699 - DNA, 2388 bp, synthetic construct
  source 1..2388: mol_type = other DNA
atggccttaccagtgaccgccttgctcctgccgctggccttgctgctccacgccgccaggccggacatccagatgacacagagccctagcagcctgtctgccagcgtgggagacagagtgaccatcacatgcaagagcagccagagcctgctggactccgatggcaagacctacctgaactggtatcagcagaagcccggcaaggcccctaagctgctgatctacctggtgtccaagctggatagcggcgtgcccagcagattttctggcagcggcagcggaaccgacttcaccctgacaatatccagcctccagcctgaggacttcgccacctactactgctggcaaggcacccactttccattcaccttcggccagggcaccaaggtggaaatcaaaagaggacagcctaaggccaatcctaccgtgacactgttccctccaagcagcgaagaactccaggccaacaaggccacacttgtgtgcctgatctccgacttctaccctggggctgtgacagtggcttggaaggccgatggatctcctgtgaaagccggcgtggaaaccaccaagccatccaagcagagcaacaacaaatacgccgccagctcctacctgagcctgacacctgagcagtggaagtcccacagatcctacagctgccaagtgacccacgaaggcagcaccgtggaaaagacagtggcccctacagagtgcagcggatcccagagcttcggcctgctggaccccaagctgtgctacctgctggatggcatcctgttcatctacggcgtgatcctgaccgccctgttcctgagagtgaagttcagcagaagcgccgacgcccctgcctaccagcagggacagaaccaactgtacaacgagctgaacctgggcagacgggaagagtacgacgtgctggacaagcggagaggcagggaccctgagatgggcggaaagccccagcggagaaagaacccccaggaaggactgtataacgaactccagaaagacaagatggccgaagcctacagcgagatcggcatgaagggcgagcggagaagaggcaagggccacgatggcctgtaccagggcctgagcaccgccaccaaggacacctatgacgccctgcacatgcaggccctgcctccaagaagggccaagcgatctggatctggagcaacaaacttctcactactcaaacaagcaggtgacgtggaggagaatcccgggcctactagtatggactggatttggcgcatccttttccttgtcggcgctgctaccggcgcgcattccttcgaagaagtgcagctggttgaatcaggcggaggactggttcagcctggcggatctctgagactgtcttgtgccgccagcggctacaccttcaccagctactggatgaactgggtccgacaggcccctggcaaaggactggaatgggtcggaatgatcgaccccagcgacagcgagacacactacaaccacatcttcaaggaccgcttcaccatcagcgccgacaccagcaagaataccgcctacctccagatgaactccctgagagccgaggacaccgccgtgtactactgcgccagaaacctgtatctgttcggccagggaaccctggtcacagtgtcatctgcctctacaaagggaccctccgtgtttcctctggctcccagcagcaagtctacaagcggaggaacagccgctctgggctgcctggtcaaggattactttcccgagcctgtgaccgtgtcctggaatagcggagcactgacaagcggcgtgcacacctttccagccgtgctgcaaagcagcggcctgtactctctgagcagcgtggtcacagtgcctagctctagcctgggcacccagacctacatctgcaatgtgaaccacaagcctagcaacaccaaggtggacaagagagtggaacccaagagctgtggtacccagagttttgggttgttggaccctaaattgtgctatctgttggacggaatcctgttcatttacggagtgatcctgaccgcattgttcctgcgggttaagttttccagatccgcagacgcacccgcttaccaacaagggcagaaccaactctacaatgaacttaatttggggcggagggaagagtacgacgttctggacaaaaggaggggacgagatcccgagatgggcggaaagcctcagcgaaggaagaatccgcaagaggggctttataacgaactccagaaagataaaatggcagaagcctatagtgagattgggatgaagggagaaaggaggaggggtaaaggtcacgatgggttgtaccaaggattgagcacagccactaaagatacctatgatgcgctccacatgcaggccctgccgccaaga

SEQ ID NO: 36700 - DNA, 2445 bp, synthetic construct
  source 1..2445: mol_type = other DNA
atggccttaccagtgaccgccttgctcctgccgctggccttgctgctccacgccgccaggccggacatccagatgacacagagccctagcagcctgtctgccagcgtgggagacagagtgaccatcacatgcaagagcagccagagcctgctggactccgatggcaagacctacctgaactggtatcagcagaagcccggcaaggcccctaagctgctgatctacctggtgtccaagctggatagcggcgtgcccagcagattttctggcagcggcagcggaaccgacttcaccctgacaatatccagcctccagcctgaggacttcgccacctactactgctggcaaggcacccactttccattcaccttcggccagggcaccaaggtggaaatcaaaagactcgaggacctgaagaacgtgttcccacctgaggtggccgtgttcgagcctagcgaggccgagatcagccacacccagaaagccaccctcgtgtgcctggctaccggcttctaccccgaccatgtggaactgtcttggtgggtcaacggcaaagaggtgcacagcggcgtgtctaccgacccccagccactgaaagaacagcccgccctgaacgacagccggtactgcctgagcagcagactgagagtgtccgccaccttctggcagaacccccggaaccacttcagatgccaggtgcagttctacggcctgagcgagaacgacgagtggacccaggacagagccaagcccgtgacccagatcgtgtctgccgaagcctggggcagagccgattgcggatcccagagcttcggcctgctggaccccaagctgtgctacctgctggatggcatcctgttcatctacggcgtgatcctgaccgccctgttcctgagagtgaagttcagcagaagcgccgacgcccctgcctaccagcagggacagaaccaactgtacaacgagctgaacctgggcagacgggaagagtacgacgtgctggacaagcggagaggcagggaccctgagatgggcggaaagccccagcggagaaagaacccccaggaaggactgtataacgaactccagaaagacaagatggccgaagcctacagcgagatcggcatgaagggcgagcggagaagaggcaagggccacgatggcctgtaccagggcctgagcaccgccaccaaggacacctatgacgccctgcacatgcaggccctgcctccaagaagggccaagcgatctggatctggagcaacaaacttctcactactcaaacaagcaggtgacgtggaggagaatcccgggcctactagtatggactggatttggcgcatccttttccttgtcggcgctgctaccggcgcgcattccttcgaagaagtgcagctggttgaatcaggcggaggactggttcagcctggcggatctctgagactgtcttgtgccgccagcggctacaccttcaccagctactggatgaactgggtccgacaggcccctggcaaaggactggaatgggtcggaatgatcgaccccagcgacagcgagacacactacaaccacatcttcaaggaccgcttcaccatcagcgccgacaccagcaagaataccgcctacctccagatgaactccctgagagccgaggacaccgccgtgtactactgcgccagaaacctgtatctgttcggccagggaaccctggtcacagtgtcatctacgcgtatccagaaccctgatcctgccgtgtaccagctgcgggatagcaagagcagcgacaagagcgtgtgtctgttcaccgacttcgacagccagaccaacgtgtcccagagcaaggactccgacgtgtacatcaccgataagaccgtgctggacatgcggagcatggacttcaagagcaactccgccgtggcctggtccaacaagtccgatttcgcctgcgccaacgccttcaacaacagcattatccccgaggacacattcttcccaagccccgagagcagctgcggtacccagagttttgggttgttggaccctaaattgtgctatctgttggacggaatcctgttcatttacggagtgatcctgaccgcattgttcctgcgggttaagttttccagatccgcagacgcacccgcttaccaacaagggcagaaccaactctacaatgaacttaatttggggcggagggaagagtacgacgttctggacaaaaggaggggacgagatcccgagatgggcggaaagcctcagcgaaggaagaatccgcaagaggggctttataacgaactccagaaagataaaatggcagaagcctatagtgagattgggatgaagggagaaaggaggaggggtaaaggtcacgatgggttgtaccaaggattgagcacagccactaaagatacctatgatgcgctccacatgcaggccctgccgccaaga

SEQ ID NO: 36701 - DNA, 2571 bp, synthetic construct
  source 1..2571: mol_type = other DNA
atggccttaccagtgaccgccttgctcctgccgctggccttgctgctccacgccgccaggccggacatccagatgacacagagccctagcagcctgtctgccagcgtgggagacagagtgaccatcacatgcaagagcagccagagcctgctggactccgatggcaagacctacctgaactggtatcagcagaagcccggcaaggcccctaagctgctgatctacctggtgtccaagctggatagcggcgtgcccagcagattttctggcagcggcagcggaaccgacttcaccctgacaatatccagcctccagcctgaggacttcgccacctactactgctggcaaggcacccactttccattcaccttcggccagggcaccaaggtggaaatcaaaagactcgaggaggacctgaagaacgtgttcccacctgaggtggccgtgttcgagcctagcgaggccgagatcagccacacccagaaagccaccctcgtgtgcctggctaccggcttctaccccgaccatgtggaactgtcttggtgggtcaacggcaaagaggtgcacagcggcgtgtctaccgacccccagccactgaaagaacagcccgccctgaacgacagccggtactgcctgagcagcagactgagagtgtccgccaccttctggcagaacccccggaaccacttcagatgccaggtgcagttctacggcctgagcgagaacgacgagtggacccaggacagagccaagcccgtgacccagatcgtgtctgccgaagcctggggcagagccgattgcggatcccagagcttcggcctgctggaccccaagctgtgctacctgctggatggcatcctgttcatctacggcgtgatcctgaccgccctgttcctgagagtgaagttcagcagaagcgccgacgcccctgcctaccagcagggacagaaccaactgtacaacgagctgaacctgggcagacgggaagagtacgacgtgctggacaagcggagaggcagggaccctgagatgggcggaaagccccagcggagaaagaacccccaggaaggactgtataacgaactccagaaagacaagatggccgaagcctacagcgagatcggcatgaagggcgagcggagaagaggcaagggccacgatggcctgtaccagggcctgagcaccgccaccaaggacacctatgacgccctgcacatgcaggccctgcctccaagaagggccaagcgatctggatctggagcaacaaacttctcactactcaaacaagcaggtgacgtggaggagaatcccgggcctactagtatggactggatttggcgcatccttttccttgtcggcgctgctaccggcgcgcattccttcgaagaagtgcagctggttgaatcaggcggaggactggttcagcctggcggatctctgagactgtcttgtgccgccagcggctacaccttcaccagctactggatgaactgggtccgacaggcccctggcaaaggactggaatgggtcggaatgatcgaccccagcgacagcgagacacactacaaccacatcttcaaggaccgcttcaccatcagcgccgacaccagcaagaataccgcctacctccagatgaactccctgagagccgaggacaccgccgtgtactactgcgccagaaacctgtatctgttcggccagggaaccctggtcacagtgtcatctacgcgtatccagaaccctgatcctgccgtgtaccagctgcgggatagcaagagcagcgacaagagcgtgtgtctgttcaccgacttcgacagccagaccaacgtgtcccagagcaaggactccgacgtgtacatcaccgataagaccgtgctggacatgcggagcatggacttcaagagcaactccgccgtggcctggtccaacaagtccgatttcgcctgcgccaacgccttcaacaacagcattatccccgaggacacattcttcccaagccccgagagcagctgcggtacccagagttttgggttgttggaccctaaattgtgctatctgttggacggaatcctgttcatttacggagtgatcctgaccgcattgttcctgaggagcaagcggtcacggctgctccacagcgattacatgaatatgacaccacgaagaccgggtcctactcgcaaacactaccaaccctacgcacctccccgcgactttgcagcgtaccgatctcgggttaagttttccagatccgcagacgcacccgcttaccaacaagggcagaaccaactctacaatgaacttaatttggggcggagggaagagtacgacgttctggacaaaaggaggggacgagatcccgagatgggcggaaagcctcagcgaaggaagaatccgcaagaggggctttataacgaactccagaaagataaaatggcagaagcctatagtgagattgggatgaagggagaaaggaggaggggtaaaggtcacgatgggttgtaccaaggattgagcacagccactaaagatacctatgatgcgctccacatgcaggccctgccgccaaga

SEQ ID NO: 36702 - DNA, 2700 bp, synthetic construct
  source 1..2700: mol_type = other DNA
atggccttaccagtgaccgccttgctcctgccgctggccttgctgctccacgccgccaggccggacatccagatgacacagagccctagcagcctgtctgccagcgtgggagacagagtgaccatcacatgcaagagcagccagagcctgctggactccgatggcaagacctacctgaactggtatcagcagaagcccggcaaggcccctaagctgctgatctacctggtgtccaagctggatagcggcgtgcccagcagattttctggcagcggcagcggaaccgacttcaccctgacaatatccagcctccagcctgaggacttcgccacctactactgctggcaaggcacccactttccattcaccttcggccagggcaccaaggtggaaatcaaaagactcgaggaggacctgaagaacgtgttcccacctgaggtggccgtgttcgagcctagcgaggccgagatcagccacacccagaaagccaccctcgtgtgcctggctaccggcttctaccccgaccatgtggaactgtcttggtgggtcaacggcaaagaggtgcacagcggcgtgtctaccgacccccagccactgaaagaacagcccgccctgaacgacagccggtactgcctgagcagcagactgagagtgtccgccaccttctggcagaacccccggaaccacttcagatgccaggtgcagttctacggcctgagcgagaacgacgagtggacccaggacagagccaagcccgtgacccagatcgtgtctgccgaagcctggggcagagccgattgcggatcccagagcttcggcctgctggaccccaagctgtgctacctgctggatggcatcctgttcatctacggcgtgatcctgaccgccctgttcctgaaacggggcagaaagaaactcctgtatatattcaaacaaccatttatgagaccagtacaaactactcaagaggaagatggctgtagctgccgatttccagaagaagaagaaggaggatgtgaactgagagtgaagttcagcagaagcgccgacgcccctgcctaccagcagggacagaaccaactgtacaacgagctgaacctgggcagacgggaagagtacgacgtgctggacaagcggagaggcagggaccctgagatgggcggaaagccccagcggagaaagaacccccaggaaggactgtataacgaactccagaaagacaagatggccgaagcctacagcgagatcggcatgaagggcgagcggagaagaggcaagggccacgatggcctgtaccagggcctgagcaccgccaccaaggacacctatgacgccctgcacatgcaggccctgcctccaagaagggccaagcgatctggatctggagcaacaaacttctcactactcaaacaagcaggtgacgtggaggagaatcccgggcctactagtatggactggatttggcgcatccttttccttgtcggcgctgctaccggcgcgcattccttcgaagaagtgcagctggttgaatcaggcggaggactggttcagcctggcggatctctgagactgtcttgtgccgccagcggctacaccttcaccagctactggatgaactgggtccgacaggcccctggcaaaggactggaatgggtcggaatgatcgaccccagcgacagcgagacacactacaaccacatcttcaaggaccgcttcaccatcagcgccgacaccagcaagaataccgcctacctccagatgaactccctgagagccgaggacaccgccgtgtactactgcgccagaaacctgtatctgttcggccagggaaccctggtcacagtgtcatctacgcgtatccagaaccctgatcctgccgtgtaccagctgcgggatagcaagagcagcgacaagagcgtgtgtctgttcaccgacttcgacagccagaccaacgtgtcccagagcaaggactccgacgtgtacatcaccgataagaccgtgctggacatgcggagcatggacttcaagagcaactccgccgtggcctggtccaacaagtccgatttcgcctgcgccaacgccttcaacaacagcattatccccgaggacacattcttcccaagccccgagagcagctgcggtacccagagttttgggttgttggaccctaaattgtgctatctgttggacggaatcctgttcatttacggagtgatcctgaccgcattgttcctgaagagaggccggaagaagctgctgtacatcttcaagcagcctttcatgcggcccgtgcagaccacccaggaagaggacggctgctcctgccggttccccgaggaagaagaaggcggctgcgagctgcgggttaagttttccagatccgcagacgcacccgcttaccaacaagggcagaaccaactctacaatgaacttaatttggggcggagggaagagtacgacgttctggacaaaaggaggggacgagatcccgagatgggcggaaagcctcagcgaaggaagaatccgcaagaggggctttataacgaactccagaaagataaaatggcagaagcctatagtgagattgggatgaagggagaaaggaggaggggtaaaggtcacgatgggttgtaccaaggattgagcacagccactaaagatacctatgatgcgctccacatgcaggccctgccgccaaga

SEQ ID NO: 36703 - DNA, 1761 bp, synthetic construct
  source 1..1761: mol_type = other DNA
atggccttaccagtgaccgccttgctcctgccgctggccttgctgctccacgccgccaggccggacatccagatgacacagagccctagcagcctgtctgccagcgtgggagacagagtgaccatcacatgcaagagcagccagagcctgctggactccgatggcaagacctacctgaactggtatcagcagaagcccggcaaggcccctaagctgctgatctacctggtgtccaagctggatagcggcgtgcccagcagattttctggcagcggcagcggaaccgacttcaccctgacaatatccagcctccagcctgaggacttcgccacctactactgctggcaaggcacccactttccattcaccttcggccagggcaccaaggtggaaatcaaaagactcgagcagagcttcggcctgctggaccccaagctgtgctacctgctggatggcatcctgttcatctacggcgtgatcctgaccgccctgttcctgagagtgaagttcagcagaagcgccgacgcccctgcctaccagcagggacagaaccaactgtacaacgagctgaacctgggcagacgggaagagtacgacgtgctggacaagcggagaggcagggaccctgagatgggcggaaagccccagcggagaaagaacccccaggaaggactgtataacgaactccagaaagacaagatggccgaagcctacagcgagatcggcatgaagggcgagcggagaagaggcaagggccacgatggcctgtaccagggcctgagcaccgccaccaaggacacctatgacgccctgcacatgcaggccctgcctccaagaagggccaagcgatctggatctggagcaacaaacttctcactactcaaacaagcaggtgacgtggaggagaatcccgggcctactagtatggactggatttggcgcatccttttccttgtcggcgctgctaccggcgcgcattccttcgaagaagtgcagctggttgaatcaggcggaggactggttcagcctggcggatctctgagactgtcttgtgccgccagcggctacaccttcaccagctactggatgaactgggtccgacaggcccctggcaaaggactggaatgggtcggaatgatcgaccccagcgacagcgagacacactacaaccacatcttcaaggaccgcttcaccatcagcgccgacaccagcaagaataccgcctacctccagatgaactccctgagagccgaggacaccgccgtgtactactgcgccagaaacctgtatctgttcggccagggaaccctggtcacagtgtcatctacgcgtcagagttttgggttgttggaccctaaattgtgctatctgttggacggaatcctgttcatttacggagtgatcctgaccgcattgttcctgcgggttaagttttccagatccgcagacgcacccgcttaccaacaagggcagaaccaactctacaatgaacttaatttggggcggagggaagagtacgacgttctggacaaaaggaggggacgagatcccgagatgggcggaaagcctcagcgaaggaagaatccgcaagaggggctttataacgaactccagaaagataaaatggcagaagcctatagtgagattgggatgaagggagaaaggaggaggggtaaaggtcacgatgggttgtaccaaggattgagcacagccactaaagatacctatgatgcgctccacatgcaggccctgccgccaaga

SEQ ID NO: 36704 - DNA, 1935 bp, synthetic construct
  source 1..1935: mol_type = other DNA
atggccttaccagtgaccgccttgctcctgccgctggccttgctgctccacgccgccaggccggacatccagatgacacagagccctagcagcctgtctgccagcgtgggagacagagtgaccatcacatgcaagagcagccagagcctgctggactccgatggcaagacctacctgaactggtatcagcagaagcccggcaaggcccctaagctgctgatctacctggtgtccaagctggatagcggcgtgcccagcagattttctggcagcggcagcggaaccgacttcaccctgacaatatccagcctccagcctgaggacttcgccacctactactgctggcaaggcacccactttccattcaccttcggccagggcaccaaggtggaaatcaaaagactcgagggacagcctaaggccaatcctaccgtgacactgttccctccaagcagcgaagaactccaggccaacaaggccacacttgtgtgcctgatctccgacttctaccctggggctgtgacagtggcttggaaggccgatggatctcctgtgaaagccggcgtggaaaccaccaagccatccaagcagagcaacaacaaatacgccgccagctcctacctgagcctgacacctgagcagtggaagtcccacagatcctacagctgccaagtgacccacgaaggcagcaccgtggaaaagacagtggcccctacagagtgcagccccatcaagaccgatgtgattacaatggaccccaaggacaactgctccaaggacgccaacgataccctgctgctccagctgaccaacaccagcgcctactacatgtacttgttgctgctgctgaagtccgtggtgtacttcgccatcatcacatgctgcctgctgcggagaaccgccttctgctgcaacggcgagaagtctagggccaagcgatctggatctggagcaacaaacttctcactactcaaacaagcaggtgacgtggaggagaatcccgggcctactagtatggactggatttggcgcatccttttccttgtcggcgctgctaccggcgcgcattccttcgaagaagtgcagctggttgaatcaggcggaggactggttcagcctggcggatctctgagactgtcttgtgccgccagcggctacaccttcaccagctactggatgaactgggtccgacaggcccctggcaaaggactggaatgggtcggaatgatcgaccccagcgacagcgagacacactacaaccacatcttcaaggaccgcttcaccatcagcgccgacaccagcaagaataccgcctacctccagatgaactccctgagagccgaggacaccgccgtgtactactgcgccagaaacctgtatctgttcggccagggaaccctggtcacagtgtcatctacgcgtgcctctacaaagggaccctccgtgtttcctctggctcccagcagcaagtctacaagcggaggaacagccgctctgggctgcctggtcaaggattactttcccgagcctgtgaccgtgtcctggaatagcggagcactgacaagcggcgtgcacacctttccagccgtgctgcaaagcagcggcctgtactctctgagcagcgtggtcacagtgcctagctctagcctgggcacccagacctacatctgcaatgtgaaccacaagcctagcaacaccaaggtggacaagagagtggaacccaagagctgtgaagtgaaaaccgactccaccgaccacgtgaagcccaaagagacagagaacaccaagcagcccagcaagagctgccacaagcccaaggccatcgtgcacaccgagaaagtgaacatgatgagcctgaccgtgctgggcctgcggatgctgttcgccaaaaccgtggccgtgaacttcctgctgaccgccaagctgttcttcctc

SEQ ID NO: 36705 - DNA, 1869 bp, synthetic construct
  source 1..1869: mol_type = other DNA
atggccttaccagtgaccgccttgctcctgccgctggccttgctgctccacgccgccaggccggacatccagatgacacagagccctagcagcctgtctgccagcgtgggagacagagtgaccatcacatgcaagagcagccagagcctgctggactccgatggcaagacctacctgaactggtatcagcagaagcccggcaaggcccctaagctgctgatctacctggtgtccaagctggatagcggcgtgcccagcagattttctggcagcggcagcggaaccgacttcaccctgacaatatccagcctccagcctgaggacttcgccacctactactgctggcaaggcacccactttccattcaccttcggccagggcaccaaggtggaaatcaaaagactcgagggacagcctaaggccaatcctaccgtgacactgttccctccaagcagcgaagaactccaggccaacaaggccacacttgtgtgcctgatctccgacttctaccctggggctgtgacagtggcttggaaggccgatggatctcctgtgaaagccggcgtggaaaccaccaagccatccaagcagagcaacaacaaatacgccgccagctcctacctgagcctgacacctgagcagtggaagtcccacagatcctacagctgccaagtgacccacgaaggcagcaccgtggaaaagacagtggcccctacagagtgcagcggcagagccgattgcggcatcaccagcgccagctaccaccagggcgtgctgagcgccaccatcctgtacgagatcctgctgggcaaggccaccctgtacgccgtgctggtgtctgccctggtgctgatggctatggtcaagcggaaggacagccggggaagggccaagcgatctggatctggagcaacaaacttctcactactcaaacaagcaggtgacgtggaggagaatcccgggcctactagtatggactggatttggcgcatccttttccttgtcggcgctgctaccggcgcgcattccttcgaagaagtgcagctggttgaatcaggcggaggactggttcagcctggcggatctctgagactgtcttgtgccgccagcggctacaccttcaccagctactggatgaactgggtccgacaggcccctggcaaaggactggaatgggtcggaatgatcgaccccagcgacagcgagacacactacaaccacatcttcaaggaccgcttcaccatcagcgccgacaccagcaagaataccgcctacctccagatgaactccctgagagccgaggacaccgccgtgtactactgcgccagaaacctgtatctgttcggccagggaaccctggtcacagtgtcatctacgcgtgcctctacaaagggaccctccgtgtttcctctggctcccagcagcaagtctacaagcggaggaacagccgctctgggctgcctggtcaaggattactttcccgagcctgtgaccgtgtcctggaatagcggagcactgacaagcggcgtgcacacctttccagccgtgctgcaaagcagcggcctgtactctctgagcagcgtggtcacagtgcctagctctagcctgggcacccagacctacatctgcaatgtgaaccacaagcctagcaacaccaaggtggacaagagagtggaacccaagagctgtatccccgaggacacattcttcccaagcagcgacgtgccctgcgacgtgaagctggtggaaaagagcttcgagacagacaccaacctgaacttccagaacctgagcgtgatcggcttcagaatcctgctgctgaaagtggccggctttaacctgctgatgaccctgcggctgtggtccagc

SEQ ID NO: 36706 - DNA, 1869 bp, synthetic construct
  source 1..1869: mol_type = other DNA
atggccttaccagtgaccgccttgctcctgccgctggccttgctgctccacgccgccaggccggacatccagatgacacagagccctagcagcctgtctgccagcgtgggagacagagtgaccatcacatgcaagagcagccagagcctgctggactccgatggcaagacctacctgaactggtatcagcagaagcccggcaaggcccctaagctgctgatctacctggtgtccaagctggatagcggcgtgcccagcagattttctggcagcggcagcggaaccgacttcaccctgacaatatccagcctccagcctgaggacttcgccacctactactgctggcaaggcacccactttccattcaccttcggccagggcaccaaggtggaaatcaaaagactcgagggacagcctaaggccaatcctaccgtgacactgttccctccaagcagcgaagaactccaggccaacaaggccacacttgtgtgcctgatctccgacttctaccctggggctgtgacagtggcttggaaggccgatggatctcctgtgaaagccggcgtggaaaccaccaagccatccaagcagagcaacaacaaatacgccgccagctcctacctgagcctgacacctgagcagtggaagtcccacagatcctacagctgccaagtgacccacgaaggcagcaccgtggaaaagacagtggcccctacagagtgcagcggcagagccgattgcggctttaccagcgagagctaccagcagggcgtgctgagcgccaccatcctgtacgagatcctgctgggcaaggccaccctgtacgccgtgctggtgtctgccctggtgctgatggctatggtcaagcggaaggacagccggggaagggccaagcgatctggatctggagcaacaaacttctcactactcaaacaagcaggtgacgtggaggagaatcccgggcctactagtatggactggatttggcgcatccttttccttgtcggcgctgctaccggcgcgcattccttcgaagaagtgcagctggttgaatcaggcggaggactggttcagcctggcggatctctgagactgtcttgtgccgccagcggctacaccttcaccagctactggatgaactgggtccgacaggcccctggcaaaggactggaatgggtcggaatgatcgaccccagcgacagcgagacacactacaaccacatcttcaaggaccgcttcaccatcagcgccgacaccagcaagaataccgcctacctccagatgaactccctgagagccgaggacaccgccgtgtactactgcgccagaaacctgtatctgttcggccagggaaccctggtcacagtgtcatctacgcgtgcctctacaaagggaccctccgtgtttcctctggctcccagcagcaagtctacaagcggaggaacagccgctctgggctgcctggtcaaggattactttcccgagcctgtgaccgtgtcctggaatagcggagcactgacaagcggcgtgcacacctttccagccgtgctgcaaagcagcggcctgtactctctgagcagcgtggtcacagtgcctagctctagcctgggcacccagacctacatctgcaatgtgaaccacaagcctagcaacaccaaggtggacaagagagtggaacccaagagctgtatccccgaggacacattcttcccaagccccgagagcagctgcgacgtgaagctggtggaaaagagcttcgagacagacaccaacctgaacttccagaacctgagcgtgatcggcttcagaatcctgctgctgaaagtggccggctttaacctgctgatgaccctgcggctgtggtccagc
